United States Patent Application Publication US 2010/0251416 A1 - sequence listing, part 2

SEQ ID NO: 2687 - DNA, 3306 bp, Xanthomonas campestris pv. campestris str. ATCC 33913
  CDS (1)..(3306): transl_table=11
gtgcgtcggcgccatccgcgccggcatcgattgacgtcttcagcaaggacaccccccgtgggcttttcgaccatcttcatccgccgtccgatcgccacctcgctgttgatggcgggcatcctgctgctgggcatcctgggctaccggcaactgccggtctcggcactgccggaaatcgacgcgcccagtctggtcgtctccacccagtatcccggcgccaacgcgaccaccatggcctcgctggtgactacgccgttggaacgccagctcgggcaaatctccgggctacagatgatgacctccgattcgtcggcaggcctgtccacgatcattctgcaattctcgatggaccgcgacatcgacattgccgcgcaggacgtgcaggcggcgatccgccaggccaccctgccctcgtcgttgccctaccagccggtctacaaccgggtgaatcccgcagacgcggcgatcctcacgctcaagctcacctccgacacgctgccgctgcgcgaggtcaaccgctacgccgatgcgatcctggcccagcgcctgtcgcaggtgccgggcgtgggcctggtgtcgatcgccggcaacgtgcggcctgcggtgcgcatccaggtcaatccggcgcagttgtcgaacatgggcctgaccatggagtcgctgcgcagcgcactgacccagaccaatgtcagcgcgccgaagggctcgctcaacggcaagacccagtcctacagcatcggcaccaacgaccagctcaccgacgcggcgcagtaccgcgaaaccatcatcagctacaacaacggcgcgccggtgcggctggccgatgtggccaaggtggtcgatggcgtagagaacgaccaacttgccgcctgggccgacggcaagccggcggtgctgctggaaatccgccgccagcccggtgccaacatcgtgcagacggtggagcagatccgcagcatcctgccgcagctgcagggcgtgctgccggccgacgtgcacctggacgtgttctccgaccgcaccgaaaccatccgcgcctcggtgcatgaagtgaagttcaccctggtgctgaccatcttcctggtggtggcggtgatcttcgtgttcctgcgccggctgtgggccaccatcattccctcggtggcggtgccgctgtcgctggccggcaccttcggggtgatggcgtttgcgggcatgtcgctggacaacctgtcgctgatggcgctggtggtggcgaccggattcgtggtcgacgatgcgatcgtgatgatcgaaaacatcgtgcgctacatcgaacagggcaagagcgggccggaggcagcagagatcggtgcgcgccagatcggcttcaccgtgttgtcgctgaccgtctcgctggtggcggtgttcctgccgctgctgctgatgcccggggtcaccgggcggctgttccacgagtttgcgtgggtgctgtcgatcgcggtggtgatctcgatgctggtgtcgctgacgctgacgccgatgatgtgcgcctacctgctcaagcccgacgcgttgcccgaaggcgaagacgcgcacgagcgcgcggccgctgaaggcaagaccaacctatggacgcgcaccgtgggtgtgtacgagcgctcgctggactgggtgctcgaccaccagccgctgaccctggccgtggcgattggcgcggtggccttgaccgtggtgctgtacgtggccatccccaagggcctgctgcccgaacaggacaccggcctgatcaccggcgtggtgcaggtcgatcagaacgtggccttcccgcagatggagcagcgcacccaggcggttgccgccgcgctgcgcaaggacccggcggtgaccggcgtggccgcctttatcggcgcaggttcgatgaaccccacgctcaaccagggccagctgtcgatcgtgctgaagacgcgcggcgaccgcgacgatctggaaaccgtggtggcgcgcctgcaaaaagcggtgtccggtattcccggcgtggcgctgttcctcaagccggtgcaggacgtcaccctggacacgcgcgtggccgccaccgaataccagtattcgatggcggacgtggacagcaccgagctggcatcctgggccacgcgcatgaccgaggcgatgcgcaagctgccagagctggccgacgtggacaacaacctggccaaccagggccgcgcgctggagctcagcatcgaccgcgacaaggccagcatgctgggcgtgccgatgcagaccatcgacgacacgctctacgacgccttcggccagcgccagatctccaccatcttcaccgagctcaatcagtaccgcgtggtgctggaagtggcgccggaattccgcagcagcactgcgttgatgaaccagctggccgtggccagcaacggcagcggcgcgctgaccggcaccaatgccaccagcttcggccaggtgacctcgtccaactcgtccaccgccaccggcgtgggcaaccagaacaccggcatcgtggtcggcgccggcagcatcattccgctggccgcgctggccgaggccaaggtcaccaacacgccgttggtggtcagccatcagcagcagctgccggcggtgaccatctccttcaacctggcgcccgggcattcgctctcgcaggccgtggcggcgatcgaacaggcgcgcgcagacctcaagattcccacccaggtgcatgccgaattcgtcggcaaggccgccgaattcaccggcagccagaccgacatcgtgtggttgctgctggcctccatcgtggtgatctacatcgtgctgggcgtgctctacgagagctacatccacccgctgacgatcatctccacgctgccgccggccggtgtcggtgcgttgctggcgttgatggtgtgcgggctgagcctgtcggtggacggcatcgtcggcatcgtgctgctgatcggcatcgtcaagaaaaacgcgatcatgatgatcgacttcgcgatcgaagcccgccgtaccggcgtcaacgcgcacgaagcgattcggcgcgcctgcctgctgcggttccgcccaatcatgatgaccaccgccgccgcgatgctgggcgcgctgccgctggcgctgggcaccggcatcggttcggaattgcgccgcccgctgggcatcgccatcgttggcggcctgctgctctcgcagctggtcacgctgtacaccaccccggtgatctatctgtacatggaacgcgccggcgagcgcgtgcgcgattggcgtgcacggcgtgccgcacgccgcgatggcgtgcctccggcatccacgacggagcgcccggcatga

SEQ ID NO: 2688 - protein, 1101 aa, Xanthomonas campestris pv. campestris str. ATCC 33913
MRRRHPRRHRLTSSARTPPVGFSTIFIRRPIATSLLMAGILLLGILGYRQLPVSALPEIDAPSLVVSTQYPGANATTMASLVTTPLERQLGQISGLQMMTSDSSAGLSTIILQFSMDRDIDIAAQDVQAAIRQATLPSSLPYQPVYNRVNPADAAILTLKLTSDTLPLREVNRYADAILAQRLSQVPGVGLVSIAGNVRPAVRIQVNPAQLSNMGLTMESLRSALTQTNVSAPKGSLNGKTQSYSIGTNDQLTDAAQYRETIISYNNGAPVRLADVAKVVDGVENDQLAAWADGKPAVLLEIRRQPGANIVQTVEQIRSILPQLQGVLPADVHLDVFSDRTETIRASVHEVKFTLVLTIFLVVAVIFVFLRRLWATIIPSVAVPLSLAGTFGVMAFAGMSLDNLSLMALVVATGFVVDDAIVMIENIVRYIEQGKSGPEAAEIGARQIGFTVLSLTVSLVAVFLPLLLMPGVTGRLFHEFAWVLSIAVVISMLVSLTLTPMMCAYLLKPDALPEGEDAHERAAAEGKTNLWTRTVGVYERSLDWVLDHQPLTLAVAIGAVALTVVLYVAIPKGLLPEQDTGLITGVVQVDQNVAFPQMEQRTQAVAAALRKDPAVTGVAAFIGAGSMNPTLNQGQLSIVLKTRGDRDDLETVVARLQKAVSGIPGVALFLKPVQDVTLDTRVAATEYQYSMADVDSTELASWATRMTEAMRKLPELADVDNNLANQGRALELSIDRDKASMLGVPMQTIDDTLYDAFGQRQISTIFTELNQYRVVLEVAPEFRSSTALMNQLAVASNGSGALTGTNATSFGQVTSSNSSTATGVGNQNTGIVVGAGSIIPLAALAEAKVTNTPLVVSHQQQLPAVTISFNLAPGHSLSQAVAAIEQARADLKIPTQVHAEFVGKAAEFTGSQTDIVWLLLASIVVIYIVLGVLYESYIHPLTIISTLPPAGVGALLALMVCGLSLSVDGIVGIVLLIGIVKKNAIMMIDFAIEARRTGVNAHEAIRRACLLRFRPIMMTTAAAMLGALPLALGTGIGSELRRPLGIAIVGGLLLSQLVTLYTTPVIYLYMERAGERVRDWRARRAARRDGVPPASTTERPA

SEQ ID NO: 2689 - DNA, 3291 bp, Xanthomonas axonopodis pv. citri str. 306
  CDS (1)..(3291): transl_table=11
atgcgccggcttcgcctgacgtcttcagcaaggacaccccccgtgggcttttcgaccatcttcatccgccgcccgatcgccacttcgttgttgatggccggcgtcctgctgctgggcatcctgggctaccgtcaattgccggtctcggcattgccggaaatcgacgcgcccagcctggtcgtcaccacccagtaccccggcgccaatgcgaccaccatggcctcgctggtgaccacgccgctggagcgccagttcgggcagatttccggcctgcagatgatgacctccgattcgtcggcgggcctgtccacgatcattctgcagttctcgatggagcgcgatatcgatatcgcctcgcaggacgtgcaggcggccatccgccaggccaccctgccctcttcgctgccgtaccaaccggtctataaccgggtcaatccggccgatgcggcgattctcacgctcaagctcacctccgattcgctgccgctgcgcgaggtcaaccgctatgcggatgcgatcctggcccagcgcctatcgcaggtgccgggtgtgggcctggtgtcgatcgccggcaacgtgcgccctgcggtgcgcatccaggtcaacccggcgcagctgtcgaacatgggcctgaccatggagtcgctgcgcagcgcgctgacccagaccaacgtcagtgcgcccaagggctcgctcaacggcaagacccagtcctacagtatcggcaccaacgaccagctcaccgacgcggcgcagtaccgcgagaccatcatcagctacaaggacggccgcccggtgcggcttgccgacgtggccaacgtggtcgatggggtggagaacgatcagcttgccgcctgggccgacggcaaacaggcggtgctgctggagatccgccgccagcccggcgccaacatcgtgcagacggtggagcagatccgcaacatcctgccgcagctgcgatcggtgttgccggccgatgtgcatctggaggtgttctccgaccgcaccgaaaccatccgcgcctcggtacatgaggtgaagttcaccctggtgctgaccatcgcgctggtggtggcggtgatcttcgtgttcctgcgccggctgtgggccaccatcattccctcggtggcggtgccgttgtcgctggccggcaccttcggggtgatggccttcgccggcatgtcgctggacaacctctccttgatggcgctggtggtggcgaccgggttcgtggtcgacgatgcgatcgtgatgatcgagaacatcgtgcgctacatcgaacagggcaagagcgggccggaagcggccgaaatcggcgccaagcagatcggcttcaccgtgttgtcgctgaccgtgtcgctggtggcggtgttcctgccgctgctgttgatgccgggcgtcaccggtcggttattccacgagtttgcgtgggtgctgtcgattgcggtggtcatctcgatgctggtgtcgctgacgttgacgccgatgatgtgcgcctacctgctcaagcccgatgccttgcccgaaggcgaagacgcgcacgagcgcgcgagcgcggccggcaagaccaacctgtggacgcgcaccgtgggcgcctatgagcgcagcctggactgggtgcttgcccaccaaccgctgaccctggccgtggcgatcggtgcggtggcgttgacggtggtgctgtatgtggccattcccaagggcttgctgcccgagcaggacaccggcctgatcaccggcgtggtgcaggccgaccagaacgtggcgttcccgcagatggagcaacgcacccaggcggtggccgccgcgttgcgcaaggacccggcggtgaccggcgtggcagccttcatcggcgccggcaccatgaaccccacgctcaaccagggccagctgtcgatcgtgctgaagacgcgcggcgaccgcgagggcctggacgaggtgctgccgcgcctgcagaacgcagtggccggcattccgggcgtggccttgttcctcaagccggtgcaggacgtcaccctggacacgcgggtggccgcgaccgaataccagtattcgatctcggacgtggacagcagcgagctggccacctgggccgggcgcatgaccgaggcaatgcgcaagttgcccgagcttgcggacgtggacaacaacctggccaaccaggggcgtgcgcttgaactgagcatcgaccgcgacaaggccagcatgctcggcgtgccgatgcagaccatcgacgacacgctgtacgactccttcggccagcgccagatctccaccatcttcaccgagctcaatcagtaccgcgtcgtgctggaagttgcgccggaattccgcaccagtaccgccttgatgaaccagctggcggtggccagcaacggcagcggcgcgctcaccggcaccaacgccaccagcttcggccaggtcacctcgtccaactcgtccactgccaccggcgtaggcgcgcagaacaccggcatcgtggtcggtgccggcagcatcattccgctggccgcgctggccgaggccaaggtcaccaacacaccgttggtggtgagccaccagcagcagctgccggccgtcaccatctcgttcaacctggcgccggggcattcgttgtcgcaggcggtggcggcgatcgagaaggcgcgcgaagaactcaagatcccgacccaggtgcatgcgcagttcgtcggcaaggccgccgaattcaccggcagccagaccgacatcgtgtggctgctgctggcctcgatcgtggtgatctacatcgtgctgggcgtgttgtacgaaagctacatccacccgttgaccatcatctccacgttgccgccggccggtgtcggtgcgttgctggcgctgatgatgtgcgggctgagcctgtcggtggacggcatcgtcggcatcgtgctgctgatcggcatcgtcaagaagaacgccatcatgatgatcgacttcgccatcgacgcacgccgcgagggggcgactgcgcacgatgcgatccggcgcgcctgcctgctgcgcttccgcccgatcatgatgaccaccgctgccgccatgctgggcgcgttgccgctggcgctgggcaccggcatcggctcggaactgcgccgcccgctgggcattgcgatcgtcggcggcctgctgctgtcgcagctggtcacgctgtacaccaccccggtgatttatctgtacatggaacgcgccggcgagcgcctgcgcgcatggcgtgcgcggcgggcggcacgccgtgacggcctcaacccggcgccgacctcggagcgcccggcatga

SEQ ID NO: 2690 - protein, 1096 aa, Xanthomonas axonopodis pv. citri str. 306
MRRLRLTSSARTPPVGFSTIFIRRPIATSLLMAGVLLLGILGYRQLPVSALPEIDAPSLVVTTQYPGANATTMASLVTTPLERQFGQISGLQMMTSDSSAGLSTIILQFSMERDIDIASQDVQAAIRQATLPSSLPYQPVYNRVNPADAAILTLKLTSDSLPLREVNRYADAILAQRLSQVPGVGLVSIAGNVRPAVRIQVNPAQLSNMGLTMESLRSALTQTNVSAPKGSLNGKTQSYSIGTNDQLTDAAQYRETIISYKDGRPVRLADVANVVDGVENDQLAAWADGKQAVLLEIRRQPGANIVQTVEQIRNILPQLRSVLPADVHLEVFSDRTETIRASVHEVKFTLVLTIALVVAVIFVFLRRLWATIIPSVAVPLSLAGTFGVMAFAGMSLDNLSLMALVVATGFVVDDAIVMIENIVRYIEQGKSGPEAAEIGAKQIGFTVLSLTVSLVAVFLPLLLMPGVTGRLFHEFAWVLSIAVVISMLVSLTLTPMMCAYLLKPDALPEGEDAHERASAAGKTNLWTRTVGAYERSLDWVLAHQPLTLAVAIGAVALTVVLYVAIPKGLLPEQDTGLITGVVQADQNVAFPQMEQRTQAVAAALRKDPAVTGVAAFIGAGTMNPTLNQGQLSIVLKTRGDREGLDEVLPRLQNAVAGIPGVALFLKPVQDVTLDTRVAATEYQYSISDVDSSELATWAGRMTEAMRKLPELADVDNNLANQGRALELSIDRDKASMLGVPMQTIDDTLYDSFGQRQISTIFTELNQYRVVLEVAPEFRTSTALMNQLAVASNGSGALTGTNATSFGQVTSSNSSTATGVGAQNTGIVVGAGSIIPLAALAEAKVTNTPLVVSHQQQLPAVTISFNLAPGHSLSQAVAAIEKAREELKIPTQVHAQFVGKAAEFTGSQTDIVWLLLASIVVIYIVLGVLYESYIHPLTIISTLPPAGVGALLALMMCGLSLSVDGIVGIVLLIGIVKKNAIMMIDFAIDARREGATAHDAIRRACLLRFRPIMMTTAAAMLGALPLALGTGIGSELRRPLGIAIVGGLLLSQLVTLYTTPVIYLYMERAGERLRAWRARRAARRDGLNPAPTSERPA

SEQ ID NO: 2691 - DNA, 3135 bp, Thermosynechococcus elongatus BP-1
  CDS (1)..(3135): transl_table=11
atgattagcaatttttttattaaacgccctgtttttgcaacggtttgttctctacttattattctagtgggggcgatcgcgctgccaaccctacccattgagtactaccctaacgtcagaccaccaacaattcaggtgtctgccaactatgcaggtgcgaatgccgaaacggtcgaaacgaatgtcaccacgatcctagaaacgcaaattaatggcgtggaagggatggattacattgactccaccagtaacagctttggcaacagcaatatcacgattaccttcacggagggctatgacgaaaacattgctgcggtggatgtgaataacttagttgcctctgttacctcacaactgccaccagaggtcattaacactggggtcaatgttagcaaatccacgaatcagattgttttggccttagccctgtacccagaggaggggtacgactacgacgccaccttcatcagcaactacgcgacactttatgtggtgcaacctctgcaacgtctgaagggtgtagggaaggttcagatctttggtcaacgcacctatgccatgcggatttggcttgatcccaatcgcttagccagtcgcggtctcacggctcaggatgtggtgggcgctctctccgatcagaacgtccaagtgggggccggaattattggtgcccccccagcaccagagggacaggagtttcaaatttccattcaagcccaaagtcgcttagcttcagaagaagagtttgccgacattattattcagcgcggtgaagatggttccgtggttcgtattcgcgatgtcggtcgcaccgagctaggagcacaaaactacaacaccaactttcagtttgatggccgtaacgcagttgggattggtatctatcaactcagtagtgccaatgccctcgacattgcccgtgctgtggaagcagagatggctattttagccgagaaatttccccccggcctcaaatggagtgtgggatttagcaccaccgatgcggtgcaggagtcgatcaaagaggtagtcattaccctgattgtggccatcatccttgtgattgcggtgatctttttatttcttcaagattggcgtgccacaattattccatcggtgacaatccccgtctcgttgatcggcacttttgcctttatgaaggcttttgggttctcgattaacagtttgaccatgtttggtctggtgctggcgacggggctggtggtggatgatgcgattgtggtcgtggaaaatgtcacccgtctcatagaagaggagggcatgactccccaagaagcagccagtcgctcaatggaggaagtaacgggagcgttgattgccacctcattggtgatgatggcggtcttcatccctgtggccttttttccgggggttactgggcggctgtatcagcagtttgctttgacgattgtctttgcgatcgccctttctacttttaatgccttaaccctttctccccctttgtgcgccctgctcctacggcgggaacgccccccgatggcgaactttatcttgtttcgctggatcaaccgcttgattgaaagaacgcggcggggctacgcaggaagcctaaatgtgattgtgcgattaaaatactgggtactggcgggctttgtcgccctgctgggggtgacctactggctgtttcagatcgttcccggtggctttgtccccgaagaggatcagggttattttgtcaccctcgtacaatccccccaaggggtctccctagaatacacgagtaatattgtcttcaaaatagcggacgcgatcgcccgaaatccagcggttgaacatacctttgccattggcggctttagcttcttcggcataggttcagataaaggaattatctttacgagcctcaagccttggtcacagcggccagcccttgatcagttgctaccccagtttcagaaggtggtagcgggtgaactcggagcagtggtgttttcgtccaatgtgccgaccattgaccttggtggcagtggccttggcggctttgatatgcaggtgatggatcagcagggtctaggtcttgaaacccttgccagttcggtgaacgagctgatcctgaaagcaaatagcacgcccggttttgttgctgttaataccccctttgccattaatgccccccagttaaatgtgacggtcgatcgcacccgcgcccttgccttggggatttccctcaaggacatttttaatgctatgcagatttacttggggtcgttatacgttaaccaattcacaatctttgcccgcagttaccaagtgattgtgcaggcggataagcagtttcgctcgaatcccgatgacatcaaccgcatctatgtgcgttcagagcaaaatgccctcattcccctcagtaatctcgtaaaaattgaagaggtctcggcaccgcccattatttatcaccataacttgttccgttcagcagaggtgaccggccaaaatgtgccgcccctcagtgatcgtcaagcaatgatgacaatggcatccttggctgaggaggttctccccaatggcatcggctacagctggacggggttatccctagagtcgctccggtccgcaggccaagcaccgttgatttttggccttggtcttgtgtttgtgttccttgtgctctcagcgcagtacgaaagctatattgaccccttgatcatcatcctttcggtgcctttggcaatcatgggcgctttgctggcacagtggttgcgggggctgaataatgatgtattttgccaaattggcttggtgatgctgattggcctcgccagtaagaatgcaatcttgattgtggagtttgccaaccaaattcgtgaaagcaagggcactgccattgtcaagtcggtgattaatgctgccgaagaacgactgcgccctattttgatgacggcaatctcctttattttgggtatcttcccgctggtaattgccacggggtctggcgcaaaatcccgtcactccttgggaaccagtgtcacgggtggcatgattgcggccacattcctcagtttctttgtggtgccgatcatttacatcctcattaaggaagtggtggcacggctgaccaaggagaagcccgaggacgcaacaccaacggcgtcttaa

SEQ ID NO: 2692 - protein, 1044 aa, Thermosynechococcus elongatus BP-1
MISNFFIKRPVFATVCSLLIILVGAIALPTLPIEYYPNVRPPTIQVSANYAGANAETVETNVTTILETQINGVEGMDYIDSTSNSFGNSNITITFTEGYDENIAAVDVNNLVASVTSQLPPEVINTGVNVSKSTNQIVLALALYPEEGYDYDATFISNYATLYVVQPLQRLKGVGKVQIFGQRTYAMRIWLDPNRLASRGLTAQDVVGALSDQNVQVGAGIIGAPPAPEGQEFQISIQAQSRLASEEEFADIIIQRGEDGSVVRIRDVGRTELGAQNYNTNFQFDGRNAVGIGIYQLSSANALDIARAVEAEMAILAEKFPPGLKWSVGFSTTDAVQESIKEVVITLIVAIILVIAVIFLFLQDWRATIIPSVTIPVSLIGTFAFMKAFGFSINSLTMFGLVLATGLVVDDAIVVVENVTRLIEEEGMTPQEAASRSMEEVTGALIATSLVMMAVFIPVAFFPGVTGRLYQQFALTIVFAIALSTFNALTLSPPLCALLLRRERPPMANFILFRWINRLIERTRRGYAGSLNVIVRLKYWVLAGFVALLGVTYWLFQIVPGGFVPEEDQGYFVTLVQSPQGVSLEYTSNIVFKIADAIARNPAVEHTFAIGGFSFFGIGSDKGIIFTSLKPWSQRPALDQLLPQFQKVVAGELGAVVFSSNVPTIDLGGSGLGGFDMQVMDQQGLGLETLASSVNELILKANSTPGFVAVNTPFAINAPQLNVTVDRTRALALGISLKDIFNAMQIYLGSLYVNQFTIFARSYQVIVQADKQFRSNPDDINRIYVRSEQNALIPLSNLVKIEEVSAPPIIYHHNLFRSAEVTGQNVPPLSDRQAMMTMASLAEEVLPNGIGYSWTGLSLESLRSAGQAPLIFGLGLVFVFLVLSAQYESYIDPLIIILSVPLAIMGALLAQWLRGLNNDVFCQIGLVMLIGLASKNAILIVEFANQIRESKGTAIVKSVINAAEERLRPILMTAISFILGIFPLVIATGSGAKSRHSLGTSVTGGMIAATFLSFFVVPIIYILIKEVVARLTKEKPEDATPTAS

SEQ ID NO: 2693 - DNA, 3132 bp, Brucella suis 1330
  CDS (1)..(3132): transl_table=11
gtgagtaacaagaacccttcttccggcggttcgacggcgcttttcatccgccgccccgtctttgccttcgtcatcaatatcctgatcgttgtggcgggccttgcagcctttaccggcgtcgatatccgtgaattgccggatgtggatcggccggtcatcacgatcagcacggattttagcggcgcatctgccgaaaccatcgaccgtcaggtcacacaggttctggaaaatgcggtcgcgcgtgtttccggcgtgaaatcgatttcctccacctcctccttcgagcgcagccgcgtgacggtggagttcaacgatggcgtcgatctcaacgtcgccgccgccgatatgcgcgatgcgatttcccgcgtcgccaacaatctgccggaagaagccgatccctcgcgcatcatcaaggcggattccaacgccgatccggtgatgcgccttgccgttacctccgacaccatggcggtcgatgacatgacggtgctggtggaagatcagatcgaggacgtgctttccgccgtgcccggcgtcgccgacgtgcagatcaacggtgaccgcgacaagattttccgcatcgatatcgatcaggcccggcttgcaagctacggtctcaccattgctgatatttccaacgcgctttcgtcgatggggctggatgcgcccgcaggttcgcttcgcagttccgaccagtccatcgtggtgcgcgccaccgccaatctggaaaagccggaagatttcgagaatgtctatatcaaggggcgcacgcagatccgcgatgttgcgacagtcacccttgggccggatatcgaaagctcggcggtgcgctccaacagcaagaccgccatcggcctcggcatcgtgcgtcaggcgcagtcgaacacgctcgatatttcgcaaggcgtgcgcgcagccgttgccaatttgcagaaaaccctgccggaaggggtcagcattgccgttaccagtgacgatgcgaacttcatcaacggcgccatccatgaagtcgaaatcgcgctgatcgcgtcggtgattatcgtcgttgccatcatcttcatgtttctgtgggatgcgcgcgcgacactgatccccgcgctctccatgccggtcgccctgatcggcaccattgcggcgatctatctggtgggcttctcggtcaatatcctcacgcttctggcgctggtacttgccacgggcctcgtggtggatgatgccatcgtggttctggaaaacgtggtgcgccgccgcaatcagggcatggggccgcgcgccgcagccgtgctcggtacgcaggaagtgttcttcgccgtcatcgccaccacgcttacgcttgctgccgttttcgtgccgatttccttcctgccggggcaggcgggcggcctgttccgcgaattcggcttcgtgctggcaattgcggttcttctttcctccgtggtcgcgctcacactttgccccatgctcgcctcgcgcttcctgaaggaagcaagcgccacggtggaaagcgaagggcatggcccgctcttcctgcgccgcattggcggcggcttggcgaatttctatcgcaagacgcttcatgcctgcctttcggcgccctttatcgtcgtgctggtggcagtgcttttcgccggtgcgtcctatgtcggctatggcctgatccgccaggaactcacgccttcggaagaccgcgcggtggcgcttctgcgcatcaacgggccgcagggcatcagtgtcgaattccttcagtcccagctcgacaagatcgaggaagcgatccagcccctgcgcgatagcggtgaaatcaccaccacctacgcgattgccggttcaggtggctcgtccaataatggttttgtggtgctgacgcttgccccctggaaggagcgccagcgttcccagcaggaaatcatggccgacatcaccaaccggatcaaaggcattacggcggtgcgcgtctttaccacgcagcccaacagccttggtattcgcggcgcgggcaatggtctgcaattcgctattgtcggtggtgaatatgccaaactccagcctgccgcgcaggcggtggtggcggcgctggagaaagacccgcgcttcgtgcagccccgcctgtcggtggagccgacacaggcgcagatttcggtggagatcaaccgcgagcgtgcttccgatctgggcatcgatatcaccggccttgccaatgccgtgcaggcggttctcgatggccgcaagatcggttcggtctatgtgggcgaccgcagcttcgatgtgaagctcgtctcgaccaccaacccgatcaacgatccgaccgatcttgaaaatattttcatgaaaacagcggatggccgctatgtgccgatgtcatccattgcaagcgttgtcgaaaaggctgttccgccacagcttaatcgggagttgcgccagcgttccgtggcgatcaccaccaatctgcgtgacgattttgcgctcggtaacgcctttgcggcggcgcaggagattgccgccccgcttctgccgcccggcagccacatcatcccgcttgccgaagcgtccacgctcagcgaaacgtcgagcggcatggccatcgtgttcggctttgctatcgttatcattttgctggtgctggcagcacagtttgaaagcttcatcagcgcgttgatcgtcatggccacggtacctttgggcctgggctgtgcagtcttcgccatgatcctcaccggcacgagcctcaacgtctatagccagatcggccttgtgctgcttgtcggcatcatggccaagaacggcattctcatcgtggaattcgccgaccagttgcgcgacaagggcctgaatgttcgcgaggcaatcgaggaggcggcgaatatccgcctgcgtcccgtctgcatgacgatgatctgcgcggtcctgggcggcgtgccgctggtgctggcaagcggcgcgggcgcagaagcccgcgtggcgcttggctgggtcatcgttggcggattgggtcttgcgaccatcgccacgctttatgtgacgcctgttgcctatctcctgcttggccgtttcaccaagccaaaggttgaggaagaggaacggctggaacgcgagcttgtccgcgccgaggctctggaagaaaaactcaaatag

SEQ ID NO: 2694 - protein, 1043 aa, Brucella suis 1330
MSNKNPSSGGSTALFIRRPVFAFVINILIVVAGLAAFTGVDIRELPDVDRPVITISTDFSGASAETIDRQVTQVLENAVARVSGVKSISSTSSFERSRVTVEFNDGVDLNVAAADMRDAISRVANNLPEEADPSRIIKADSNADPVMRLAVTSDTMAVDDMTVLVEDQIEDVLSAVPGVADVQINGDRDKIFRIDIDQARLASYGLTIADISNALSSMGLDAPAGSLRSSDQSIVVRATANLEKPEDFENVYIKGRTQIRDVATVTLGPDIESSAVRSNSKTAIGLGIVRQAQSNTLDISQGVRAAVANLQKTLPEGVSIAVTSDDANFINGAIHEVEIALIASVIIVVAIIFMFLWDARATLIPALSMPVALIGTIAAIYLVGFSVNILTLLALVLATGLVVDDAIVVLENVVRRRNQGMGPRAAAVLGTQEVFFAVIATTLTLAAVFVPISFLPGQAGGLFREFGFVLAIAVLLSSVVALTLCPMLASRFLKEASATVESEGHGPLFLRRIGGGLANFYRKTLHACLSAPFIVVLVAVLFAGASYVGYGLIRQELTPSEDRAVALLRINGPQGISVEFLQSQLDKIEEAIQPLRDSGEITTTYAIAGSGGSSNNGFVVLTLAPWKERQRSQQEIMADITNRIKGITAVRVFTTQPNSLGIRGAGNGLQFAIVGGEYAKLQPAAQAVVAALEKDPRFVQPRLSVEPTQAQISVEINRERASDLGIDITGLANAVQAVLDGRKIGSVYVGDRSFDVKLVSTTNPINDPTDLENIFMKTADGRYVPMSSIASVVEKAVPPQLNRELRQRSVAITTNLRDDFALGNAFAAAQEIAAPLLPPGSHIIPLAEASTLSETSSGMAIVFGFAIVIILLVLAAQFESFISALIVMATVPLGLGCAVFAMILTGTSLNVYSQIGLVLLVGIMAKNGILIVEFADQLRDKGLNVREAIEEAANIRLRPVCMTMICAVLGGVPLVLASGAGAEARVALGWVIVGGLGLATIATLYVTPVAYLLLGRFTKPKVEEEERLERELVRAEALEEKLK

SEQ ID NO: 2695 - DNA, 3090 bp, Brucella suis 1330
  CDS (1)..(3090): transl_table=11
atgaatttttccgatatcttcatccggcgccccgtgcttgccacggtggtttccctcatgatcgtccttttgggcctgcaggggattgcgcagctttccgtgcgcgaatatccgaaggttgatgaaaccgtcatcaccgtgacaacggcctatgccggtgcgagcgccgatctcattcagggcttcatcactgcgcccattgcggaagcggtcgcaacaaccgaaaacattgactatgtaacctcgtccagccgtccttcgtccagtactgtcaccgtgcagatgaagctcggcgcagacccggatgcggcgctgaccgaggttatcgcgaaggtcaatcaggttcgtggcaatctgcccgacgaatccgacgatcctgtcatcgtcaagggaacgggccagagctttgccaccatgtatctggcggcgcagaaccccaatatgacgagtgagcagatcacggaatacctaaagcgcgtgatccagcctcgtatgtccaccattcagggtgtcgccaaggcggaaattctcggtgggcaggtctattcgatgcgtgtctggctggacccgatccagcttgccgcgcgccagatcaccgcgccggaagttctgtccgcgatcaaggcctcgaacttcctgtctgcgccgggcaagaccaagaacgaatatgttgcgacatcgatcacgctgaagtccaccttgcagacaccggaagctttcggggccatgcctatcaaggcgttgggcgacgaagtggtgcgcctgcgcgatgtggcaaaggtggagcttgcggcagaaagcacggatactatcgtttcgttcaacggttcggccggcacattcctcggggtctatccgacaccggcggcaaaccccatcgacatggcggcagccgtgcgcaaggaattgccatccattcaggcatcgttgccggaaggcatgtcgctcgtcctcgtttatgacgcgaccgagcagatcagttcttcgatcaacgaggcgttcacgaccattggcgaagccgtggccatcgtcattctggtcatcatcgtctttctcggctcgttccgctcggtgctcatcccgattgtcacgatcccgatctcgctgatcggcgtgtgctttttcctttatgtgctgggcttttcgatcaatctcctgtcactgcttgccatggtgctcgctatcggccttgtggtggatgacgcgatcgtggtgctggagaatatccaccggcatatcgaggaaggcttgcaccccatcgatgcggccttcaaggggatgaaggaaattaccggctcgattgtcgcaatgacgatcacgctggcggcagtgtttacgccgctcggatttatcggcggcctgacgggttctctgttccgcgaattcgccttcacgctggcgggcgcggtcattatatccggtatcgctgctttgacgatttcgccgatgatgtgttcgcgcatgttgaagcatggcgaccagacccggttccagaagtttatcgaccgcaccttttcgcgcttcgagaagtggtatcatgcgcgcgtttccaactccctgaactatcgctggatcacgctggcaattgtcttgtgcctcatggggctgacgggcttcctgttcatgaacacgtccagcgagcttgcacctgaagaagattcgggcgcactgttttccatgtttcaggccccgcaatatgcgacgtcggcctataccaatctctatgccgagcagattgatgcgctgaccaaggatctgcccgagcagaaaactcggttccagatcgttggcatggacggcggcacgacttcgggcatcgcgctctgggttttgaaagactggaatgagcgtgaccgttcgcaaaagcaaatccagcaagacctgaccgcgcgtatctccaaggttgcaggcgtgcaggccttcatcttcgcgcctccatccctgccggggacaggtggcggcctgccgatctcgatagcgctgcaatcgaccggccctgccgatcaggtgtttgcgcttgccgaagagatcaaggccgaagcacaggcttcaggccagttcattatcgtgcagaattcgctctccttcaacgcgccgcagaccacgatcacgattgaccgtgactgtgcggcgacgcttggcgtgcaggtgagcgatatcggttcgacactcggtcttttgaccggcggcgcatcgattgccaagttcgaccgcgattccaacagctacgatatcatcacacaggtgccggattcctaccgcgccaacccggaaatgctcggcaacttctatgtccgcagtgtttcaggttcgatggtgccgctgtcctcggttatccagatcaatgaaaatgccgcacctgcggccatcgaacagttcaatcagttgaactcggccacgatttcggcgctgcccttgccgggcgtgacgaccggccagggcctgcaaacactggtggatatcgccagatcgaaaatgccggaaggtttcttcctcgattattccggccagtcccgactggaggtggagcagggcaacacgatcctgatcgcttttggccttgctgttgtcgtgatctatcttgtgcttgcagcgcagtttgaaagcttccgcgatccattcatcatcatgatgtcggttccgctatcgattttcggcgctatcgtcccgctcaatatcggccttggcacgttgaacatctatacgcaggtagggcttatcacccttgtcgggctgataaccaaacacgggattctgatggtggagtttgccaatcagcagcgccgcctgcacggtctttcgcgctgcgacgccattgtggtcgccgcagaaacccgtctgcgtccgatcctgatgaccacagccgccatggcgcttggcgtggtgccgctgataatcgccaccggcgcaggcgctgccgcccgttactcgatggggctggtgatcttcacaggcatcacgatcggcaccatctttacgctgttcgtggtgccgatgttttatactttcattgcaaagaaggatgttgagggcgggtattttacgccctcggaagaaggcagtgaatctgcgccagtgcaacatcactga

SEQ ID NO: 2696 - protein, 1029 aa, Brucella suis 1330
MNFSDIFIRRPVLATVVSLMIVLLGLQGIAQLSVREYPKVDETVITVTTAYAGASADLIQGFITAPIAEAVATTENIDYVTSSSRPSSSTVTVQMKLGADPDAALTEVIAKVNQVRGNLPDESDDPVIVKGTGQSFATMYLAAQNPNMTSEQITEYLKRVIQPRMSTIQGVAKAEILGGQVYSMRVWLDPIQLAARQITAPEVLSAIKASNFLSAPGKTKNEYVATSITLKSTLQTPEAFGAMPIKALGDEVVRLRDVAKVELAAESTDTIVSFNGSAGTFLGVYPTPAANPIDMAAAVRKELPSIQASLPEGMSLVLVYDATEQISSSINEAFTTIGEAVAIVILVIIVFLGSFRSVLIPIVTIPISLIGVCFFLYVLGFSINLLSLLAMVLAIGLVVDDAIVVLENIHRHIEEGLHPIDAAFKGMKEITGSIVAMTITLAAVFTPLGFIGGLTGSLFREFAFTLAGAVIISGIAALTISPMMCSRMLKHGDQTRFQKFIDRTFSRFEKWYHARVSNSLNYRWITLAIVLCLMGLTGFLFMNTSSELAPEEDSGALFSMFQAPQYATSAYTNLYAEQIDALTKDLPEQKTRFQIVGMDGGTTSGIALWVLKDWNERDRSQKQIQQDLTARISKVAGVQAFIFAPPSLPGTGGGLPISIALQSTGPADQVFALAEEIKAEAQASGQFIIVQNSLSFNAPQTTITIDRDCAATLGVQVSDIGSTLGLLTGGASIAKFDRDSNSYDIITQVPDSYRANPEMLGNFYVRSVSGSMVPLSSVIQINENAAPAAIEQFNQLNSATISALPLPGVTTGQGLQTLVDIARSKMPEGFFLDYSGQSRLEVEQGNTILIAFGLAVVVIYLVLAAQFESFRDPFIIMMSVPLSIFGAIVPLNIGLGTLNIYTQVGLITLVGLITKHGILMVEFANQQRRLHGLSRCDAIVVAAETRLRPILMTTAAMALGVVPLIIATGAGAAARYSMGLVIFTGITIGTIFTLFVVPMFYTFIAKKDVEGGYFTPSEEGSESAPVQHH

SEQ ID NO: 2697 - DNA, 3096 bp, Shewanella oneidensis MR-1
  CDS (1)..(3096): transl_table=11
atgatcctgaccgatctttccgttaaacggccggtgtttgcctcggtcattagtttattgctggtggcctttggtctggtcgcattcggtaaattaccgctgcgggaataccccaatatcgacccgcccattgtatcgattgaaaccaactatcgtggtgccagtgccgcggtggtcgaaagtcgcatcacccaactgattgaggacaggatcagcggggtggagggcattcgccatgtgagttcatcgagcagcgatggtcgctcacaagtgaccttagagtttgatattagtcgtaatattgaggatgcggctaacgatgtgcgtgatagaatttcgggtctattagataacttacccgaagaagccgatcccccagaggtacaaaaagccaacggtggcgatgaagtcatcatgtggttaaatcttgagtcggatcagatgaccacattagagctgactgactacacccgccgttatttagccgaccgtctgtctgtggtagatggtgtgtcgatgatccgtattggtggtggcaaagtgtacgccatgcgcgtctggctcgatagacaagcgttagcatcgcgcagtctgacggttgccgatgttgaagccgcactcagggcggaaaacgtcgagctacccgcaggttcgcttgagtcaaaggagcgccattttaccgtgcgtttagagcgtagctatcgcagcgcggaggactttgccaatttggtgatagtccaaggcgaagatggctatttggtcaagcttggcgatgtggcaagggtggaagttggctcagatgaagatcgcatcatgttccgtggtaatagggagtccatgattggactcggggtgtcgaaacagtcgactgccaataccttagaagtggcccgcggcgtcaatgcgttagttgataagatcaatcctacattaccagcgggaatgtcaattaagcgcagctacgatagttcggtgtttatcgaggcttcgatcaaagaggtgtatcaaacgctgtttaccgccatggtgctggtgattatcgtgatttatctattccttggtagcgtacgcgccatgttaatccccgcgattaccgtgcccgtgtcgttgctcggcacatttatcgtgctttatgccttgggatatacgattaacctgttgacgctgctggcgatgatccttgccatcgggatggtagtagacgatgcgattgtgatgttagaaaacattcaccgccgtatcgaagaaggggactctcccttaaaagccgccttccttggcgcccgtgaagtggcatttgcggtcattgccaccaccttagtgctggtggcggtatttatgccgattacgttccttgaaggggacttaggtaaactctttaaagagtttgcagtggccatgagtgcggcggtgattttctccagtattgtggcgttaaccttaagcccgatgatgtgcgctaagctgctcaaacccgcagagcaggactcatggttagtgcgtaaggttgatagcattatgacgggcatttcccgtcgctatcaaagctcgctagagggcgcgatgacaaaaccggtgctgatgttagttatcgtgttgattgcacttgggagcagcgtgtttcttgcccaaaaagtaccgcaggaatttgcaccacaggaggaccgaggctccttatttttaatggttaatgggccgcagggggcgagttacgagtatatcgaatcctacatgaccgaggtggaaagccgtttaatgccgctggtggattcgggtgatattaagcgcctgttgatccgcgcgccccgaggctttggccgtgcggcggacttctctaacgggatggcgattattgtgctcgaagactggggacaacgtcgtccaatgaaagaagtgattggcgatattaataaacgtctcgccgatttagccggtgtgcaagctttccctgtgatgcgtcaagcctttggccgtggtgtaggcaaacccgtgcaatttgtgattggtgggccaagctatgaggagctggctgcttggcgggatatcatgatgcaaaaggtggcggaaaatcctaaactgcttggccttgaccatgattataaagagaccaaaccgcagctcagagtggtgattgacagggacagggcggcgagtcttggggtgtcgatttccaatatcggccgtactttggagtctatgctaggctcccgcttagtcactacctttatgcgtgatggcgaagagtacgatgtgattgtggaaggggagcgcagtaaccaaaatactgcggccgatctacaaaatatctatgttcgttctgaacggacgaaggagctgatcccattatcaaacttagtcacggtagaagagtttgccgatgccagttcgcttaatcgctataatcgcatgcgggcgattaccatcgaagctagcttggctgatggctatagcttaggtgaagcgcttgattacctcaatcaagtcgcgcgggctaatttgccggcggaagcggtcatcagctacaagggacaatcgctggattatcaagagtctggcagctcaatgtactttgtgttcctgctggcactcgggattgtattcctggtattagccgcgcagtttgaaagctatattcaccctatggtgatcatgctaacggtaccgcttgccacggttggcgccttgctcgggctgtggtttaccgggcagagccttaatatctacagccagattgggattattatgctggtcggtttagcggcgaaaaacggtattttgattgtcgaatttgccaaccagttgcgggataaaggcgtggattttgaccgcgccattatccaagcctcttgccagcgtttacggccgattctgatgacgggaataactacagccgcgggcgccgtccctctggtattggcaacgggcgcaggtgctgaaacccgctttgtgattggcgtagtggtgcttgcgggtattatgctggcgacgctgtttaccatttatgtgatcccaactgcttacggtctctttgcccgtaatagcggctcgccagaagccattgcccagcaattagaaaaggaattagcgcaggattaa

SEQ ID NO: 2698 - protein, 1031 aa, Shewanella oneidensis MR-1
MILTDLSVKRPVFASVISLLLVAFGLVAFGKLPLREYPNIDPPIVSIETNYRGASAAVVESRITQLIEDRISGVEGIRHVSSSSSDGRSQVTLEFDISRNIEDAANDVRDRISGLLDNLPEEADPPEVQKANGGDEVIMWLNLESDQMTTLELTDYTRRYLADRLSVVDGVSMIRIGGGKVYAMRVWLDRQALASRSLTVADVEAALRAENVELPAGSLESKERHFTVRLERSYRSAEDFANLVIVQGEDGYLVKLGDVARVEVGSDEDRIMFRGNRESMIGLGVSKQSTANTLEVARGVNALVDKINPTLPAGMSIKRSYDSSVFIEASIKEVYQTLFTAMVLVIIVIYLFLGSVRAMLIPAITVPVSLLGTFIVLYALGYTINLLTLLAMILAIGMVVDDAIVMLENIHRRIEEGDSPLKAAFLGAREVAFAVIATTLVLVAVFMPITFLEGDLGKLFKEFAVAMSAAVIFSSIVALTLSPMMCAKLLKPAEQDSWLVRKVDSIMTGISRRYQSSLEGAMTKPVLMLVIVLIALGSSVFLAQKVPQEFAPQEDRGSLFLMVNGPQGASYEYIESYMTEVESRLMPLVDSGDIKRLLIRAPRGFGRAADFSNGMAIIVLEDWGQRRPMKEVIGDINKRLADLAGVQAFPVMRQAFGRGVGKPVQFVIGGPSYEELAAWRDIMMQKVAENPKLLGLDHDYKETKPQLRVVIDRDRAASLGVSISNIGRTLESMLGSRLVTTFMRDGEEYDVIVEGERSNQNTAADLQNIYVRSERTKELIPLSNLVTVEEFADASSLNRYNRMRAITIEASLADGYSLGEALDYLNQVARANLPAEAVISYKGQSLDYQESGSSMYFVFLLALGIVFLVLAAQFESYIHPMVIMLTVPLATVGALLGLWFTGQSLNIYSQIGIIMLVGLAAKNGILIVEFANQLRDKGVDFDRAIIQASCQRLRPILMTGITTAAGAVPLVLATGAGAETRFVIGVVVLAGIMLATLFTIYVIPTAYGLFARNSGSPEAIAQQLEKELAQD

SEQ ID NO: 2699 - DNA, 3144 bp, Bradyrhizobium japonicum USDA 110
  CDS (1)..(3144): transl_table=11
atgaacctttccgcgcccttcatcctgcggccaattgcaaccgccctgctgatggccggcttgctgctgtgcggcctcgcggcctatccgttgctgccggtcggtgcgctgccgaacgtcaattacccgaccatccagatctcggcgcaactgcccggcgccgatccgggcaccattgcctcgtcgctggcgacgccgctcgagcagcagctcagccagatccccggcgtcacgcagctcacctcgtccagtgcgctcggcgtcgcccagctcacagtgcagttcgagctgtcgcgcaccgtggacagcgcggcggtggacgtgctggccgcgatcaatgccgcaagccctttcctgccgccgaacatcccctacccgccgacgatcaggaaggtgaatccggcggagacgccgatcatgctgatcgcgctgacgtcggactcgctgccgctgaccacggtcgacgcctatgcggaaaacatcctgctgccgaagatctcgcaggtgccgggtgtgggtctcgtcggcatcggcggccagcagaagcccgcgatccgtgttcgcgtcaatccgcaggcgcttgccgcccgcggcatcggcctcgaagacgtccgcaacgtgatcgccggcgccaacgtcgacctgccgaagggcacgctcaacagcccgcgcgtcacctatacgctgaacaccaacgatcaattgctcaagccctccgcctatgaagacctcatcatcgcctatcgcaacggctcgccggtgcggatacgcgacatcggcacggcgatcgaggggcccgagaacgacctcctggccggctggtacggcaaggagcccgccatcatcctggcagtccagcgcgttcccggcgccaacgtgatcgagacggtcgaccgcatcaagaagctgctgccgcaattgcaggcctccgttccaccggcgatcaaggtgacgatcgccgccgaccggaccgccaccattcgcgccgcggtctccgacgttcaattcacgctgatgctgacggtcgcactggtggtaatggtcatattcctgttcctgcggaatttctgggccaccatcatcccggcgatcacggttcccctgtcgctgatcggcacgttcgcggtcctctacgtgctcggctacagcctggacaacctctcgctgatggcgctgtcgatcgcggtgggcttcgtcgtcgacgatgccgtcgtcgtcatcgagaacatcgtgcgccatctcgagcagggcatgacgccgatggaggccgcgctcaagggttccagcgaaatcggcttcacgatcgtctccatcaccctgtcgctgatcgctgtgttcatcccgcttttcctgatgggaggctacgtcggcaagctgttccaggaattcgccgtcacgatcacggcttcgctgctgctgtcgctggtcatctcgctcacgctgacgccgatgatgtgcgcgcggctgctgaaggacgactcgcggaagaagcacggccgaatctatctcgccttcgaacgcggtttcgacgccctgcttgcgctttatgcgagcggcctgcgaatcgtgctgcgccatcgcttcgtgacgctgctcgtgatgctctcgacgatcgcgctgaccggctatctctacgtgatcattccgaagggtttcttcccgcaacaggataccgggcagattgtcggcatcaccgaagccgcacaggacatttccttccccgccatgtccgaacgccagcaggcgatcgtcgacatcctgtcgaaggatccggcaattcagtcggtggcgagctatatcggtccgggaggtcccacggcgacgctcaaccagggacggatatttatcgtcctgaagccgaagcccgggcgcaaggccagcgccgaccagatcatcgaacggctggggccccagctcgcccatatccagggcatcaggctctacatgcaggccgcgcaggacatcaccatcggcgcacgcctgtccaagacgcaataccagtacacgctgacggacgccgattccaacgagctcaccaactggtcggcgatcttcctcaagaagctccgcgagctcgacctcatcaccgacgtcgcgagcgaccaggccaatgccggtccgcggctggaggtcaccgtcaatcgcgaggtcgcatcgagcttcggcatcctgcccacgacgatcgacaatgccctcgacgacgcattcggccagcgcatcgtctccacgatgttcacctcgctgaaccagtaccatgtcgtgatggaggtcgatccgcgtttccagtacgggccggaagcgctcaaggacatctacctgaactcggccaccggccagcaggtccccctgagcacgctggttcacagcgtcattaagcccgcgcccatcctgatcaaccaccagagcctgtttccgtcggtcacgatctcgttcaacctgcagcccggcgccgcgctcggcgatgcggtgacggcgatccagaacatcgagaagagcacgggcaagcccgcctcgctatcgacctcgttccagggcaacgcccaggccttccagtcttccctgcgaggcacaccgctgctgatcggggcggcgctgatcgtgatctacatcatcctcggcgtgctctatgagagcctgatccatccgatcacgatcctgtcgacgctgccgtcggccggcatcggcgcgctgttgctgctgctggcggtccacatggatctcagcgtcatcgccatcattggcatcatcctgctgatcggcatcgtcaagaagaacggcatcatgctggtcgatttcgccctcgaggtggagcgccagcacgggctcagcccggaagaggcgatctaccaggcctgcacgctgcgcttccgcccgatcctgatgacgacgatggcggcgctgctcggcggcgtgccgctgatgatcggttccggtaccggcgcggagctgcgccagccgctcggctacacgatcgtcggcggcctgatgctctcgcagatcctgacgctctacaccacgcccgtcgtctatctctatctcgaccagctcagcaactggctgaccgggcgcaagccgcaggcggccgcgacacccacttcatccacgaccaaggcagatgcggaattgagccatgaatccgcttga

SEQ ID NO: 2700 - protein, 1047 aa, Bradyrhizobium japonicum USDA 110
MNLSAPFILRPIATALLMAGLLLCGLAAYPLLPVGALPNVNYPTIQISAQLPGADPGTIASSLATPLEQQLSQIPGVTQLTSSSALGVAQLTVQFELSRTVDSAAVDVLAAINAASPFLPPNIPYPPTIRKVNPAETPIMLIALTSDSLPLTTVDAYAENILLPKISQVPGVGLVGIGGQQKPAIRVRVNPQALAARGIGLEDVRNVIAGANVDLPKGTLNSPRVTYTLNTNDQLLKPSAYEDLIIAYRNGSPVRIRDIGTAIEGPENDLLAGWYGKEPAIILAVQRVPGANVIETVDRIKKLLPQLQASVPPAIKVTIAADRTATIRAAVSDVQFTLMLTVALVVMVIFLFLRNFWATIIPAITVPLSLIGTFAVLYVLGYSLDNLSLMALSIAVGFVVDDAVVVIENIVRHLEQGMTPMEAALKGSSEIGFTIVSITLSLIAVFIPLFLMGGYVGKLFQEFAVTITASLLLSLVISLTLTPMMCARLLKDDSRKKHGRIYLAFERGFDALLALYASGLRIVLRHRFVTLLVMLSTIALTGYLYVIIPKGFFPQQDTGQIVGITEAAQDISFPAMSERQQAIVDILSKDPAIQSVASYIGPGGPTATLNQGRIFIVLKPKPGRKASADQIIERLGPQLAHIQGIRLYMQAAQDITIGARLSKTQYQYTLTDADSNELTNWSAIFLKKLRELDLITDVASDQANAGPRLEVTVNREVASSFGILPTTIDNALDDAFGQRIVSTMFTSLNQYHVVMEVDPRFQYGPEALKDIYLNSATGQQVPLSTLVHSVIKPAPILINHQSLFPSVTISFNLQPGAALGDAVTAIQNIEKSTGKPASLSTSFQGNAQAFQSSLRGTPLLIGAALIVIYIILGVLYESLIHPITILSTLPSAGIGALLLLLAVHMDLSVIAIIGIILLIGIVKKNGIMLVDFALEVERQHGLSPEEAIYQACTLRFRPILMTTMAALLGGVPLMIGSGTGAELRQPLGYTIVGGLMLSQILTLYTTPVVYLYLDQLSNWLTGRKPQAAATPTSSTTKADAELSHESA

SEQ ID NO: 2701 - DNA, 3189 bp, Bradyrhizobium japonicum USDA 110
  CDS (1)..(3189)
atgaatctctcaaaattcttcatcgatcgtccgatttttgccggtgtgctgtcggtcctgattttcctcgcagggctcatctcgctgttcgcgatgccgatctcggaatacccggacgtggtgccgccctccgtcctcgtgcgcgcgacctatcccggcgccaatccgaaggtgatcgcggagacggtggcgacgccgatcgaggagcagatcaacggcgtcgaaggcatgctctacatgtcgagccaggcgaccaccgacggcgcgatgacgctgacggtgacgttccgcctcggcaccgaccccgacaaggcgacgcagctggtgcagaaccgcgtgcagcaggccgagccgcgcctgccggccgtggtgcgccagctcggcatcatcaccaagaagtcctcgcccgacctcaccatggtggtgcatctcttgtcgcccaacggccgctacgacatgacgtatttgcgcaactatgcggtgctcaacgtcaaggaccggctggcgcggatcgacggcgtcggtgacgtccagctgtatggtgccggcgactattcgatgcgggtctgggtcgacccgcagaaggcggccgaacacgggctgaccgcgagcgacatcgtcaaatcgatccaggcgcagaacgtcgaggccgccgccggtgtggtcggctcctccccgaacgtcaaaggcatcgacctgcaactgtccgtcaatgcggaagggcggctcgcgaacgaggagcagttcggcgacatcgtggtcaaaaccggcgcgcgcggtgaagtggtgcggttgcgcgacgtcgcgcgcatcgagctaggggcgtccgaatacggcctgcgctcgctgctcgacaacaagcaggcggtggcgatcccgatcttccaggcgcccggctccaatgcgctgcagatttccgaccacgtccgcgccaccatggccgagatcaagaagaacatgcccgagggcgtgtcctaccagatcgtctacgatccgacccagttcgtgcgctcctcgatcgaggcggtgatccacacgctgctggaggcaatcgcgctggtggtgctggtcgtgatcctgttcctgcagacctggcgcgcctcgatcattccgctgctggcggtgcccgtgtcgatcgtcggcacctttgccgtgatgcacgtgttcggcttctccatcaacgcgctcagcctgttcggcctggtgctcgcgatcggcatcgtcgtcgatgacgccatcgtcgtggtcgagaacgtcgagcgcaacatcgaggccgggctgtcgccgcgcgatgcgacctatcaggcgatgcgcgaggtctccggcccgatcatcgcgatcgccatggtgctgatcgcggtgttcgtgcctctcgccttcatctccggcctgaccgggcagttctacaagcagttcgcgttgacgatcgcgatctcgaccgtgatttccgccgtcaactcgctgacgctgtccccggcgttgtcggcactgctgctcaagggccacaatgagccgaaggaccggctgacgatcatcatggaaaagggccttggctggttcttccgcggtttcaaccgggccttcacgcgttcatccgagaattacagcggcaccgtcaccaaggtgatctccggcaaggccgcggtgatgggtctttacgtcgtgctggtcggcctcaccgccttcctgttccagcaggtgccgagcggcttcgtgccgggccaggacaagcaatatctggtcggcttctcgcggctgcccgacggggcaacgctcgaccgcaccgaagaggtgatccgcaagatgagcgacgtcgcgctgacccagccaggcgtcgagagctctgtcgccttcccgggcctgtcgatctcaggcttcaccaactcgtccaatgccggcatcgtgttctcgacgctgaagccgttcgacgagcgcaagggtgcagccctgagcggcaatgccatcgcggccgagctgaacaagaaatacgccggcatccaggaagccttcatcgccatgttcccgccgccgccggtcaacggcctcggcaccatcggcggcttcaagctgcagatcgaggatcgcgccggcctcggctatgaggcgctgaacgaggcgaccaaagcgttcatggcggcgatgcagaaggcgccggagatcgccggcgtgttctcgagcttccaggtcaacgtgccccagctcttcgccgacatcgaccgcaccaaggcgctccagctcggggtgcccgtgacggaggtgttcaacactctccagatctacctcggctcctactacgtcaacgacttcaacaagtttggccgcacctattccgtccgcgtccaggccgacgcgccgttccgcgcccgggccgacgacatccggcagctcaaggtgcgctcgtcctccggcgacatggtgccgttgtccgcactgctcaagatccgccagagtgcgggtccggagcgcgcgatccgctacaacggcttcctgtcgtccgacatcaacgcggcggccgcgcccggcttttcatcgggccaggcgcaggaagtcgcgacgcggatcgcagcggaagtgctgccgcccggctttgccttcgaatggaccgacctgacctatcaggagttcatcgccggcaattccggaatctgggtgttcccgctggcgatcctgctggtgttcctggtgctggccgcgctctacgagagcctgaccctgccgctctcgatcatcatgatcgtgccgatgggtctgctcgcggcgatgttcggggtctggctctcgaagggcgacaacaacgtcttcacccagatcggcctcatcgttctcgtcgggctctcggccaagaacgcgatcctgatcgtcgaattcgcgcgcgagctcgaattcgccgggcgcaccccgatccgcgccgcgatcgaggcgagccggctgcggctccgtccgatcctgatgacgtcgatggcgttcatcatgggcgtcctgccgctggtgctctcgaccggcgcaggctcagagatgcgacgcgcgatgggtgtcgcggtgttctccggcatgatcggcgtcaccgtgttcggcctgttcctgacgccggtgttctacgtgctgctgcggaccgtcaccggcatgaagccgctgacgcaccacggcagcgacatcagcgccgcgccggtccagggactcacgcactag

SEQ ID NO: 2702 - protein, 1062 aa, Bradyrhizobium japonicum USDA 110
MNLSKFFIDRPIFAGVLSVLIFLAGLISLFAMPISEYPDVVPPSVLVRATYPGANPKVIAETVATPIEEQINGVEGMLYMSSQATTDGAMTLTVTFRLGTDPDKATQLVQNRVQQAEPRLPAVVRQLGIITKKSSPDLTMVVHLLSPNGRYDMTYLRNYAVLNVKDRLARIDGVGDVQLYGAGDYSMRVWVDPQKAAEHGLTASDIVKSIQAQNVEAAAGVVGSSPNVKGIDLQLSVNAEGRLANEEQFGDIVVKTGARGEVVRLRDVARIELGASEYGLRSLLDNKQAVAIPIFQAPGSNALQISDHVRATMAEIKKNMPEGVSYQIVYDPTQFVRSSIEAVIHTLLEAIALVVLVVILFLQTWRASIIPLLAVPVSIVGTFAVMHVFGFSINALSLFGLVLAIGIVVDDAIVVVENVERNIEAGLSPRDATYQAMREVSGPIIAIAMVLIAVFVPLAFISGLTGQFYKQFALTIAISTVISAVNSLTLSPALSALLLKGHNEPKDRLTIIMEKGLGWFFRGFNRAFTRSSENYSGTVTKVISGKAAVMGLYVVLVGLTAFLFQQVPSGFVPGQDKQYLVGFSRLPDGATLDRTEEVIRKMSDVALTQPGVESSVAFPGLSISGFTNSSNAGIVFSTLKPFDERKGAALSGNAIAAELNKKYAGIQEAFIAMFPPPPVNGLGTIGGFKLQIEDRAGLGYEALNEATKAFMAAMQKAPEIAGVFSSFQVNVPQLFADIDRTKALQLGVPVTEVFNTLQIYLGSYYVNDFNKFGRTYSVRVQADAPFRARADDIRQLKVRSSSGDMVPLSALLKIRQSAGPERAIRYNGFLSSDINAAAAPGFSSGQAQEVATRIAAEVLPPGFAFEWTDLTYQEFIAGNSGIWVFPLAILLVFLVLAALYESLTLPLSIIMIVPMGLLAAMFGVWLSKGDNNVFTQIGLIVLVGLSAKNAILIVEFARELEFAGRTPIRAAIEASRLRLRPILMTSMAFIMGVLPLVLSTGAGSEMRRAMGVAVFSGMIGVTVFGLFLTPVFYVLLRTVTGMKPLTHHGSDISAAPVQGLTH

SEQ ID NO: 2703 - DNA, 3150 bp, Bradyrhizobium japonicum USDA 110
  CDS (1)..(3150): transl_table=11
atgggtgtctccgaacccttcatccgccgtcccatcgcgacctcgctgctcggcatcgcgctcctgatcggcgggctgctgggctatttctcgctcccggtctcggcgctgccgcaggtcgacttcccgaccgtgcaggtgacgacgcagctgccgggtgccagccccgacgtgatcgcctcgctgattaccgcgccgctggagcggcagctcggccagatcccgtcgctgtcggcaatgaactcgacgagctcgttcggcgtcagccagatatcgctccagttcgacctcaaccgcgacatcgacggcgcgacccaggacgtgcaggccgcgatcaacgcggcggccggcgtgctgcccaagacgctgccttatccgccgacctacgccaaggtgaacccggcggatgcgccagtcatgacgctggcgctgcgttcggacacgatctcgctgcgggcgatgagcgacatcgccgatacgcttctggcgcaacggctgagccagatttccggcgtcgggcgcgtttccgtgctcggcgggctaaagccggccgtgcgcatccaggcggatctggcgcggctggcggcctatggcatcgccatggaggatctgcgcaccgcgatcgccaatgccaacgtctcgggcccgaagggctcgctcgacggcgcgcagcaatcctacatcatcgccgccaacgaccagatcgccgccgccgaggcctacaagcctgtcatcatcgcctatcgcaacggctcgccggtcacgatcgccgacgtcgcgcagatcgtcgatggcctggagaacgaccgcaccggcggctggtaccagggcacgccggccgtcatcatcgatatccagcgccagcccggcgccaacgtcatcgacgtcgtcagccagatccgggccgaaatcccgaaggtccagcgcgcgatcccggccggcgtgaacctcaccatcgtctccgaccgcaccgtcaccatccgcgcctcggtgcgcgacgtgcagttcacgctgatcctcagcgtcgtgctggtgacgctggtggtgctgctgttcctgcgctcgctcagggccacgctgatcgcgggcgtggcgctgccgctgtcgctgatcgcgagcttcggcatcatgtattttgccggcttcagcctcgacaatctgtcgctgatggcgcttacgatcggcaccggcttcgtggtcgacgacgccatcgtgatgatcgagaacatcgtccgccacatggagaatggcgacgggccgatggaggcttcgctgaaaggcgcgagcgaaatcggcttcacggtgatctcgctgacggtgtcgctgatcgcggtgttcatcccgcttctgttcatgtcgggcctcgtcgggcgcatgttccgcgaattcgcgctgacgctgacgatcgcggtcgtgacctcggccgtggtctcgctgacgttgacgccgatgatgtgctcgcggctgctgaggcacgcccatgaggaagtggcggtgccgggcctcgctgcgatcagccgcttcatcgaccgcaccgtcgagttctatcaccgcacgctgctctgggttctggagcgccagcgcgccacgctggtcgtgaccttcgccacgctgatcgcaaccctcgtcctctacgtcgtggcgccaaagggcttcctgccgcttcaggacaccgcctcgatcacggcggtgacggaggccggacccgacgtctcgttcgcggagatgcagaggcggcaggccgaggccgccgacgccatcaaggcagaccccgacgtggtcggcgtcgtctcggtgatcggcgccggctcggtcaatccgaccaccaatgtcggccgtctcgtcatgaccttgaaaccgcgcggcgagcggcgtgacgacgtcagcgtggtcgtgacccggctgaagcagagggtgtcgggcatccccggcatgaccgtctatttccagccggtgcaggacgtgcagatctcgacccagtcgagccgctcgcaataccagtacacgctgaccggcaccgatgcggcgctggtgtcggaatgggcgcgcaagctggttgcggagatgcggcgcgatcccttgttccgcgacgtctcctcggaggcgcaggagggcggcctgcgggcgcagctcgatgtggatcgaacgcgggcgggccagctcggcgtgagcctgcaaggcatcaccgacacgctgaacgatgccttcgcccagcggcagatctcgaccatctacggccaggccaaccagtaccgcgtcgtgctggaggcgctgccgatgtaccagcgcgatccctcgatcctgtcgaagctctatctgccgggcgccgcgagcgccatcgtcggcgcgcccaacgcccaggtgccgctgtcggcggtggcgacgctgaagcgcactacggcgccgctggcgatctcgcaccaggcgcaattcccggcgatctcgctcagcttcaacctcgcgccgggcgcagccctcggcgatgccgtcgaagcggtgaagacgatcgagacccgcatcgaaatgcccaacagcatcgtcggggtctatgccggcgatgccgccgaattcgccaaggcgctcgccggccagccctggctgctgctcgccgccgtcatcacgatctacatcgtgctcggcgtgctctacgagagctacatccacccgatcaccatcctgtcgacgctgccctcggccggcgtcggcgcgatcctggcgctggtcctgtgcggacaggatctctcggtgatcggcctgatcggcatcatcctgttgatgggcatcgtcaagaagaacgcgatcatgatgatcgacttcgcgctcgaggccgagcgcgggcaggggatgtcgcccaacgaggcgatcgtgcaggcgtgtctcttgcgtttccgcccgatcatgatgacgacgctggccgcgctgttcggcgcgctgccgctggcgatcgagagcggcaccggcgccgagctgcgctttccgctcggcatctccatcatcggcggcctgctgctgagccagctcctgacgctgtacaccacgcccgtgatctacctggcgctcgaccgcatcaaccgccgcctcgagcaggcgctgccgccggccgaatccggcggcccgccggtcgcgggcgcgaccgaggggatgcagtga

SEQ ID NO: 2704 - protein, 1049 aa, Bradyrhizobium japonicum USDA 110
MGVSEPFIRRPIATSLLGIALLIGGLLGYFSLPVSALPQVDFPTVQVTTQLPGASPDVIASLITAPLERQLGQIPSLSAMNSTSSFGVSQISLQFDLNRDIDGATQDVQAAINAAAGVLPKTLPYPPTYAKVNPADAPVMTLALRSDTISLRAMSDIADTLLAQRLSQISGVGRVSVLGGLKPAVRIQADLARLAAYGIAMEDLRTAIANANVSGPKGSLDGAQQSYIIAANDQIAAAEAYKPVIIAYRNGSPVTIADVAQIVDGLENDRTGGWYQGTPAVIIDIQRQPGANVIDVVSQIRAEIPKVQRAIPAGVNLTIVSDRTVTIRASVRDVQFTLILSVVLVTLVVLLFLRSLRATLIAGVALPLSLIASFGIMYFAGFSLDNLSLMALTIGTGFVVDDAIVMIENIVRHMENGDGPMEASLKGASEIGFTVISLTVSLIAVFIPLLFMSGLVGRMFREFALTLTIAVVTSAVVSLTLTPMMCSRLLRHAHEEVAVPGLAAISRFIDRTVEFYHRTLLWVLERQRATLVVTFATLIATLVLYVVAPKGFLPLQDTASITAVTEAGPDVSFAEMQRRQAEAADAIKADPDVVGVVSVIGAGSVNPTTNVGRLVMTLKPRGERRDDVSVVVTRLKQRVSGIPGMTVYFQPVQDVQISTQSSRSQYQYTLTGTDAALVSEWARKLVAEMRRDPLFRDVSSEAQEGGLRAQLDVDRTRAGQLGVSLQGITDTLNDAFAQRQISTIYGQANQYRVVLEALPMYQRDPSILSKLYLPGAASAIVGAPNAQVPLSAVATLKRTTAPLAISHQAQFPAISLSFNLAPGAALGDAVEAVKTIETRIEMPNSIVGVYAGDAAEFAKALAGQPWLLLAAVITIYIVLGVLYESYIHPITILSTLPSAGVGAILALVLCGQDLSVIGLIGIILLMGIVKKNAIMMIDFALEAERGQGMSPNEAIVQACLLRFRPIMMTTLAALFGALPLAIESGTGAELRFPLGISIIGGLLLSQLLTLYTTPVIYLALDRINRRLEQALPPAESGGPPVAGATEGMQ

SEQ ID NO: 2705 - DNA, 3234 bp, Xylella fastidiosa Temecula1
  CDS (1)..(3234): transl_table=11
ttgtcaaggacacaccacgtgggcttttcgacgatctttatccgccgcccaatcgccacttcactgctgatgttcggcgtactcctacttgggatcctgggctacaagaaattaccgatgtcggcactccctgaggtcgatgcacctagcctggtcgtcaccacccagtatccgggtgccaacgccaagacaatggccgcattggtgaccaccccactagaacatcagctcgggcagatttctggcttggacatgatgagttctgattcctcggctggcttatcaacaataaccctgcaattctcaacacacaaaaatctcgacatcgccgcacaagacgtacaagcagcgatccatcaggccaccctgccctcaacattacctcaccaaccgatctacaaccgggtgaatccagctgacgcggccatcatcaccctcaagctcacctctgataccctgccactacgcgaactcaatacatacgcagacgctatcctggcacaacgcctctcacaaatatcaggcgttggtgtggtctcgattgctggcaacgtccgaccagcggtgcggatccaagtgaatccggcacagctatccaacatgggcctgaccatggaatcgctgcgcaatacactgacccaagccaacgtcaacgcacctaaaggctcgctcaatggcaagaaccagtcctacagcatcggtaccaacgatcaactgaaagatgcttcgcaatatcgggacaccatcatccattaccaaaatggacatccggttcgcctctcagaggtcgccaatgtggtggacggcgtcgaaaatgaccagatctccgcttgggccaacgcaaaaccagccgtgctgctggagattcgccgccagcccggcgccaacattattaagaccgtcgaacaaatccgcgcgatcctgccgcagttgcgtgcggtgctgcccacggatgtacatcttgacgtcttttccgaccgcaccgaaaccatccgcgcttccgtgcatgaagtaaaattcaccctgctactgaccattggtctggtggtcgcggtgatctttgtattcctgcgccgactatgggccacgctcattccatcggtagcggtccccctatcactggccggcaccttcagcgtgatggcatttaacgggatgtcactagacaacctctccctgatggcactggtcgtcgccaccggctttgtcgttgatgacgcgattgtgatgatcgaaaacatcgtccgctacattgaacaaggcaagagcggacgcgaagcagcggagattggagcacgtcaaattggtttcaccatactctcgctcaccatttcgctggtcgccgtgtttctccccctgctgttgatgcctggcgtcaccggccgactgttcaacgagttcgcctgggtcctgtcgaccgccgtcgtcatctcgatgctggtatcactgaccctgacaccgatgatgtgtgcctacctactcaaacccgatactctgcccgaaggcgatagcccaacacaaatcaccaagatcaccctgtggacacgcactgtcgcactatacgaacgcaccttagactgggtgctgatgcaccaacaactgaccttagttgtagcgctagtgacagtagcactcaccatcgtgctgtatgtaacgatccccaaggggctactgccagaacaagacactggactcatcatcggcgttgtgcaagccgaccaggacatcgcattctcacagatggaacagcgtacacgggccgtggccgatgcactgcgcaaggatcccgccgtgacaggcgtctccgcatttatcggtgccggcaccatcaaccccacactcaatcatggccaactatcgatcgttctcaagccacgcaaccaacgtgaggggctaaacaccatacgcccacgactacaacgcgccgcagccggcatcccaggcatcgtcctctatctaaagccggtacaggatgtgactctggatacccacgtcgctgcaaccgaataccaatactcactctcaaacgtcgatgcaacggagctggctacctgggccacacgcatgaccgaggcaatgcgccagattccggcactggccgacgtagacaacaacttggccgaccaagggcgtgccttacagatcactgttgatcgtgataaagccagcctccttggcgtaccgatgcagactatcaacgacaccctatatgacgcattcggccagcgccaaatctccacgattttcaccgaactcaaccaatatcgggtcgtcctggaagtggccccacactttcgcaccagcaccgcactgatgcagcaactgggagtcgccagcaacggcagcggcgcactgactggcagcaatgccacgagcttcggccaagccgtctcatcaaactcttccacggccacaggtattggcaacctcaacaccggaatgaccgtcggtactggccgtatcatcccgctgtcagcccttgccgatgctaaggtcaccaacgctcctcgcgttatcagccatcagcagcaacttccctccgtaacgatctcattcaacctggcccaggggtattccctctcccatgccgtgaaagccatcgaacaggcacgtacccaactacagatacctgcccaggtacgcgcccagttcatcggtaaagccgtcgaattcaccagtagccagagtgacatcgtgtggttgctgctcgcttcgattgtggtgatctacatcgtgctgggggtgctatacgaaagttatatccatccgctgacgatcatctccacactaccgtcggcaggcgttggcgcattgctggcactgatgctctgcggactgagcctgtcggtggatagcattgtcggtatcgtgctgctgattggtatcgtcaagaaaaacgcaatcatgatgattgacttcaccatcgaagcacgcagcaccgggagcagcgcccacgatgcgatccgccgcgcctgtctgttgcgcttccgtccgatcatcatgactactgccgccgcactgctcggcgcattaccgctagcactgagcgacggcatcggctcggaattgcgccgtccactgggcattactattgtcggtggcttgctgctatcgcagttgatcaccttgtacaccacgcctgtcatctacctgttcttcgaacggttatccgagcgcctacgcctccggcgtacacaccgtacctcggtccaggccacaccacagcgcgtatga

SEQ ID NO: 2706 - protein, 1077 aa, Xylella fastidiosa Temecula1
MSRTHHVGFSTIFIRRPIATSLLMFGVLLLGILGYKKLPMSALPEVDAPSLVVTTQYPGANAKTMAALVTTPLEHQLGQISGLDMMSSDSSAGLSTITLQFSTHKNLDIAAQDVQAAIHQATLPSTLPHQPIYNRVNPADAAIITLKLTSDTLPLRELNTYADAILAQRLSQISGVGVVSIAGNVRPAVRIQVNPAQLSNMGLTMESLRNTLTQANVNAPKGSLNGKNQSYSIGTNDQLKDASQYRDTIIHYQNGHPVRLSEVANVVDGVENDQISAWANAKPAVLLEIRRQPGANIIKTVEQIRAILPQLRAVLPTDVHLDVFSDRTETIRASVHEVKFTLLLTIGLVVAVIFVFLRRLWATLIPSVAVPLSLAGTFSVMAFNGMSLDNLSLMALVVATGFVVDDAIVMIENIVRYIEQGKSGREAAEIGARQIGFTILSLTISLVAVFLPLLLMPGVTGRLFNEFAWVLSTAVVISMLVSLTLTPMMCAYLLKPDTLPEGDSPTQITKITLWTRTVALYERTLDWVLMHQQLTLVVALVTVALTIVLYVTIPKGLLPEQDTGLIIGVVQADQDIAFSQMEQRTRAVADALRKDPAVTGVSAFIGAGTINPTLNHGQLSIVLKPRNQREGLNTIRPRLQRAAAGIPGIVLYLKPVQDVTLDTHVAATEYQYSLSNVDATELATWATRMTEAMRQIPALADVDNNLADQGRALQITVDRDKASLLGVPMQTINDTLYDAFGQRQISTIFTELNQYRVVLEVAPHFRTSTALMQQLGVASNGSGALTGSNATSFGQAVSSNSSTATGIGNLNTGMTVGTGRIIPLSALADAKVTNAPRVISHQQQLPSVTISFNLAQGYSLSHAVKAIEQARTQLQIPAQVRAQFIGKAVEFTSSQSDIVWLLLASIVVIYIVLGVLYESYIHPLTIISTLPSAGVGALLALMLCGLSLSVDSIVGIVLLIGIVKKNAIMMIDFTIEARSTGSSAHDAIRRACLLRFRPIIMTTAAALLGALPLALSDGIGSELRRPLGITIVGGLLLSQLITLYTTPVIYLFFERLSERLRLRRTHRTSVQATPQRV

SEQ ID NO: 2707 - DNA, 3147 bp, Bacteroides thetaiotaomicron VPI-5482
  CDS (1)..(3147): transl_table=11
atgttttctaagtttttcattaaccgaccaatttttgctaccgtacttgccctgctcattgtggtagccggtttggtcgcacttaatatattgcctgtggcgcaatttccggagattacacctccgacggttcaggtatcggctgtctatcccggtgcgaatgctgaaactgtagctcaaacggtaggactccccatcgaacagcaggtgaatggggtggacggtatgctctatatgtcttcaaattcttcctcttcgggagcatattctctgacaattacatttgccgtcggtacagatatcgatatggctactgtacaagtccagaacagggtaagtgttgctcaatcatccttgccggaaccggtagtggtacagggggtgactgtgcagaaacagtcttcgaacattgtcatgttcctgacaatgacttcgaaagactctgtatacaacagtctctatctgactaactatgccaaattgaatttggtcgatcagttatcacgtgtgcctggtgtaggagctgttaatgtcatgggagcaggtgattattccatgcgtatctggctggatcctgaagctatgcgtatccggaacatttctccggcacaagtatatcagtccattcagtctcagaatatggaagtgtccgccggctatatcggtcaaccgatcggacaggacaataaaaatgcctttcaatatacacttaatgtacaggggcgacttatttctccggagcaattcgggaatattatcattcgtcgggaacaggatggggcaatgcttcgcctgaaagatattgcgcgaatagatttggggtctgcttcttatagtgtagtatcacgattgaaggggatgcctaccgcagcgattgctatctatcagcagccgggctccaattcgctggacgtttcaaaaggagtgaaggctaagatggaggaactggcgaccagttttcctacaggagtagcctataacgtaactttggatacaacggatgtaattcatgcttctattgatgaagtaatggtgacattttttgagacaacgctgctggtagtactggttattttcctgtttttgcagaactggagagcggttattattccttgtatcacaattcctgtatcgctgatcggtacattggcagttatggcggcatttggtttttcgatcaatacgctgactctgttcggattgattctggcagttgccattgtagtggatgatgctattgtggtggttgagaatgcttcaagattgctggagaccggacaatattcaactcgtgaagcagtcacaaaagctatgggggaaattacggggccgattgtcggagtggtgcttgttttgcttgccgtgtttattccgacgatgatgatcagcggtatttcggggcagttgtataagcagtttgcactgacaattgctgcttctactgtattaagcggttttaactcactgacactgacgcctgctctttgtgctctattcctcaaaaagagcaaaccgtctaacttctttatatacaaaggatttaataaagcgtatgataagacacagggagtctacgatagtacggtgaaatggttgcttcaacgtccgcttatctcttttgtatcttttgctattctgacagtgattgccgtaatactctttatgcgttggccgtcgacatttattccggatgaagatgatggttattttattgcagttgttcagcttcctccggcagccagcttggaacgtacacaagctgtcggggataaaatcaatgctattttggattcttatccggaagtggagaattacattggaatcactggtttctccgtgatgggcggaggtgagcaaagtaactccgcaacctattttgttgtcctgaaaaactgggacgaaaggaaagggaaggagcatacggctgctgccgttgtcgaccgttttaatggcgaagcgtatatggagatacaggcaggacaagcatttgctatggttcctccggctattccaggattgggtgcttccggtggcttgcaacttcaattggaagaccggaggaatctgggaccgacagaaatgcagcaggctattgacgcattgcttgcttcttctcattccaaaccggccttagcttctgtatccagtcagtatcaggcaaatgtccctcaatattttctgaatatcgatcgtgataaggtgcaatttatgggcattgctctgaatgatgtattttctacattaagctattatatgggggcggcatacgttaatgattttgttgaattcggtcatatttatcaggtaaagatcgaagcgcgtgatcaggcacaacgggtcattgatgatgtcttaaaactcagtgtggctaattcggcaggagagatggtccccctttcttctttcaccaaagtggaagagcagttggggcaggatcagatcaatcgttacaatatgtattcaacagctgccctgacttgtaatgtagcgcccggaagcagttccggacaggctattcaagaaatggaaactttgtttaaagaacagctgggagatgaattcggctatgaatggacgtcggttgcctatcaggaaacgcaggcgggaaatacgaccaccattgttttggtcatggccttgattgtagcattccttgttttggctgcgcaatatgaaagctggaccagtccggtggctgccgtgataggtttgccggtggccttgttgggagcaatgataggatgtatgataatgggaactccggtcagcgtatatacacagattggtattatcctgcttgttgcactttcggcaaagaatggtattctgattgtagagtttgcccgtgatttccgtgctgagggaaactcaattcgtgaggctgcatacgaagcaggacacgtccgcttacgtccgattttgatgacttcttttgcttttgtattgggggtaatgcctttgctgtttgctaccggggctggtgcgcagagtcgtatagcgttgggtactgcggttgttttcggtatggcgatgaatactttattagcgacagtctatattcctaatttctatgaattgatgcagaaactgcaagagaagtttagcaggaagaaagatgacgatgtgaaaaaagatacgaatatgtaa

SEQ ID NO: 2708 - protein, 1048 aa, Bacteroides thetaiotaomicron VPI-5482
MFSKFFINRPIFATVLALLIVVAGLVALNILPVAQFPEITPPTVQVSAVYPGANAETVAQTVGLPIEQQVNGVDGMLYMSSNSSSSGAYSLTITFAVGTDIDMATVQVQNRVSVAQSSLPEPVVVQGVTVQKQSSNIVMFLTMTSKDSVYNSLYLTNYAKLNLVDQLSRVPGVGAVNVMGAGDYSMRIWLDPEAMRIRNISPAQVYQSIQSQNMEVSAGYIGQPIGQDNKNAFQYTLNVQGRLISPEQFGNIIIRREQDGAMLRLKDIARIDLGSASYSVVSRLKGMPTAAIAIYQQPGSNSLDVSKGVKAKMEELATSFPTGVAYNVTLDTTDVIHASIDEVMVTFFETTLLVVLVIFLFLQNWRAVIIPCITIPVSLIGTLAVMAAFGFSINTLTLFGLILAVAIVVDDAIVVVENASRLLETGQYSTREAVTKAMGEITGPIVGVVLVLLAVFIPTMMISGISGQLYKQFALTIAASTVLSGFNSLTLTPALCALFLKKSKPSNFFIYKGFNKAYDKTQGVYDSTVKWLLQRPLISFVSFAILTVIAVILFMRWPSTFIPDEDDGYFIAVVQLPPAASLERTQAVGDKINAILDSYPEVENYIGITGFSVMGGGEQSNSATYFVVLKNWDERKGKEHTAAAVVDRFNGEAYMEIQAGQAFAMVPPAIPGLGASGGLQLQLEDRRNLGPTEMQQAIDALLASSHSKPALASVSSQYQANVPQYFLNIDRDKVQFMGIALNDVFSTLSYYMGAAYVNDFVEFGHIYQVKIEARDQAQRVIDDVLKLSVANSAGEMVPLSSFTKVEEQLGQDQINRYNMYSTAALTCNVAPGSSSGQAIQEMETLFKEQLGDEFGYEWTSVAYQETQAGNTTTIVLVMALIVAFLVLAAQYESWTSPVAAVIGLPVALLGAMIGCMIMGTPVSVYTQIGIILLVALSAKNGILIVEFARDFRAEGNSIREAAYEAGHVRLRPILMTSFAFVLGVMPLLFATGAGAQSRIALGTAVVFGMAMNTLLATVYIPNFYELMQKLQEKFSRKKDDDVKKDTNM

SEQ ID NO: 2709 - DNA, 3114 bp, Rhodopirellula baltica SH 1
  CDS (1)..(3114): transl_table=11
atgtcaaagtttttcatctaccgcccgatctttgccacggtgatctccatcgtgattgtgatcgccggtgcggtctcgttctttggacttccgatcgagaagttcccaccgatcacgccgcccacggtccaagtgacggcggtctatcccggcgcgaatgctcgaacggtcgctgaaaccgttgccgctccgattgaacaagcggtcaatggcgtcgaaggcatgatttacatgtcatcgacaagcactaacgaaggtctgtacaccctgacggttacgttcgagttgggaatggatttggacatcgcttcggtcttggtccagaacctagtcggcagtgcggaagccagcttgcctcaagaggttcggcaacaaggcatcacgaccaagaagcgttccacacaaacacttcaattcatcgcgctgacatcacccggtggagctcacgatggattgttcctgagcaacttctcgctcgatgttcgagacgagatcagtcgcatcaaaggcgtcggcgacgttcagtcatttggcgatggtgactacagcatgcgagtctggttggacccgcgtttgttgaaacagcgtggactgacaaccgaagatgtggtctcggtgatctccgaacaaaacgttcaagtcgcggcgggacaaattggggctccgcctgctgaatccggcaccgcgttccaattttcagtcaacacgcaaggtcgcttttcaagcgtcgaacaattccaagacatcatcgtccgcaccggtgacaacggcgaagtgctgcgtctgggcgatctcgctcgcattgagcttggggccgaggcctacacctattccagttctttcactggcgacgccgccgcgacgctcgcgatctaccagttgccgggcgccaacgctctggaaaccgcagaggcgatccggatcaagatggacgaactgtcttcggcggcaaactggccggatgacgtggaataccaagtcgcatacgacgcgactgaattcgtcaccgcctccatcaccgaagtctacaagacattggcgatggcaatcgcgttggttgtgttcgtcatctttgtcttcctgcaagattggcgagcgacggtggttcccgtcgcggcgattccggtctctttgatcggcaccttcgccatcatggcaggcatcgggttctcgctgaacatgttatccctgttcggcattgtgctcgccattggcatcgtggtcgacgacgccatcgtggtcgttgaaaacgtatcacgacacatcgccgatgggctgtccagccgagacgccgcagtcaaagccatgtccgagatcaccgggccagtgatcgccacaacactcgtgttgctagccgtctttgttccgtgtgcattcatgcccggcatcaccggtgaattgttccgccagtttgcattgacgatctcagcatcggtgatcatcagcacgatcaacgcactgacgctcagtcccgccctttgcgcgattttccttcggccaccaaccgagactaagttcatcggatttcgactgttcaaccaagcctttgaacgaaccacggccatctatggtgccacggtggccagactggttcgcttgacattggttgtgtcggttgcatccatcgccttggtgatggcgacgggctggatcctcacacagttgcccactggatttgttccagacgaggaccaaggtgtgttgttcgtcaacgttcagttgcctgacgcagccagcaaagaacgcaccgatgaagtgatcaaagacttagaccagatcttcgaacaaaccccaggagtccatggctggttgtccgtgaccggctactcgttgctcggtgggagtggtggtcccaacgtcggattctcggttctggtgttgaaaccatgggaagaccgggatgccaaaaccgaaagcgtcactgcgatccagcaatacattcagcaaaaattcgcgtccgaacaacgcgccatcctgttcacgtttgctccacctccgatcgatggtttggggacggccggcggatttcaaatggaagtccaagaccgcggcagcaatggctaccttccgttgcaaaacgcgacggaagaactcgtcgccaacgcatccacccaatccagtttggcagctctgaacagttccttccgagccaccgtccctcaactctacgtggatgttgaccgagaaaaagcgaagacgatggacattccgctgagcagcgtgttcgcgaccttgcaagcatcgctgggttcgtcctacatcaacgacttcactcttaataatcgttcgtatcaagtccgagcgcaggccgaagcaccgtttcgacgatccgcttcggacatcacgcagctcgatgtacgtgacagcaatggcaacatgatcccactcggatcgatcgtgacggtgcgagatgattttgggcctgacgtggtacgtcgatacaacatgtacccgagcgccgccgtcaatggttccgcagcacccggcgtcagctccggaaccgcactggagctgatggaacaaacggctgatcaaaccctacccgcttcattctcttacgaatggacggggatgtcattccaagaaaaacaagcctccggtggtcagtacttgatcttcggcctggcaattttgttcgtcttcttggttcttgccgcacagtacgaaagctggaccagccccgccgcggtcatcgcagtcgtgcctctggccgctctcggtgttgccttgtcgctgatgcttcgaggaagcgataacaacacctacactcaaattggaattgtgttgctggtcgctctggccagcaagaacgcaattctgattgtggagtttgccagcgaacaacgtgctgaggggaaatccccccgcgatgcagcgaccacggcagccaagcttcgattccgagccatcctgatgacggcgttttcgtcgatccttggtttcttaccgctcctggttgcgaccggtgccggtgctgccagtcgccaagcggttggaaccgcggttgtcggcggcatgatcgccgccaccgtcttcgcgctgctactcgtccccacgttctttgtcgtcttccgaacgctgtccgaacgaatggcacccaagtccgacaattga

SEQ ID NO: 2710 - protein, 1037 aa, Rhodopirellula baltica SH 1
MSKFFIYRPIFATVISIVIVIAGAVSFFGLPIEKFPPITPPTVQVTAVYPGANARTVAETVAAPIEQAVNGVEGMIYMSSTSTNEGLYTLTVTFELGMDLDIASVLVQNLVGSAEASLPQEVRQQGITTKKRSTQTLQFIALTSPGGAHDGLFLSNFSLDVRDEISRIKGVGDVQSFGDGDYSMRVWLDPRLLKQRGLTTEDVVSVISEQNVQVAAGQIGAPPAESGTAFQFSVNTQGRFSSVEQFQDIIVRTGDNGEVLRLGDLARIELGAEAYTYSSSFTGDAAATLAIYQLPGANALETAEAIRIKMDELSSAANWPDDVEYQVAYDATEFVTASITEVYKTLAMAIALVVFVIFVFLQDWRATVVPVAAIPVSLIGTFAIMAGIGFSLNMLSLFGIVLAIGIVVDDAIVVVENVSRHIADGLSSRDAAVKAMSEITGPVIATTLVLLAVFVPCAFMPGITGELFRQFALTISASVIISTINALTLSPALCAIFLRPPTETKFIGFRLFNQAFERTTAIYGATVARLVRLTLVVSVASIALVMATGWILTQLPTGFVPDEDQGVLFVNVQLPDAASKERTDEVIKDLDQIFEQTPGVHGWLSVTGYSLLGGSGGPNVGFSVLVLKPWEDRDAKTESVTAIQQYIQQKFASEQRAILFTFAPPPIDGLGTAGGFQMEVQDRGSNGYLPLQNATEELVANASTQSSLAALNSSFRATVPQLYVDVDREKAKTMDIPLSSVFATLQASLGSSYINDFTLNNRSYQVRAQAEAPFRRSASDITQLDVRDSNGNMIPLGSIVTVRDDFGPDVVRRYNMYPSAAVNGSAAPGVSSGTALELMEQTADQTLPASFSYEWTGMSFQEKQASGGQYLIFGLAILFVFLVLAAQYESWTSPAAVIAVVPLAALGVALSLMLRGSDNNTYTQIGIVLLVALASKNAILIVEFASEQRAEGKSPRDAATTAAKLRFRAILMTAFSSILGFLPLLVATGAGAASRQAVGTAVVGGMIAATVFALLLVPTFFVVFRTLSERMAPKSDN

SEQ ID NO: 2711 - DNA, 3069 bp, Bordetella pertussis Tohama I
  CDS (1)..(3069): transl_table=11
gtgagcccgtcgcgcctgttcatcctgcggccggtcgccaccaccttgtcgatggtggcgatcctgatcgccggcctgatcgcctatcggctgctgcccgtgtcggcgctgcccgaagtcgactatccgaccatccaggtggtcacgctgtatcccggcgccagccccgatgtgatgacctcgctggtgacctcgccgctggagcgccagttcggccagatgccgggcctgaaccagatgtcgtccaccagctccggcggcgcgtcggtcatcacgctgcagttcagcctcgacctgtcgctggacgtggccgagcagcaggtgcaggcggccatcaacgcggcctccaacctgctgcccaacgatctgccggtgccgcccacctacaacaaggtcaacccggccgacgcggccgtgctgaccctggcggtgacctcgcccaccatgccgctgccgcaggtgcgcgacctggtcgatacgcgcatggcccagcggctgtcgcagattcccggcgtgggcctggtcagcgtggcgggcgggcagcgcccggcggtgcgggtacaggtcaatccgcaggccctggcctcggccggcctgagcctggcggacctgcgcacggcggtggtcggcgccaacgtcaatcagcccaagggcaacctggacgggccgatccgctccaccaccatcaacgccaacgaccagctgaagtcgcccaccgactacaacgacctgatcatcgcctaccgcaacgacgcgccgctgcgcctgtccgacgtggcgcgcgcggtgcagggcgccgaggacatccgccaggcggcctgggtgggcgacaagcccgccatcctgctgaacgtgcagcgccagcccggcgccaacgtgatcgacgtggtggactgcatccatgccttgctgccgcagctgcgcgccgcgatgccggccacgctggacctggtggtggtggccgaccgcacccagaccatccgcgactcggtggccgacgtgcagttcgagatgctgctggcggtggggctggtggtgctggtcacgttcctgttcctgcgcagcctcacggctaccgtgatccccagcgtggtggtgccgctgtcgctgatcggcacgttcggcatcatgtacctggccggcttcagcatcaacaacctgaccctgatggcgctgaccatcgcgaccggcttcgtggtcgacgacgccatcgtcatgatcgagaacatcgcgcgccacctggaagagggcgagacgcccctgcaggcggcgctcaagggcgccgcgcagatcggcttcacgctgatttcgctgaccttctcgctgatcgccgtgctgattccgctgctgttcatgaccgaggtggtggggcggctgttccgcgagttcgcggtgacgctggccgtggcgatcctgatctcgctggtggtgtcgctgacgcttacgccgatgatgtgcgcgcgcctgctgcggcccgagtccgagcagcgccatgggcgctttcaccaggccaccggcgcgctgatcgaccgcgtgatcgccggctacgaccgcatgctgctggtggcgctgggcaccttcgcgctgacggtgctgctgtacatcgtcgtgcccaagggcttctttccgcagcaggacagcgggctgatccaggccatcacgcaggcgccgcagaccatctcgttcgccgccatgtcgcagcgccagcaggaggccgcgcgcatcatcgtgcaggatcccgacgtggccgccgtgtcctcgttcatcggcgtcgacggcagcaaccccacgctgaacaacggccgcatgcagatcgccctcaagccgcagagcgagcgcagcggcgatctcaagaccgtgatggcgcgcctgcaggacgcgctgcatggcgggaccgacctgggcctgacggtgtacatgcagccggtgcaggacctgaccatcgaggaccgcgtcagccgcacgcaataccagatgacgctgtccaaccccgacctggccgtgctcagcgagtgggcgcccaggctggtcgagcggctgcgccaggtgccgcagcttgccgacgtcacctacgacctgcaggaccagggcctgcagacctgggtcgagatcgatcgcgacgccgcctcgcggctggggatcaccgccgcggtgatcgacgaggcgctttatgacgcattcggccagcggctgatttccaccgtcttcacgcagtccaaccagtaccgggtggtgctggaggtgctgccgcagttccgccagtcgccccagtcgctggaccatatccatgtgccgacggcttccggcgcgcaggtgccgctgtcgtcggtcgcgcgcatttccgaggggcgcacggtgctggcggtcaaccggctcgaccagttccccatgaccacggtgtcgttcaacctggcgcccggggcctcgctgtcgggcgcggtcgaggcgatttcggccgtgcaggccgaaatcgggctgccgctggcgatcgacacgcgcttccagggggcggcgctggcgttccagaattcgctcgacagcacgctgtggctgatcctggccgcggtggtcaccatgtacatcgtgctgggcatcctgtatgaaagctacatccacccgatcacgatcctgtccaccctgccttcggccggggtgggggcgctgctggccctgctgatcagcggcaccgacctggacatgataggcatcatcggcatcatcctgctgatcggcatcgtcaagaagaacgccatcatgatgatcgacttcgccctggaggccgagcgcaagcgcgggctggcgccgcgcgaagccatccacgaggcggcgctgctgcgctttcggcccatcctgatgacgacgctggcggccctgttcggcgcgctgccgctgatgctctcgaccggcaccggggccgagctgcgccagcccctggggctggtgatggtgggcgggctgctcgtcagccaggtgctgacgctgttcaccacgccggtgatctacctcatgtttgaccggctggcgcgccgtcgcggcggcgccggcgcggccgcgcggcaggcgccatga

SEQ ID NO: 2712 - protein, 1022 aa, Bordetella pertussis Tohama I
MSPSRLFILRPVATTLSMVAILIAGLIAYRLLPVSALPEVDYPTIQVVTLYPGASPDVMTSLVTSPLERQFGQMPGLNQMSSTSSGGASVITLQFSLDLSLDVAEQQVQAAINAASNLLPNDLPVPPTYNKVNPADAAVLTLAVTSPTMPLPQVRDLVDTRMAQRLSQIPGVGLVSVAGGQRPAVRVQVNPQALASAGLSLADLRTAVVGANVNQPKGNLDGPIRSTTINANDQLKSPTDYNDLIIAYRNDAPLRLSDVARAVQGAEDIRQAAWVGDKPAILLNVQRQPGANVIDVVDCIHALLPQLRAAMPATLDLVVVADRTQTIRDSVADVQFEMLLAVGLVVLVTFLFLRSLTATVIPSVVVPLSLIGTFGIMYLAGFSINNLTLMALTIATGFVVDDAIVMIENIARHLEEGETPLQAALKGAAQIGFTLISLTFSLIAVLIPLLFMTEVVGRLFREFAVTLAVAILISLVVSLTLTPMMCARLLRPESEQRHGRFHQATGALIDRVIAGYDRMLLVALGTFALTVLLYIVVPKGFFPQQDSGLIQAITQAPQTISFAAMSQRQQEAARIIVQDPDVAAVSSFIGVDGSNPTLNNGRMQIALKPQSERSGDLKTVMARLQDALHGGTDLGLTVYMQPVQDLTIEDRVSRTQYQMTLSNPDLAVLSEWAPRLVERLRQVPQLADVTYDLQDQGLQTWVEIDRDAASRLGITAAVIDEALYDAFGQRLISTVFTQSNQYRVVLEVLPQFRQSPQSLDHIHVPTASGAQVPLSSVARISEGRTVLAVNRLDQFPMTTVSFNLAPGASLSGAVEAISAVQAEIGLPLAIDTRFQGAALAFQNSLDSTLWLILAAVVTMYIVLGILYESYIHPITILSTLPSAGVGALLALLISGTDLDMIGIIGIILLIGIVKKNAIMMIDFALEAERKRGLAPREAIHEAALLRFRPILMTTLAALFGALPLMLSTGTGAELRQPLGLVMVGGLLVSQVLTLFTTPVIYLMFDRLARRRGGAGAAARQAP

SEQ ID NO: 2713 - DNA, 3087 bp, Bordetella bronchiseptica RB50
  CDS (1)..(3087)
atggtgctctcggaaatctgcatccgccggccggtcttcgcgtcggtgctctcgctgatcatcgtcctgatcggccttatttcgtatacgcgcctgagtgtgcgcgaatatcccaagatcgacgagcccatcgtctcggtcgacaccacctacaagggcgcctcgcccgaggtgatcgagtcgcaggtcaccaagcccctggaagaccagctggcgggcatcgagggcgtggacgtgatgacctcgcgcagccgctccgagcgcagcctgatcaacatcaagttcagcctctcgcgcgatccggacgccgcggccgccgaagtgcgcgacaaggtatcgcgggcgcgccgcttcctgcccgacgagatcgacgagcccatcatcggcaaggtcgaggccgattcccagcccatcatctacatcgcggtcgaatccggctcgtactcggccatccagacctcggactacatcaaccgctatatcaagacccgcctgtcggtgctgccgggcgcggccgaggtgcgcgtgttcggcgaacgcctgccgtcgatgcgcatctacgtggaccgcgacaagctggcggcctacgggctgacggtgcaggacgtggaggcggcgctgcgcagccagaacgtggagatcccggccgggcgcatcgaatcgcgcgcgcgcgaattctcggtggtgtcctcgaccgacctgcagacgccggcccagttcgaggatgtggtggtggccaacgtcaagggctatccggtgcgcctgcgcgacgtggccaaggtggagatcggcgcggccaatgatcgcgtgctgtcgcgctacaacgggcgttcggccatcaatatcggcctgacgcgccagtccaccgccaatccgctggagctctccaaggcggtgcgcgccgagatcgtgcagctcaaccagagcctgccggccggaatgaagctgaacatcgcctatgactcgtcggtgttcatcgagcgctcgatcgactcggtgttcaagaccatcggcgaagccatcatcctggtggtgctggtgatcttcttcttcctgcgcaacctgcgcgccagcatcatccccatcgtcaccatcccggtatcgctggtgggcgcctgcgccctgatgtacctgttcggcttttcgatcaacaccctgaccctgctcgcgatggtgctggccatcgggctggtggtcgacgacgccatcgtggtgctggagaacatcttccggcacatcgaggaaggcatgccgcgcaagcaggcggcgttccaggggtcgcgcgagatcggcttcgcggtggtggcgatgaccctgaccctggtcacggtgtacgcgccgctggcgttcgccaccggccgcaccgggcggctgttcatcgaattcgcgctggcgctggcgggcgccgtgctggtgtcgggcttcgtggcgctgacgcttacccccatgatgtgctcggtgctgctgcggcaccagcacagccacaatcgctggtacaacctgatcgagggctggctggaagcgctggggcgcggctaccggcgcgcgctggagctggccttgcgccatcgctggacggtggtgggcgtgggcgccgtggtggcggccgccagcggggtgctgttctcggtggtcaagagcgaactggccccgatcgaggaccgcggcgtcgtgttcggcatcgtcagcgcgcccgaaggcgccacgctgaactacacgctcgacagcatgctgggcatcgaacagttctacgccgccatcccggaggccgccaccgcccaggtgacggtgggctttccgacggtcaccgacggcacggccatcctgcgcctgacgccctgggaggagcgcacccggcgccagcagcagatcgcccaggagctgcagcccaagttcgcgtcgctgccgggcgtgcgggcgttcccgaccaatccgccctcgctggggcagtcggcccgttccaagccggtggaattcatcatcatgagccaggcctcgtatcccgagctggccaagctggtcggcgtgttcaccaatgcgctgcgcgactatcccggcctgcagaacatcgataccgacctgcgcctgaacacccccgaactgcgcgtgcacgtcgatcgcgacaagatggccgacgtgggggccagcgtcgaagtggtcgggcgcaccctggaatccatgctgggggggcggcaggtcacgcgctacaaggaccagggcgaacagtacgacgtgatcgtgcaggtggtgcagggcgaccgcgccacgcccaccgacatctcgggcatttacgtgcgggcgcgcgatggcagcatggtgcagctggacaacctgctgtcggtgcgcgaaagcgtgtcgccgcagtcgctcaaccacttcaaccgcttgcgcgcggtcaaggtcgacgcggcggtggcgccgggctatgcgctgggcgaagtgctcgaccacatgcaccgggtggcgcgcgacgtgctgcccaatacggtgatcaccgacctcgatggccagtcgcgcgagttccgcgactcgtcgggcagcatctacctggtgtttgccatggcgctggccttcatctacctggtgctggcggcccagttcgagagctggcgcaatcccttcatcatcatgctgtcggtgccgctgtcgatgaccggggcgttgctggcgctgtggctgaccggcggcacgctgtccatctacagccagatcggcctgatcaccctggtggggctgatcaccaagcacggcatcctgatcgtcgaattcgccaaccagctgcgcgaccagggcaaggccatgcacgaggccgtggtcgaggccagcgtgctgcgcctgcgtcccatcctgatgacgaccggcgccatggtgctgggcaccgtgccgctggcgctggcgcagggcgcgggcgccgaatcgcgccagcagatcggctgggtgctggtcggcgggctgatgctgggtacactactgactttgttcgtggtgccggtggcgtattcgatgatcgccgcggcgcgcccgcaagggcagcgcaccggcgccagccataccgggccggccgtcgcgccgcccgcctcggagtag

SEQ ID NO: 2714 - protein, 1028 aa, Bordetella bronchiseptica RB50
MVLSEICIRRPVFASVLSLIIVLIGLISYTRLSVREYPKIDEPIVSVDTTYKGASPEVIESQVTKPLEDQLAGIEGVDVMTSRSRSERSLINIKFSLSRDPDAAAAEVRDKVSRARRFLPDEIDEPIIGKVEADSQPIIYIAVESGSYSAIQTSDYINRYIKTRLSVLPGAAEVRVFGERLPSMRIYVDRDKLAAYGLTVQDVEAALRSQNVEIPAGRIESRAREFSVVSSTDLQTPAQFEDVVVANVKGYPVRLRDVAKVEIGAANDRVLSRYNGRSAINIGLTRQSTANPLELSKAVRAEIVQLNQSLPAGMKLNIAYDSSVFIERSIDSVFKTIGEAIILVVLVIFFFLRNLRASIIPIVTIPVSLVGACALMYLFGFSINTLTLLAMVLAIGLVVDDAIVVLENIFRHIEEGMPRKQAAFQGSREIGFAVVAMTLTLVTVYAPLAFATGRTGRLFIEFALALAGAVLVSGFVALTLTPMMCSVLLRHQHSHNRWYNLIEGWLEALGRGYRRALELALRHRWTVVGVGAVVAAASGVLFSVVKSELAPIEDRGVVFGIVSAPEGATLNYTLDSMLGIEQFYAAIPEAATAQVTVGFPTVTDGTAILRLTPWEERTRRQQQIAQELQPKFASLPGVRAFPTNPPSLGQSARSKPVEFIIMSQASYPELAKLVGVFTNALRDYPGLQNIDTDLRLNTPELRVHVDRDKMADVGASVEVVGRTLESMLGGRQVTRYKDQGEQYDVIVQVVQGDRATPTDISGIYVRARDGSMVQLDNLLSVRESVSPQSLNHFNRLRAVKVDAAVAPGYALGEVLDHMHRVARDVLPNTVITDLDGQSREFRDSSGSIYLVFAMALAFIYLVLAAQFESWRNPFIIMLSVPLSMTGALLALWLTGGTLSIYSQIGLITLVGLITKHGILIVEFANQLRDQGKAMHEAVVEASVLRLRPILMTTGAMVLGTVPLALAQGAGAESRQQIGWVLVGGLMLGTLLTLFVVPVAYSMIAAARPQGQRTGASHTGPAVAPPASE

SEQ ID NO: 2715 - DNA, 3102 bp, Bordetella bronchiseptica RB50
  CDS (1)..(3102): transl_table=11
gtgagcccgtcgcgcctgttcatcctgcggccggtcgccaccgccttgtcgatggtggcgatcctgatcgccggcctgatcgcctatcggctgctgcccgtgtcggcgctgcccgaagtcgactatccgaccatccaggtggtcacgctgtatcccggcgccagccccgatgtgatgacctcgctggtgacctcgccgctggagcgccagttcggccagatgccgggcctgaaccagatgtcgtccaccagctccggcggcgcgtcggtcatcacgctgcagttcagcctcgacctgtcgctggacgtggccgagcagcaggtgcaggcggccatcaacgcggcctccaacctgctgcccaacgatctgccggtgccgcccacctacaacaaggtcaacccggccgacgcggccgtgctgaccctggcggtgacctcgcccaccatgccgctgccgcaggtgcgcgacctggtcgatacgcgcatggcccagcggctgtcgcagattcccggcgtgggcctggtcagcgtggcgggcgggcagcgcccggcggtgcgggtacaggtcaatccgcaggccctggcctcggccggcctgagcctggcggacctgcgcacggcggtggtcggcgccaacgtcaatcagcccaagggcaacctggacgggccgatccgctccaccaccatcaacgccaacgaccagctgaagtcgcccaccgactacaacgacctgatcatcgcctaccgcaacgacgcgccgctgcgcctgtccgacgtggcgcgcgcggtgcagggcgccgaggacatccgccaggcggcctgggtgggcgacaagcccgccatcctgctgaacgtgcagcgccagcccggcgccaacgtgatcgacgtggtggaccgcatccatgccttgctgccgcagctgcgcgccgcgatgccggccacgctggacctggtggtggtggccgaccgcacccagaccatccgcgactcggtggccgacgtgcagttcgagatgctgctggcggtggggctggtggtgctggtcacgttcctgttcctgcgcagcctcacggctaccgtgatccccagcgtggtggtgccgctgtcgctgatcggcacgttcggcatcatgtacctggccggcttcagcatcaacaacctgaccctgatggcgctgaccatcgcgaccggcttcgtggtcgacgacgccatcgtcatgatcgagaacatcgcgcgccacctggaagagggcgagacgcccctgcaggcggcgctcaagggcgccgcgcagatcggcttcacgctgatttcgctgaccttctcgctgatcgccgtgctgattccgctgctgttcatgaccgaggtggtggggcggctgttccgcgagttcgcggtgacgctggccgtggcgatcctgatctcgctggtggtgtcgctgacgcttacgccgatgatgtgcgcgcgcctgctgcggcccgagtccgagcagcgccatgggcgctttcaccaggccaccggcgcgctgatcgaccgcgtgatcgccggctacgaccgcatgctgcaggtggtgctgcgccaccagccgctgacgctgctggtggcgctgggcaccttcgcgctgacggtgctgctgtacatcgtcgtgcccaagggcttctttccgcagcaggacagcgggctgatccaggccatcacgcaggcgccgcagaccatctcgttcgccgccatgtcgcagcgccagcaggaggccgcgcgcatcatcgtgcaggatcccgacgtggccgccgtgtcctcgttcatcggcgtcgacggcagcaaccccacgctgaacaacggccgcatgcagatcgccctcaagccgcagagcgagcgcagcggcgatctcaagaccgtgatggcgcgcctgcaggacgcgctgcatggcgggaccgacctgggcctgacggtgtacatgcagccggtgcaggacctgaccatcgaggaccgcgtcagccgcacgcaataccagatgacgctgtccaaccccgacctggccgtgctcagcgagtgggcgcccaggctggtcgagcggctgcgccaggtgccgcagcttgccgacgtcacctacgacctgcaggaccagggcctgcagacctgggtcgagatcgatcgcgacgccgcctcgcggctggggatcaccgccgcggtgatcgacgaggcgctttatgacgcattcggccagcggctgatttccaccgtcttcacgcagtccaaccagtaccgggtggtgctggaggtgctgccgcagttccgccagtcgccccagtcgctggaccatatccatgtgccgacggcttccggcgcgcaggtgccgctgtcgtcggtcgcgcgcatttccgaggggcgcacggtgctggcggtcaaccggctcgaccagttccccatgaccacggtgtcgttcaacctggcgcccggggcctcgctgtcgggcgcggtcgaggcgatttcggccgtgcaggccgagatcgggctgccgctggcgatcgacacgcgcttccagggggcggcgctggcgttccagaattcactcgacagcacgctgtggctgatcctggccgcggtggtcaccatgtacatcgtgctgggcatcctgtatgaaagctacatccacccgatcacgatcctgtccaccctgccttcggccggggtgggggcgctgctggccctgctgatcagcggcaccgacctggacatgataggcatcatcggcatcatcctgctgatcggcatcgtcaagaagaacgccatcatgatgatcgacttcgccctggaggccgagcgcaagcgcgggctggcgccgcgcgaagccatccacgaggcggcgctgctgcgctttcggcccatcctgatgacgacgctggcggccctgttcggcgcgctgccgctgatgctctcgaccggcaccggggccgagctgcgccagcccctggggctggtgatggtgggcgggctgctcgtcagccaggtgctgacgctgttcaccacgccggtgatctacctcatgtttgaccggctggcgcgccgtcgcggcggcgccggcgcggccgcgcggcaggcgccatga

SEQ ID NO: 2716 - protein, 1033 aa, Bordetella bronchiseptica RB50
MSPSRLFILRPVATALSMVAILIAGLIAYRLLPVSALPEVDYPTIQVVTLYPGASPDVMTSLVTSPLERQFGQMPGLNQMSSTSSGGASVITLQFSLDLSLDVAEQQVQAAINAASNLLPNDLPVPPTYNKVNPADAAVLTLAVTSPTMPLPQVRDLVDTRMAQRLSQIPGVGLVSVAGGQRPAVRVQVNPQALASAGLSLADLRTAVVGANVNQPKGNLDGPIRSTTINANDQLKSPTDYNDLIIAYRNDAPLRLSDVARAVQGAEDIRQAAWVGDKPAILLNVQRQPGANVIDVVDRIHALLPQLRAAMPATLDLVVVADRTQTIRDSVADVQFEMLLAVGLVVLVTFLFLRSLTATVIPSVVVPLSLIGTFGIMYLAGFSINNLTLMALTIATGFVVDDAIVMIENIARHLEEGETPLQAALKGAAQIGFTLISLTFSLIAVLIPLLFMTEVVGRLFREFAVTLAVAILISLVVSLTLTPMMCARLLRPESEQRHGRFHQATGALIDRVIAGYDRMLQVVLRHQPLTLLVALGTFALTVLLYIVVPKGFFPQQDSGLIQAITQAPQTISFAAMSQRQQEAARIIVQDPDVAAVSSFIGVDGSNPTLNNGRMQIALKPQSERSGDLKTVMARLQDALHGGTDLGLTVYMQPVQDLTIEDRVSRTQYQMTLSNPDLAVLSEWAPRLVERLRQVPQLADVTYDLQDQGLQTWVEIDRDAASRLGITAAVIDEALYDAFGQRLISTVFTQSNQYRVVLEVLPQFRQSPQSLDHIHVPTASGAQVPLSSVARISEGRTVLAVNRLDQFPMTTVSFNLAPGASLSGAVEAISAVQAEIGLPLAIDTRFQGAALAFQNSLDSTLWLILAAVVTMYIVLGILYESYIHPITILSTLPSAGVGALLALLISGTDLDMIGIIGIILLIGIVKKNAIMMIDFALEAERKRGLAPREAIHEAALLRFRPILMTTLAALFGALPLMLSTGTGAELRQPLGLVMVGGLLVSQVLTLFTTPVIYLMFDRLARRRGGAGAAARQAP

SEQ ID NO: 2717 - DNA, 3102 bp, Chromobacterium violaceum ATCC 12472
  CDS (1)..(3102): transl_table=11
atgaatccctcccgtccgttcattatgcggccggtggccaccaccttgctgatggtggccatcctgctgaccggcctggtggcctggcggatgctgccggtatcggcgctgccggaagtcgattacccgaccatccaggtggtgacgctctaccccggcgccagtcccgacgtgatgacctcgtcggtcaccgccccgctggagcgccagttcggccagatgccgggcctgtcgcagatgtcgtcgtccagctccggcggcgcctcggtgatcacgctgcagttcagcctggacctgacgctggacgtcgctgagcaggaagtgcaggcggcgatcaacgccgccggcaacctgctgccgtccgacctgcccagcccgccggtctacaacaaggtcaacccggccgatacgcccatcctgaccatcgccgtcagttcgcccaccatgccgctgaccaagcttgaggacatggtggacacccgtctggcgcaaaagctgtcgcaggtgcagggtgtcggcctagtcagcatcagcggcggccagcgcccggccgtgcgcatccagagcaatcccaaggcgctggcctcgcgcgggctgacgctggaggacatccgcaccgccatcgccagcgccaacgtcaaccaggccaagggcagcttcgacggcccgagccaggcctccaccgtggacggcaacgaccagctgcagtccgcggacgagtacaagaacgtcatcatcgcctaccagaacggcgcgccggtctacctcagggacgtggccaaggtggtggaatcggccgagaacacccggctggccgcctggtccggcaccacgccgtccatcatactcaacgttcagcgtcagcccggcgccaacgtgatccaggtgaccaaccgcatcaagtcgctgctgccgcagttgcagggcacgctgcccggctcggtggacgtgcacgtgctgagcgaccgcaccgtgaccatccgcgcctcggtggaggacgtggagttcgagctgatgctggccatcgcgctggtggtgatggtgatcttcgtcttcctgcgcaacgtgccggccaccatcattccggcggtggcggtgccgctgtcgctggtgggcaccttcggcgtgatgtacctgaccggcttttccatcaacaacctgacgttgatggcgctgaccatcgccaccggcttcgtcgtcgacgacgccatcgtgatgatagagaacatcgcccgctacatcgaggaaggcgacaagccgctggaggcggcgctgaagggctccaaacagatcggcttcaccatcatctcgctgaccatctcgctgatcgcggtgctgatcccgctgctgttcatgggcgacgtggtgggccggctgttccgcgaattcgccatcacgctggcggtgtccatcctgatctccgccttcatctcgctgacgctgacgccgatgatgtgcgcgcggttgctcaagcacgtgccagaggaaaagcagggccgcttctaccacgccagcggcaagttcttcgacgacatcatcgccggctacggcaagatgctggcctgggtgctggacaggcagaagaccaccctgctggtggcggtcggcaccgtggcgctgaccgcggcgctgtatgtctgggtgcccaagggcttcttcccgctgcaggacaccggcgcgatacaaggcatcagcgaggcgtcgcagtccatctccttcagcgcgatggccgaccgtcaggaaaaattggccgaggcgctgctgaaagacccggcggtggacagcctgtcttccttcatcggcgtcgacggcaccaacgccacgctgaacagcggccgcctgctgatcaacctcaagcccaagggagagcgcgacgacatccgcaccgtgctcgcgcggctgcagcagcgcgccggcgacgtgccgggcatgtcgctgtacctgcaggcggtgcaggacctgaccatcgacgcccgcgtcagccgcacccaataccagttcacgctgcaggccaccagccaggacgatctgtcgacctgggtgcccaagctggtgcgccggctgcagcaagagccagcgctggccgacgtcgccagcgacctgcaggacaagggcctgcaagcctacgtcaacatcaaccgcgacgtcgcctcccgcctgggcgtcaccaccgccgcgatcgacaacgcgctgtacgacgccttcggccagcggctgatctccaccatcttcacccagaccaaccagtaccgcgtggtgctggaggtggacaaggaccaccagcgcgatccgctgtcgctgaagggcatctacgtgcccaccgccagcggcggaccggtgccgctgaacgcggtggccagcatagaggagcgtccgacctcgctggcgatcaaccacctgggccaattccccaccgccaccatttccttcaacctgaaagctggcgcgtcgctgggcgaggcggtggacgccatccgccaggccgaagccgagctgggcctgccggccagcatggacaccaagttccagggcgcggccatggccttccaggcgtcgctgtccaacacgctgtggctgatcctggccgccatcgtcaccatgtacatcgtgctgggcgtgctgtacgagagctatatccatccgatcacgattctctccaccctgccctcggccggcatcggcgcgctgctggcgctgatggtgtccggcaccgacctgtcggtgatcgccatcatcggcatcatcctcctgatcggcatcgtgaagaagaacgccatcatgatgatagacttcgcgctggaggccgagcgcgaacagggcatggcgccgcgcgaagccatctaccaggcctgtctgctgcgcttccgccccatcctgatgaccacgatggcggcgctcttgggcgcgctgccgctgatgatgggcggcggcatgggctcggagctgcgccagccgctgggcatcaccatggtgggcggcctgatggtcagccaggtgctgacgctgttcaccaccccggtgatctacctggccttcgaccggctggcgcggcgcttcggccgcaaggacaagcccgagcttgcggaagaggtggacgcatga

SEQ ID NO: 2718 - protein, 1033 aa, Chromobacterium violaceum ATCC 12472
MNPSRPFIMRPVATTLLMVAILLTGLVAWRMLPVSALPEVDYPTIQVVTLYPGASPDVMTSSVTAPLERQFGQMPGLSQMSSSSSGGASVITLQFSLDLTLDVAEQEVQAAINAAGNLLPSDLPSPPVYNKVNPADTPILTIAVSSPTMPLTKLEDMVDTRLAQKLSQVQGVGLVSISGGQRPAVRIQSNPKALASRGLTLEDIRTAIASANVNQAKGSFDGPSQASTVDGNDQLQSADEYKNVIIAYQNGAPVYLRDVAKVVESAENTRLAAWSGTTPSIILNVQRQPGANVIQVTNRIKSLLPQLQGTLPGSVDVHVLSDRTVTIRASVEDVEFELMLAIALVVMVIFVFLRNVPATIIPAVAVPLSLVGTFGVMYLTGFSINNLTLMALTIATGFVVDDAIVMIENIARYIEEGDKPLEAALKGSKQIGFTIISLTISLIAVLIPLLFMGDVVGRLFREFAITLAVSILISAFISLTLTPMMCARLLKHVPEEKQGRFYHASGKFFDDIIAGYGKMLAWVLDRQKTTLLVAVGTVALTAALYVWVPKGFFPLQDTGAIQGISEASQSISFSAMADRQEKLAEALLKDPAVDSLSSFIGVDGTNATLNSGRLLINLKPKGERDDIRTVLARLQQRAGDVPGMSLYLQAVQDLTIDARVSRTQYQFTLQATSQDDLSTWVPKLVRRLQQEPALADVASDLQDKGLQAYVNINRDVASRLGVTTAAIDNALYDAFGQRLISTIFTQTNQYRVVLEVDKDHQRDPLSLKGIYVPTASGGPVPLNAVASIEERPTSLAINHLGQFPTATISFNLKAGASLGEAVDAIRQAEAELGLPASMDTKFQGAAMAFQASLSNTLWLILAAIVTMYIVLGVLYESYIHPITILSTLPSAGIGALLALMVSGTDLSVIAIIGIILLIGIVKKNAIMMIDFALEAEREQGMAPREAIYQACLLRFRPILMTTMAALLGALPLMMGGGMGSELRQPLGITMVGGLMVSQVLTLFTTPVIYLAFDRLARRFGRKDKPELAEEVDA

SEQ ID NO: 2719 - DNA, 3105 bp, Chromobacterium violaceum ATCC 12472
  CDS (1)..(3105): transl_table=11
atgattccgtccgcccccttcatccgccgcccggtggccaccacgctgctgacgctggccatcctgctggccggcgccatcgccttcaagctgctgccggtgtcgccgctgccgcaggtggacttccccaccatctcggtgtcggccaagctgcccggcgccagcccggaaacgatggcggccacggtggccacgccgctggagcgcgcgctgggccgcatcgccggcgtcaccgagatgacgtcgaccagctcgctgggctccaccaacgtcacgctgcagttcgacctggaccgcgacatcaacggcgccgcgcgcgacgtgcaggccgccatcaacgccgcccgctcgctgctgcccaccggcatgccgtccaacccgacctaccgcaaggtgaacccggccgacgcgcccatcatgatcctggcgctgacctcggacaccctgagccgcggccagatgtacgacgcggccgactccatcctggggcagaaactgtcgcaggtggacggcatcggcaacgtgatcatcggcggcggcgcgcagccggcggtgcgggtggaaatgaacccgacgcagctgaaccattacggcatcggcatggagacggtgcgcgccgccatcaccagcaccaacgccaaccggcccaagggtttcctggaaaacgacgagcgccactggcaggtgcaggccaacgaccaggccggcaaggccagcgactacctgccgctgatcgtcagctacaagaacggcagcgcggtgcgcatctcggacgtggccgaggtcaaggattcggtggtggacctgcgcaacgccggcatgctgggcaagcagccggcggtgatgctgatcctgttccgccagcccggcgccaacatcatcgaaaccgtcgatcgggtgaaggcgatgctgccgcagttgcaggcgtcgatcccgccgtcgatcaagatcaaccaggtgatggaccgcacgcccaccatccgcgcctcgctgtccgaagtagagcgctcgctggcgatctcgatcgcgctggtgatcctggtggtgttcctgttcctgcgcaacggccgcgccaccgccatcccggccatcaccgtgccggtgtcgctggtgggcaccttcgccatcatgtacctggccggcttttcgctgaacaacctcagcctgatggcgctgaccatcgccaccggcttcgtcgtggacgacaccatcgtggtgctggagaacatctcccgccatatcgagaatggcatgcagccgttccaggcggcgctgcgcggcgcgcgcgaggtcggcttcaccgtgctgtcgatgagcatctcgctgatcgcggtgttcattcccatcctgctgatgggcggcatcatcggccggctgttccgcgaattcgcggtcacgctgtcggtggccatcatggtgtcgctgctggtgtcgctgaccaccacgcccatgctgtgcgcgcgctggctgaagacgcacgacgcgcacaaggctccgggcaagctgttccaatggagcgagcgcgccttcgacgcgatgctgaacggctaccgccgctcgctgtcctgggcgctgcgccacggccggctgatgatggccgtgctcggcgccaccatcgcgctgaacgtgttcctgtacacggtgattgccaagggtttcttcccgcaacaggacaccggccgcctgaccggcatgatcaaggccgaccagagcatctccttccaggcgatgcagggcaagctgcagcgcttcatcaacgtggtcggcgccgatccggcggtggacaaggtggtgggcttcaccggcggcggccagcgcaacagcgccaatatgttcgtcagcctgaagccgctggccgaacgcaaggaaaacgcagatcaggtgatcgcccggctgcgcaagaaactgtccggcgagcccggcgcccagctgttcctgcaatcggtgcaggacatccgcatcggcagccgctccagcaacgcgcaataccagtacacgctgcagggcgacgacctgaacgagctgcgcgaatggacgcccaaggtgcagctggcgatgagcaagattcccttcctggccgacctcaacaacgaccaggaggtgaagggcctgcaaaccacgctcgccttcgaccgcgcggcgatggcgcggctggggctgacccaggcccaggtggactcggtgctgaacgacgctttcggccagcgccaggtctccaccatctacaatccgctcaaccagtaccacgtggtgctggaagtggcgccgcagtactggcagggccctgaaggcctgcgcgacatctatctgcagacgccgggcggccagccgacgccgctgtcggccttcgccagctggcaaccgacccatgccgcgctgtcggtcaaccaccagagccagttcgcggccaccaccatctccttcaacctgccgcccggctactcgctgtccgacgccacccaggcgatagacgcggccatcgccgacatcggcctgcccagcggcatccacgccagcttccagggcacagccaagtcgttccaggcttcgctggacagccagccggtgctgatcctggcggccctggtggcggtgtacatcgtgctgggcatgctgtacgagagcgtggtgcacccgatcaccatcctctccaccctgccctccgccggcgtcggcgcgctgttggcgctgatggccaccggcggcgagttcaacatcatcgcgctgatcggcatcctgctcttgatcggcatcgtcaagaaaaacgccatcatgatgatagatttcgcgctcacggcggagcgcgagcagggtctgccgccgcaggaagccatcctgcaggcctgcctgctgcgcttccgccccatcatgatgaccacgatggccgccctgttcggcgcgttgccgctggcgctgggccgcggagacggcgccgagatgcgtaccccgctgggcatctccatcgtcggcggcctgctgctcagccagctgctgacgctgtacaccacccccatcgtctacctgtacctggaccgcttccgcctgtggtgcctgaagtggcgcggcggccgcggcccggccttggccgccggcaaagaggaatga

SEQ ID NO: 2720 - protein, 1034 aa, Chromobacterium violaceum ATCC 12472
MIPSAPFIRRPVATTLLTLAILLAGAIAFKLLPVSPLPQVDFPTISVSAKLPGASPETMAATVATPLERALGRIAGVTEMTSTSSLGSTNVTLQFDLDRDINGAARDVQAAINAARSLLPTGMPSNPTYRKVNPADAPIMILALTSDTLSRGQMYDAADSILGQKLSQVDGIGNVIIGGGAQPAVRVEMNPTQLNHYGIGMETVRAAITSTNANRPKGFLENDERHWQVQANDQAGKASDYLPLIVSYKNGSAVRISDVAEVKDSVVDLRNAGMLGKQPAVMLILFRQPGANIIETVDRVKAMLPQLQASIPPSIKINQVMDRTPTIRASLSEVERSLAISIALVILVVFLFLRNGRATAIPAITVPVSLVGTFAIMYLAGFSLNNLSLMALTIATGFVVDDTIVVLENISRHIENGMQPFQAALRGAREVGFTVLSMSISLIAVFIPILLMGGIIGRLFREFAVTLSVAIMVSLLVSLTTTPMLCARWLKTHDAHKAPGKLFQWSERAFDAMLNGYRRSLSWALRHGRLMMAVLGATIALNVFLYTVIAKGFFPQQDTGRLTGMIKADQSISFQAMQGKLQRFINVVGADPAVDKVVGFTGGGQRNSANMFVSLKPLAERKENADQVIARLRKKLSGEPGAQLFLQSVQDIRIGSRSSNAQYQYTLQGDDLNELREWTPKVQLAMSKIPFLADLNNDQEVKGLQTTLAFDRAAMARLGLTQAQVDSVLNDAFGQRQVSTIYNPLNQYHVVLEVAPQYWQGPEGLRDIYLQTPGGQPTPLSAFASWQPTHAALSVNHQSQFAATTISFNLPPGYSLSDATQAIDAAIADIGLPSGIHASFQGTAKSFQASLDSQPVLILAALVAVYIVLGMLYESVVHPITILSTLPSAGVGALLALMATGGEFNIIALIGILLLIGIVKKNAIMMIDFALTAEREQGLPPQEAILQACLLRFRPIMMTTMAALFGALPLALGRGDGAEMRTPLGISIVGGLLLSQLLTLYTTPIVYLYLDRFRLWCLKWRGGRGPALAAGKEE

SEQ ID NO: 2721 - DNA, 3132 bp, Rhodopseudomonas palustris CGA009
  CDS (1)..(3132): transl_table=11
atgggcgtatccgagccgttcatccgacgtccgatcgcgacctcgctgcttggcgtggcgctgatgatcggcggtctgctcggctatttggcgctgccggtgtcggccttgccgcaggtcgatttcccgaccgtgcaggtgtcgacgcaattgccgggggcgagccctgacgtggtggcgtcgctgatcaccgcgcccttggagcggcagctcggccagattccgtcgctgacggcgatgacatcgacttcgtcctatggcgtcagccaggtgtcgctgcagttcgatctcaaccgcgatatcgacggcgccactcaggacgtgcaggcggcgatcaatgcggctgccggcattctgccgaagaacctgccgtacccgccggtctatgccaaagtgaatccggccgatgcgccggtgatgacgctggcgctgacctcgaccacggtgtcgctgcgcaccatgagcgaccttgccgacacgctgatggcgcagcggctggcgcagatctccggtgtcggccgggtctcggtgctcggcgggctgaagccggcggtgcgggtgcaggccgatctggcccggctcgccgcctacggcatctcgatggaagacctgcgcacggcgatcgccaacgccaacgtgtcgggccccaagggctcgctcgacggcgcgcagcaggcctacaccatcgcggcgaacgaccagattgcggctgcggatgcgtaccggccgatcatcgtggcgtatcgcaatggctcgccggtgacgatcggcgacgtcgcgcagatcgtcgacgggctggagaacgagcgcaccggcgcctggtaccaaggcacaccggcggtgatcctcgacattcagcgccagcccggcgccaacgtcatcgacgtggtcaagggcatccgcgccgagatcccgcggatccagcggctggtgccggccggcgtcaagctcaccgtggtcagcgaccgcaccgagaccattcgcgcctcggtgcacgacgtgcagttcacgctgctgctcagcgtggtgctggtgacgctggtggtgctgctgttcctgcgctcgatgcgcgccaccatcattgccggcgtggcgctgccgctgtcgctgatcaccagcttcggcgtgatgtatttcatgggcttcagcctcgacaatctgtcgctgatggcgctgacgatcgggaccggctttgtggtcgacgacgccatcgtgatgatcgagaacatcgtccgtcatatggaggacggcgagagcccgatgcaggcggccctgaagggcgccagcgagatcggcttcaccgtgatctcgctgacgatgtcgctgatcgcagtgttcatcccgctgctgttcatgtccgggctggtcggccggatgttccgcgaattcgcgctgacgctgacgatcgcggtcgtcacctcggcgatcgtgtcgctgacgttgacgccgatgatgtgttcgcggctgctcaagcacgcccgcgacgagcgtcaggtgccggggcttgccaccatcaccgcctggatcgatcgcggcgcggaagcatatcaccgcagtctgctgtgggtgctgaagcatcagcgcgccacgctggtggtgacgttcctgaccatcgcggcgacgctggtgctgtatgcgatcgcgccgaagggcttcctgccgctgcaggacactgcctcgatcaccgcggtgacggaagcgggcccagcggtgtcgttcgccgagatgaaggcgcggcagaccgagaccgcccaggcgatcgaagccgatccggacgtcgtcggcgtggtgtcggtgatcggcgccggctcggtcaatccgacgccgaatgtcggccggctggtgttgacgctgaagccgcgcggcgaccgcaagtccgacgtcggcgaagtgatcgaacggctgaagcagcgcgtcgccggcattcccggcatgaccgtgtacttccaggccgtccaggacgtgcagatttcgacccaggccagccgctcgcagtatcaatacacgctgaccgcgaccgatgcggcgctgctgtcgcaatgggccaatcggctgcttgccgaactgcgccgcgatccgctgttccgcgacgtctcgaccgaagcgcaggagggcggcctgcgggccgcgctcgacgtcaaccgcgaacgcgccggccagcttggcgtcagcgttcaggcgatcaacgacacgctcaacgacgccttcgcgcagcggcagatttcgacgatctacggccaggctaaccagtaccgcgtggtgctggaagcgatgccggtctatcagcaggacccgtcgatcctgtccaagctgtatgtgcccggcaatgccggcgcccaggtgccgatctcggcggtcgccgagttgaagcgcaccatcgcgccgctggcgatctcgcaccaggcccagttcccgtcggtcgcgatgagcttcaatctcgcgcccgatgcgtcgctcggcgaggcgttgaagcggatcgaaaccatcgagaagcagatcgggatgccgggcagcatcgtcggggtgttctatggcgacgccgccgaattctccaaggcgctagccggccagccttggctgatcctggcggcgatcgtggcgatctacatcgtgctcggcgtgctgtacgagagctacatccacccgatcaccattctgtcgacgctgccgtcggccggtgtcggtgcgatcctggcgttgatgctgttcggccaggatctgtcggtgatcggcctgatcggcatcatcctgctgatgggcatcgtcaagaagaacgccatcatgatgatcgacttcgcgctcgaggcggaacgcggacaggggatgtcgtcctacgaggcgatcgtgcaggcgtgccggctgcgtttccggccgatcatgatgacgacgctggctgccttgttcggcgcgctgccgctggcggtcgaaagcggtaccggctctgagctgcggtttccgctcggcatctcgatcattggcggtctgctgctcagccagttgctgacgctgtacaccacgccggtgatctatctggcgctcgaccgcatcaaccggaagctggagcgggcattgccgccagtgccgccggcgacaccatcgccgccgctggccggcgccggggaggggctgtaa

SEQ ID NO: 2722 - protein, 1043 aa, Rhodopseudomonas palustris CGA009
MGVSEPFIRRPIATSLLGVALMIGGLLGYLALPVSALPQVDFPTVQVSTQLPGASPDVVASLITAPLERQLGQIPSLTAMTSTSSYGVSQVSLQFDLNRDIDGATQDVQAAINAAAGILPKNLPYPPVYAKVNPADAPVMTLALTSTTVSLRTMSDLADTLMAQRLAQISGVGRVSVLGGLKPAVRVQADLARLAAYGISMEDLRTAIANANVSGPKGSLDGAQQAYTIAANDQIAAADAYRPIIVAYRNGSPVTIGDVAQIVDGLENERTGAWYQGTPAVILDIQRQPGANVIDVVKGIRAEIPRIQRLVPAGVKLTVVSDRTETIRASVHDVQFTLLLSVVLVTLVVLLFLRSMRATIIAGVALPLSLITSFGVMYFMGFSLDNLSLMALTIGTGFVVDDAIVMIENIVRHMEDGESPMQAALKGASEIGFTVISLTMSLIAVFIPLLFMSGLVGRMFREFALTLTIAVVTSAIVSLTLTPMMCSRLLKHARDERQVPGLATITAWIDRGAEAYHRSLLWVLKHQRATLVVTFLTIAATLVLYAIAPKGFLPLQDTASITAVTEAGPAVSFAEMKARQTETAQAIEADPDVVGVVSVIGAGSVNPTPNVGRLVLTLKPRGDRKSDVGEVIERLKQRVAGIPGMTVYFQAVQDVQISTQASRSQYQYTLTATDAALLSQWANRLLAELRRDPLFRDVSTEAQEGGLRAALDVNRERAGQLGVSVQAINDTLNDAFAQRQISTIYGQANQYRVVLEAMPVYQQDPSILSKLYVPGNAGAQVPISAVAELKRTIAPLAISHQAQFPSVAMSFNLAPDASLGEALKRIETIEKQIGMPGSIVGVFYGDAAEFSKALAGQPWLILAAIVAIYIVLGVLYESYIHPITILSTLPSAGVGAILALMLFGQDLSVIGLIGIILLMGIVKKNAIMMIDFALEAERGQGMSSYEAIVQACRLRFRPIMMTTLAALFGALPLAVESGTGSELRFPLGISIIGGLLLSQLLTLYTTPVIYLALDRINRKLERALPPVPPATPSPPLAGAGEGL

SEQ ID NO: 2723 - DNA, 3138 bp, Rhodopseudomonas palustris CGA009
  CDS (1)..(3138): transl_table=11
atggaccggagcatctcggcgccgttcatccgctacccgatcgcgacctcgctgttgatggcggggatcctgttcctcggtctgatcgcctaccctgcgttgccggtggcgccgctgccgcaggtcgacttcccgaccatccagatttcggccagcctgcccggggccagccctgaaacaatggcctcgtcggtggccacgccgctggagcgtcagctcgcgcagatccccggcatatcgcagatgacgtcgacgagctcgctgggctcgaccgcggtcaccatccagttcgatctcaaccgcaacatcgacgccgccgccaacgacgtccaagcggcgatcaacgccgccggcggccagctgccgaagaacctgccgaacccgccgacctaccgcaaggtcaacccggccgacgcgccgatcctgatcctgtcggcgacctccgacactctgccgctgaccaccgtcagcgacaacgccgacgccaagatcgcccagcagatcagccagatcaccggcgtcgcccaggtgttcatcggcggccagcagaagccggcgatccggatccaggtcgatccggccaagctgatgaccaaggggctgtcgctcgaggacgtccgcgcccagatcgcgatcaccaccgtcgacagtccgaagggcacgctcgacgcgccgaaccgcagctacaccatctacgccaacgaccagctcaccgagtccaaggactggaacgacgtcatcctcgcgtatcgcaacggcggcccgctgcggattcgtgatgtcggtcatgcggtgaccggcccggaggacgccaagaccgcggcctgggccaacggcaagcgcggcgtgttcctggtggtgttcaagcagcccggcgccaacgtcatcgacaccgtcgaccacatcaaggcggaactgccgcggctggtggcgggcattccgccggctatcaaggtcgaggtgatcagcgaccgtaccaccaccatccgcgccgcggtcgaggacgtgcagttcaccctgctgctgaccatcgcgctggtggtgatggtgatcttcctgttcctgcgcagcttctgggcgaccatcatccccagcgtcacggtgccgctggcgctgctcggcgcctgcgcgctgatgtgggcggccggctacacgctcgacaacctgtcgctgatggcgctgacgatctcggtcggcttcgtggtcgacgacgccatcgtgatgctggagaacatcgcccgccacatcgaagaaggcgagaagccgttcaccgcggcactgaagggcgcgcgcgagatcggcttcaccatcgtgtcgatctcgatctcgctggtcgcggtgctgatcccgctgttgttcatgggcggcatcatcggccggctgttccgcgaattcgcggtgacgctggcgatgaccatcgcggtgtcgatgctggtgtcgctgacactgacaccgatgatggcatcgcgcttcatgcggccggccaccgaggtgcgccacggccggatctatcagtggatcgaaggcgccttcgaggcgatgctgcgcgcttatgagcgcggcctcgatctggtgctgcgttggcgcttcacgacgctgatggtgttcttcgccacggtggggctgtccgtctatctgttcgtggcgatcccgaagggcttcttcccgcagcaggacgtcggcatgatcaccgcgacgtcggaagccgcgcaggacatctccttcaccgggatgaagcagcgccaggagcagctcggcgaaatcgtgatggccgatcctgacgtcgacagcgttgcgatgttcatcggcggcagcggcaccgcgctcaacaccgggcgaatgttcatcacgctgaagccgcgcgacgagcgctccggcagcgcgcaggaaatcatcgcgcggctgcggccgaagctggagaaggtcgaaggcgcgcggctgttcatgcaggcggcgcaggacgtccggctcggcggccggccgacccgtacccagtttgaatacacccttcaggacgccaacctcgccgagctcaacgagtgggcgccgaaggtgctggccaagatgcagtcgctgccgcaactgcgcgacgtcgccaccgaccagcagaccgaaggtaccacgctgacgctgacgatcgaccgcgacaccgcctcgcggttcggcatcaagccgcaactaatcgacgacacgctgtatgacgcgttcggccagcgccaggtgacgcaatacttcacccaggtgaacacttaccggatcatcctggaggtgctgccggagctgcagggccggctcgacacgctgaaccagatccacatcaagtcgccgaccagcggcgatcaggtgccgctgtcgacgtttgcgaaatggacgacggtgccggtgcggccgctgtcgatcagccaccagggccagttcccggccaccacgatcagcttcaatctggcgcagggcgtcgcgctcggtcaggcgaccgaagcggtgcaggcggcgatggccgagatgggcgcaccaccgacgctgacgggcagcttccagggcacagcgcaggccttccagcagtcgctatcgacagtgccgctcttgatcgtcgcggcgctggtggtggtctatctgatcctcggcatcttgtacgagagctacatccacccgctgacgattctctcgaccctgccctcggccggcgtcggcgcgctggcgatgctgatgctgttcggcttcgacttcagcctgatcgcgctgatcggcatcatcctgctcatcggcatcgtcaagaagaacggcatcatgatggtcgacttcgccatcactgccgagcgcgacgagcacctcaatcccgagcaggcaatccgtaaggcggcgctgctgcgcttccgcccgatcatgatgaccacgatggcggcgatgctcggcggcgtgccgttgatgctcggcaccggcaccgggtcggagatccgccagccgctcggctacgccatggtcggcggcctgctggtcagccaggcgctgacgctattcaccaccccggtggtgtatctctatctcgatcgcctctccaacgcgctgaccaactggggccgcacccatatcccggtcgacgaggacgaagacgaccgcgtccagcgcgcggcggagtga

SEQ ID NO: 2724 - protein, 1045 aa, Rhodopseudomonas palustris CGA009
MDRSISAPFIRYPIATSLLMAGILFLGLIAYPALPVAPLPQVDFPTIQISASLPGASPETMASSVATPLERQLAQIPGISQMTSTSSLGSTAVTIQFDLNRNIDAAANDVQAAINAAGGQLPKNLPNPPTYRKVNPADAPILILSATSDTLPLTTVSDNADAKIAQQISQITGVAQVFIGGQQKPAIRIQVDPAKLMTKGLSLEDVRAQIAITTVDSPKGTLDAPNRSYTIYANDQLTESKDWNDVILAYRNGGPLRIRDVGHAVTGPEDAKTAAWANGKRGVFLVVFKQPGANVIDTVDHIKAELPRLVAGIPPAIKVEVISDRTTTIRAAVEDVQFTLLLTIALVVMVIFLFLRSFWATIIPSVTVPLALLGACALMWAAGYTLDNLSLMALTISVGFVVDDAIVMLENIARHIEEGEKPFTAALKGAREIGFTIVSISISLVAVLIPLLFMGGIIGRLFREFAVTLAMTIAVSMLVSLTLTPMMASRFMRPATEVRHGRIYQWIEGAFEAMLRAYERGLDLVLRWRFTTLMVFFATVGLSVYLFVAIPKGFFPQQDVGMITATSEAAQDISFTGMKQRQEQLGEIVMADPDVDSVAMFIGGSGTALNTGRMFITLKPRDERSGSAQEIIARLRPKLEKVEGARLFMQAAQDVRLGGRPTRTQFEYTLQDANLAELNEWAPKVLAKMQSLPQLRDVATDQQTEGTTLTLTIDRDTASRFGIKPQLIDDTLYDAFGQRQVTQYFTQVNTYRIILEVLPELQGRLDTLNQIHIKSPTSGDQVPLSTFAKWTTVPVRPLSISHQGQFPATTISFNLAQGVALGQATEAVQAAMAEMGAPPTLTGSFQGTAQAFQQSLSTVPLLIVAALVVVYLILGILYESYIHPLTILSTLPSAGVGALAMLMLFGFDFSLIALIGIILLIGIVKKNGIMMVDFAITAERDEHLNPEQAIRKAALLRFRPIMMTTMAAMLGGVPLMLGTGTGSEIRQPLGYAMVGGLLVSQALTLFTTPVVYLYLDRLSNALTNWGRTHIPVDEDEDDRVQRAAE

SEQ ID NO: 2725 - DNA, 3096 bp, Acinetobacter sp. ADP1
  CDS (1)..(3096): transl_table=11
atgaatatgtcgagattttttattttacgacccgttgcaaccacattattgatgctggcacttttgtttagtggcttgatgatttggcggttccttcctgtttctgctttaccacaagtcgattatccgattattcagatctatacctttcaacctggtgcaaatccagatacggttcagcgaaccattactgcgccgcttgagcgtgaaatgggcaaaattgctggacttaaacagatgtcttccaatagcgctgtcggtgcatcagtcatcaccttacagtttgaactcagtgccgagttaggagtggttgagcaagaagtacaatctgcgctgagtaccgcaagcagtaaattgcccaatgatttgcccacatcgcctgtctatcgaaaagtaaatcctgcggatgtgcctgtaattaccttggcggtaagttcagaaactttgccactcacgaccgtttacgacatggttgatactcgtattgcacagaagttatcgcagttatcgggtgtgggaatggtgagtttggtgggtgggcaacgtcctgcgatacgtgtgcaaatgaatccaactgccttggcggcctataaaataagtgctgaagatgttcgttcagtgattaattctgctaatgccaatcagccgaaaggtagttttgatgggccatatcgcaccaccatgctggatgccaatgatcagatgggttctattgcagaatatgaaaatttgattttacgctggaataatggcgcaccgattcgccttaaagacgtctcacaggtgaaacaaggaagtgaagaccgctatatggcagcgtgggcagatcgtgagtctgctattttaattaatgtacaacgtcaacctaatgccaatgtaattcaggttgttgaccagatcaaaaatattttgcctgaactgcaaaaaaatctgcctgaaaatgtcaagattcgggttctgacagatcgtaccgaaagtattcgtagttcgattggtgatgtacaaaaggaattggtttttgccgtgtgtttggtggtaatggtaacttttctgtttttacggaatttgtcagcgaccattattccaagtattgcagtgcccttatcgattattggtacatttgtactgatgtattttctaggtttttctatcaacaatctcacgttgatggcgctgaccattgccacgggttttgtggttgatgatgcgattgtcatgctagaaaatattacacggcaccgtgaagcaggagcaagcctgctagatgctgcactcaaaggatcaaaagaaattggttttactctaatttcattaacgatttccttaattgcagttttgattccattactgtttatgggcgatgtggtcggacgtttattccatgaatttgccgtgaccttagcggcagccattgcactttctctagtggtgtctttaacccttacgccaatgatgtgcgcttacttacttaaaaataaaaaacataatcaaaagcatagccgctggagtctagataaaattattgatcgttacgcaaaggcattacagtgggtgtttaaacatcagccgttaatgctcgggatcatgctcagcactatagttttagccggcgttttgtactggatgattcccaaaggattctttcctgtacaggatagtggtgtgattcaggtcgtcactgaagcgcccgatgatatttcttttcagacaatgagcgaacgtcagcaaaacgtagctgcacaaattttaaaagatccatcggttgccagtttgtcatcttttactggtatagacgccaataatcctaaactcagcaatggccgtattttaattaatttaaaacctcatgcagagcgtgattcggcacagcaggtgatcaatcgtttacgagatcagctcaaagatgtaccagggattcacgcttggatgcagcctgttcaggaattgagtattgaagacaaaatcagtcgtactcaatatcaagtcagtttgagcgcagcgaaagctgaggatttaaaacaatggacacctattgttggggacgctttaaagcaccaacccgaattttcagatgtgaccagtgaagatggtggacaagcattgcaggcctatatcgatgtgaatcgagatgccgcagcgcgtttaggactttctattgaggatatcagtttggcattgcagaatttatttgcgcaacgccaaatcgcaactttatatacgcagtctaatcagtatcgaattgtactggaacttgatcctgatcaagtgcaaggactggatgccttaaatcaaacatatattcacaatgccaatggtgaagcgatacaactcggtacggtagcaagtattgagcaaaaaagagtggcaagtgtcttgcaacaacaagcgcaacttcctgctgatagcttgtcatttaatttggcacaaggtatttcacttggtgaagcaatccaggcgattgatcgagtcaaacagcagctcaaactacctgctgaaatcaatctgagtttacaaggtgcagcagcagcatttgaaaattcacaacagcacaccttttggctggttattgctgcaattgtgaccatgtatatcgtattgggtattttgtatgaaagtttcattcatcccattaccattctttctactttaccttccgccgcgattggtgcgttattggcgctgtttatgctcaatcagccactcgatatgattgcactgatcgggattattttgctaattggtctggtgaaaaagaacggcattatgatggtcgattttgcactggcagcacaacgcaatgagggattatctcctcagcaagcgatttatcaagctgccttaatgcgctttcgccccattttgatgaccacactggcggctttggttggggcaattccgttaatgctggcttctggttcgggtgctgaattacgtcagccccttggtattgtgatggtcggtgggctgattctgagtcaaattctcacgttgtttactacgcctgtggtttatctcttttttgatcgcttacaaggaatcacgcatcagcacaacaaaacaattccaccgatggatgagtctgaggcaatcacgtga

SEQ ID NO: 2726 - protein, 1031 aa, Acinetobacter sp. ADP1
MNMSRFFILRPVATTLLMLALLFSGLMIWRFLPVSALPQVDYPIIQIYTFQPGANPDTVQRTITAPLEREMGKIAGLKQMSSNSAVGASVITLQFELSAELGVVEQEVQSALSTASSKLPNDLPTSPVYRKVNPADVPVITLAVSSETLPLTTVYDMVDTRIAQKLSQLSGVGMVSLVGGQRPAIRVQMNPTALAAYKISAEDVRSVINSANANQPKGSFDGPYRTTMLDANDQMGSIAEYENLILRWNNGAPIRLKDVSQVKQGSEDRYMAAWADRESAILINVQRQPNANVIQVVDQIKNILPELQKNLPENVKIRVLTDRTESIRSSIGDVQKELVFAVCLVVMVTFLFLRNLSATIIPSIAVPLSIIGTFVLMYFLGFSINNLTLMALTIATGFVVDDAIVMLENITRHREAGASLLDAALKGSKEIGFTLISLTISLIAVLIPLLFMGDVVGRLFHEFAVTLAAAIALSLVVSLTLTPMMCAYLLKNKKHNQKHSRWSLDKIIDRYAKALQWVFKHQPLMLGIMLSTIVLAGVLYWMIPKGFFPVQDSGVIQVVTEAPDDISFQTMSERQQNVAAQILKDPSVASLSSFTGIDANNPKLSNGRILINLKPHAERDSAQQVINRLRDQLKDVPGIHAWMQPVQELSIEDKISRTQYQVSLSAAKAEDLKQWTPIVGDALKHQPEFSDVTSEDGGQALQAYIDVNRDAAARLGLSIEDISLALQNLFAQRQIATLYTQSNQYRIVLELDPDQVQGLDALNQTYIHNANGEAIQLGTVASIEQKRVASVLQQQAQLPADSLSFNLAQGISLGEAIQAIDRVKQQLKLPAEINLSLQGAAAAFENSQQHTFWLVIAAIVTMYIVLGILYESFIHPITILSTLPSAAIGALLALFMLNQPLDMIALIGIILLIGLVKKNGIMMVDFALAAQRNEGLSPQQAIYQAALMRFRPILMTTLAALVGAIPLMLASGSGAELRQPLGIVMVGGLILSQILTLFTTPVVYLFFDRLQGITHQHNKTIPPMDESEAIT

SEQ ID NO: 2727 - DNA, 3108 bp, Acinetobacter sp. ADP1
  CDS (1)..(3108): transl_table=11
gtgaatatctttgctctatttgtacatcgtccagttgctaatattttactgggaattgccatgactttgcttgggatattggccttttttcgcttacccgtagcggccttaccacaggtggatattccaacgattgtggtacgggcaaatttaccaggagcaagtcctgaaagtatgtcggctacagtggccacgccattggaacgtgcgatgatgggcgtatctgggatcaaagcgattaattcatctagtagtcaaaattcaacacaggtcattttacattttgatctggatacagatattaatgaagcggcgcgtgaagtacaggctgctatcaatgtggcgatgtctcaattgccatcagggatgccaagcccacctgaatattttaaggtcaatcccagtcaaagtccgatcttttatctggcactaagctccaggtatttatctgctggcaaattgtatgagttggcaagcaatcaattaaagcccaatcttgctcaaactagcggtgtaggagaagtcgaaattgatggtgcttcaatgcctgctgtgcggattatccttaatccaaatgcgttaatctcacaagggatttcgttggaacaagtacgagatgcagttaaaaaaagtaatgtagttcagtccttgggtgtaattgaacatcaaaacaatcgctggcaagtcgcactttcaacacatataaaagatgcagcagatttttcaaatttaattgtgcatcaaacagcgcaagggattgttcggcttaaagatgtggctgaggtagaagattcagttgagaatcgttatgtcgctggttttcataatggcgaacctgcggtaatgattaaaatcagtcgacagcctaatgccaataccattgcaacgattgaaaaaattaaagcaaaattgcctgaattaaattcgatgattcctgccgatgccaaattgactacggtcatggacggttcagaggtgattcatacgggtttacaggaagcgcgtgagaccttacttttttcaatttttttggtggtcgttgtggttgtgctgatgttagggcgactacgaagtgcgattgtaccaagcatcgcgatgttggtgactttggtgggtgcaatcagtctaatctatctggcaggattttcattcaacaatttatccatcatggcagtgattgttgcgattggattggtggtggatgatgctattgtcgtacttgaaaatattgaacggcacatcgaacagggtgaacatccatttagtgcagcgatacaaggcgttcgagaagttggttttactctggttgccatgaatctggcactcataataatttttatttccgtactatttatggggggcgtaattgagcgactgttccgtgaattttcattgacactggtgtttattgttgttgtttctgtttttgtgtctttgatcttgacaccaagtttatcagcacggtgtttacaatctatcaatgtgcagaataggcaaccattatacgattatagccaacgtatgatgcatggtttaacccgtcattatatccattcattacaatggattatacggcatacctatctagtgatactgctttggctaggggctatcataggttcagtttatgtgtatcagagtttacctaaacggattttgcctgaacaggatacaggacgaattgaatcttttattcgtggtgatgatggcttttcttttcaaattatgcagcccaaaattgcaacatttagccaaagtttgctcaaagatccagcaattaaagatgtgattggaacatcgggtggtgcaggtggcacaaccaattccttttttatggtgagtttgaaacctaaagcagaacgagaaggtaaaacgacgcgtgaaattgctgaaaggattcgtcaaaatgcgccatggatcgcaggtgctattttttcagcacgagtacagcaagacttggaactggatgatccattttctggaaatagtgggcaggattatttacttttattacaatcagatgatgtggctttacttagaaaatgggcacccaaagtcgcagaggctatacaaaaactacctgagcttgaagaagttgaaactttaggtgatgagggcgcacagcatgtcacgcttgacattaaccgagaagcagcacggcgtttgggcgttgatgtcgaaagtatttccagtgtactgaataattcattttcacagcgacaaatttcaacgatctatgatcaaaccaatcagtttcacgtggtgatggaaattgataaacgctttactgaaaaccccgaagcacttgcggatatcaaagttccaaatcaaaacggtgaatatgtgccactgaccaactttgccacgtggtcctatggaatcactaatgatcgggtacatcgacgcaatcagtatgctgcaatgggcattggctatgtcctcaaacaaggttatacagcagaacaagcagagtatgcgatccgtagtgttctgccacaagtgatgcttccgaatcagatttttgtggctacggataaagatgtagaagctgaaagtttacaagcaggtttaagtacaccgatgttgttggtgacggtcattgcactgatttatatcgtattaggtataacttatgaaagcatggttcaccccttaactatattatcgacaattcctgcgattgctttgggtggattactcacgctttggttatttaatttcgaatttactctcattgcattgcttggcatgtttttattgatcgggattgtggtgaaaaatgccattttactgattgattttaccttacagcaacgccgtttgggaaaaacagcccttgagtcggttgtatctgcggcgacattacgttttcggcctattttaatgactaatactgcggctttattaggggccatccctttggcactcagtacaaccgaaggatccgaattacgacaaccgttgggacttgtgattgttggcggtttggcattaggtcaacttttaacactttataccacacctgtgatgtatctcgttttagaaaaattggctcaaatatttaaaaaattcaagatgagcaatgccatcggttatagaaatagatag

SEQ ID NO: 2728 - protein, 1035 aa, Acinetobacter sp. ADP1
MNIFALFVHRPVANILLGIAMTLLGILAFFRLPVAALPQVDIPTIVVRANLPGASPESMSATVATPLERAMMGVSGIKAINSSSSQNSTQVILHFDLDTDINEAAREVQAAINVAMSQLPSGMPSPPEYFKVNPSQSPIFYLALSSRYLSAGKLYELASNQLKPNLAQTSGVGEVEIDGASMPAVRIILNPNALISQGISLEQVRDAVKKSNVVQSLGVIEHQNNRWQVALSTHIKDAADFSNLIVHQTAQGIVRLKDVAEVEDSVENRYVAGFHNGEPAVMIKISRQPNANTIATIEKIKAKLPELNSMIPADAKLTTVMDGSEVIHTGLQEARETLLFSIFLVVVVVVLMLGRLRSAIVPSIAMLVTLVGAISLIYLAGFSFNNLSIMAVIVAIGLVVDDAIVVLENIERHIEQGEHPFSAAIQGVREVGFTLVAMNLALIIIFISVLFMGGVIERLFREFSLTLVFIVVVSVFVSLILTPSLSARCLQSINVQNRQPLYDYSQRMMHGLTRHYIHSLQWIIRHTYLVILLWLGAIIGSVYVYQSLPKRILPEQDTGRIESFIRGDDGFSFQIMQPKIATFSQSLLKDPAIKDVIGTSGGAGGTTNSFFMVSLKPKAEREGKTTREIAERIRQNAPWIAGAIFSARVQQDLELDDPFSGNSGQDYLLLLQSDDVALLRKWAPKVAEAIQKLPELEEVETLGDEGAQHVTLDINREAARRLGVDVESISSVLNNSFSQRQISTIYDQTNQFHVVMEIDKRFTENPEALADIKVPNQNGEYVPLTNFATWSYGITNDRVHRRNQYAAMGIGYVLKQGYTAEQAEYAIRSVLPQVMLPNQIFVATDKDVEAESLQAGLSTPMLLVTVIALIYIVLGITYESMVHPLTILSTIPAIALGGLLTLWLFNFEFTLIALLGMFLLIGIVVKNAILLIDFTLQQRRLGKTALESVVSAATLRFRPILMTNTAALLGAIPLALSTTEGSELRQPLGLVIVGGLALGQLLTLYTTPVMYLVLEKLAQIFKKFKMSNAIGYRNR

SEQ ID NO: 2729 - DNA, 3162 bp, Acinetobacter sp. ADP1
  CDS (1)..(3162): transl_table=11
atgaatccgtcccgtttgtttatccagcgaccagtggcgaccacactggtgatgatcgcaatttttttgtgtgggctggtgtcctggaaatttttacctgtggcgtctttgccagccgtagattatccaaccatgcaggtgacgacggtatatcctggggcgagtccagaggtgatagcctctaccattactgcaccactggaacgccagtttggtcagatgcctggtttaagccaaatgtcatcgaccagttctaatggggcttcggtcattacattgcagtttaatctcaatctggggttggacgttgccgagcaagaagtacaggcagcaattaacgcctctaataatttactaccttccgatctactgacaccaccgacctatagcaaagtgaaccctgctgataagccaattatgaccatcgctatcagctcaaaagaaatgccgatcaccaagctggaagatttggtagatacgcgcttagcacaacagctctcccaagtgagcggagtggggctgattagcgtgagtggtggtcagcgccctgcggtacgcttacaggtgaactctactgcactggcgaatatgggtttgacgctagaagatgtacgtactgcggttacggcagccaatgtaaatcaggccaaaggaaccatcagtggcagtgttcagtcatctacaattgatggtaatgatcagttgcataccgcagatgattataaaaacctgattattgcctataaaaatggtgcgccgattcgaatgtcggacattgcctcgaccattgactctgccgagaatacccgcttggcggcttgggttgggcatcgcaatcatgatgctgcaacacaaagcccagccattattattaatgtacaacgccaacccaatgccaatgtcattcaggtagccaatcagatcaaacaaattttgccgcaactgcaaagtagctttccacaatcggctaaagtagaaatcttaagtgacagtacccgtaccattcaggcttcgctgaatgatgtcgaatttgaactgctactggcgatggttttggtgattgtggtggtgtttctatttttacgcagtttacgtgcgacgtttattcccgcagtcgcattacccctttcactggtcggaactttcgctgtgatgtatctgctggggttttcagtcgataatttaagtttgatggcactgaccattgccacggggtttgtgattgatgatgccattgtgatgattgaaaacatttctcgctatatcgaacagggcgagtcgcccatgcaggcggcattaaaaggttcggagcaaattgctttcaccattatttcactcaccatttcattgattgcggtgcttattccactgttgtttatgggggatgtggttgggcgtttgtttcgtgagtttgcgattacactggctgtttccattttaatttctgcttttatttctttaaccctgactccgatgttgtctgccagattactcaagtatacgcctgaagcagaacaggggcgtttttatcatgtcatgggagatttttttgacaaactgatcggctggtacgccactgcattacgctgggtattggcacggcaaggtttattcctggtggtcaccattgcgacctttgtatttacggtcatgttgtatgtttttattccaaaaggtttttttcctgttcaggatacgggacaagttattgcgataacggaagcagaccagaccacatcgtttcaggcaatgcgtgttaagcagcagcaagtcgctaacattattctgcatgacccagcagtggacagtatctcttcttttattggggttgatggtagcaatagcgctttaaatatggggcgtattctgattaatctcaaagataaatcggatcgagcagatattcagacagttattcaggatttgcagcaacggctgaatcaggcgcaaggaatgaccgtatatctacagcctgcgcaggatttaacgatcgatgcgaggcagagtcggacacagtatcagtttaccttgcagtcaaccagcgcagatcatttggcaaaatgggtacctaccttgatgcaggcgttggcacaacgtcccgaactgaatcatctggcaagcgactggcaaaataagggcttgcaggtttatgtcgatatcaaccgcgatgctgctgcacaatacggcattactacagcaggcatcgataatattctttacgatgcctttggccaaagactgattagtacgatttttacgcaaaccaatcaatatcacgttgtactggggttatctggacaagatcagaatggattacaggcattacaaaatttatatatcccttccagtcatggcacgcctatacgcttgagtagcattgccagtattcaacccagaagcaccttgcttgaagtcaatcatttagggcaatttccaaccgcaacggtgtcgtttgatacagcagcaggggtttcactacaacaagccgtacaggcagtcaaagataccgaacaacaattaaagatgcctggcagcctaatgacgcagtttcaaggcgcagctttggcctttcaagcttcgctgagcagtaccgtctggttaattgttgcagcgattgtggtgatgtacattattttgggggtgttatatgaaagctttattcatccattaaccattttatcgaccttgccatcggcagggattggtgcgttgctggcattggtattatctcataatgatctgaatatcattgccattatcgggattgtattgctgatcggaatcgtcaaaaaaaatgccatcatgatgattgattttgccttagatgcagagcgacaccaagggctgaccccaatcgagtctatttatcaagcctgtttattacgctttaggcctattttaatgaccactatggcagcattgctgggtgctgtaccgttagtgattggctcgggcatagggtcagagttaaggcatcctttgggaattaccatgattggtggtctgattgtgagccagttacttactttatttacaacacctgtggtgtatttggcctttaatcatttagcacaaaagatcagagggacgcatcgaccagacaagtctgccagtgacttggcaccttacaaacattttaagtcacaggcggatgaggtatga

SEQ ID NO: 2730 - protein, 1053 aa, Acinetobacter sp. ADP1
MNPSRLFIQRPVATTLVMIAIFLCGLVSWKFLPVASLPAVDYPTMQVTTVYPGASPEVIASTITAPLERQFGQMPGLSQMSSTSSNGASVITLQFNLNLGLDVAEQEVQAAINASNNLLPSDLLTPPTYSKVNPADKPIMTIAISSKEMPITKLEDLVDTRLAQQLSQVSGVGLISVSGGQRPAVRLQVNSTALANMGLTLEDVRTAVTAANVNQAKGTISGSVQSSTIDGNDQLHTADDYKNLIIAYKNGAPIRMSDIASTIDSAENTRLAAWVGHRNHDAATQSPAIIINVQRQPNANVIQVANQIKQILPQLQSSFPQSAKVEILSDSTRTIQASLNDVEFELLLAMVLVIVVVFLFLRSLRATFIPAVALPLSLVGTFAVMYLLGFSVDNLSLMALTIATGFVIDDAIVMIENISRYIEQGESPMQAALKGSEQIAFTIISLTISLIAVLIPLLFMGDVVGRLFREFAITLAVSILISAFISLTLTPMLSARLLKYTPEAEQGRFYHVMGDFFDKLIGWYATALRWVLARQGLFLVVTIATFVFTVMLYVFIPKGFFPVQDTGQVIAITEADQTTSFQAMRVKQQQVANIILHDPAVDSISSFIGVDGSNSALNMGRILINLKDKSDRADIQTVIQDLQQRLNQAQGMTVYLQPAQDLTIDARQSRTQYQFTLQSTSADHLAKWVPTLMQALAQRPELNHLASDWQNKGLQVYVDINRDAAAQYGITTAGIDNILYDAFGQRLISTIFTQTNQYHVVLGLSGQDQNGLQALQNLYIPSSHGTPIRLSSIASIQPRSTLLEVNHLGQFPTATVSFDTAAGVSLQQAVQAVKDTEQQLKMPGSLMTQFQGAALAFQASLSSTVWLIVAAIVVMYIILGVLYESFIHPLTILSTLPSAGIGALLALVLSHNDLNIIAIIGIVLLIGIVKKNAIMMIDFALDAERHQGLTPIESIYQACLLRFRPILMTTMAALLGAVPLVIGSGIGSELRHPLGITMIGGLIVSQLLTLFTTPVVYLAFNHLAQKIRGTHRPDKSASDLAPYKHFKSQADEV

SEQ ID NO: 2731 - DNA, 3054 bp, Desulfotalea psychrophila LSv54
  CDS (1)..(3054): transl_table=11
atgaaaatatcagaaataagtgtcagacgtccggtactggcgacggtgatgagtctgctgatcgtactgatcggcctggttgcctatgatcgtttgacggttcgtgagtaccctaatatcgacgagcctacggtttcggtggtgaccgtttatcaaggtgccagtccggagatcattgaaaccgagattaccaccatcattgaggatagcctctcgggaattgaggggatcaaaaccatctcttccgagagtcttcaggaacggagccagatcagtattgtctttaagatggagcgtaatgccgatgatgccgccgctgaggtgcgtgaccgggttgggcgggtgcgcgctgatctacccctcgatgtcgaggagccggtcattgccaaggttgaagccgatgccgatccgatcctctatatggccttttccagtgacaagcacagtaatgaagagattactgattacgttgatcgctatgtgaccgaccagattgaaatgatcgatggtgttgccgaagcgcaggtccttggtgctcgtaaatactccatgcgtatctggcttgatccggccctgctcactggccatggggtgacgccacaggatgttgaggaggcgatccgggcccagaatatagaggtgccgggtggtcgtctggaaagcagtacccgcgagtttactgtcctctccgataccagtctcaactcaacggaagagtttgaaaatattatcgttcgcaagtcgggtacaaccttagtccggttaaaagatattggtcgggccgagatcggtccccaatcggtgcgatcgagtctgcgttataacggggcccaggcagttgcccttggtctggtcaaacagtcggttgccaatccacttgatatctccattgccctccataagatgctgccagaactgaaggcatcactgccagaggggatgaaaactaaaatcgtctacgactcttccatttttattgagcgctccattgaaaacgtttttagctccatctttgaggcggttgccctggtgctgttgattatctttatctttctgcgttctgttcgttccaccctgattcctctggtcactattccggtctctctaatcggctcctttgtcctgatgtgggcctttggcttttccattaataccctgaccctattggcaatggttttggcggttggactggtggtcgatgatgctattgttgtcctggaaaatgttcaccgccatgttgaaaaaggcctcaaaccagccgaagctgccattaagggaatgcgggagatcggttttgccgtcgtcttaatgaccatgaccctggccgctgtttttgttccggtggcaatgatggagggaaggaccggtaagctcttcaccgaatttgccctgactctggccggtgcggtaattgtctccggcttcgtggctctgactctgaccccaatgatgtgtgcaaaaatgctccgtcatcaggacaagcatatgaagatcttcaccattatggagaatattttcatcgcaatcgagcaaggctataaaagggttcttgcctggtccttgaaaaccgtcatatttggattgaccattgccgttttagccggagccggttcctactatctgttgcagcaactcccttcagagatgtcgccactggaggacagaggggtctttatgacctttgccattgctcccgacggcgccaatttgaaatattcggatcactatctgcgccaaactgaaaaattgctccagccaattccggaaagtaatggtgttttttccgtggcaggaatgggtggtaaggtgaccgaggcaatttcctttgttcagttgaaagactgggctgaccgccaacgttcttcgctacagatcgcaggagaactggcgcccagcctattcggaatccccggagtcctctgctttcccatcacaccgccttctcttggtcagccatttatggatcagccggtccagtttgttattaagaccagcgagagctatgtggaattaaataagcaaatcaatcagctgatggctgaagtacgtaaaaatccaaaaattattgccgccagaaccgacctgaagctcaactcgcccgaactgcgcctgcagattgatcgtgataaggctgccgatttaggcgttaatattgccgtcattggccggaccattgaaaccatgatgggtggacgggaggtaacccgttttaaaatggacggagaacagtacgacgttattgttaaaattgaggataaactgcgggtagtcccggaggatcttaaccagattcatgtgcggagcgccagtgggataatgattccgctagccaatctggtaagcattgaagaaggtgttaccgcccagtcacttaatcactttaaccgcagtcgggcagcggtgctgagtgccaatctggcccccggttattcgcagggtgaagccttggcttttctatctgatgcagcaaagcgaattttgcctaaaaccgcccgaattgattataaggggcagtcacgtgaatttatggagagcaactccggtctgattatgacctttgccctggccctgatcatgatttatctgatgatggccgcccaattcgaatcatttgttgatcccctgatcatcctctttaccgtacctctctccatggttggtgccctattggccctttactgtacaggtaatagtctcagcatctatagtcaggtggggctgattaccctggttgggctcattactaaacatggtatcctcatcgtcgagtttgccaaccagcttcaggaacagggaaagagtaagctggaggcggtactcgaagcagccaccctccgtcttcgcccgattctgatgaccaccggagccatggtgctgggcagtgtaccgctggctctagccagtggagcaggggccgaaagtcgttcacagatcggctgggttatcgtcggcggtttaacactcggaaccgcccttaccctcttcgttgtgccatcggtctatatgttactggccaaaaagcgacaaccactagagcccgaggctgaaaaatag

SEQ ID NO: 2732 - protein, 1017 aa, Desulfotalea psychrophila LSv54
MKISEISVRRPVLATVMSLLIVLIGLVAYDRLTVREYPNIDEPTVSVVTVYQGASPEIIETEITTIIEDSLSGIEGIKTISSESLQERSQISIVFKMERNADDAAAEVRDRVGRVRADLPLDVEEPVIAKVEADADPILYMAFSSDKHSNEEITDYVDRYVTDQIEMIDGVAEAQVLGARKYSMRIWLDPALLTGHGVTPQDVEEAIRAQNIEVPGGRLESSTREFTVLSDTSLNSTEEFENIIVRKSGTTLVRLKDIGRAEIGPQSVRSSLRYNGAQAVALGLVKQSVANPLDISIALHKMLPELKASLPEGMKTKIVYDSSIFIERSIENVFSSIFEAVALVLLIIFIFLRSVRSTLIPLVTIPVSLIGSFVLMWAFGFSINTLTLLAMVLAVGLVVDDAIVVLENVHRHVEKGLKPAEAAIKGMREIGFAVVLMTMTLAAVFVPVAMMEGRTGKLFTEFALTLAGAVIVSGFVALTLTPMMCAKMLRHQDKHMKIFTIMENIFIAIEQGYKRVLAWSLKTVIFGLTIAVLAGAGSYYLLQQLPSEMSPLEDRGVFMTFAIAPDGANLKYSDHYLRQTEKLLQPIPESNGVFSVAGMGGKVTEAISFVQLKDWADRQRSSLQIAGELAPSLFGIPGVLCFPITPPSLGQPFMDQPVQFVIKTSESYVELNKQINQLMAEVRKNPKIIAARTDLKLNSPELRLQIDRDKAADLGVNIAVIGRTIETMMGGREVTRFKMDGEQYDVIVKIEDKLRVVPEDLNQIHVRSASGIMIPLANLVSIEEGVTAQSLNHFNRSRAAVLSANLAPGYSQGEALAFLSDAAKRILPKTARIDYKGQSREFMESNSGLIMTFALALIMIYLMMAAQFESFVDPLIILFTVPLSMVGALLALYCTGNSLSIYSQVGLITLVGLITKHGILIVEFANQLQEQGKSKLEAVLEAATLRLRPILMTTGAMVLGSVPLALASGAGAESRSQIGWVIVGGLTLGTALTLFVVPSVYMLLAKKRQPLEPEAEK

SEQ ID NO: 2733 - DNA, 3036 bp, Bacteroides fragilis YCH46
  CDS (1)..(3036): transl_table=11
atgaatatatccgaattaagtatacgacggccggtactctcaacggtactgaccatcatcattttgctctttggactgatcgggtacaactacctgggtgtccgggagtatccatccgtagataaccctattatttcggtgtcctgctcctatccgggtgcaaatgccgatgtcatcgagaatcagatcaccgaacccctggaacagaacatcaatggtattccgggcatccgctcactctccagtgtcagtcagcagggacaaagccgtatcacggtagagtttgagctttccgtcgacctggaaacagctgccaatgacgtgcgtgacaaggtatcacgcgcccaacgttatctcccgcgcgactgtgaccctcctaccgtatcgaaagccgacgccgatgccacccctatccttatggtggctttgcaaagcgacaaacgttctttgctggaactcagtgaaattgccgacctgactgtaaaagaacagttgcaaacgatctctgacgtaagtagtgtctccatttggggagagaaacgatactccatgcgtttatggctcgaccccatcaagatgtccggttacgggatcactcccatcgatgtgaagaatgcggtagacaaagagaacgtggaactcccttcaggtagtatcgaaggaaatacaacagaacttaccatccgtactttgggactgatgcacactgcagaagagttcaacaacctgatcgtcaaagaagagaacgaccgcatcatccgtttcagtgatatcggacgagccgaactgggccctgccgacatcaaaagctacatgaagatgaatggtgtacccatggtgggaatcgttgtaatcccccagccgggtgccaaccatataaagatagccgatgcggtatatgaacgcatggagaagatgcagaaggacctcccggaagacgtgaagtattcttacggattcgataacaccaaattcatccgtgcctctatcagcgaagtgaaagaaaccgtttacgtagctttcatcctggttatcattattatcttcctttttctgcgcgactggcgtgttacgctggttccctgcatcgtgattccggtatcgttgatcggtgctttcttcgttatgtatctggcggacttctccatcaacgtgctctccatgctggctgttgtgctggcagtgggtctggtggtggacgacgctatcgtaatgacggaaaacatctatgtccgcattgagaaaggtatgcctccgaaagaggccggcatcgaaggggctaaagagattttcttcgctgtcatctctaccaccattacgctggttgccgtattcttccccatcgtctttatggaggggatgacaggacgactgttccgtgaatttagtattgttatttccggttcggttatcatctcctcttttgcggctctgacctttactccgatgctagccaccaagttactggtaaaacgggagaaacagaactggttctatctgaaaacagaacctttcttcgaaggaatgaaccgcctctacagtcgttcactggctgttttcctccataaacgttggattgccctgccttttgtagcaattaccattggcatcattgccttcttgtggaattacatcccggcagaaatggctccgttggaagaccgttcacaaatcagtatcaatacccgtggagccgaaggtgtgacctatgaatacatccgggactatacggaagacatcaatgacctcgtagactcgattgtaccggatgccgaatcggtaaccgcccgtgtatcgagtggtagcggtaatgtgcgcatcacgctgaaagacatgaaagaccgtgactacacccagatggatgtggctgaaaaactgtcggcagcagtacaaaaaaagacgatggcgcgttcattcgtccagcagtcatcttcttttggcggacggcgtggcggtatgcccgtccaatacgtattgcaggccactaatatcgaaaagctacaggaagtactgcccaagttcatggcgaaggtttacgagaacccggtattccagatggcagacgtagacctgaagttcagcaagccggaggcacgtatcaatatcaatcgcgacaaagccagcatcatgggggtaagtacacgtaacatcgcacagaccctgcaatacggtctgagcggacagcgaatgggctacttctatatgaacggcaagcaatatgagatcttaggagaaatcaaccgccagcaacgtaacacacctgccaatctgaaatcgatctacattcgtagtgacaaaggagatatggtgcaattggacaacctgattgaactgaccggtggcatcgcgcctccgaaactgtatcgttacaatcgtttcgtttcggccactgtttccgccggattggccgaaggaaaaaccatcggacaaggattggacgaaatggacaagatagccaaagagacgctggacgacacgttccgcacagcattgaccggtgattcgaaagaatatcgcgagagttcttcaagtctgatgtttgcttttattctggccattgtactgatttacctgatcctggcagcacagttcgagagtttcaaagacccgctgatcattatgctgaccgtccccctggctattgcaggcgcattggtattcatgtattttggaggtatcacaatgaacatcttcagccagatcggcattattatgctgattggactggtggctaaaaacggtatcctgatcgtagagtttgccaacctgaaacaagaaacgggtgaggataagatgacagccatcaaagatgcggcgttacaacgcctgcgtcctatcctgatgacaagtgcttctaccatcctgggattaatcccgctggctttcgcctcgggtgaaggttgcaaccaacgtatcgcaatgggtacggctgtagtgggaggtatgttggtatctaccctgctgaccatgtacatcgtacctgccatttacagttatatttcgacgaaccgaagtaataaattaaagcaagaatga

SEQ ID NO: 2734 - protein, 1011 aa, Bacteroides fragilis YCH46
MNISELSIRRPVLSTVLTIIILLFGLIGYNYLGVREYPSVDNPIISVSCSYPGANADVIENQITEPLEQNINGIPGIRSLSSVSQQGQSRITVEFELSVDLETAANDVRDKVSRAQRYLPRDCDPPTVSKADADATPILMVALQSDKRSLLELSEIADLTVKEQLQTISDVSSVSIWGEKRYSMRLWLDPIKMSGYGITPIDVKNAVDKENVELPSGSIEGNTTELTIRTLGLMHTAEEFNNLIVKEENDRIIRFSDIGRAELGPADIKSYMKMNGVPMVGIVVIPQPGANHIKIADAVYERMEKMQKDLPEDVKYSYGFDNTKFIRASISEVKETVYVAFILVIIIIFLFLRDWRVTLVPCIVIPVSLIGAFFVMYLADFSINVLSMLAVVLAVGLVVDDAIVMTENIYVRIEKGMPPKEAGIEGAKEIFFAVISTTITLVAVFFPIVFMEGMTGRLFREFSIVISGSVIISSFAALTFTPMLATKLLVKREKQNWFYLKTEPFFEGMNRLYSRSLAVFLHKRWIALPFVAITIGIIAFLWNYIPAEMAPLEDRSQISINTRGAEGVTYEYIRDYTEDINDLVDSIVPDAESVTARVSSGSGNVRITLKDMKDRDYTQMDVAEKLSAAVQKKTMARSFVQQSSSFGGRRGGMPVQYVLQATNIEKLQEVLPKFMAKVYENPVFQMADVDLKFSKPEARININRDKASIMGVSTRNIAQTLQYGLSGQRMGYFYMNGKQYEILGEINRQQRNTPANLKSIYIRSDKGDMVQLDNLIELTGGIAPPKLYRYNRFVSATVSAGLAEGKTIGQGLDEMDKIAKETLDDTFRTALTGDSKEYRESSSSLMFAFILAIVLIYLILAAQFESFKDPLIIMLTVPLAIAGALVFMYFGGITMNIFSQIGIIMLIGLVAKNGILIVEFANLKQETGEDKMTAIKDAALQRLRPILMTSASTILGLIPLAFASGEGCNQRIAMGTAVVGGMLVSTLLTMYIVPAIYSYISTNRSNKLKQE

SEQ ID NO: 2735 - DNA, 3111 bp, Burkholderia pseudomallei K96243
  CDS (1)..(3111): transl_table=11
atgaatccgtcccgcgtcttcattctccggccggtcggcaccgcgctcctgatggcggcgatcatgctcgccggcctcgtcgcgctgcgcttcctgccgctcgcggcgctgcccgaagtcgactatccgacgatccaggtccagaccttctatccgggcgcgagccccgaggtgatgacgtcgtccgtcaccgcgccgctcgagcgtcagttcgggcagatgccgtcgctcaaccagatgtcgtcgcaaagctcggcgggcgcgtcggtgatcacgctgcagttcagcctcgatctgccgctcgacatcgccgagcaggaagtgcaggcggccatcaacgcggcgggcaacctgctgccgtcggacctgcccgcgccgcccatctacgcgaaggtcaacccggccgacgcgcccgtgatcacgctcgccgtcacgtcgaagacgctgccgctcacgcaggtgcaggatctcgcggacacgcgcctcgcgatgaagatctcgcaggtgtcgggcgtcggcctcgtcagcctgtcgggcggcaaccggccggccgtgcggatccaggcgaacccgctcgcgctcgcgtcgtacggcctgaacctcgacgatctgcgcacgacgatctcgaacctgaacgtcaacacgccgaagggcaacttcgacggcccgacgcgcgcgtacacgatcaacgcgaacgatcagctgacgagcgccgaccagtacaacgacgccgtcgtcgcgtacaagaacggccggccggtgatgctcaccgatgtcgcgaagatcgtcgccggctcggagaacacgaagctcggcgcgtgggtcgacgccgagcccgcgatcatcctgaacgtgcagcggcagccgggcgcgaacgtgattcaaacggtcgacaacgtcaaggcgatcctgccgaagctgcaggaatcgctgcccgccgcgctcgacgtgcagatcgtcaccgatcgcacgacgatgatccgcgccgccgtgcgcgacgtgcagttcgagctcgggctcgcggtcgcgctcgtcgtgctcgtcatgtacctgttcctcgcgaacgtctacgcgacgatcatcccgagcctgtcggtgccgctgtcgctgatcggcacgctcgcggtgatgtacctgtcgggcttttcgctgaacaacctgtcgctgatggcgctcacgatcgccacgggcttcgtcgtcgacgacgcgatcgtgatgatcgagaacatcgcgcgctacgtcgaggaaggcgactccgcgctcgaagcggcgttaaagggctccaagcagatcggcttcacgatcatctcgctcaccgtgtcgctgatcgccgtgctgattccgctgctgttcatgggcgacgtcgtcgggcggctgttccacgagttcgcgatcacgctcgcggtgacgatcgtgatctcggctgtcgtgtcgctcacgctcgtgccgatgatgtgcgcgaagctgctgcgccacacgccgccgcccgagagccaccgcttcgaggcgaaggtgcacgggctgatcgagcgcgtgatcgagcgctacggcgtcgcgctgcaatgggtgctcgaccggcagcgcgcgacgctcgtcgtcgcggtgctcacgctcgcgctcaccgcgctgctctacgtcgtgattccgaagggcttcttcccgacgcaggacacgggcgtgatccaggcgatcacgcaggcgccgcaatcggtgtcgtacggcgcgatggccgagcggcagcaggcgctcgccgccgagatcctgaagcatccggacgtcgtgagcctcacgtcgttcatcggcgtcgacggcgcgaacatcacgctcaacagcggccgcatgctgatcaacctgaagccgcgcgacgagcgcagcgaatcggcgagcgacgtgatccgctcgctgcagcggcaggtcgcgaacgtcacgggcatctcgctgtacatgcagccggtgcaggatctgacgatcgactcgacggtcagcccgacgcaatatcagttcatgctgacgagcccgaatccggacgagttcgcgacctgggtgccgaagctcgtcgaccggctgaggaaggagccctcgctcgccgacgtcgccaccgatctgcagaacagcggcaagtcggtctacatcgagatcgaccgcacgagcgccgcgcgcttcgggatcacgccggcgaccgtcgacaacgcgctctacgacgcgtacggccagcggatcgtgtcgacgatcttcacgcagtcgaaccagtaccgcgtgatcctcgaatcggaaccgcagatgcagcactacaccgattcgctcaacggcatctacctgccgtcggcgggcggcgggcaggtgccgctgtccgcgatcgcgacgttccgcgagcggcccgcgccgctgctcgtgtcgcacctgtcgcagttcccggccacgacgatctcgtttaacctcgcgccgggcgcgtcgctcggcgaggcggtgaaggcgatcgacgcggccgagcgcgagctcgggctgccggcgtcgttccagacgcgcttccagggcgcggcgctcgcgttccaggcatcgctgtcgaaccagctgttcctgatcctcgccgcgatcgtcacgatgtacatcgtgctcggcgtgctgtacgagagctacatccatccgatcacgatcctctcgacgctgccgtcggcgggtgtcggcgcgctgctcgcgctgatgatcaccgggcacgatctcgacatcatcgggatcatcggcatcgtgctgctcatcggcatcgtgaagaagaacgcgatcatgatgatcgacttcgcgctcgaggccgagcgcgtcgagggcaagccgccgcgcgaggcgatctaccaggcgtgcctgctgcgcttccggccgatcctgatgacgacgctcgccgcgctgctcggcgccgtgccgctcatcgtcggctcgggcgcgggctccgagctgcgccagccgctcggcatcgcgatcgcgggcgggctcatcgtgtcgcaggtgctcacgctcttcacgacgcccgtgatctatctcggcttcgatgcgctcgcccgccgcgtgcgcggcttcttcgagcgctccggcggcccggccgcgcatccggacgcgtaa

SEQ ID NO: 2736 - protein, 1036 aa, Burkholderia pseudomallei K96243
MNPSRVFILRPVGTALLMAAIMLAGLVALRFLPLAALPEVDYPTIQVQTFYPGASPEVMTSSVTAPLERQFGQMPSLNQMSSQSSAGASVITLQFSLDLPLDIAEQEVQAAINAAGNLLPSDLPAPPIYAKVNPADAPVITLAVTSKTLPLTQVQDLADTRLAMKISQVSGVGLVSLSGGNRPAVRIQANPLALASYGLNLDDLRTTISNLNVNTPKGNFDGPTRAYTINANDQLTSADQYNDAVVAYKNGRPVMLTDVAKIVAGSENTKLGAWVDAEPAIILNVQRQPGANVIQTVDNVKAILPKLQESLPAALDVQIVTDRTTMIRAAVRDVQFELGLAVALVVLVMYLFLANVYATIIPSLSVPLSLIGTLAVMYLSGFSLNNLSLMALTIATGFVVDDAIVMIENIARYVEEGDSALEAALKGSKQIGFTIISLTVSLIAVLIPLLFMGDVVGRLFHEFAITLAVTIVISAVVSLTLVPMMCAKLLRHTPPPESHRFEAKVHGLIERVIERYGVALQWVLDRQRATLVVAVLTLALTALLYVVIPKGFFPTQDTGVIQAITQAPQSVSYGAMAERQQALAAEILKHPDVVSLTSFIGVDGANITLNSGRMLINLKPRDERSESASDVIRSLQRQVANVTGISLYMQPVQDLTIDSTVSPTQYQFMLTSPNPDEFATWVPKLVDRLRKEPSLADVATDLQNSGKSVYIEIDRTSAARFGITPATVDNALYDAYGQRIVSTIFTQSNQYRVILESEPQMQHYTDSLNGIYLPSAGGGQVPLSAIATFRERPAPLLVSHLSQFPATTISFNLAPGASLGEAVKAIDAAERELGLPASFQTRFQGAALAFQASLSNQLFLILAAIVTMYIVLGVLYESYIHPITILSTLPSAGVGALLALMITGHDLDIIGIIGIVLLIGIVKKNAIMMIDFALEAERVEGKPPREAIYQACLLRFRPILMTTLAALLGAVPLIVGSGAGSELRQPLGIAIAGGLIVSQVLTLFTTPVIYLGFDALARRVRGFFERSGGPAAHPDA

SEQ ID NO: 2737 - DNA, 3168 bp, Methylococcus capsulatus str. Bath
  CDS (1)..(3168): transl_table=11
atgaaattcgcccatttcttcatcgaccggccgcgcttcgccatcgtcctctccgtcatcacggtgctgatcggcgggatcgcgatgttcgcactgccgatcgcgcaatatccagaagtggtgccgcctaccatcgtggtatcgaccacctatccgggcgccaatcccaaggtgatcgccgaaaccgtggcggcgccgatcgagcaggaagtcaacggcgtcgagcgcatgctgtacatgtcctcgcagtcgaccagcgacggccagatgcagctcacgatcaccttcgagatcggcaccgacatggacatcgcccagatgcaggtgcagaaccgggtctccaatgccctaccgaagctgccggaggacgtccgcaggcagggcgtgacgaccaagaaatcttcgcccgacatcctgctggtcatccatctggtctcgccgaaccagcgctacgaccagctttatctctccaactacgccctgctcaacatccgcgaccagatcctgcggctcccgggggtgggcgatgtccgaaccttcggcgccggcgattacagtatgcgggtctggctcgacccgacccggatcgcggctttgaacatgaccgccggcgatgtggtgcgcgccatccgcgaacagaacatccaggtgccggccggcgtgatcgggcagccgccgctggacggcagcccggacttccagctcaacgtcaacaccatgggtcgcctcgccagcgtcgagcagttcggcgcgatcatcgtcaagtacggcgaaggcggcagcctggtgcgtctgcgcgacgtcgccaggatcgagctgggcgccaaccgctactccctgcgcagccagctgaacaacgaagacgccgtcgccatgccgatttcgctgcggccgggcgccaacgccctggatacggcccggcgaatcaagagcaagatgcagaccctgaaacagcggtttccggaaggagtggattaccggatcgtctacgacaccacgatcttcgtcgagcaatcactggacgccgtcacccgcacctttttcgaggcgttggccctggtggtgctggtggtgctggtgtttctgcagacctggcgcgccgcgctcatcccgctgctggcggtgccggtgtccatcgtggggaccttcgcggtcatggcggcgctgggctattcgctgaacaatctgtcgctgttcgggctggtactcgccatcggcatcgtcgtcgacgacgccatcgtggtggtggagaacgtcgagcgccacatcggcctcgggctttcggtcaaggaagcggcgcgccaggccatgcgggaggtgacgggaccgatcatcgccatctcggtggtgctgggtgcggtgttcattccggcggccttcgtctccggcatcaacggacagttctaccgccagttcgccgtcaccatcgccgcttccaccctgatctcggcgttcaactctctgaccttgagccccgcgctcgccgcggtcctgctcgagccccaccatgcccgcaaggaccgtttgagcctttggatcgaccggttgttcggctggctgttccgtgggttcaaccggggtttcgatgcctgctccaacggctacgccggcctggtcaaacgcctgctgaggctgtccggcgtcgtgctggcgctgtatggagggctgctcgccttcaccggctacgaattcgagcgggtgcctggcgggttcattccactgcaggacaagggctatctggtggtatttgcccagttgccggaggccgcctctctggaacgaaccgatgccgtgctgcacagggcatcggaaatcatcctggcccagccgggcgtgcagggaacggtggcgtttcccggtttttcggtcgtcagcggcgccaatacctcgaatgccggcaccatcttcgtgcctctcaagccgttcgaggagcgggtggccaagggcctgtcggcccagcggatattgggcgaattgcagcccaagctcggcggcgtgaaggaggctttcatcggcatctttcctccgccgccgatcctgggtctgggcagccttggcggcttcaagctgcagatccaggaccggggcaacgagggcttcgacgcgctgaacggcgcactgcaagccgccctcgacgcaggccggcagacaccgggactggcgggactgttcaccagtttccaaaacaacgttccgcagctctatgtcgacatcgaccgggtcaaagccaagtcgcagggcatcccgctctcggaaatcttcgacaccatgcagatttatctcggatcgctctatgtcaacgacctcaacctgttcggccgcacctaccaggtcacggcccaggccgacggcgagtaccgccgcgaacccgaggacatcggccggctcaaaacccgcaacgccgcgggggccatggtaccgctggcggcgctaatgacagtgagggaaatcagcgggccggagcgggtgcttcgctacaatatgtaccctgcggccgagatcaacggctctcccgcgcccggtgtcagttcggggcaggcgatcgctctgatggaggagctgttgaggaggaccctgccgctgtccatggatttcgaatggaccgagttgacctaccagcagatcctggcgggcgacacggccgtctatgtgttcgccctctcgagcctgctggtgttcctggtcctggtggctttgtacgaaagctggatactgccgctcgccatcgtcctcatcgtgcccatgaccctgatgtgcgctctgggcggggtatggctgcggagcggagacaacaacatcttcacccagatcgccttgctggtgctggtcggcctggcggccaagaacgccatcctgatcgtcgaattcgccaagacccggcgggaagaaggggtggacgcgatggcggcagccctcgaagcctgccggctgaggttccgaccgatcctcatgacttcgttcgcgtttatcatgggcgttttgcccctcatgttcgccaccggggcaggcgccgagatgcggcaggccttgggggtgccggtgttcttcggcatgttgggcgtgacggtgttcggcctgctgttcaccccggtgttttatcatgtcttgcaaaggcttgccgaccggagccgtggccatgccgttccagcggccggcgggtccggatga

SEQ ID NO: 2738 - protein, 1055 aa, Methylococcus capsulatus str. Bath
MKFAHFFIDRPRFAIVLSVITVLIGGIAMFALPIAQYPEVVPPTIVVSTTYPGANPKVIAETVAAPIEQEVNGVERMLYMSSQSTSDGQMQLTITFEIGTDMDIAQMQVQNRVSNALPKLPEDVRRQGVTTKKSSPDILLVIHLVSPNQRYDQLYLSNYALLNIRDQILRLPGVGDVRTFGAGDYSMRVWLDPTRIAALNMTAGDVVRAIREQNIQVPAGVIGQPPLDGSPDFQLNVNTMGRLASVEQFGAIIVKYGEGGSLVRLRDVARIELGANRYSLRSQLNNEDAVAMPISLRPGANALDTARRIKSKMQTLKQRFPEGVDYRIVYDTTIFVEQSLDAVTRTFFEALALVVLVVLVFLQTWRAALIPLLAVPVSIVGTFAVMAALGYSLNNLSLFGLVLAIGIVVDDAIVVVENVERHIGLGLSVKEAARQAMREVTGPIIAISVVLGAVFIPAAFVSGINGQFYRQFAVTIAASTLISAFNSLTLSPALAAVLLEPHHARKDRLSLWIDRLFGWLFRGFNRGFDACSNGYAGLVKRLLRLSGVVLALYGGLLAFTGYEFERVPGGFIPLQDKGYLVVFAQLPEAASLERTDAVLHRASEIILAQPGVQGTVAFPGFSVVSGANTSNAGTIFVPLKPFEERVAKGLSAQRILGELQPKLGGVKEAFIGIFPPPPILGLGSLGGFKLQIQDRGNEGFDALNGALQAALDAGRQTPGLAGLFTSFQNNVPQLYVDIDRVKAKSQGIPLSEIFDTMQIYLGSLYVNDLNLFGRTYQVTAQADGEYRREPEDIGRLKTRNAAGAMVPLAALMTVREISGPERVLRYNMYPAAEINGSPAPGVSSGQAIALMEELLRRTLPLSMDFEWTELTYQQILAGDTAVYVFALSSLLVFLVLVALYESWILPLAIVLIVPMTLMCALGGVWLRSGDNNIFTQIALLVLVGLAAKNAILIVEFAKTRREEGVDAMAAALEACRLRFRPILMTSFAFIMGVLPLMFATGAGAEMRQALGVPVFFGMLGVTVFGLLFTPVFYHVLQRLADRSRGHAVPAAGGSG

SEQ ID NO: 2739 - DNA, 3075 bp, Methylococcus capsulatus str. Bath
  CDS (1)..(3075): transl_table=11
atgacactgagcgacatttccatccgccggccggtgctggcgacggtgatgagcctcgctttggtgctggtcgggctgatgtgtttccagcgcctgccggtgcgggagtatcccaacatcgatgcacccgtagtctcggtccgcagcgtctacaagggcgccagttcggaggtgatcgagagccaggtgacgcggccgctggaggactcgctgtccggcatcgaaggcatccggaccatgaagtcggtcagccgcgaagaagtcagccagatcaccctcgagttcaacgtcagccgcgaccaggattcggcggcggccgatgtgcgcgaccgggtgtcgcgggtcagggcccggctgccgcgcgagatggacgaacccgtcatcagcaagatcgaagccgacgcccagcccatcctgtggcttgctttttccagcgatcgccatagtcccctggaaatcaccgatttcgccgatcgttacgtgcaggaccggctgcagactctgccgggcgtcgccagtgtgatcatcggcggtgaacgccgctatgcgatgcggctgtggctcaaccgcgagcggatggctgcccacggggtgacggtgcaggatgtcgaggcggcgctgcagaagcgcaacgtcgaactgccaggcggacgcatcgaaagtgcacagcgcgagttcaccgtattcagcgagaccgacctgaaaacggtcgaagaattcaacgctctgatcgtccgggaggtgaacggttttctggtgcggctgtcggacatcggtcgggccgagctgggggcggcggatgagcgcaacatcgtgcgggtgaacggcaatccggcggtggcgctgggggtggtcaagcaggccacggccaacaccctggaggtggcccggtcggtgcgggcggagctgccgaaaatcctgcaaaccctgccggacgggatgacgctggaagtgtccttcgacacctcccagttcatcgacgagtccatccattccgtctacaagaccctggccgagtccctggggttggtcacgctggttacctggtcgtttctgcgttcggcgcgcgctaccctcatcccgttcgtgaccatcccggtctctctgatcggcgccttcatcttcatttatgcgctggggttttcggtcaacattctgaccctgctggcgttggtgctcgccatcggcctggtggtggatgacgccatcgtgatgatggagaacatctaccggcgcatcgaaggcggtacgccccctttgagggcggcggtcgagggcagccgggaaatcgccttcgcggtgattgccatgacgttgacgctggcttcggtcttcgcgccgctggcgttcatgagcggcaataccggccggctgttctctgaattcgctctggcggtgtcctgcgcagtgctggtctccggcttcgtggcgctgacgctgaccccgatgatgtgctcacgcctgttgaagccgggcgctaccgtcaggacggggcgggccgaaagcggccaggcctccggtttcacggcgctctaccgaaaggggctcgaggccgccttgcggcaccggtgggccgtgatcggggtgatgctgggtatagccgtcggcgcggtagggctgttccgtgcgctcaacgcggaactgtcgccgctggaggaccgcggcaacatcatcatcatgatcgcggcccccgaaggtgcgaccgtagagtacaccgaccgttatgcccgcgaagtcgaggcgatggtccagccgatcccggaagtccggagttatttcatggtggtggcgccggggttggaccggcccaacccggtgaattccgcgatcggtttcgtgcgcctgaagccatggcagcagcgccaccgctcgcagcaggagatcgcggcgaccttgttgccgaagctgatggccttgccgggggtgatggctttcgccatcaatcctccttccctggggcagagcttccgcagcccgcccgtgcagttcgtgatccaggggccgacctacgaaaagctcgatggtgtggcggcgcaattggtcgaccgggcccggcagtacgccggcttggtcaacgccgataccgacctcaagctcgataagccgcagatcagtgtgcaggtgaaccgggaaaaggccgctgacgtcggggtcgacgtcgacgagatcggccggacgctgcagacgctgctgggcggccgtcaggtgacgcgtttcaagaaaggcggtgaacagtacgacgtgatcgtcgaactggaggatgccgagcggatgaccgtgaacgacgtgggctcgatctacctgcgcggtgccggcggccggctggtccagctcgccaatctggtcgagacccgggaaaaaggcgcggccaaggaactcaaccatttcaaccggctgcgttcggcggtgctgtctgccagcgtcacccccggcttcacattgggtgaggccctgtcctacctcggcgcagcggcgaaggagattctgccggccgatttcaagaccgatctcgatggccagtcgcgcgagttcgtcgaatccagtcgcacgctctacctcaccttcgtgttcgcgctgctgttcatttatctggtgctcgcggcgcagttcgagagcttctccgatccgttcatcatcatgctcactgtgccactggccgtgaccggtgcgctgctttcactgaaatggaccggtggcaccctcaatgtctatagccagatcggcatgatcatgctgatcggcctggtgaccaagaacggcattctgatcgtggagtttgccaaccagctccaacgggcggggcgcggtctcgtggaggctgtggtcgaggcctccgtgctgcgcttccggccgatcctgatgacctcgctgaccatgattctgggcgccctgccgctggccttgtcgtcgggcgccggggccgagagccggcagcagatcggctgggtcatcgtcggtggactgctcatcgggaccgtattcacagtgttcgtcattccggccgtatataccctgctggccaagcctccgaggacgcaggacgaagggaacgaaagggcggccggcgtggtctag

SEQ ID NO: 2740 - protein, 1024 aa, Methylococcus capsulatus str. Bath
MTLSDISIRRPVLATVMSLALVLVGLMCFQRLPVREYPNIDAPVVSVRSVYKGASSEVIESQVTRPLEDSLSGIEGIRTMKSVSREEVSQITLEFNVSRDQDSAAADVRDRVSRVRARLPREMDEPVISKIEADAQPILWLAFSSDRHSPLEITDFADRYVQDRLQTLPGVASVIIGGERRYAMRLWLNRERMAAHGVTVQDVEAALQKRNVELPGGRIESAQREFTVFSETDLKTVEEFNALIVREVNGFLVRLSDIGRAELGAADERNIVRVNGNPAVALGVVKQATANTLEVARSVRAELPKILQTLPDGMTLEVSFDTSQFIDESIHSVYKTLAESLGLVTLVTWSFLRSARATLIPFVTIPVSLIGAFIFIYALGFSVNILTLLALVLAIGLVVDDAIVMMENIYRRIEGGTPPLRAAVEGSREIAFAVIAMTLTLASVFAPLAFMSGNTGRLFSEFALAVSCAVLVSGFVALTLTPMMCSRLLKPGATVRTGRAESGQASGFTALYRKGLEAALRHRWAVIGVMLGIAVGAVGLFRALNAELSPLEDRGNIIIMIAAPEGATVEYTDRYAREVEAMVQPIPEVRSYFMVVAPGLDRPNPVNSAIGFVRLKPWQQRHRSQQEIAATLLPKLMALPGVMAFAINPPSLGQSFRSPPVQFVIQGPTYEKLDGVAAQLVDRARQYAGLVNADTDLKLDKPQISVQVNREKAADVGVDVDEIGRTLQTLLGGRQVTRFKKGGEQYDVIVELEDAERMTVNDVGSIYLRGAGGRLVQLANLVETREKGAAKELNHFNRLRSAVLSASVTPGFTLGEALSYLGAAAKEILPADFKTDLDGQSREFVESSRTLYLTFVFALLFIYLVLAAQFESFSDPFIIMLTVPLAVTGALLSLKWTGGTLNVYSQIGMIMLIGLVTKNGILIVEFANQLQRAGRGLVEAVVEASVLRFRPILMTSLTMILGALPLALSSGAGAESRQQIGWVIVGGLLIGTVFTVFVIPAVYTLLAKPPRTQDEGNERAAGVV

SEQ ID NO: 2741 - DNA, 3099 bp, Idiomarina loihiensis L2TR
  CDS (1)..(3099): transl_table=11
atgttgttgtcagacctttctgtaaaacgtccggtttttgcaaccgtactgaatattctgctggtggtcttcggtattgtggcttttaccatgctgccattgcgagaatatccggatattgatcgtcccatagttactattgatacagactaccccggtgcctctgccgaagttgtagaaactcaggtcacgcagttagtcgaagaccgtattagtggcatagaaggcattaaaaacattagctctagcagccgcaacgggcgctccagtatcagtatagagtttaatctgactcgcgacattgatgccgcttctaacgacgttcgtgagcgggtgtcccgggtacttgataacctgccggaagaagctgacccccctgaagtttcaaaggcctcaagcgatgagagtaccattgtctggtataaccttcgcagcgagagcatgtcgatactagagctaactgactacgcggagcgatacatcgtagaccgtctgtcagttgccgacggtgtcgcacgggtagtcattggtggtgaccgccgttacgccatgcgtgtatggctggaccgtgatgctatggcggcacggcaggtgacggtaaccgatattgttagccgtttgcgagaagaaaacgttgagcttccggcaggtgaagttgagtcaaccgacagagaattctcggttcgtatggcacgcgcgtatttatcgccggaagactttaaaaacctggtgatacgacagggcgacgacggttacttagtccggttaggtgaagtggcccgggtagaactgggtgccgaagatgacaaaaccgacttccggggtaatggcgttaacatggttggtgtcggtgtcattaaacagtcgaagggcaacaccctggatgtggtgaagaacgttcaccgggaaatgaaaaaaattcaggaaaccctgcctgaaaccatgtatctggcacccagctatgactcgtcgatatttattcagggctcagttgacgaagtttataatactctggctgtggcgatggcactggttattgtcgttatttacctgtttttaggaaatataagggcaactattgttcctgcgctgacggtgcctgtggcgattattgcgtcctacatggtgctattcgcactgggcttttccataaacttgttaaccttgctggcgctggtactggctattggactggtggttgatgactctattgtcgtgctggaaaacatataccgccgtatagaagagggagagcctccggttctggctgcttatcgtggagccagagaagtgggctttgcggttattgcgacaactctggtactgatttcggtatttgtaccgctggctttcttagacggaaatatcggtaagctttttacggagtttgcccttgccatagccgctgctgttgctttctccagtattgcagcactgacgttaacgccaatgctgagctctaaaatactgagtaaaaaagagcgtaccagtaaatttggtaaggcttttgatgcgactttcaactggctggaacaaggttaccgtggcgtgcttgagaaaagcgtgaagcggcctatgatggcaatcgtgttggtggttatgtcgggcgttgttgcgtttggtttattcagctttattccacaagagttcgcaccacctgaagaccgcggtactttttacattcaggtgcgcagtgccgaaggcgcaagtttcgagtccagctccagacatatggacgaaatagaacagattcttttgccttatattgatgaaggcaagattgaccgtttgattgttcgtgctcccggttggggtggtagcgccggtattgccatcgtcggtgccgttccttttgacgagcgtgactggtcaagttttgatcttatggaagaaatgcgctctcagttggattcggttgtcggcgttcaggcgttcgcttttatgcggagtggtattagcggcggaggcgggcgtccggtcgaattcgtgttgcaggggaatacctacgagcgcttagctgaatttcgtgacattgttattgaggaagcttctaccaacccgggtttacaggatctggacagtgactataaagaaactttgccacaattactgattcaggtggatgaagccagcgcggctgatttaggagtttcagtgcaggatataggtatcaccctgcagtctgtattaggccaaagacgagtgacaacctaccttgatcgcggtgaagagtatgacgtgatgctggagggcgaaaaagccgattaccgtagccccagcgccatagataatatctatgtacgttcgcgtaaaagtgacgaattgattccgctttctaacctcgtaaccattactgagcaggccacttcagcccgacttaaccgatacaaccgtatgcgcagtgtcaccattgaagcgaatctggctgagggatattcactgggtgaagcgttgagttatttggaaggcgtggtgcaggaaaaactgccggaagatgtttcaattgactataaaggcgagtctcaactgtacaaagagagtggtagttcaattgtctttgtttttgggttggcattggtcattaccttcctggttctggctgcgcagtttgaaagctttattcatccgttggtcattatgctggcggtacctatggctatagttggggctttaatggcgctgtatctggccggaatgagcatcaatatatacagtcagataggcatagtaatgctcattggtctggcagcgaaaaatggtattcttattgttgaatttgcgaatcagttgcgtgattcaggagtggagttcaaagaagctgtgcttaaagctgcgcaacagcgtttacgaccgattgtgatgacggcgttcacaactctaatgagttccgtgccacttatcctcggttctgggccgggagctgaaagccgtatggtcattggtacggttatttttgccggggttgcagtgtcagcatttttgacgttatttgttattcctgctctgtatatcgctctggcgaagaataccagctcaccaatggctatcacgcgtaaactggaatctttacaggaagagtatccagaccatcatagttga

SEQ ID NO: 2742 - protein, 1032 aa, Idiomarina loihiensis L2TR
MLLSDLSVKRPVFATVLNILLVVFGIVAFTMLPLREYPDIDRPIVTIDTDYPGASAEVVETQVTQLVEDRISGIEGIKNISSSSRNGRSSISIEFNLTRDIDAASNDVRERVSRVLDNLPEEADPPEVSKASSDESTIVWYNLRSESMSILELTDYAERYIVDRLSVADGVARVVIGGDRRYAMRVWLDRDAMAARQVTVTDIVSRLREENVELPAGEVESTDREFSVRMARAYLSPEDFKNLVIRQGDDGYLVRLGEVARVELGAEDDKTDFRGNGVNMVGVGVIKQSKGNTLDVVKNVHREMKKIQETLPETMYLAPSYDSSIFIQGSVDEVYNTLAVAMALVIVVIYLFLGNIRATIVPALTVPVAIIASYMVLFALGFSINLLTLLALVLAIGLVVDDSIVVLENIYRRIEEGEPPVLAAYRGAREVGFAVIATTLVLISVFVPLAFLDGNIGKLFTEFALAIAAAVAFSSIAALTLTPMLSSKILSKKERTSKFGKAFDATFNWLEQGYRGVLEKSVKRPMMAIVLVVMSGVVAFGLFSFIPQEFAPPEDRGTFYIQVRSAEGASFESSSRHMDEIEQILLPYIDEGKIDRLIVRAPGWGGSAGIAIVGAVPFDERDWSSFDLMEEMRSQLDSVVGVQAFAFMRSGISGGGGRPVEFVLQGNTYERLAEFRDIVIEEASTNPGLQDLDSDYKETLPQLLIQVDEASAADLGVSVQDIGITLQSVLGQRRVTTYLDRGEEYDVMLEGEKADYRSPSAIDNIYVRSRKSDELIPLSNLVTITEQATSARLNRYNRMRSVTIEANLAEGYSLGEALSYLEGVVQEKLPEDVSIDYKGESQLYKESGSSIVFVFGLALVITFLVLAAQFESFIHPLVIMLAVPMAIVGALMALYLAGMSINIYSQIGIVMLIGLAAKNGILIVEFANQLRDSGVEFKEAVLKAAQQRLRPIVMTAFTTLMSSVPLILGSGPGAESRMVIGTVIFAGVAVSAFLTLFVIPALYIALAKNTSSPMAITRKLESLQEEYPDHHS

SEQ ID NO: 2743 - DNA, 3075 bp, Azoarcus sp. EbN1
  CDS (1)..(3075): transl_table=11
atgatcctgtccgaggtctgtatcaagcgtccggtgttcgcgacagtgctgtcgctgctggtgctgctcgtcgggctgatgtcgtattcgcgcctgacggtgcgcgagtacccgaacatcgacgaaccggtcgtcaccgtcgatacgacctacaccggcgcgagcgccgagatcgtcgagtcgcaggtcacgaaaccgctcgaggattcgctcgccgggatcgaaggcgtcgacgtgatccagtcgatcagccgccaggagcgcagccagatcacgatccgtttccgcatcgagcgcgacgccgacagcgccgcggccgacgtgcgcgaccgcgtgtcgcgcgcgcgccgccagctgcccgacgacatcgacgagccggtgatcgcgaaagtcgaggccgacgcgagcccgatcatctggatcgcgttctcgtcggatcgccactcgtcgctagaactgagcgacatcgccagccgcatcgtcaagccacggctgcagacgctctccggcgccgccgacgcgcgcgtgttcggcgagcgccgctattcgatgcgcatctggctcgaccgcgaccggcttgcggcgttcaacctcacgccgcaggacgtcgaggacgcgatccggcgccagaacgtcgagctgccggccgggcgcatcgaaagccgcgagcgcgagttcgccgtcgtcgcgcagaccgatctcgacgaaccgcaggagttcgaggcggtcgtcgtgcgcgaacccgggacggccgacgggcgcccggtgcgcatccgcgacgttggccgcgtcgaggtcgccgcgcagagcgagcgcacgctggtgcgtttcatgggcaagccggcggtgtcgctcggcctgatcaagcagtcggtcgcgaacccgctcgacctcaagcgcggcctcgccgagatgatgccggtgctcgaggcggaactgcccgaaggcatgacgatgagcatcgcgaacgacacgaccgtgttcatcgaacgctcgatcgcatcggtgttcgcgacgatctgggaggcggtgctgctggtcgcggtgatctgcttcttcttcctgcgcaactggcgcgcgatgctggtgccgctggtgacgatccccgtgtcgctcgtcggcgcgttcacgctgatgctggtgttcggcttctcgatcaacacgctgacgctgctcgcgctggtgctcgcgatcggcctcgtcgtcgacgacgcgatcgtcgtgctcgagaacatctaccggcatgtcgaggacggtatggagccggtccaggcggcttttcgcggcgcgcgcgagatcggcttcgccgtcgttgcgatgacgatcacgctcgccgcggtctatgcgccggtcgcgttcatgaccgggcgcaccggcaagcttttcaccgagttcgcgctgacgctcgccggcgcggtgatcgtgtcgggcttcgtcgcgctgacgctgtcgccgatgatgtgctcgaagctgctgcgccacgagcagcggcatgggcgtttctacaacgcgatcgagcggttcctcggcgggctgaccaacggctaccgccgcgcgctgatcgtcgcgctgcaaatgcgctgggccgtggtgctcgcgttcgtcgtcgtcgccggctcgtcgctcgtgctgctcaagacgctgaagacggaactcgcgccggtcgaagaccgtggtcgcgtcgtcggcatcttttccggaccggaaggggcgacgatcgacttcatggggcgctacgccgaacaggtcgaggcgatcttcgcccagacaccggaagtcgaccgctacctcgtcatctccggcaacccgacggtgtcccagggaatctcgttcgccggcttcacggactgggccgagcgcgagcgcagcgccgccgagatcgccggcgagctgcggccgaagctctcggcggtgccggggctgctcgcgttcccggtactgccggcggcgttcgggcagagttcgcgctcgcgcccggtcagcttcgtcatcacgacgtcggagtcgtacgacgaactcgcgcgctacaccgaacggatgctcgacgagctgggcggccatccgggcttcgtgtcgccagacaccgacctgaagctgacgaagccggaactcgctgtcgacgtcgatcgcgaccgcgcggccgacctcggcattcccgtcgacgtaatcggccgcacgctcgagacgatgctcggcgggcggcaggtcacgcgctacaagaaggacgccgaacagtacgacgtgatcgtgcaggtcgaagcggcaagccgcgccattgcccgcgatatccgcgagatctacgtgcgtggcaagagcggcgcgatggtgccgctcgcgaacctcgtgcaggtgcgcgagacggtcagcccgcgcgagctcaatcatttcggtcagcggcgttcggtgacgatctcggcgaacctcgggccggatcttgcgctcggcgaagcgctggcgtttctcgaacagacggccgcgcgcgtgctgccggccggctatgcgatcgactacgacggccagtcacgcgaattcaagaccagctcggcgagcctcgcgctgactttcgtgctcgcgctggcgttcatctatctcgttctcgcggcgcagttcgagagcttccgcgacccgttcatcatcatgctgacggtgccgttgtcgatgaccggcgcgctcgcggcgctgtatttcaccggcggcacgctgaacgtctacagccagatcggtctcgtcacgctggtcggcctgatcaccaagcacggcatcctgatcgtcgagttcgcgaaccagttgcgcgacgacggcgccgcgctgacggaggcggtcatcgacgcgtcggtgctgcggctgcggccgatcctgatgacgacgggagcgatggtgctcggctcgattccgctcgcgctcgcgaccggcgccggcgccgagagccgccagcagatcggctgggtcatcgtcggcggcctgctgctcggcacggtgttcacgctgttcgtcgtgccgaccgtctatacgctcctcgcccgccgcgagcgcacccgcatcgaggccgagcagccggtcgtggcgactgaataa

SEQ ID NO: 2744 - protein, 1024 aa, Azoarcus sp. EbN1
MILSEVCIKRPVFATVLSLLVLLVGLMSYSRLTVREYPNIDEPVVTVDTTYTGASAEIVESQVTKPLEDSLAGIEGVDVIQSISRQERSQITIRFRIERDADSAAADVRDRVSRARRQLPDDIDEPVIAKVEADASPIIWIAFSSDRHSSLELSDIASRIVKPRLQTLSGAADARVFGERRYSMRIWLDRDRLAAFNLTPQDVEDAIRRQNVELPAGRIESREREFAVVAQTDLDEPQEFEAVVVREPGTADGRPVRIRDVGRVEVAAQSERTLVRFMGKPAVSLGLIKQSVANPLDLKRGLAEMMPVLEAELPEGMTMSIANDTTVFIERSIASVFATIWEAVLLVAVICFFFLRNWRAMLVPLVTIPVSLVGAFTLMLVFGFSINTLTLLALVLAIGLVVDDAIVVLENIYRHVEDGMEPVQAAFRGAREIGFAVVAMTITLAAVYAPVAFMTGRTGKLFTEFALTLAGAVIVSGFVALTLSPMMCSKLLRHEQRHGRFYNAIERFLGGLTNGYRRALIVALQMRWAVVLAFVVVAGSSLVLLKTLKTELAPVEDRGRVVGIFSGPEGATIDFMGRYAEQVEAIFAQTPEVDRYLVISGNPTVSQGISFAGFTDWAERERSAAEIAGELRPKLSAVPGLLAFPVLPAAFGQSSRSRPVSFVITTSESYDELARYTERMLDELGGHPGFVSPDTDLKLTKPELAVDVDRDRAADLGIPVDVIGRTLETMLGGRQVTRYKKDAEQYDVIVQVEAASRAIARDIREIYVRGKSGAMVPLANLVQVRETVSPRELNHFGQRRSVTISANLGPDLALGEALAFLEQTAARVLPAGYAIDYDGQSREFKTSSASLALTFVLALAFIYLVLAAQFESFRDPFIIMLTVPLSMTGALAALYFTGGTLNVYSQIGLVTLVGLITKHGILIVEFANQLRDDGAALTEAVIDASVLRLRPILMTTGAMVLGSIPLALATGAGAESRQQIGWVIVGGLLLGTVFTLFVVPTVYTLLARRERTRIEAEQPVVATE

SEQ ID NO: 2745 - DNA, 3114 bp, Francisella tularensis subsp. tularensis Schu 4
  CDS (1)..(3114): transl_table=11
atgcgtcttattgatctttttatcagaaggccagtattatccctttcaataagctttatgattattgtcgttggggttggttcattttttaaacttcaggttagacagtatccgtacatagatagcgcgacaattacagtcacaacatcatatccaggagcaaatccagccactattcaagcatttgttactagacctttagaagctgcagttggctcatcaaaaggtatcgattatatgacttctgaatcagcactaggaactagtacaatcactgtatatgtaaagcttggatataatacaaacgatgtactctcagaagtagtacaaaatgttaactctatacttaatcagttaccacaagatgcctactctcctgctatcaaacttaatcctgcggataacttcccttctttgattttagcttttactagtaaaacaatgaatacttcagagatatcggcatatataaactctgagctgactccaaaactacttgctgagggtggtttatcagaaattaatgtctggggtaatatgccatatgcaatgcgtatttacccaaataaaactcgtatggccgagtatggtataacaccaacagaactagcaacagctattggttcaaatagtttagtttcagcaggtggtcaaatccaaggtccatacctaaactatacgcttaatcctgaaaccagcatgtctacagctcaagaatatagaaatctgattatcaagaaaagcgataatcaaatagttcgccttagcgatgtagctagagtagagctaggtgcacaaaactataactcctcagtatattttgatggtaaaaatgccgtgcttgcaggtgctgttgtatcgcctgaagagaatccattagatgttgtcaaccgattagtcaaacagcttccaaatatcaaagcttctctacctaatggcttaaatgttgatgttgcttataacagtaccttatatatagagagttctattgatgaagtattacatactttactagaagccgtaattattgtatctatagtaatgttcctatttttaggctcattacgagctattattgtaccaataattgctattcccttatcgattataggatcatttttccttatgagtattatgggattctcgattaacttacttacattattagcgatgattttagctataggattagtagttgatgatgcaattgttgtgctagagaatatttatcgtcatattgaagaaggtatggagccttttgctgctgcgatcaaaggtgcccgagaaattgctaatcccgtgatactaatgactctaacgcttatagttgtttatgctcctatcggtatgatgggtggatttactggacaacttttcacagaatttgcttactcacttgccggtgctgtgcttatctctggtatagttgcttatactctctcgccaatgatgtgctcaaaggttcttaaccgtgaaatgatgagctcaaagctagtcaaatttattgataatgtttttagtaaactagcagcaaagtacaaagccttactaatgtttgttttagatatcaaacctgccatagcaattgttggaattatagttttagcaagctgttttatcatggggaaaggtattaaatctgaattagctccaaatgaagatatgggcttcttaggagttatgggacaagctccgtcatcagcaaatattaactatctagagacctttggcaaaaagctagcaaacacacttgatgaaattccaggtaaacaaaatgtctttattcttaatggtataatgagctctaatgtgatttttggcggttttattatgcaaccttgggatgaacgaaaaatatcccagcaacaagctgcaaacattgctcaagccaaagtcactgaattacctggtgttcaaacatatacataccaaacgcctgctttaccagggattccacgcggagctccactttcattagttattcaaagtgtcaatgactatgaagctatcgatgagatcactaataaaatcattgcaaaaatgatgagcaatggattatttgtatttgctcagagtgaccttaagtttgataatcctattgttgatattaatattgatcgtgataaggctggaattttaggtattacaatgtctgatattgctaaaactctaggttattcatacgccggtggttatattaattatttctttttaaaaggctatagtttccaagttattccacagttagctagaaatgagatgcttactcaggaacaacttggtaatatttatatccgttctgatgaaatgaataaactatttgactctgaggtaccattatcagctttagtaaccttcaaaacagaaggacaacctcttacgctaaatactttccaacagttaaatgcatcaacaatttcagctgttatggcaccagggataacccaaggacaagctatagaatatgtccaaagtgttgtcaaaagcatgcttcctgaaggcttttcatataacttctccggttcagcacgtcaatatatcgaaaatggtaatacaatgatggttgcatttgcatttgcgattgtattgatattcttagcattatcagcacagtttgaaagttttagagactcgcttgtaattttagttactattccaatggcaatctctggagcattgattccactctatgttgggcagtacttaggagctagttgggcatctttgaatatttatactcagctaggcttagttactctaataggcttaatatctaaacaaggtattatggttgttgagtttgccaatcacttacaaaaacataatggcatgaacaaatatgatgcgattgttacatcttcgtctcaacgtctaagaccaatattaatgactgtatcagcaatggttgttggcgtaatacctcttgtaacctcatctggagctggtgcaattagtagaaactgtatcggtgtagttatatcaagtggtttagttattggtgcaatattctcactatttgtactacctgtagtatatatgtatatagccagtgacaaatctaaattagtcaaaactgatgctgaacaacaacaaataatagatcaaataaagtaa

SEQ ID NO: 2746 - protein, 1037 aa, Francisella tularensis subsp. tularensis Schu 4
MRLIDLFIRRPVLSLSISFMIIVVGVGSFFKLQVRQYPYIDSATITVTTSYPGANPATIQAFVTRPLEAAVGSSKGIDYMTSESALGTSTITVYVKLGYNTNDVLSEVVQNVNSILNQLPQDAYSPAIKLNPADNFPSLILAFTSKTMNTSEISAYINSELTPKLLAEGGLSEINVWGNMPYAMRIYPNKTRMAEYGITPTELATAIGSNSLVSAGGQIQGPYLNYTLNPETSMSTAQEYRNLIIKKSDNQIVRLSDVARVELGAQNYNSSVYFDGKNAVLAGAVVSPEENPLDVVNRLVKQLPNIKASLPNGLNVDVAYNSTLYIESSIDEVLHTLLEAVIIVSIVMFLFLGSLRAIIVPIIAIPLSIIGSFFLMSIMGFSINLLTLLAMILAIGLVVDDAIVVLENIYRHIEEGMEPFAAAIKGAREIANPVILMTLTLIVVYAPIGMMGGFTGQLFTEFAYSLAGAVLISGIVAYTLSPMMCSKVLNREMMSSKLVKFIDNVFSKLAAKYKALLMFVLDIKPAIAIVGIIVLASCFIMGKGIKSELAPNEDMGFLGVMGQAPSSANINYLETFGKKLANTLDEIPGKQNVFILNGIMSSNVIFGGFIMQPWDERKISQQQAANIAQAKVTELPGVQTYTYQTPALPGIPRGAPLSLVIQSVNDYEAIDEITNKIIAKMMSNGLFVFAQSDLKFDNPIVDINIDRDKAGILGITMSDIAKTLGYSYAGGYINYFFLKGYSFQVIPQLARNEMLTQEQLGNIYIRSDEMNKLFDSEVPLSALVTFKTEGQPLTLNTFQQLNASTISAVMAPGITQGQAIEYVQSVVKSMLPEGFSYNFSGSARQYIENGNTMMVAFAFAIVLIFLALSAQFESFRDSLVILVTIPMAISGALIPLYVGQYLGASWASLNIYTQLGLVTLIGLISKQGIMVVEFANHLQKHNGMNKYDAIVTSSSQRLRPILMTVSAMVVGVIPLVTSSGAGAISRNCIGVVISSGLVIGAIFSLFVLPVVYMYIASDKSKLVKTDAEQQQIIDQIK

SEQ ID NO: 2747 - DNA, 3126 bp, Xanthomonas oryzae pv. oryzae KACC10331
  CDS (1)..(3126): transl_table=11
atgaaactctccgacctgtcgatcacccgcccggtgatggcggtggtgatgagtttgctgctgatcgtgctgggggtgatgtcgttcacccgcctcaccctgcgcgagttgccggcgatcgacccgcccatcgtctcggtgaatgtggaatacaccggtgcctcggcggcagtggtggaaagccgcatcacccaggtactggaagacgggctggccggcatcgagggcatttccaccattgaagcgcacagccgcaatggctcctccgatatcagcatcgaattcgtgcaatcgcgcgatgtggaagcggccgccaacgatgtgcgcgacgcggtcagccgcgtgtccgaccgcatgcccgaccaggcgcgcgcgccggagatttccaaggtcgaagccgacgccgaccccatcctgtggctcaacatgagctccagcaccatggacacgctgcagctgtccgactatgccgagcgctatgtcgtcgaccgcttttccagcctggatggcgtggcgcaggtgcggatcggcggacgccagcgctatgcaatgcgcatctggctggaccgcgaccaactggccgcacgcgacctcactgtcgccgatgtggaagcggcgctgcagaacgaaaatgtggaagtgcctgccggcagtatcgaatcggcgcagcgcgatttcaccttgcgcgtggagcgcagttatctcaagcccgaagacttcgccaagctgcccttgaacaagggcgagggcggttacgtggtgcgtctgggcgacgtggccagggtcgagctgagctcggccgagcggcgcgcgtatttccagagtaacggcgtgccgaatgtgggcctgggcatcgtgcgtaactccaccgccaacgcgctggatgtggcccgcaaagcacgcgcgcgcgctatagaagtgcagaagtcgctgccgcagggcacgaatattttcgtcgccttcgacaccaccaccttcatcgacgccgcggtggagcgcgtttatcacacgctggtggaagcggtggtcctggtgctggtggtgatctgggtgtttctgggtagcgcgcgcgccgcattgatccccgcggtgacggtgccggtgtgcctgatcgcctcctttatcgcgctgtatgcgttcgatttttcgatcaacctgctcaccttgctggcgttggtgctgtgtatcggcttggtggtggacgacgccatcgtggtggtggaaaacatccagcgccgcatcgatctgggcgagccgccgctggtggccgccaagcgtggtaccgggcaggtggcgtttgcggtgattgcgaccaccgcggtgctggtggcggtctttgtgccggtcggttttctgcaaggcaataccgggcggctgttccgtgagctggcggtggcgctggcggcggcggtggcgatctcggccttcgtggcgctgacgttgacgcctatgatgtcgtccaagttgttgcgcgcgcatgggcaggccaaacccaatcgctttcaccaatggttcgatgggcgcatgcaggcggtgtccggtgcgtatgggcgctcgctggagcggcatgtgcaccgcacctgggtctttgcgctgctgatgctgttggcgctgggcgccagcgcatggctgatgggccgcattccttccgaagtggcgccggccgaggaccgcggcaatttccagatcatgatcgacggcccggaaggtgccggcttcgattacacggtggggcagatgcatcaggtggaagacatcctgcgccccttcgtgggcccggacaaacccatcgtgcgcgccaacccgcgcgtgcccggcagcttcggcagcagcgaggaaatgcacaccggccgggtcagcgtgttcttgcaggattgggaaaagcgcacccgccccactaccgaagtggccgatgaggtgcagcagaaactcaatgtgctcagcggcgtgcgtgcacgcacgcaggtgagcggaggcctggtgcgtcgccgtgggcaaccgttccagctggtgctgggcgggccggattacgcggagattgcgcagtggcgcgatcgcatcctgcagcgcatggaagccaaccccggcctggtcggccccgactccgattacaaggaaacccgcccgcagatgcgcgtcaatattgatcgcgtgcgcgcggccgatctcggcgtgccggtaactgcgattggcggcgcgctggaagcattgatgggctcacgccgcgtcaccaccttcgtcgacaacggcgaggagtacgacgtgatgctgcaggccgggcgcgaaggccgcatgtcgccggaagatctcaccgcgatccgcgtgcgctccaaccgtggcgagctgattccgctttccaatctggtgactttgagcgaagtcgccgaagccggcaccttgaaccgcttcaatcgcctgcgtgcaatcacgatcacggcgggcctggcaccaggttatccactcggcgatgccatcgcctgggcgcagcaggcggcgcaggaagaactacccgaatacgcgcaagtggactggaagggcgaatcgcgcgaataccagcaatccggcagtgcggtgttgttgaccttcggcatggcgctgctggtggtgtatctggtgctggccgcgcagttcgaaagttttgcgcacccgttggtgatcatgctcacggtgccgttggcggtgctgggcgcgctggtgggcttgtggctgaccggtggcacgctcaacctgttcagtcagatcggcatcgtgatgctggtgggcctggcagccaagaacggcattctgattgtggaattcgccaaccaattgcgcgacgagggccgcagcgtgcatgcggcgatcgtggcgtcggcctcggtgcgtttgcgcccgatcctgatgacctcgattgccacggtggtcggcgcgattccgctggtggtggccggcgggcccggctcggccagccgcgccacgattggcgtggtggtgatcttcggcgtctcgctgtccacggtgttgtcgctgtacgtggtgccggcgttttacagcctgatcgccccgtacaccaggtcgcctgaagcggtggcacgccagctggaaaccctggacgcgcagacaccctcagtgggcggacatgcgtga

SEQ ID NO: 2748 - protein, 1041 aa, Xanthomonas oryzae pv. oryzae KACC10331
MKLSDLSITRPVMAVVMSLLLIVLGVMSFTRLTLRELPAIDPPIVSVNVEYTGASAAVVESRITQVLEDGLAGIEGISTIEAHSRNGSSDISIEFVQSRDVEAAANDVRDAVSRVSDRMPDQARAPEISKVEADADPILWLNMSSSTMDTLQLSDYAERYVVDRFSSLDGVAQVRIGGRQRYAMRIWLDRDQLAARDLTVADVEAALQNENVEVPAGSIESAQRDFTLRVERSYLKPEDFAKLPLNKGEGGYVVRLGDVARVELSSAERRAYFQSNGVPNVGLGIVRNSTANALDVARKARARAIEVQKSLPQGTNIFVAFDTTTFIDAAVERVYHTLVEAVVLVLVVIWVFLGSARAALIPAVTVPVCLIASFIALYAFDFSINLLTLLALVLCIGLVVDDAIVVVENIQRRIDLGEPPLVAAKRGTGQVAFAVIATTAVLVAVFVPVGFLQGNTGRLFRELAVALAAAVAISAFVALTLTPMMSSKLLRAHGQAKPNRFHQWFDGRMQAVSGAYGRSLERHVHRTWVFALLMLLALGASAWLMGRIPSEVAPAEDRGNFQIMIDGPEGAGFDYTVGQMHQVEDILRPFVGPDKPIVRANPRVPGSFGSSEEMHTGRVSVFLQDWEKRTRPTTEVADEVQQKLNVLSGVRARTQVSGGLVRRRGQPFQLVLGGPDYAEIAQWRDRILQRMEANPGLVGPDSDYKETRPQMRVNIDRVRAADLGVPVTAIGGALEALMGSRRVTTFVDNGEEYDVMLQAGREGRMSPEDLTAIRVRSNRGELIPLSNLVTLSEVAEAGTLNRFNRLRAITITAGLAPGYPLGDAIAWAQQAAQEELPEYAQVDWKGESREYQQSGSAVLLTFGMALLVVYLVLAAQFESFAHPLVIMLTVPLAVLGALVGLWLTGGTLNLFSQIGIVMLVGLAAKNGILIVEFANQLRDEGRSVHAAIVASASVRLRPILMTSIATVVGAIPLVVAGGPGSASRATIGVVVIFGVSLSTVLSLYVVPAFYSLIAPYTRSPEAVARQLETLDAQTPSVGGHA

SEQ ID NO: 2749 - DNA, 3111 bp, Pseudomonas syringae pv. syringae B728a
  CDS (1)..(3111): transl_table=11
atgaacatgtcgcgcctgttcatcctgcgtccggttgccaccacactgagcatgttggcaatcgtcctggcgggtctgatcgcctataccttgctaccggtttcggcgttgccccaggtcgactacccgaccatccgggtgatgaccctgtacccgggtgccagcccgcaggtgatgaccagttccgtgactgcgccgctggaacgtcaattcggacagatgcccggcctgacacagatggcctcgaccagctctggcggtgcgtcggtcattaccttgcgcttcagccttgaaatcaatatggatgtcgccgagcagcaggtgcaggcagcgatcaacgcggccaccaacctgctgccaactgacctgccagcgcctccggtctacaacaaggtcaacccggccgatactccggttctgaccctggcgatcacttcgaaaaccatgttgttgcccaagctcaatgatctggtcgatacgcgtatggcgcagaagatctcgcagatcagcggtgtcggcatggtcagcattgccggcgggcagcgtcaggcggtacggatcaaggtcaatccggaggcgctcgccgccaacagcctcaacctgtccgatgtgcgtactctgatcagcgcctccaacgtcaaccagccgaagggtaacttcgacgggccgacccgggtgtcgatgctggatgccaacgatcagctgaagtctccggaggagtacgccaacctgattctggcttacaaggatggcgcacccttgcgcctgaaggatgtcgccgaaatcgtcaatggtgccgaaaacgagcggctcgcggcctgggccaatcggagccaggcggtgctgttgaacattcagcgtcagccgggcgccaacgtcatcgaggtggtcgaccggatcaaggcgttgctgccgtcgatcaccgaaaaccttccggccggcctcgacgtcgtggtcctgacggaccgcacgcaaaccatccgcgcgtcggtgaccgatgttcagcacgaattgctgatcgcgatcgtcctggtggtgctggtcacgttcctgttcctgcgtcgtttcagcgcgacgatcattccttcgatcgccgttccgctgtcgctggtaggcacgttcggcgtgatgtacctggccggtttctcggtcaacaacctgacgctgatggccatgaccattgccaccggtttcgtcgtcgatgacgccatcgtcatgctggaaaacatctcccggcatatcgaagagggcgagacgcccctgcaggccgcgctcaagggcgcgaagcagatcggtttcaccctgatctccctgaccctgtcactgattgcggtattgatcccgctgttgttcatggccgacgtggtagggcggctgttccgcgagttcgcgattaccctggcggtcgcgatattgatatcgctggtggtctcgctgaccctgacgccaatgatgtgcgcacgcttgctcaagcgcgagcccagggaagaagagcagagccgcttttaccgcgccagtggtgcctggatcgactggctgatcgacatctacgcgggcaggctgcgctgggtgctcaagcatcagccactgaccctgctggtcgctttggccaccctggcattgacggtgctgctgtacatcgtcgtgcccaaaggctttttcccggtgcaggataccggggtgatccagggtatttcggaagcgccacagtcggtctctttcgcggcgatgagccagcgtcagcaggcactggccgacatcattctcaaggacccggcagtggtcagtctgtcgtcctacatcggtgtcgacggtgacaatgccacgctcaacagcgggcgtctgctgatcaacctcaagcctcacggagcgcgcgacctgactgcgtccgaggtgatccagcgcctgcagccagaggtcgacaaactgtcggatatccgtctgttcatgcagccggtgcaggatctgaccatcgaagaccgggtcagtcgcacccagtatcaattcagcatgtcgtcgcccgacgccgaactgctgacgttgtggagcgaaaaactggtagacgcgctcggcaagcggcccgaactgagggatgtggccagcgacctgcaggacaaaggtttgcaggtgtacctgaacatcgatcgtgatgcggccagccgggtcggggtcacggttgcgaacattaccgatgcgctgtacgacgcattcggtcagcgccagatatccaccatctatacgcaggccagccagtaccgcgtggtgctgcaggctgcgtcgggcagtgaactcggcccggcggcgctcgagcagatccacgtcaagaccaccgatggcgcacaggtgaagctgtcgagcctggcacgtgtcgagcagcgccaggcgcagctggccatcgctcacctcgggcagtttcctgcagtgatgatgtcgttcaacctggcacccgatatcgccttgggcaaggcggtgaaggtgatcgaggaggtcgagcaggagatcggcatgccgattggcgtgcagacgcagtttcagggcgcggccgaagcgtttcaggcttcgttgtccagcactttgctgctgattctggcggcagtggtcaccatgtacatcgtgctgggcgtgctctacgagagctacattcacccgatcaccatcctctcgaccctgccgtcggccgcggtgggggccttgttggctctgctgatcagcggcaacgatctggggatgatcgcgatcatcggcatcattctgttgatcggtatcgtcaagaagaacgcgatcatgatgatcgacttcgcgctcgacgcggagcgcaaccgcagtgttgcgcccgagcaggcgatctacgatgcggcgctgttgcgcttccggccgattctcatgaccaccctggcagcattgttcggcgccatcccgctgatgctcgccagtggctccggcgccgaattgcggcaacccctggggctggtgatggtcggcgggctgttgctcagccaggtcctgacactgttcaccacgccggtcatctacctgtatttcgaccgccttggccgtcgctggagtcgcaaacctgccgacccggaccgacaggaacgggctgacgcatga

SEQ ID NO: 2750 - protein, 1036 aa, Pseudomonas syringae pv. syringae B728a
MNMSRLFILRPVATTLSMLAIVLAGLIAYTLLPVSALPQVDYPTIRVMTLYPGASPQVMTSSVTAPLERQFGQMPGLTQMASTSSGGASVITLRFSLEINMDVAEQQVQAAINAATNLLPTDLPAPPVYNKVNPADTPVLTLAITSKTMLLPKLNDLVDTRMAQKISQISGVGMVSIAGGQRQAVRIKVNPEALAANSLNLSDVRTLISASNVNQPKGNFDGPTRVSMLDANDQLKSPEEYANLILAYKDGAPLRLKDVAEIVNGAENERLAAWANRSQAVLLNIQRQPGANVIEVVDRIKALLPSITENLPAGLDVVVLTDRTQTIRASVTDVQHELLIAIVLVVLVTFLFLRRFSATIIPSIAVPLSLVGTFGVMYLAGFSVNNLTLMAMTIATGFVVDDAIVMLENISRHIEEGETPLQAALKGAKQIGFTLISLTLSLIAVLIPLLFMADVVGRLFREFAITLAVAILISLVVSLTLTPMMCARLLKREPREEEQSRFYRASGAWIDWLIDIYAGRLRWVLKHQPLTLLVALATLALTVLLYIVVPKGFFPVQDTGVIQGISEAPQSVSFAAMSQRQQALADIILKDPAVVSLSSYIGVDGDNATLNSGRLLINLKPHGARDLTASEVIQRLQPEVDKLSDIRLFMQPVQDLTIEDRVSRTQYQFSMSSPDAELLTLWSEKLVDALGKRPELRDVASDLQDKGLQVYLNIDRDAASRVGVTVANITDALYDAFGQRQISTIYTQASQYRVVLQAASGSELGPAALEQIHVKTTDGAQVKLSSLARVEQRQAQLAIAHLGQFPAVMMSFNLAPDIALGKAVKVIEEVEQEIGMPIGVQTQFQGAAEAFQASLSSTLLLILAAVVTMYIVLGVLYESYIHPITILSTLPSAAVGALLALLISGNDLGMIAIIGIILLIGIVKKNAIMMIDFALDAERNRSVAPEQAIYDAALLRFRPILMTTLAALFGAIPLMLASGSGAELRQPLGLVMVGGLLLSQVLTLFTTPVIYLYFDRLGRRWSRKPADPDRQERADA

SEQ ID NO: 2751 - DNA, 3099 bp, Pseudomonas fluorescens Pf-5
  CDS (1)..(3099): transl_table=11
atgaatttctcgcggctgttcatcctgcgtccggtagccaccaccctgagcatgctggccattgtcctggccggcctgatcgcctatcgcctgttgccggtctcggccttgccccaggtggactacccgaccatccgggtcatgaccctgtaccccggggccagcccggacgtgatgaccagcgcggtcaccgcgcccctggagcgccagttcgggcagatgcccggcctgacccagatggcctccaccagttccggcggggcctcggtgctgaccctgcgcttcagcctcgatatcaatatggacgtggccgagcagcaggtgcaggcggcgatcaacgctgccaccaacctgttgcccaaggacctgccggccccgccggtgtacaacaaggtcaacccggcggacaccccggtgctgaccctggccattacctccaagaccatgctgctgcccaagctcaatgacctggtggatacgcgcatggcgcagaagatcgcccagatcagcggcgtcggcatggtcagcattgccggcggccagcgccaggcggtgcggatcaaggtcaaccccgaggccctggcggccaacggtctgaacctggcggacgtgcgcgccctgatcggcgcctccaacgtcaaccagcccaagggcaacttcgacggcccgacccgggtctcgatgctcgacgccaacgaccagttgacctcgcccaaggactacgccgagctgatcctggcctacaacaatggcgcgccgctgcgcctgaaggatgtggccgagatcgtcgatggcgcggagaacgagcgcctggcggcctgggccaacgagaaccaggcggtgctgctcaatatccagcgccagcccggggccaacgtgatcgaggtggtggaccggatcaaggcgctgctgccgagcatcaccgacaacctgccggcgggcctggacgtcaccgtgctcaccgaccgtacccagaccatccgcgcttcggtcaaggatgtgcagcacgagctgttgatcgccatcgcgctggtggtgatggtgaccttcctgttcctgcgccgggccagtgccaccatcattccttcgattgccgtgccgctgtcgctgatcggcaccttcggggtgatgtacctggccggcttctcggtgaacaacctgaccctgatggccttgaccatcgccaccggcttcgtggtggacgatgccatcgtcatgctggagaacatctcgcgcttcatcgaggagggcgacagcccgatgcaggcagcgctcaagggcgccaggcagatcggcttcaccctgatctccctgaccctgtcgctgatcgcggtgctgatcccgctgctgttcatggcggatgtggtggggcggctgttccgtgagttcgccatcaccctggcggtggcgatcctgatttccctggtggtatccctgaccctgaccccgatgatgtgtgcgcggctgctcaagcgtgagcccaagcctgaagagcaggggcgcttctaccgcgccagcggggcctggatcgactggctgatcgaaagctacgggcgcaagttgcagtgggtactcaagcaccagttcctgaccctgatggtggccatcggcaccctgggcctgaccgtgttcctttatatggtggtgcccaagggtttcttcccggtgcaagacaccggggtcatccagggcatttccgaggcgccgcagtcggtgtccttcgccgccatgagccagcgtcagcaggacctggccaagatcatcctgcaggacccggcggtgcaaagcctgtcgtcctacatcggggtggacggcgacaacgccaccctcaacagcggtcgcctgctgatcaacctcaagccccacagcgagcgcgacctgagcgcagcccaggtgatcgcgcggatccagcccgaggtggacaagctgctgggcatccgcctgttcatgcagccggtacaggacctgaccatcgaggaccgggtcagccgcacccagtaccagttcagcctgtcgtcgccggatgccgagctgctgagcctgtggagcaatcgcctggtgcaggccctggcccagcgcccggagctcaccgacgtggccagcgacctgcaggacaagggcctgcaggtgttcatggtgatcgaccgtgacgccgcgtcccgggtcggggtttcggtgtcgaacatcaccgacgccctgtacgacgccttcggccagcgccagatctccaccatctacacccaggccagccagtaccgggtggtgctccaggcccaggccggcgagcgcatcgggccccaggccctggagcagatccacgtcaagaccaccgacggcggccaagtgcggctgtcgagcctggcccatgtcgaggagcgccaggcgcaactggccatcgcccatatcggccagttcccggcggtaatgatgtccttcaacctggctccgggcgtggccctgggcaaggcggtggacgtgatcgagcaggtgcagcaggagatcggcatgccggtgggcgtgcagacccgcttccagggcgcggcggaagccttccaggcctcgctgtcgagcaccttgctgctgatcctggcggcggtggtgaccatgtacatcgtgctcggcgtgctctatgagagctacatccacccgatcaccatcctctccaccttgccctcggcggcggtgggggccttgctggcgctgatcctcagcggcaacgacctgggcatgatcgccatcatcggcatcatcctgctgatcggcatcgtcaagaagaacgcgatcatgatgatcgacttcgccctcgacgccgaacgccaccagggcatggccccggaacaggctatctaccaggcggcgctgctgcgtttccggccgatcctgatgaccaccctggcggcgctgttcggcgccgtgccactgatgctggccaccggttccggcgccgagctgcgccagcccctgggcctggtgatggtgggcggcctgctggtgagccaggtgctgaccctgttcaccacgccggtgatctacctgtacttcgaccgcctgggtcggcgcttcggcaagcgtgaagacgcccaagaggtggaggcatga

SEQ ID NO: 2752 - protein, 1032 aa, Pseudomonas fluorescens Pf-5
MNFSRLFILRPVATTLSMLAIVLAGLIAYRLLPVSALPQVDYPTIRVMTLYPGASPDVMTSAVTAPLERQFGQMPGLTQMASTSSGGASVLTLRFSLDINMDVAEQQVQAAINAATNLLPKDLPAPPVYNKVNPADTPVLTLAITSKTMLLPKLNDLVDTRMAQKIAQISGVGMVSIAGGQRQAVRIKVNPEALAANGLNLADVRALIGASNVNQPKGNFDGPTRVSMLDANDQLTSPKDYAELILAYNNGAPLRLKDVAEIVDGAENERLAAWANENQAVLLNIQRQPGANVIEVVDRIKALLPSITDNLPAGLDVTVLTDRTQTIRASVKDVQHELLIAIALVVMVTFLFLRRASATIIPSIAVPLSLIGTFGVMYLAGFSVNNLTLMALTIATGFVVDDAIVMLENISRFIEEGDSPMQAALKGARQIGFTLISLTLSLIAVLIPLLFMADVVGRLFREFAITLAVAILISLVVSLTLTPMMCARLLKREPKPEEQGRFYRASGAWIDWLIESYGRKLQWVLKHQFLTLMVAIGTLGLTVFLYMVVPKGFFPVQDTGVIQGISEAPQSVSFAAMSQRQQDLAKIILQDPAVQSLSSYIGVDGDNATLNSGRLLINLKPHSERDLSAAQVIARIQPEVDKLLGIRLFMQPVQDLTIEDRVSRTQYQFSLSSPDAELLSLWSNRLVQALAQRPELTDVASDLQDKGLQVFMVIDRDAASRVGVSVSNITDALYDAFGQRQISTIYTQASQYRVVLQAQAGERIGPQALEQIHVKTTDGGQVRLSSLAHVEERQAQLAIAHIGQFPAVMMSFNLAPGVALGKAVDVIEQVQQEIGMPVGVQTRFQGAAEAFQASLSSTLLLILAAVVTMYIVLGVLYESYIHPITILSTLPSAAVGALLALILSGNDLGMIAIIGIILLIGIVKKNAIMMIDFALDAERHQGMAPEQAIYQAALLRFRPILMTTLAALFGAVPLMLATGSGAELRQPLGLVMVGGLLVSQVLTLFTTPVIYLYFDRLGRRFGKREDAQEVEA

SEQ ID NO: 2753 - DNA, 3111 bp, Pseudomonas syringae pv. phaseolicola 1448A
  CDS (1)..(3111): transl_table=11
atgaacatgtcgcgcctgttcatcctgcgtccggttgccaccacgctgagtatgctggcaatcgtcctggcgggtctgatcgcctacaccttgctgccggtgtcggcgctgcctcaggtcgactatccgaccattcgggtgatgacgctgtatcccggtgccagtccgcaggtcatgaccagctccgtcactgcgcctcttgagcgtcaattcgggcagatgcccggtttgacccagatggcctcgacgagctcgggcggcgcgtcggtcattaccctgcgtttcagcctcgaaatcaatatggatgtggctgagcagcaggtccaggccgcgatcaacgccgccaccaaccttctgcctaccgatcttccggcaccgccggtctataacaaggtcaacccggcagacacgccggttctgaccctggcgattacctcgaaaaccatgctgctgcccaagctcaatgagctggtcgatacacgcatggcgcagaaaatctcgcagatcagcggtgtcggcatggtcagcattgccggcggccagtgtcaggctgtgcggatcaaggtcaatccggaagcgctggccgccaacagcctgaacctgtctgatgtgcggaacctgatcggcgcgtccaacgtcaaccagcccaagggtaacttcgacgggccaacccgggtttcgatgctggatgccaacgatcagttgaagtctccagaggagtacgccaaccttattctggcctacaaggatggcgctcccctgcgtctgaaggatgtggccgaaatcgtcgacggtgccgaaaacgaacgcctggcggcctgggccaatcggagtcaggcggtgctgctgaacattcagcgccagccgggcgccaacgtgatcgaagtggtcgaccggatcaaggcattgctgccgtcaatcaccgagaaccttccggccggcctcgacgtcgtggtactgacggaccgcactcagacgatccgcgcgtcggtgaccgatgttcagcacgaactgttgatcgcgattatcctggtggtgctggtaaccttcctgttcctgcgtcgtttcagcgcgacgatcattccctctatcgccgtcccgctgtcactggtaggcaccttcggcgtcatgtacctggcgggcttctcggtcaacaacctcacgctgatggccatgaccatcgcgaccggtttcgttgttgatgacgccatcgtgatgctggaaaacatctcccggcatatcgaggagggcgaaacacctctgcaggccgccctgaagggcgcgaaacagatcggtttcaccctgatttccctgaccctgtcgctgattgcagtgcttataccgctgttgttcatggctgatgtggtcgggcgactgttccgcgagttcgcgataaccctggcagtcgccatcctgatatcgctggtggtatcgctgaccctgacgcccatgatgtgcgcgcggttgctcaagcgcgagccaaaggaagaagagcagagccgtttctatcgtgccagcggtgcctggatcgactggctgatcgatatctacgcgggcgggttgcgctgggtgctcaggcatcaaccactgaccctgttggcggcattggccactctggcactgactgtgctgctgtacatcgttgtgcccaagggcttttttccggtgcaggacaccggcgtgatccagggtatttcggaagcgccacagtcggtctcctttgctgccatgagccagcgtcagcaggcgctggctgacatcattctcaaggaccctgccgtggtcagtctgtcttcctacattggtgttgacggtgataacgcaacgctcaacagcgggcgtctgctgatcaacctcaagccccactcagagcgtgacctcaccgcatccgaggtgatccagcgcctgcagccagaggtagacaagctttcggacattcgtctgttcatgcagccggtgcaggacctgaccattgaagaccgggtcagtcgtactcagtatcagttcagcatgtcatcgcccgacgccgagctgctgacgctgtggagcgaaaggctggtcgaggcgctcggcaaacggtccgagctgacggatgtggccagcgacctgcaggacaagggcctacaggtatatctgaacatcgatcgtgatgcggccagtcgggtaggggtcaccgttgcgaatattaccgatgcgctgtacgacgcattcggtcagcgacagatttccaccatctatacccaggccagccagtaccgcgtggtgctgcaagccgcgtcgggcagtgaactcggccctgccgcacttgagcagatccacgtcaagaccaccgatggcgcacaggtaaaactgtcgagcctggcacgcgtcgagcagcgtcaggcgcagttggccattgctcacctcgggcagtttcccgcagtgatgatgtcgttcaaccttgcgcccggcgttgcattgggcaaggccgtgcaggtcatcgaacaggttgagcaggacatcggcatgccgattggtgtgcagacccagtttcagggcgctgccgaggcatttcaggcatcgttgtcgagcacgctgctgctgattctggcggctgtagtgaccatgtacatcgtgctgggcgtgctctacgagagctatatccacccgatcaccatcctctcgacactgccgtcggcagcagtgggtgccttgctggccttgctgatcagcggcaatgacctggggatgatcgcgatcatcggtatcattttgctgatcggcatcgtcaagaagaacgcgatcatgatgatcgacttcgcgctcgacgcagagcgcaaccggggtgttgcaccggaaacggcgatctacgaagcggcgctgctgcgtttccggccgattctcatgaccaccctggcagcattgttcggcgccattccgttgatgcttgccagcggctccggcgcagagttgcgccagccactggggttggtgatggtcggcggtctgctcgtcagccaggtactgacgctgtttaccacgccggtcatctatctgtatttcgaccggcttggccgtcgctggagtcgcaggcctgccgacccggaccgactggaacgggctgacgcatga

SEQ ID NO: 2754 - protein, 1036 aa, Pseudomonas syringae pv. phaseolicola 1448A
MNMSRLFILRPVATTLSMLAIVLAGLIAYTLLPVSALPQVDYPTIRVMTLYPGASPQVMTSSVTAPLERQFGQMPGLTQMASTSSGGASVITLRFSLEINMDVAEQQVQAAINAATNLLPTDLPAPPVYNKVNPADTPVLTLAITSKTMLLPKLNELVDTRMAQKISQISGVGMVSIAGGQCQAVRIKVNPEALAANSLNLSDVRNLIGASNVNQPKGNFDGPTRVSMLDANDQLKSPEEYANLILAYKDGAPLRLKDVAEIVDGAENERLAAWANRSQAVLLNIQRQPGANVIEVVDRIKALLPSITENLPAGLDVVVLTDRTQTIRASVTDVQHELLIAIILVVLVTFLFLRRFSATIIPSIAVPLSLVGTFGVMYLAGFSVNNLTLMAMTIATGFVVDDAIVMLENISRHIEEGETPLQAALKGAKQIGFTLISLTLSLIAVLIPLLFMADVVGRLFREFAITLAVAILISLVVSLTLTPMMCARLLKREPKEEEQSRFYRASGAWIDWLIDIYAGGLRWVLRHQPLTLLAALATLALTVLLYIVVPKGFFPVQDTGVIQGISEAPQSVSFAAMSQRQQALADIILKDPAVVSLSSYIGVDGDNATLNSGRLLINLKPHSERDLTASEVIQRLQPEVDKLSDIRLFMQPVQDLTIEDRVSRTQYQFSMSSPDAELLTLWSERLVEALGKRSELTDVASDLQDKGLQVYLNIDRDAASRVGVTVANITDALYDAFGQRQISTIYTQASQYRVVLQAASGSELGPAALEQIHVKTTDGAQVKLSSLARVEQRQAQLAIAHLGQFPAVMMSFNLAPGVALGKAVQVIEQVEQDIGMPIGVQTQFQGAAEAFQASLSSTLLLILAAVVTMYIVLGVLYESYIHPITILSTLPSAAVGALLALLISGNDLGMIAIIGIILLIGIVKKNAIMMIDFALDAERNRGVAPETAIYEAALLRFRPILMTTLAALFGAIPLMLASGSGAELRQPLGLVMVGGLLVSQVLTLFTTPVIYLYFDRLGRRWSRRPADPDRLERADA

SEQ ID NO: 2755 - DNA, 3141 bp, Ralstonia eutropha JMP134
  CDS (1)..(3141): transl_table=11
atgaacccgtcacgcctcttcatcgagcgcccggtagccacggcgctgctgatgctggccatcctgctctcggggctggtggcctaccggctgctgccgctgtccgcgctgcccgaggtggactaccccaccatccaggtcaccacgctctatccgggcgcgagccccgacgtgatgacctcgtcgatcaccgcgccgctggagcggcagttcgggcagatgccggggctcaagcagatgtcgtcgtcctcgtcgggcggcgcgtcggtgatcacgctgcagttcgaactgacgctgccgctggacgtggccgagcaggaggtgcaggcggccatcaatgccggcagcaacctgctgccgtcggacctgccgatgccgccggtctacagcaaggtcaatccggccgacgcgccgatcatgaccattgcgatgacgtccgacacgctgccgctacccaagctgcaggacatggtggacacccgcgtagcggccaagatttcgcagatccagggcgtgggtctggtcacgatcagcggcgggcagcgccccgccgtgcgcatccaggcgaaccccaccgcgctcgcgtcgctgggcatgtcgatcgatgacctgcgcacagccatcggcgcggccaacgtgaacggcgccaagggcagcttcgacggcccggcgcgcgcttccaccatcgacgccaacgaccagctgcgttcggccgacgagtataagcagatcatcatcgcgtaccagaacggcgcgccgatccgcatcaccgacgtcgccgagatcgtcgacggtcccgaaaacaaccggctggccgcctgggccaacggcaacccttcgatcatcctcaatatccagcgccagccgggcgccaacgtgatcgaggtggtggaccgtatcaagacgctgctgccgcagctgcagaccgcgctgccggcttcggtccacgcgcagctcatgaccgatcgcacgacgacaattcgcgcgtcggtgcatgacgtggaattcgagctgttcctggccatcgcactcgtggtgatggtcatcttcgtgtttctgcgcaacgtctccgccaccatcatccccggtgtggcggtgccgctgtcgctcgtcggcacgttcggcgtgatgtacatggccggcttctcgatcaacaacctgacgctgatggcgctgaccatcgccacgggcttcgtcgttgacgacgccatcgtcatgatcgagaacatcatgcgctacatcgaggaaggcgattccccgatggaagccgcgctcaagggctcgaagcagatcggcttcaccatcatctcgctgacgttttcgctggtggctgtgctgatcccgctgctgttcatgggcgatgtggtcggccgcctgtttcgcgagttcgcgatcacgctggcggtgtcgatcctgatctcggccgtggtgtcgctgacgctcacgccgatgatgtgcgcgcggctgctgcgccatgtgccggaagaccagcagtcgcgcttccacaaggcgaccgggcgtttcttcgacaacgtgatccaccgctacggcgtggcgctcgaatgggtgctggatcggcagaaggcaacgctggtggtcgctgtcgccacgctggtgctgaccgtgctgctgtacatgctcgtgcccaaaggcttcttcccggtgcaggacaccggcctgattcagggcatcaccgaagccacgcagaccacctcgttccaggccatgggcatcaagcagcaggccgcggcgaaggtggtcgcggaagaccctgctgtggcgagcgtatcgtcgttcatcggcgtggacggctccaacaccacgctcaacgccgggcgcatgctgatcaacctcaagcccaagggcgagcgcgattcgatcgacgtggtctcgcagcgcctgcagcacgcggtggaaaagctcggcggcatctcgctgtacacgcaaccggtgcaagacctgacgatcgaagaccgcgtcgcgcgcacgcagtaccagttcacggtggaagaccccgatccgcagaacctggcgacgtgggtgccgcgcctggtcgagcgcctgcgccaggagcccgaactgcgcgatgtcgccagcgatcagcagaacaacggcctgcgcgcctacgtagacatcgatcgcgacgccgccgcgcgtttcggcatcacgactgccgtgatcgacagcgcgctgtacagcgcattcggccagcggctggtatcgaccatcttcacgcagtcgagccaataccgcgtggtgctggaaaccatgcccgagttccgcaaggacccgcagtcgctcgccgaactgcgcctgccctcctcgtccggcggacaagtgccgctgggcgcgttcgcgcgcatcagtgaacggacgggtccgctcgtgatcaaccaccagggccagttcccggccgcgaccatctcgttcaacctggcgccgggcgaatcgctgggcgccgcggtcgacaagatcaccaaggtggaaaacgagctgggcctgccgatctcgatgcaaaccgagttccagggcgccgcgctggcgttccgcgcgtcgttgtccaacacgctgtggctgatcctggccgccgtggtgacgatgtatatcgtgctgggcgtgctgtatgaaagcacgatccatccggtgaccatcctgtccacgctgccgtcggccggcgtgggcgcgctgctggcgctgctgctcgcggggcaggacctcggcatcatcgcgatcattggcatcatcctgctgatcggtatcgtcaagaagaacgcgatcatgatgatcgacttcgcgctcgaagccgagcgcgaaggcggcatggccccgcgcgaggcgatcttccaggcctgcctgctgcgtttccgcccgatcctgatgaccaccatggccgcactgctcgcggcactgcccatgatgctcggcaccggcatcggctcggaactgcgccgcccgctcggtgtgaccatggtcggcggcctgctcgtgagccaggtgctgacgctgttcaccacgccggtgatctacctggccttcgaccgcgtggctttccgcctcaaggactggcgcaagcgccgcttcggtgatccggaagaaggcggcaccgatgaaggcgatccgtcgtcagcggggccgcgatga

SEQ ID NO: 2756 - protein, 1046 aa, Ralstonia eutropha JMP134
MNPSRLFIERPVATALLMLAILLSGLVAYRLLPLSALPEVDYPTIQVTTLYPGASPDVMTSSITAPLERQFGQMPGLKQMSSSSSGGASVITLQFELTLPLDVAEQEVQAAINAGSNLLPSDLPMPPVYSKVNPADAPIMTIAMTSDTLPLPKLQDMVDTRVAAKISQIQGVGLVTISGGQRPAVRIQANPTALASLGMSIDDLRTAIGAANVNGAKGSFDGPARASTIDANDQLRSADEYKQIIIAYQNGAPIRITDVAEIVDGPENNRLAAWANGNPSIILNIQRQPGANVIEVVDRIKTLLPQLQTALPASVHAQLMTDRTTTIRASVHDVEFELFLAIALVVMVIFVFLRNVSATIIPGVAVPLSLVGTFGVMYMAGFSINNLTLMALTIATGFVVDDAIVMIENIMRYIEEGDSPMEAALKGSKQIGFTIISLTFSLVAVLIPLLFMGDVVGRLFREFAITLAVSILISAVVSLTLTPMMCARLLRHVPEDQQSRFHKATGRFFDNVIHRYGVALEWVLDRQKATLVVAVATLVLTVLLYMLVPKGFFPVQDTGLIQGITEATQTTSFQAMGIKQQAAAKVVAEDPAVASVSSFIGVDGSNTTLNAGRMLINLKPKGERDSIDVVSQRLQHAVEKLGGISLYTQPVQDLTIEDRVARTQYQFTVEDPDPQNLATWVPRLVERLRQEPELRDVASDQQNNGLRAYVDIDRDAAARFGITTAVIDSALYSAFGQRLVSTIFTQSSQYRVVLETMPEFRKDPQSLAELRLPSSSGGQVPLGAFARISERTGPLVINHQGQFPAATISFNLAPGESLGAAVDKITKVENELGLPISMQTEFQGAALAFRASLSNTLWLILAAVVTMYIVLGVLYESTIHPVTILSTLPSAGVGALLALLLAGQDLGIIAIIGIILLIGIVKKNAIMMIDFALEAEREGGMAPREAIFQACLLRFRPILMTTMAALLAALPMMLGTGIGSELRRPLGVTMVGGLLVSQVLTLFTTPVIYLAFDRVAFRLKDWRKRRFGDPEEGGTDEGDPSSAGPR

SEQ ID NO: 2757 - DNA, 3105 bp, Pseudomonas fluorescens PfO-1
  CDS (1)..(3105): transl_table=11
atgaacatttcgcgtctgttcatcctccgtccggtcgccaccacgctgagcatgctggccatcgtgttggccggtctgatcgcctatcgcctgctgccggtttcggcgttgccgcaggtcgattacccgaccatccgggtcatgaccctgtatccgggcgccagtccggacgtgatgaccagcgccgttaccgcgccgctggaacgccagttcgggcagatgccgggcctcacgcaaatggcctcgaccagttccggcggcgcgtcggtgctgaccctgcggttcagtctcgacatcaacatggacgtcgccgaacagcaggtgcaggccgcgatcaacgccgcgaccaacctgttgccgaccgacttgcccgcgccgccggtgtacaacaaggtcaacccggcggacaccccggtgctgaccctggccatcacctcgaaaaccatgttgctgcccaaactcaatgatctggtcgatacgcgcatggcgcagaaaatcgcccagatcagcggcgtcggcatggtcagcatcgccggcggccagcgtcaggcggtgaggatcaaggtcaatccggaggcgcttgcggccaacggcctgaacctgtcggacgtgcgcacgctgatcagcgcgtccaacgtcaatcagcccaagggtaacttcgacggcccgacccgggtgtcgatgctcgacgccaacgaccagctgacgtcgcccaaggattacgccaacctgatcctggcctacgccaacggcgcgccgctgcggctcaaggatgtcgcgcagatcgtcgacggcgccgagaacgagcgtctggcggcgtgggccaaccagaatcaggccgtgctgctgaacatccagcgtcaaccgggcgccaacgtgatcgaagtggtcgaccggatcaaggcgctgctgccaagcatcaccgacaacctgccggccggtctcgacgtggtcgtgctgaccgaccgcacccagaccatccgcgcttccgtcaccgacgtgcaacatgaactgttgatcgccatcgcgctggtggtgatggtgacgttcctgttcctgcgccgcgccagtgccacgatcattccgtcggtggccgtgccgctgtcgctgatcggtacgttcggcgtgatgtacctcgccggcttctcggtcaacaacctgacgctgatggcattgaccatcgccaccggtttcgtggtcgacgatgcgatcgtgatgctggagaacatcgcgcgtttcatcgaggagggtgatagcccgatgcaggccgcgctcaagggcgcgaagcagatcggtttcaccctgatttccctgaccctgtcgctgattgcggttctgattccgctgctgttcatggccgacgtagtggggcggttgttccgtgagtttgccatcaccctggcggtggcgatcctgatttccctggtggtctcgctgaccctgacgccgatgatgtgcgcgcgtctgctcaagcgtgaaccagagccgcatgaacagggccgcttctaccgcgccagtggtgcgttcattgactggatgattgccgcttacgggcgcaagttgcagtgggtgctcaggcatcagccgctgaccctgctggtggccatcggcacactggccctgaccgtgttcctttatatggtggtgcccaagggcttcttcccggtgcaggacaccggggtgatccagggcatttccgaagcgccgcagtcgatttcctttgctgcaatgggcgagcgtcagcaggcgctggccaaggtgattctggaagatccggcggtggaaagtctgtcgtcctacatcggggtcgacggcgacaacgccacgctcaacagcggtcggctgctgatcaacctcaagccccatggccagcgtgacctgacggcgaccgaagtgattgctcgcctgcaaccacaactggacaagcttgtcggcatccgtctgttcatgcagccggtgcaggacttgaccatcgaagaccgcgtcagccgtacccagtaccagttcagcatgtcgtcgccggattctgaattactcagcctgtggagtggccgactggtcgaggcgctggcccagcgtccggaactgactgacgtcgccagcgacttgcaggacaagggtttgcaggtgttcctggtgatcgaccgcgacgctgcttcacggctgggtgtgtcggtgtcgaacatcaccgatgcgctgtatgacgcgttcggccagcggcagatttcgaccatctacacccaggccagccagtaccgcgtggtgctgcaggctcaggccggagagaagatcggcccgcaggcgctggatcagattcacgtcaagaccaccgatggtggtcaggtgcggttgtcgagcctggcccatgtcgaggaacggcaggcgcaactggcgatcacccacatcggccagttcccggcggtgatgatgtcattcaacctcgcaccgggcgtggcgctggggcatgcggtggacatcatcgagcaggtgcaaaaggacatcggcatgccgatcggcgtgcagacccagttccagggcgccgccgaagcgttccaggcgtcgttgtcgagcaccttgctgctgattctggcggcggtggtgaccatgtacatcgtgctcggcgtgctttacgagagctacattcacccgatcaccattctctcgaccttgccgtcggcggcggtgggggccttgttggcgttgctgctcagtggcaatgacctggggatgatcgcgatcatcggcatcattctgctgatcggtatcgtgaagaagaacgcgatcatgatgatcgacttcgccctcgacgccgaacgcactcagggcatggcgccggagcaggcgatctatcaggcggcgctgttgcgtttccggccgattctgatgacgacgctggcggcgctgtttggcgcggtgccgttgatgctggccaccggctccggcgctgaattgcgtcagccgctgggtctggtgatggttggcgggttgctggtgagtcaggtgctgacgctgttcaccaccccggtgatctacctgtacttcgatcgtctcggccggcgctggggccgtgctccttcggccgtggagccggtggaacagccatga

SEQ ID NO: 2758 - protein, 1034 aa, Pseudomonas fluorescens PfO-1
MNISRLFILRPVATTLSMLAIVLAGLIAYRLLPVSALPQVDYPTIRVMTLYPGASPDVMTSAVTAPLERQFGQMPGLTQMASTSSGGASVLTLRFSLDINMDVAEQQVQAAINAATNLLPTDLPAPPVYNKVNPADTPVLTLAITSKTMLLPKLNDLVDTRMAQKIAQISGVGMVSIAGGQRQAVRIKVNPEALAANGLNLSDVRTLISASNVNQPKGNFDGPTRVSMLDANDQLTSPKDYANLILAYANGAPLRLKDVAQIVDGAENERLAAWANQNQAVLLNIQRQPGANVIEVVDRIKALLPSITDNLPAGLDVVVLTDRTQTIRASVTDVQHELLIAIALVVMVTFLFLRRASATIIPSVAVPLSLIGTFGVMYLAGFSVNNLTLMALTIATGFVVDDAIVMLENIARFIEEGDSPMQAALKGAKQIGFTLISLTLSLIAVLIPLLFMADVVGRLFREFAITLAVAILISLVVSLTLTPMMCARLLKREPEPHEQGRFYRASGAFIDWMIAAYGRKLQWVLRHQPLTLLVAIGTLALTVFLYMVVPKGFFPVQDTGVIQGISEAPQSISFAAMGERQQALAKVILEDPAVESLSSYIGVDGDNATLNSGRLLINLKPHGQRDLTATEVIARLQPQLDKLVGIRLFMQPVQDLTIEDRVSRTQYQFSMSSPDSELLSLWSGRLVEALAQRPELTDVASDLQDKGLQVFLVIDRDAASRLGVSVSNITDALYDAFGQRQISTIYTQASQYRVVLQAQAGEKIGPQALDQIHVKTTDGGQVRLSSLAHVEERQAQLAITHIGQFPAVMMSFNLAPGVALGHAVDIIEQVQKDIGMPIGVQTQFQGAAEAFQASLSSTLLLILAAVVTMYIVLGVLYESYIHPITILSTLPSAAVGALLALLLSGNDLGMIAIIGIILLIGIVKKNAIMMIDFALDAERTQGMAPEQAIYQAALLRFRPILMTTLAALFGAVPLMLATGSGAELRQPLGLVMVGGLLVSQVLTLFTTPVIYLYFDRLGRRWGRAPSAVEPVEQP

SEQ ID NO: 2759 - DNA, 3114 bp, Burkholderia sp. 383
  CDS (1)..(3114): transl_table=11
atgaatccatcccgcctattcattctccggccggtcggcaccgccctcctgatggcggcgatcatgctggccggtctcgtcgcgctgcgcttcctgccgctcgccgcgctgccggaagtcgactatccgacgatccaggtccagaccttctacccgggcgcgagcccggaggtaatgacctcgtcggtcaccgcgccgctcgaacggcagttcgggcagatgccgtcgctgaaccagatgtcgtcgcaaagctcggccggctcgtccgtgatcacgctgcagttctcgctcgacctgccgctcgacatcgccgaacaggaagtgcaggccgcgatcaacgcggccggcaacctgctgccgtccgacctccctgccccgccgatctacgcgaaggtcaacccggccgacgcgccggtgctgacgctcgccgtcacgtcgaaaacactgccgctcacgcaggtgcaggatctcgccgacacgcgcctcgcgatgaagatctcgcaggtcgcgggcgtcggcctcgtcagcctgtcgggcggcaaccgcccggccgtgcgcatccaggcgaacccgaccgcgctcgcgcagtacgggatgaacctcgacgacctgcgcacgacgatctcgaacctgaacgtcaacacgccgaagggcaacttcgacggcccgacgcgcgcgtacacgatcaacgcgaacgaccagctcacgagcgccgatcaatacaacagcgcggtcgtcgcatacaagaacggccgcccggtgatgctcaccgacgtcgcgacggtcgtcgccggctcggaaaacaccaagctcggcgcgtgggtgaacaaggagcccgcgatcatcctgaacgtgcagcgccagccgggcgcgaacgtgatccagacggtcgacgcgatcaaggcgcagctgccgaagctgcaggaaacgctgccgggcgcgctcgacgtgcagatcgtcaccgaccgcacgacgatgatccgcgccgccgtgcgcgacgtgcagttcgagctgctgctcgcggtcgggctggtcgtgctcgtgatgtacctgttcctcgcgaacatctacgcgacgatcatcccgagcctgtcggtgccgctgtcgctgatcggcacgctcgcggtgatgtacatggccggcttctcgctgaacaacctgtcattgatggcgctcaccatcgcgaccggcttcgtggtcgacgacgcgatcgtgatgatcgagaacatcgcgcgctacgtcgaggaaggcgaaacagggctcgaggccgcgctgaagggttcgaagcagatcggcttcacgatcatctcgctgacggtgtcgctgatcgcggtgctgatcccgctgctgttcatgggcgacgtggtcgggcgcctgttccacgaattcgcgatcacgctcgcggtgacgatcgtgatctcggcgatcgtgtcgctcacgctcgtgccgatgatgtgcgcgaagctgctgcgccattcgccgccgcccgagagccatcgcttcgaggcgcgcgtgcaccaggcgatcgactgggtgatcgcgcgctacgcggtcgcgctcgaatgggtgctgaaccgccagcgctcgacgctcgtcgtcgcgctgctgacgctcgcgctgacgggcctgctgtacgtctacgtgccgaagggcttcttccccgcgcaggataccggcgtgatccaggcgatcacgcaggcgccgcagtcgatctcgtacggcgcgatggccgagcgccagcaggcgctcgcggccgagatcctgaaggatccgaacgtcgagagcctgacgtcgttcatcggcgtcgacggcagcaacatcacgctgaacagcggccggatgctgatcaacctgaaggcgcgcgacgatcgttccgagacggccgcgcagatcatccgcgatctgcagcaccgcgtcgcgaacatcaccggcatctcgctgttcatgcagtcggtgcaggatctgacgatcgactcgaccgtcagcccgacgcagtaccagttcatgctgacgagcccgaattccgaagaattcgcgacctgggtgccgaagctcgtcgcgcggctgcagcaggagccgtcgctcgccgacgtcgcgaccgatctgcagagcaacggccagtcggtctacatcgagatcgaccgtccgagcgccgcgcgcttcggcatcacgccggcgaccgtcgacaacgcgctgtacgacgcgttcggccagcgcatcgtgtcgacgatcttcacgcagtcgaaccagtaccgcgtgattctcgagtccgagccgaaggagcagcactacgcgcaatcgctgaacgacatctacctgccgtcggcgggcggcggccaggtgccgctgtcgtcgatcgcgtcgttccacgagcggccgtcgccgctgctggtcgcgcacctgtcgcagttcccgtcgaccaccatctcgttcaacctcgcggcgggcgcctcgctcggcgaggcggtcaaggcgatcgacgccgccgagaaggacatcgggctgcccgcgtcgttccagacgcgcttccagggcgcggcgctcgcgttccaggcctcgctgtcgaaccagctgttcctgatcctcgcggcggtcgtcacgatgtacatcgtgctcggcgtgctgtacgagagctacatccacccgatcacgatcctgtcgacgctgccgtcggccggcgtcggcgcgctgctcgcgctgatgatcaccgggcacgacctcgacatcatcgggatcatcggcatcgtgctgctgatcggtatcgtaaagaagaacgcgatcatgatgatcgacttcgcgctcgaggccgagcgcgtcgaaggcaagccgccgcgcgaagcgatctaccaggcgtgcctgctgcgcttccggccgatcctgatgacgacgctcgccgcgctgctcggcgcggtgccgctgatcgtcggctccggcgcgggctccgagctgcgccagccgctcgggatcgcgatcgccggcggcctgatcgtgtcgcaggtgctgacgctgttcacgacgcccgtgatctacctcggcttcgactcgctcgcgcgccgcgtgcgcggctggttcgaacgccacggcccgcaagccggcccgcgcacggatgcgtaa

SEQ ID NO: 2760 - protein, 1037 aa, Burkholderia sp. 383
MNPSRLFILRPVGTALLMAAIMLAGLVALRFLPLAALPEVDYPTIQVQTFYPGASPEVMTSSVTAPLERQFGQMPSLNQMSSQSSAGSSVITLQFSLDLPLDIAEQEVQAAINAAGNLLPSDLPAPPIYAKVNPADAPVLTLAVTSKTLPLTQVQDLADTRLAMKISQVAGVGLVSLSGGNRPAVRIQANPTALAQYGMNLDDLRTTISNLNVNTPKGNFDGPTRAYTINANDQLTSADQYNSAVVAYKNGRPVMLTDVATVVAGSENTKLGAWVNKEPAIILNVQRQPGANVIQTVDAIKAQLPKLQETLPGALDVQIVTDRTTMIRAAVRDVQFELLLAVGLVVLVMYLFLANIYATIIPSLSVPLSLIGTLAVMYMAGFSLNNLSLMALTIATGFVVDDAIVMIENIARYVEEGETGLEAALKGSKQIGFTIISLTVSLIAVLIPLLFMGDVVGRLFHEFAITLAVTIVISAIVSLTLVPMMCAKLLRHSPPPESHRFEARVHQAIDWVIARYAVALEWVLNRQRSTLVVALLTLALTGLLYVYVPKGFFPAQDTGVIQAITQAPQSISYGAMAERQQALAAEILKDPNVESLTSFIGVDGSNITLNSGRMLINLKARDDRSETAAQIIRDLQHRVANITGISLFMQSVQDLTIDSTVSPTQYQFMLTSPNSEEFATWVPKLVARLQQEPSLADVATDLQSNGQSVYIEIDRPSAARFGITPATVDNALYDAFGQRIVSTIFTQSNQYRVILESEPKEQHYAQSLNDIYLPSAGGGQVPLSSIASFHERPSPLLVAHLSQFPSTTISFNLAAGASLGEAVKAIDAAEKDIGLPASFQTRFQGAALAFQASLSNQLFLILAAVVTMYIVLGVLYESYIHPITILSTLPSAGVGALLALMITGHDLDIIGIIGIVLLIGIVKKNAIMMIDFALEAERVEGKPPREAIYQACLLRFRPILMTTLAALLGAVPLIVGSGAGSELRQPLGIAIAGGLIVSQVLTLFTTPVIYLGFDSLARRVRGWFERHGPQAGPRTDA

SEQ ID NO: 2761 - DNA, 3111 bp, Burkholderia thailandensis E264
  CDS (1)..(3111): transl_table=11
atgaacccgtcccgcatcttcatccttcgcccggtcggcaccgcgctcctgatggcggcgatcatgctcgccggcctcgtcgcgctgcgcttcctgccgctcgcggcgctgcccgaggtcgactatccgacgatccaggtccagaccttctatccgggcgcgagccccgaagtgatgacgtcgtccgtcaccgcgccgctcgagcggcaattcgggcagatgccgtcgctcaaccaaatgtcgtcgcaaagctcggcgggcgcgtccgtgatcacgctgcagttcagcctcgatctgccgctcgacatcgccgagcaggaagtgcaggcggccatcaacgcggcgggcaacctgctgccgtcggacctccccgcgccgcccatctacgcgaaggtcaatccggccgacgcgcccgtgatcacgctcgccgtcacgtcgaagacgctgccgctcacgcaggttcaggatctcgcggacacgcggctcgcgatgaagatctcgcaggtgtcgggcgtcggcctggtcagcctgtcgggcggcaaccggccggccgtgcggattcaggcgaacccgctcgcgctcgcgtcgtacggcctgaatctcgacgacctgcgcacgacgatctcgaacctgaacgtcaacacgccgaagggcaacttcgacggcccgacgcgcgcgtacacgatcaacgcgaacgatcaattgacgagcgccgaccagtacaacgacgccgtcgtcgcgtacaagaacggccggccggtgatgctcaccgacgtcgcgaagatcgtcgccggctcggagaacacgaagctcggcgcgtgggtcgacgccgagcccgcgatcatcctgaacgtgcagcgccagccgggcgcgaacgtgatccagaccgtcgacaacatcaaggcgatcctgccgaagctgcaggaatcgctgcccgccgcgctcgacgtgcagatcgtcaccgatcgcacgacgatgatccgcgccgccgtgcgcgacgtgcagttcgaactcgggctcgcggtcgcgctcgtcgtgctcgtgatgtacctgttcctcgcgaacgtctatgcgacgatcatcccgagcctgtcggtgccgctgtcgctgatcggcacgctcgcggtgatgtacctgtcgggcttttcgctgaacaacctgtcgctgatggcgctcacgatcgccacgggcttcgtcgtcgacgacgcgatcgtgatgatcgagaacatcgcgcgctacgtcgaggaaggcgattccgcgctcgaagcggcgttgaagggctcgaagcagatcggcttcacgatcatctcgctcacggtgtcgctgatcgccgtgctgattccgctgctcttcatgggcgacgtcgtcgggcggctgttccacgagttcgcgatcacgctcgcggtgacgatcgtgatctcggccatcgtgtcgctcacgctcgtgccgatgatgtgcgcgaagctgctgcgccacacgccaccgcccgaaagccaccgcttcgaggcgaaggtgcacgggctgatcgaccgcgtgatcgcgcgctacggcgtcgcgctcgagtgggtgctcgaccggcagcgctcgacgctcgtcgtcgcggtgctgacgctcgcgctcaccgccctcctctacgtcgtgattccgaagggcttcttcccgacgcaggacacgggcgtgatccaggcgatcacgcaggcgccgcaatcggtatcgtacggcgcgatggccgagcgtcagcaggcgctcgccgccgagatcctgaagaacccggacgtcgtgagcctcacgtcgttcatcggcgtcgacggctcgaacatcacgctgaacagcggccggatgctgatcaacctgaagccgcgcgacgaccgcagcgaatcggcgagcgacgtgatccgctcgctgcagcagcaggtcgcggcggtcacgggcatttcgctgtacatgcagccggtgcaggatctgacgatcgattcgacggtgagtccgacgcagtatcagttcatgctgacgagcccgaacccggacgagttcgcgacctgggtgccgaagctcgtcgaccggctgaagcaggagcgctcgctcgccgacgtcgcgaccgatctgcagaacaacggcaagtcggtctacatcgagatcgaccgcgcgagcgccgcgcgcttcgggatcacgcccgcgaccgtcgacaacgcgctctacgacgcatacggccagcgaatcgtgtcgacgatcttcacgcagtcgaaccagtaccgcgtgatcctcgaatcggagccgcagatgcagcactacaccgattcgctgaacggcatctacctgccgtcggcgggcggcgggcaggtgccgctctcggcgatcgcgacgttccacgagcggccggcgccgctgctcgtgtcgcacctgtcgcagttcccggcggcgacgatctcattcaacctcgcgccgggcgcgtcgctcggcgaggcggtgaaggcgatcgacgcggccgagcgcgagctcggcctgccggcgtcgttccagacgcgcttccagggcgcggcgctcgcgttccaggcgtcgctgtcgaaccagctgttcctgatcctcgccgcgatcgtcacgatgtacatcgtgctcggcgtgctgtacgagagctacatccatccgatcacgatcctgtcgacgctgccgtcggcgggcgtcggcgcgctgctcgcgctgatgatcaccgggcacgacctcgacatcatcggcatcatcggcatcgtgctgctgatcggcatcgtgaagaagaacgcgatcatgatgatcgacttcgcgctcgaggcggaacgcgtcgagggcaagccgccgcgcgaggcgatctaccaggcgtgcctgctgcgctttcggccgatcctgatgacgacgctcgccgcgctcctgggcgccgtgccgctcatcgccggctcgggcgcgggctccgagctgcgccagccgctcggcatcgcgatcgcgggcgggctcatcgtgtcgcaggtgctcacgctcttcacgacgcccgtgatctacctcggcttcgacgcgctcgcgcgccgcatccgcggcttcttcgagcgctccggccggcgggccgcgcatccggacgcgtaa

SEQ ID NO: 2762 - protein, 1036 aa, Burkholderia thailandensis E264
MNPSRIFILRPVGTALLMAAIMLAGLVALRFLPLAALPEVDYPTIQVQTFYPGASPEVMTSSVTAPLERQFGQMPSLNQMSSQSSAGASVITLQFSLDLPLDIAEQEVQAAINAAGNLLPSDLPAPPIYAKVNPADAPVITLAVTSKTLPLTQVQDLADTRLAMKISQVSGVGLVSLSGGNRPAVRIQANPLALASYGLNLDDLRTTISNLNVNTPKGNFDGPTRAYTINANDQLTSADQYNDAVVAYKNGRPVMLTDVAKIVAGSENTKLGAWVDAEPAIILNVQRQPGANVIQTVDNIKAILPKLQESLPAALDVQIVTDRTTMIRAAVRDVQFELGLAVALVVLVMYLFLANVYATIIPSLSVPLSLIGTLAVMYLSGFSLNNLSLMALTIATGFVVDDAIVMIENIARYVEEGDSALEAALKGSKQIGFTIISLTVSLIAVLIPLLFMGDVVGRLFHEFAITLAVTIVISAIVSLTLVPMMCAKLLRHTPPPESHRFEAKVHGLIDRVIARYGVALEWVLDRQRSTLVVAVLTLALTALLYVVIPKGFFPTQDTGVIQAITQAPQSVSYGAMAERQQALAAEILKNPDVVSLTSFIGVDGSNITLNSGRMLINLKPRDDRSESASDVIRSLQQQVAAVTGISLYMQPVQDLTIDSTVSPTQYQFMLTSPNPDEFATWVPKLVDRLKQERSLADVATDLQNNGKSVYIEIDRASAARFGITPATVDNALYDAYGQRIVSTIFTQSNQYRVILESEPQMQHYTDSLNGIYLPSAGGGQVPLSAIATFHERPAPLLVSHLSQFPAATISFNLAPGASLGEAVKAIDAAERELGLPASFQTRFQGAALAFQASLSNQLFLILAAIVTMYIVLGVLYESYIHPITILSTLPSAGVGALLALMITGHDLDIIGIIGIVLLIGIVKKNAIMMIDFALEAERVEGKPPREAIYQACLLRFRPILMTTLAALLGAVPLIAGSGAGSELRQPLGIAIAGGLIVSQVLTLFTTPVIYLGFDALARRIRGFFERSGRRAAHPDA

SEQ ID NO: 2763 - DNA, 3135 bp, Methylobacillus flagellatus KT
  CDS (1)..(3135): transl_table=11
atgaatccctcccgggtttttatcgaaaggccggtagcgactacgctgctgatgctggccttgcttatatcaggcctgctggcctataccttgttgcctgtcgcctccttgccggaagtggaatatcccactatccaggtgaagaccttgtatcccggggccagccccgaggtggtcaattccatgatcacagcaccgttggaaagccagctcggcaggattgcaggcctggacgaaatgtcttccagcagttcaggcggcgcttcggtgatcacactgcgcttcaacctcaatacgagcctgggcattgccgagcaaggcgtgcaagccgcgatcaataccgcatccaacctgctgcccaatgatttgccgactcagccggtctacagcaaggtcaatcctgctgatgtccctgtgttgaccctggccgtcacttccgacgccttgcccctgcccaaggtgcaggacctggtcgatacgcggctcgcacagaagatcgcgcagatttcaggtgtcggcatggtcagcatcagtggtgggcagcggccggcagtacgcgtcagcgccaatcccaccgcgctggcggcttatggcctcagcctggagtccatccggacggcgattgccagcaataacctgaacggatccaagggcagcttcaacggtgccacgcgctctaccatcatcgatgccaatgatcagatgcgcagcgtcgaggagtatcgcaacctggtgctgagctaccagaatggcgcgccgataaggctcaaggacgtggctgaggcctatgacggtgccgaaaacgaatacctcgccgcgtgggcaaatgacaagccggccgtcatcgtcaatatccagcgccagcccggggcgaatgtgatcgaggtggtcgagcgtgtgcgggacatgttgcccagcctcaaggaaagcctgccagagaatgtgcatgtctccatcctgagcgaccgcagtcacaccatccaggcttcggtgagggatacgcagttcgaactgctgcttgcgatcgggctggtagtcctggtgactttccttttcctgcaggatgcccgtgcaaccctgataccgtccattgccgtgccactgtcgttgatcggcacctttggcgtcatgtacctggctgggttttccctcaataaccttaccttgatggcattgacgattgccaccggcttcgtcatcgacgatgccatcgtcatgctggaaaatatcgagcgctacattgagcagggagacagtccgctgcaggcggcattgaagggttcgaagcagatcagcttcaccatcatttcattgacggtttcactggttgccgtattgattccgctccttttcatgagcgatattgccggacgcttgttccgcgagtttgcgttgaccctcgccatcgccattctcgtatcgatgctgatttctctgaccttgacccccatgttgtgctcgttatggctcaaacatgtgccacacaccgaaaaggggcggttttctcaggccggcgcccggatgatgcaggggctcatcacgcattatggccgcgcattgaaatgggtgttgtcgcatcagtggtcgacactgtttgcagcattggtgacgctgctcattacggtgctgctctatctctatttgcccaagggtttcttcccgacccaggacaccgggttgatccaggggatcagcgaggcaccacagtcggcgtcatttaacgccatggcaagaaagcaagcgcatctggcccgcgtgatccagcgcgacccggccgtggaaagcgtgtcatcctacatcggggtagacggtaccaacgaagcgcttaataccggacgtttgctgatcaacctcaagccccatgcggatcgcgacgtgaccgccagtcaggtgatcgcccgtctcaagcaggcgacggcggatatcccggatttcaagctctacctgcagccggtgcaggatctcaccatagaggacaagagcagccgcacacagtaccgcttcttgctcacggaccccgatatcagcgtgctgcagtctgccatgccgcgcgtgctggaacgcctgggccagttgccgcagatcaccgatgtcgccagtgaccttcagggcaagggcctgcaggctttcctggtgatagaccgtgacaatgcggcccggctcggggtgaccgttgccaatatcaatgcggtgttgtacaacgctttcggccaacggctgatttccaccatctacacccaggccaaccaataccgtgtggtcatggaagtgccgcccaacttccgcagcggccctgtggcgctcgccaatctctatgtgcccgggagcagcaccgatagcgcaggcaatgtagtgacgacgcaggtgccactcaatacactggtacacgttgaggagcgcaacaccttgctcaccattaaccatatcggccaattccctgccgccaccgtgtctttcaatctggctgaaaatgtcgcgctgggtgatgctgtggcggctattcgagaggccgtggccgggctgcagttgccgggcagtgtacagacccggttccagggagcggcgctggcattcgaggcttcgctttccaataccttgttcctgatcctggcggcgctggtatgcatgtatatcgtactcggcatcctgtatgagagctttatccatccagtgaccattctttccacgctgccttcagcaaccgtgggggcgatgctggcattgtgggtgtacggacatgaaatcggcatggtggccatcatcggcatcatcttactgatcggcatcgtgaagaagaacgccatcatgatgatcgattttgcactggctgcggagcgcgagcaggggctcaagccggtagatgcgatctaccaggcctgcctgctgcgtttccgccccatcctgatgacgaccatggcagccttgttcggcgccttaccgctgatgttttccaccggggcgggcgcggaattgcggcagcccctaggtattaccatggtgggtgggctgttgctgtcgcaattgctgaccatcttcactacgcctgtgatttacctgatgttcgatcgtctggtgcggcgccgacgtgccagtgcggaacgccgtagcggcaacacgggtgaggagctggcctga

SEQ ID NO: 2764 - protein, 1044 aa, Methylobacillus flagellatus KT
MNPSRVFIERPVATTLLMLALLISGLLAYTLLPVASLPEVEYPTIQVKTLYPGASPEVVNSMITAPLESQLGRIAGLDEMSSSSSGGASVITLRFNLNTSLGIAEQGVQAAINTASNLLPNDLPTQPVYSKVNPADVPVLTLAVTSDALPLPKVQDLVDTRLAQKIAQISGVGMVSISGGQRPAVRVSANPTALAAYGLSLESIRTAIASNNLNGSKGSFNGATRSTIIDANDQMRSVEEYRNLVLSYQNGAPIRLKDVAEAYDGAENEYLAAWANDKPAVIVNIQRQPGANVIEVVERVRDMLPSLKESLPENVHVSILSDRSHTIQASVRDTQFELLLAIGLVVLVTFLFLQDARATLIPSIAVPLSLIGTFGVMYLAGFSLNNLTLMALTIATGFVIDDAIVMLENIERYIEQGDSPLQAALKGSKQISFTIISLTVSLVAVLIPLLFMSDIAGRLFREFALTLAIAILVSMLISLTLTPMLCSLWLKHVPHTEKGRFSQAGARMMQGLITHYGRALKWVLSHQWSTLFAALVTLLITVLLYLYLPKGFFPTQDTGLIQGISEAPQSASFNAMARKQAHLARVIQRDPAVESVSSYIGVDGTNEALNTGRLLINLKPHADRDVTASQVIARLKQATADIPDFKLYLQPVQDLTIEDKSSRTQYRFLLTDPDISVLQSAMPRVLERLGQLPQITDVASDLQGKGLQAFLVIDRDNAARLGVTVANINAVLYNAFGQRLISTIYTQANQYRVVMEVPPNFRSGPVALANLYVPGSSTDSAGNVVTTQVPLNTLVHVEERNTLLTINHIGQFPAATVSFNLAENVALGDAVAAIREAVAGLQLPGSVQTRFQGAALAFEASLSNTLFLILAALVCMYIVLGILYESFIHPVTILSTLPSATVGAMLALWVYGHEIGMVAIIGIILLIGIVKKNAIMMIDFALAAEREQGLKPVDAIYQACLLRFRPILMTTMAALFGALPLMFSTGAGAELRQPLGITMVGGLLLSQLLTIFTTPVIYLMFDRLVRRRRASAERRSGNTGEELA

SEQ ID NO: 2765 - DNA, 3126 bp, Burkholderia xenovorans LB400
  CDS (1)..(3126): transl_table=11
atgaacttctcccgtctgttcatcctcagacccgtggcgacgtcgctgctgatggtcgcgctcgtgctcgtcgggctggtcgcgatgcgctttctgccggtgtcttcgctgcccgacgtcgactatcccactatccaggtccagaccttctatcccggcgcgagcccgaacgtgatggcgaccaccgtcacggcgccgctcgaggtccagctcggcgagattccggggctgcagcagatggtctcgtacagttcggaaggcgcgtcggtgatcacgctgcagttcgatctctcgctgaacctggacattgccgagcagaacgtgcagcaggcgatcaacgccgccaacagctttctgcccaccggcctgcccgcgccgccgacctacgcgaaggtgaacccggccgatcagccgatcctcacgctcgcggtcacgtcgaagtccatgtcgctgacgcagttgcaggacaccgccaacaatcgtctcgccaccaagatctcggaagtgccgggcgtcggtctcgtgacgacggccggcggcaacgtgccggccgtgcgcgtggaagccgatccgcagaagctcgccgcttacggcctgaatctcgacgatctgcgcaccctgctcgccaacgtcaacgtcagccagccgaaaggcaatttcgacggtccggagctcgactacacgatcaacgccaacgatcagatcgtggacccgcaagactatctggactccgtgatcgcctatcagaacggtgcgccggtgtatctgcgcgacgtcgcgcgcgtgagccaggcggcccaggacgtggaacgcggcgcgtggtacaaccgcacgccggccatcgtgctgaacgtgcagcgtcagccgggcgcgaacgtgatcgccaccgtgaaccagatcatgaagcagttgccggcgctcgaatcgacgctgcccgccggcctgcaggtcaccgtggtggcgaacaccaccggcgtgatccgctcgtcggtctcggacgccgcgttcgaactggtgctcgccgtcgtgctggtggtgctggtgatcttcgtgttcctgcgcaacgtgcccgccaccatcattccgagcatctccgtgccggtctcgctgatcggcacgctcgcggtgatgtaccagctcaactattcgatcgacaatctctcgctgatggcgctgatcatcgcaacgggtttcgtcgtcgacgattcgatcgtgatgatcgagaatatcgtgcgctatctggaggaaggcaagacgccgctcgaagccgcgctcgaaggcgccggccagatcggcttcacaatcctctcgctgacggtctcgctgatcgcggtgctgatcccgctgctgttcatgggcggcgtgatcggccggctcttcagcgaattcgcgatcacgctcgcggtgacgatcgtgatttcggcggtggtctcgctgaccgtggtgccgatgctgtgcgcgcgcctgttgcgcgcgcaggcgcagcgccatccgagccgcttcgagcgcttcagcgaaggcctgttcgacaggacgctcgccgcctacgagcgtggtctgaactgggtgctcgatcaccagatgctgacactggcggtcgcgctcatcaccgtcgcgctcacggcgatcctgtacatcgtgattccgaagggcctgttcccggtgcaggacgtcggcgtgatccagggtatcagcgtggccgacaactcggtttcgtacacggcgatggtccgtcgccaaagcgccctcgccgacgcgattctgaaggaccccgacgtggtgtcgctcacctcctatgtcggcatcgacgggaccaatccgacgctgaacaacggccgcttcctgatcaatctgcgcccgcgcgacgaccgctcggtcaccgccgaggaaatcggccggcggatccagcaggaagtcgcgaacgtgcccggcattcgcctgtatctgcaacccgagcaggacctgacgctcgacacctcggtctcgcgcaaccagtacaacttcgtgctgcgcgggccgaaccagcaggccttcaaccagtacgtgccggccttgatcgcgcgcatgaagcagatttcgtcgatcacggacgtgacgagcgatctgaacaccaacggcctgagcgtgaacgtggaagtgaaccgccagcttgccgcgcgctacggcatcaccgcggccacgatcgacaacgcgctgtacgatgcgctcggccagcgcatcgtctcgaccatcttccagcagtccgatcagtaccgcgtgattctggtggcgaagcccgagacgctgcctaccgtgcagtcgatcggcaatctgtatctgccgagtcagaccagcagcagcggccaggtgccgctgtcgggcatcgcgaagatcagcatcacgcagtcgccgctgatgatcagccatctcgcgcagttcccctcggtgacgatctcgttcaacctcgcgcaggacgcgtcgctcagcgccgccgtggcgcaaatccgcgacgccgagcgcgcggtgcaactgccgccgtccatcacgacctcgttccagggcgcggcgcaggcattcgaagactcgctctccagcgaggtatatctgctgatcgccgcgctcgtcgccgtgtatatcgtgctcggcgtgctgtacgagagctacattcacccggtgacgattctttcgacgctgccctcggccggcatcggcgccctgctcgcgctgatgatcgcgggcagcgatctcgacgtgatcggcattatcggcatcgtgctgctgatcggcatcgtcaagaagaacgcgatcatgatggtcgacttcgcgctcgaagcggagcgcgtgcacggcaagccggcgcgcgaagcgatcttcgaagcgtcgctgctgcgcttccggccgatcctgatgaccacgctcgcggccatgctcggcgcgctgcccatgctgctcggcaccggcaccggctccgaactgcgccggccgctcggtctcgcgatcatcggcgggctgatggtgagccaggtgctgacgctgttcaccacgccggtgatctatctgttcttcgaccgcctcgcgcagcgcgtgaacagcaggcggcgcgccgcgagtgagggcgccgccgcaccgccggagaacacgccgtga

SEQ ID NO: 2766 - protein, 1041 aa, Burkholderia xenovorans LB400
MNFSRLFILRPVATSLLMVALVLVGLVAMRFLPVSSLPDVDYPTIQVQTFYPGASPNVMATTVTAPLEVQLGEIPGLQQMVSYSSEGASVITLQFDLSLNLDIAEQNVQQAINAANSFLPTGLPAPPTYAKVNPADQPILTLAVTSKSMSLTQLQDTANNRLATKISEVPGVGLVTTAGGNVPAVRVEADPQKLAAYGLNLDDLRTLLANVNVSQPKGNFDGPELDYTINANDQIVDPQDYLDSVIAYQNGAPVYLRDVARVSQAAQDVERGAWYNRTPAIVLNVQRQPGANVIATVNQIMKQLPALESTLPAGLQVTVVANTTGVIRSSVSDAAFELVLAVVLVVLVIFVFLRNVPATIIPSISVPVSLIGTLAVMYQLNYSIDNLSLMALIIATGFVVDDSIVMIENIVRYLEEGKTPLEAALEGAGQIGFTILSLTVSLIAVLIPLLFMGGVIGRLFSEFAITLAVTIVISAVVSLTVVPMLCARLLRAQAQRHPSRFERFSEGLFDRTLAAYERGLNWVLDHQMLTLAVALITVALTAILYIVIPKGLFPVQDVGVIQGISVADNSVSYTAMVRRQSALADAILKDPDVVSLTSYVGIDGTNPTLNNGRFLINLRPRDDRSVTAEEIGRRIQQEVANVPGIRLYLQPEQDLTLDTSVSRNQYNFVLRGPNQQAFNQYVPALIARMKQISSITDVTSDLNTNGLSVNVEVNRQLAARYGITAATIDNALYDALGQRIVSTIFQQSDQYRVILVAKPETLPTVQSIGNLYLPSQTSSSGQVPLSGIAKISITQSPLMISHLAQFPSVTISFNLAQDASLSAAVAQIRDAERAVQLPPSITTSFQGAAQAFEDSLSSEVYLLIAALVAVYIVLGVLYESYIHPVTILSTLPSAGIGALLALMIAGSDLDVIGIIGIVLLIGIVKKNAIMMVDFALEAERVHGKPAREAIFEASLLRFRPILMTTLAAMLGALPMLLGTGTGSELRRPLGLAIIGGLMVSQVLTLFTTPVIYLFFDRLAQRVNSRRRAASEGAAAPPENTP

SEQ ID NO: 2767 - DNA, 3123 bp, Burkholderia xenovorans LB400
  CDS (1)..(3123): transl_table=11
atgaatccatcccgcgcttttattctgcgtcccgtcggcaccgcgctgctgatggcggcgatcatgctggtcggtctcgtcgcgctgcgcttcctgccgctctccgcgctgcccgaggtcgactatccgaccatccaggtgcagaccttctatccgggcgcgagcccggacgtgatgacgtcgtcggtcaccgcgccgctcgaacgccagttcgggcagatgccgtcgctcaatcagatgtcctcgcaaagctcggccggctcgtcgatcatcacgctgcaattcagcctcgatctgccgctcgacatcgccgaacaggaagtgcaggccgccatcaacgcggccggcaacctgctgccctcggacctgcccgcgccgccgatctacgccaaggtcaatccggccgacgcgccgatcatcacgctcgcgatcacctcgaagacgctgccgctcacgcaggtgcaggatctggccgacacgcgtctcgcgcagaaaatctcgcaggtggcgggcgtgggcctggtgagcttgtcgggcggccagcgcccggccgtgcgcattcaggcgaacccgcgcgcgctcgccgcgtacggcctgaatctcgacgacctgcgcaccaccatctcgaacctgaacgtcaacacgccgaagggcaatttcgacggccccacgcgcaactacacgatcaacgcgaacgaccagttgaccgacgccgacgcctacaagagcgcggtggtcgcgtacaagaacggccgcgcggtgatgctgaccgacgtggccaccatcgtacagggcgccgagaacaccaagctcggcgcatgggtggacggcacgcccgcgatcattctgaacgtgcagcgccagccgggcgcgaacgtgatccaggtggtggacagcatcaagaagctgctgccgcaattgcagcaggcgctgcccgccgcgctggacgtggaaatcgtcaccgaccgtaccaccacgatccgcgcttccgtgcgcgacgtgcagttcgaactcgcgatgtcggtcgtgctggtggtgatggtgatgtacctgttcctcgccaacatctacgcgaccatcattccgagtctctcggtgccgctgtcgctgatcggcacgctcgccgtgatgtacctgtgcggcttctcgctggacaacctgtccctgatggcgctgaccatcgcgaccggtttcgtggtggacgacgcgatcgtgatgatcgagaacatcgcgcgttatgtcgaagacggcgagtcgccgctcgaagccgcgctgaagggttcgaaacagatcggcttcaccatcatttcgctgacggtttcgctgatcgccgtgctgattccgctgcttttcatgggcgacgtggtcggccgcctgttccacgaattcgccattacgctcgccgtgacgatcgtgatctcggcagtcgtgtcgctcacgctggtgccgatgatgtgcgcgaaactgctgcgccacacgccgccgcacgagaaccaccgtttcgaggccaaagcgcaccgcgcgatcgactgggtgatcgcacgctatgcggtcgcgctcacgtgggtgctgaaccggcaacgctccacgctggtcgtcgcactcctcacgctggtgctgaccggcctgctgtacgtgtacattccgaagggcttcttcccggtgcaggacaccggcgtgatccaggcgatcacgcaggcgccgcagtcggtatcgtatgcgtcgatggccgagcgccagcaggaactcgccgcgcagatcctgaagaatccggacgtggaaagcctgacttcgttcatcggcgtggacggcagcaatatcacgctgaacagcggccgcatgctgatcaacctgaagccgcgcgacgaccgcagcaacaccgcgagcgaagtgatccgccagttgcagcgggatgtggcgcatattccgggcgcgtcgctgtacatgcaaccggtgcaggacctgaccatcgactcgacggtgagccccacgcagtaccagttcatgctgaccgatccgaacatcggcgaattcaccacgtgggtgcccaagcttgtcgagcgcctgcggcagtcgcccgaactggcggacgtggcgacggatctgcaggacaacggccagtcggtctacatcgaaatcgaccgcgccaccgcgtcgcgttatggcatcacgccggccaccgtggatagcgcgctgtacgacgcgttcggccagcgcatcatctcgaccatcttcacgcagtcgaaccagtaccgcgtgattctggaagcgcagccggaaatgcagcactacaccgaatcgctgaagtcgatctatctgccctcttccacgtccacgggcggacaggtgccgctctcctcgatcgcgcgcttcatcgagaagcccgcgccgctgctggtcacgcacctgagccagttcccggccaccaccgtgtcgttcaaccttgcgccgggctcgtcgctcggtgcggcggtgaaggcgatcgaccaggcgcagaaagacatcggcttgcccgcgtcgttccagacgcgctaccagggcgcggcgctggcattccaggcgtcgctgtcgaacgagctgttcctgatcctcgcggcgatcgtcacgatgtatatcgtgctgggcgtgctgtacgagagcttcatccatccaatcacgattctctccacgctgccctcggccggtgtcggcgcgctgctcgcgctgctcgttaccgggcacgatctggacatcatcggcatcattggcatcgtgctgctgatcggtatcgtgaagaagaacgcgatcatgatgatcgacttcgcgctctacgccgagcgcgaagaaggcaagccgccgcgcgaggcgatctatcaggcgtgtctgctgcgtttccggccgatcctgatgaccacgctcgccgccctgctcggcgcgctgccgctgatgctcggcacgggtgccggctcggagctgcgccgtccgctcggtatcgcgattgcgggcgggttgatcgtcagccagttgctgacgctcttcaccacgccggtgatctacctcgcgttcgactcgctcgggcgccgcgtgcgtgagcgcttcaatcggggcaagcccacgccgcccgtcaccgacgcggggaactga

SEQ ID NO: 2768 - protein, 1040 aa, Burkholderia xenovorans LB400
MNPSRAFILRPVGTALLMAAIMLVGLVALRFLPLSALPEVDYPTIQVQTFYPGASPDVMTSSVTAPLERQFGQMPSLNQMSSQSSAGSSIITLQFSLDLPLDIAEQEVQAAINAAGNLLPSDLPAPPIYAKVNPADAPIITLAITSKTLPLTQVQDLADTRLAQKISQVAGVGLVSLSGGQRPAVRIQANPRALAAYGLNLDDLRTTISNLNVNTPKGNFDGPTRNYTINANDQLTDADAYKSAVVAYKNGRAVMLTDVATIVQGAENTKLGAWVDGTPAIILNVQRQPGANVIQVVDSIKKLLPQLQQALPAALDVEIVTDRTTTIRASVRDVQFELAMSVVLVVMVMYLFLANIYATIIPSLSVPLSLIGTLAVMYLCGFSLDNLSLMALTIATGFVVDDAIVMIENIARYVEDGESPLEAALKGSKQIGFTIISLTVSLIAVLIPLLFMGDVVGRLFHEFAITLAVTIVISAVVSLTLVPMMCAKLLRHTPPHENHRFEAKAHRAIDWVIARYAVALTWVLNRQRSTLVVALLTLVLTGLLYVYIPKGFFPVQDTGVIQAITQAPQSVSYASMAERQQELAAQILKNPDVESLTSFIGVDGSNITLNSGRMLINLKPRDDRSNTASEVIRQLQRDVAHIPGASLYMQPVQDLTIDSTVSPTQYQFMLTDPNIGEFTTWVPKLVERLRQSPELADVATDLQDNGQSVYIEIDRATASRYGITPATVDSALYDAFGQRIISTIFTQSNQYRVILEAQPEMQHYTESLKSIYLPSSTSTGGQVPLSSIARFIEKPAPLLVTHLSQFPATTVSFNLAPGSSLGAAVKAIDQAQKDIGLPASFQTRYQGAALAFQASLSNELFLILAAIVTMYIVLGVLYESFIHPITILSTLPSAGVGALLALLVTGHDLDIIGIIGIVLLIGIVKKNAIMMIDFALYAEREEGKPPREAIYQACLLRFRPILMTTLAALLGALPLMLGTGAGSELRRPLGIAIAGGLIVSQLLTLFTTPVIYLAFDSLGRRVRERFNRGKPTPPVTDAGN

SEQ ID NO: 2769 - DNA, 3156 bp, Ralstonia metallidurans CH34
  CDS (1)..(3156): transl_table=11
atgaatccctcacgcatctttatcgagcggccagtcgccacagcgctgctgatggtggccatcctgctgtcggggctggtcgcattccggctgctgccgctctcggccctgcccgaggtggactacccgaccatccaggtcaccacgctctaccccggcgccagccccgacgtgatgacctcgtcggtcaccgcgccgttggaacgccagttcggccagatgcctggcctaaagcagatgtcgtcgtcctcctccggcggcgcatcggtgatcacgctgcagttcgagctgacactgtcgctcgacgtggccgaacaggaagtgcaggccgccattaacgcgggcagcaacctgctcccggctgacctgccaatgccgccgatctacagcaaggtcaacccggccgacgcgccgatcatgacgctggcgatgacgtccgacacgctgccgctgcccaagctgcaggacatggtcgacacgcgcgtggccgccaagatctcgcagatccagggcgtgggcctggtcacgatcagcgggggccagcgccccgccgtgcgcatccaggccaatccgacggcgctggccaacctcggcatgtcgatcgacgacctgcgcaccgccatcggcaatgcgaacgtgaacggcgccaagggcagtttcgacggccccgcgcgcgcgtcgacaatcgacgccaatgaccagctcaagtcggccgacgaatacaagcagatcatcatcggctaccagaacggcgcgccgatccgcatcaccgacgtggccgacatcgtcgatgcggccgagaacagccgcctggccgcatgggccaacgccaagccggccatcgtgctgaacatccagcgccagcccggcgccaacgtgatcgaggtggtcgaccgcatcaagacgctgatgccccagttgcgggcgtcgctgccggcctccgtgcaggtgcagcagctgaccgaccgcaccaccacaatccgcgcctcggtcaaggacgtcgagttcgaactgctgctggccgtcgcgctggtggtgatggtgatcttcatcttcctgcgcaacctgtccgccacgatcatcccgggggtggcggtgccgctgtcgctggtgggcacgttcggcgtgatgtacatggccggcttctcgatcaacaacctcacgctgatggcactgaccatcgccaccggcttcgtggtggacgacgccatcgtgatgatcgagaacatcatgcgctacatcgaggaaggcgatccgccgatggaagcggcgctgaagggctcgaaacagatcggcttcaccatcatctcgctgacgttctcgctggtggccgtgctgattccactgctgttcatgggcgacgtggtcggccggctgttccgcgagttcgccatcacgctcgccgtgtcgatcctgatctccgcagtggtctccctgacgctgacgccgatgatgtgcgcgcgtctgctgcgtcacgtgcccgagagcgaaatgtcccgcttccacgtggtcacgggccgcttcttcgacagcgtgatcgaacaatatggccgcgcgctgaactgggtgctcgagcgccagacggccacgctgctcgtcgccgtgggcacactggtgctgaccggccttctctacgtggtggtgccgaagggtttcttcccggtgcaggacacgggcatgatccaggcgatcaccgaagccgcgcagaccagttcgttccagtcgatgggccgcaagcaggaggcggtgcagaaggtgattctcgaggaccccgccgtggatagcgtgtcgtcgttcattggtgtcgacggcaccaacacgacgatcaacgcgggccgcatgatcatcaatctgaagccgaaggacgaacgcgactcgatggcagtcgtgaccgaccggctgcaggcctcggtgcagaagcttggcggcgtggcgctgtacatgcagccggtgcaggacctgacaatcgaggaccgcgtggcccgcacgcagtaccagttcaccgtcgaggacccggacccagccgtgctggccgaatgggtaccgaagctgattgagcggctgaagcaggagccggaactgcgcgacgtggccagcgaccagcagaacaacggcctgcgcgcctacgtggagatcgaccgcgacgccgccgcgcgtttcggcatcaccaccgcggtcatcgacagcgcgctctacagcgcgttcggccagcggctggtctcgacgatcttcacgcagtcgagccagtatcgcgtggtgctggaaacgatgccgcaattccgggtgagcccggagtcgctgtccgcgctgcgcctgccgtcgtcgtcgggcggccaggtgccgctcgggtcgatcgcgcacatctcggagcgcaccggcccgctcgtgatcaatcaccagggccagttcccgtccgcgacgatctcgttcaacctcgcgccgggtgaatcgcttggcgcggcggtggacaagatcaccaaggtcgagagcgagattggcctgccgatctcgatggccaccgagttccagggcgccgctctggccttccgcgcgtcgctctccaacaccctgtggctgatcctggccgctgtggtcacgatgtacatcgtgctcggtgtgctgtatgaaagcacgatccatccggtgaccatcctctcgacgctgccgtcggccgccgtcggcgccctgctggcgctgctggtgtcggggcaggatatcggcatcatcgcgatcatcggcatcatcctgctgatcggtatcgtgaagaagaacgcgatcatgatgatcgacttcgcgcttgaggccgagcgcgaaggcggcatgaagccgcgcgatgcgattttccaggcctgtctgctgcgcttccgcccgatcctgatgacgacgatggccgcactgctggctgcgttgccgatgatgctcggcacgggcatcggctcggaactgcgccgtccgctgggtatcacgatggtgggtggcctgctggtcagccaggtgctgacgctgttcaccacgccggtgatctacctggcgttcgaccgcgtcgcgatccgcctgaaggcctggcgccgcaaccgcttcggtgaccccgatgagggcggcaccggagaggatggcggccagcagccgcaccgtccgcaggagccgaacgtctga

SEQ ID NO: 2770 - protein, 1051 aa, Ralstonia metallidurans CH34
MNPSRIFIERPVATALLMVAILLSGLVAFRLLPLSALPEVDYPTIQVTTLYPGASPDVMTSSVTAPLERQFGQMPGLKQMSSSSSGGASVITLQFELTLSLDVAEQEVQAAINAGSNLLPADLPMPPIYSKVNPADAPIMTLAMTSDTLPLPKLQDMVDTRVAAKISQIQGVGLVTISGGQRPAVRIQANPTALANLGMSIDDLRTAIGNANVNGAKGSFDGPARASTIDANDQLKSADEYKQIIIGYQNGAPIRITDVADIVDAAENSRLAAWANAKPAIVLNIQRQPGANVIEVVDRIKTLMPQLRASLPASVQVQQLTDRTTTIRASVKDVEFELLLAVALVVMVIFIFLRNLSATIIPGVAVPLSLVGTFGVMYMAGFSINNLTLMALTIATGFVVDDAIVMIENIMRYIEEGDPPMEAALKGSKQIGFTIISLTFSLVAVLIPLLFMGDVVGRLFREFAITLAVSILISAVVSLTLTPMMCARLLRHVPESEMSRFHVVTGRFFDSVIEQYGRALNWVLERQTATLLVAVGTLVLTGLLYVVVPKGFFPVQDTGMIQAITEAAQTSSFQSMGRKQEAVQKVILEDPAVDSVSSFIGVDGTNTTINAGRMIINLKPKDERDSMAVVTDRLQASVQKLGGVALYMQPVQDLTIEDRVARTQYQFTVEDPDPAVLAEWVPKLIERLKQEPELRDVASDQQNNGLRAYVEIDRDAAARFGITTAVIDSALYSAFGQRLVSTIFTQSSQYRVVLETMPQFRVSPESLSALRLPSSSGGQVPLGSIAHISERTGPLVINHQGQFPSATISFNLAPGESLGAAVDKITKVESEIGLPISMATEFQGAALAFRASLSNTLWLILAAVVTMYIVLGVLYESTIHPVTILSTLPSAAVGALLALLVSGQDIGIIAIIGIILLIGIVKKNAIMMIDFALEAEREGGMKPRDAIFQACLLRFRPILMTTMAALLAALPMMLGTGIGSELRRPLGITMVGGLLVSQVLTLFTTPVIYLAFDRVAIRLKAWRRNRFGDPDEGGTGEDGGQQPHRPQEPNV

SEQ ID NO: 2771 - DNA, 3201 bp, Ralstonia metallidurans CH34
  CDS (1)..(3201): transl_table=11
atgagtatttcggccaccttcatcaagcggccgatcggcacatcgctgctggcgctcgcgttgctgctcgttggcctggccgcgtggccactgctgccgatcgccccgctgccgcaagtggactttccgaccatccaggtcacagtcaacctgccgggcgccaatcccgagacgatggcgtcgaacgtggcgcagccgctcgaacggcagttctcgctgatcgcggggctgtcgcagatgacgtcgaccagcgcgcaaggcaccacgcagatcacgctgcagttcgacctgaaccgcagcatcgacgccgccgccgtggacgtgcaggccgccatcaacgccgcgggcggccagcttccgtccaacctgccgacacccccgacgttccgcaagatcaaccccgccgacgcgccgatcctggtgctggcggtgcagtccgacgcgctgccgctgaccaccgtcaacgacttcgccgacaacatcctggcgcagcagatctcgcagatcgaaggcgtcggcctggtcaacattggcggccagcagaagccggccgtgcgcatccaggtagacccggccaagctcgcgtcgatgggcctgagcatggaagacatccgtggcgtgatcgcggcgaccacggtcaaccagccaaccggcgccaccgatggcgcgaccaaggccttcaacgtctacaccaacgaccagatcacccgcgcggcgccgtggaacgacatggtgctggcgtggcgcaacggcgccccggtgcgcgtgcgcgatgtcggcgtggcggtggatggcccggagaacaaccggctcgcgggctgggcgttcgccggcgccgccgcccccgctgacaacacgttccacaacggccgcgcgatcatcctggccgtgaccaagcagccgggcgccaacgtgatcgccacggtggaccgcatcaaggccgccctaccccgcctgcagctttcgattccggccgcggtcaacgtcaacgtgctggcagaccgcacgcagaacatccgcgcctcggaagccgatgtcgagttcacgctgatcctgaccatcgtgctggtggtcggcatcatcttcgtgttcctgcgcgacgtatgggccacggtgatcccgagcatcaccgtgccgctggcgctgctgggcacggccggaggcatgtacctgctgggctacagccgcgacaacctgtcgctgatggcgctgacgattgccgtgggcttcgtcgtcgatgatgcgatcgtgatgcttgagaacatctatcgccacgtggaagcgggcatgtcgccgctggaggctgcgctgcagggtgccggcgagatcgcgttcacgatcgtgtcgatctctgtgtcgctggtggccgtgttcatcccgctgctgctgatgggcggcatcgtcggccggctgttccgcgaattcgcggtcacggtgacgctgacgatcgcggtatcggtgatcgtctcgctgacgctgacgccgatgatgtgcgcaaaattcctgcagccgcacgacccggcccacgcccgccatcacggacggctctacctgatgttcgagcgcggcttcgatgcgatgctcggtgcgtaccggcgcgggctcgatcacgtgctcgatcaccagttcctgacgttgtgcgtgttcctgctgaccgtggccaccacggtagtgctgttcgtgatcatcccgaagggcttctttccccagcaggacaccggcttcgtgttcggcaccgcggagtccgcgcaggacgcatcattcaagtcgatgaacgcgcgcatggtggcgctggcggacgtggtccgcagcgaccccgacatctcggccgtcggcatgaccggcgggcagaacacggtcaacactggcaacttcttcatcgcgctgcgcccgaaggaggaaggccgcacggccacggctgacgagatcatcgcgcggctgcgaccgaagctggccaaggtggagggcgccaacctgttcctgcaagccggacaggacatcaacgttggcgggcggctgtcgcgcacgcagtaccagtacacgctcaccgacgccaacctcgccgaactcaacgactgggcgccgcgcgtcctggagcggttccgccagttgccgcaactggccgacgtagcgtccgaccagcagaactccgcggccgcggccatgctgacgatcgaccgcgcgcgggcgtcgagcttcggcatcacaccggcgctgatcgacgccacgatctacgacgcgatcggccagcgccaggtggcacagtacttcacgcagatcaacagctaccacgtggtcctcgaagccacgccacaattgcaggacgacccgcgcctgttcgacaagctctacctgacgtccccgatcaccggcgagcaggtgccgctatcgtcgttcgtgaagatcgacacgaaccgcacggcctacctggcgatcggccaccaggggcagttcccggcggtgaccatctcgttcaacctggcgcagggcgcgtcgctgggtgacgccgtggaggccatcaacaaggccctggccggcatggggcggccacgcacgctcggcggcgcgttccagggtaccgcgcaggcattcggcgcgtcgctcgcttcgcagccctacctgatcgccgccgcgctgatcgcggtgtacatcgtgctggggctgctctacgagagctatatccacccgctgacgattctttcgacgctgccgtccgccggcgtcggcgcgctgctggtgctgatgctgggtggctacgacttcaccgtgatcgcgctgatcgggatcatcctgctgatcggcatcgtcaagaagaacggcatcatgatggtcgacttcgcgctggtggccgagcgcgagcgcggcatgtctccgcgcgacgcgatctacgaggcgtgtctgctgcgcttccgcccgatcatgatgaccacgatgtgcgcgctgctggcggggctgccgcttatgctcgggcacggcgcggggtccgaactgcgtcggccgctgggctacgcgatggtcggcgggctggtggtgtcgcagatgctcacgctgttcagcacgccggtggtctatctctacctggatcgcgcgcactattggtacatgcgccgcaaggccgcgcgcggcggcggcaagccgccacccacgcaacaaacaccgcacggcaagtcgcacgagtacatgggtggagagggcgagtga

SEQ ID NO: 2772 - protein, 1066 aa, Ralstonia metallidurans CH34
MSISATFIKRPIGTSLLALALLLVGLAAWPLLPIAPLPQVDFPTIQVTVNLPGANPETMASNVAQPLERQFSLIAGLSQMTSTSAQGTTQITLQFDLNRSIDAAAVDVQAAINAAGGQLPSNLPTPPTFRKINPADAPILVLAVQSDALPLTTVNDFADNILAQQISQIEGVGLVNIGGQQKPAVRIQVDPAKLASMGLSMEDIRGVIAATTVNQPTGATDGATKAFNVYTNDQITRAAPWNDMVLAWRNGAPVRVRDVGVAVDGPENNRLAGWAFAGAAAPADNTFHNGRAIILAVTKQPGANVIATVDRIKAALPRLQLSIPAAVNVNVLADRTQNIRASEADVEFTLILTIVLVVGIIFVFLRDVWATVIPSITVPLALLGTAGGMYLLGYSRDNLSLMALTIAVGFVVDDAIVMLENIYRHVEAGMSPLEAALQGAGEIAFTIVSISVSLVAVFIPLLLMGGIVGRLFREFAVTVTLTIAVSVIVSLTLTPMMCAKFLQPHDPAHARHHGRLYLMFERGFDAMLGAYRRGLDHVLDHQFLTLCVFLLTVATTVVLFVIIPKGFFPQQDTGFVFGTAESAQDASFKSMNARMVALADVVRSDPDISAVGMTGGQNTVNTGNFFIALRPKEEGRTATADEIIARLRPKLAKVEGANLFLQAGQDINVGGRLSRTQYQYTLTDANLAELNDWAPRVLERFRQLPQLADVASDQQNSAAAAMLTIDRARASSFGITPALIDATIYDAIGQRQVAQYFTQINSYHVVLEATPQLQDDPRLFDKLYLTSPITGEQVPLSSFVKIDTNRTAYLAIGHQGQFPAVTISFNLAQGASLGDAVEAINKALAGMGRPRTLGGAFQGTAQAFGASLASQPYLIAAALIAVYIVLGLLYESYIHPLTILSTLPSAGVGALLVLMLGGYDFTVIALIGIILLIGIVKKNGIMMVDFALVAERERGMSPRDAIYEACLLRFRPIMMTTMCALLAGLPLMLGHGAGSELRRPLGYAMVGGLVVSQMLTLFSTPVVYLYLDRAHYWYMRRKAARGGGKPPPTQQTPHGKSHEYMGGEGE

SEQ ID NO: 2773 - DNA, 3279 bp, Acidobacteria bacterium Ellin345
  CDS (1)..(3279): transl_table=11
atgagtccttcacggccatttattctgcggccggtcgcgacatcgttgctgatggccgcgatcctgctcgccggcatggtggcgtacttccagctcccagtgtcggcactgccgcaggtggattacccaacgatccaggtcatcacgttctatccgggcgcgagtccggacgtgaccgcttcggccgtgacggcgcccttggaacgccagtttggcgaagtacccggattgcagcagatgacgtcgacgagctcgtcgggcgcatcggtcatcgtgttgcagttcgaactgaacctgaacattgatgtggccgagcaggaagtgcaggcgggcatcaatgcggcgcagtcgtacttgcctaccgatttgccgacgccgccgatttacagcaaaaccaacccagccgacgctcccatccttactcttgcgctgacctcaaagacggttccgctgacgcaagtcgaagaccttgctgacacgcgactggcgcagaagattgcgcaacttcccggtgttggattggtctcgatcagcggcggacaaaagccggcggtgcgcatccaggtcaacccaacccaactttcgtcgtacggattgaacctcgaagatgtgcgcactgcgatccagaacacgagcctcgaccaggcgaagggatcgttcgacggcccacaccagaatttccagatccaggccaatgatcaactgctgagcagcgccgatttcaaaaacatcgttgtcgcctatcgcaataattcgccagtcttcatgaaggacgtcgcgaacgtcgtcgacggcgccgaaaacgaaaaacaagctgcgtggatcaacacgactcccgcggtgatcatgaacattcagcggcagcctggggcgaacatcatccaggtggtggaccgcattacccgtctgctgccgcaattgaagacgaacctcccggcatccgtggacgtttcggtggtcaccgaccgcaccacaacaattcgcgcttcggtaaaggacgttgaattcgaactgatgctcaccgtcgggctcgtcgtgatggtgatcttcctgttcctgcgcagcgtctcggcaacgatcatccccagcgtcgcggtgccactttcattgatcggcacgttcggcatcatgtacctatgtgggtacagtctgaacaacctcacgctcatggcgctgacgatctccactggcttcgtggtggacgacgccatcgtgatgatcgagaacatctcgcgcttcattgaagaaggcgatcctccgctccaggccgcgctgaagggcgctgagcaaatcggcttcaccatcgtttcgctgacaatttcgctgatcgcggtgctcatcccactgctcttcatgggcgacatcgtaggccgactcttccgagagttcgccatcacgctgagcgtcacgatcctcgtttctgcggtggtgtcattaacgctgaccccgatgatgtcggcgcgtttgttgaagcacacgccggagtcgaagcgaagcaacttctatcgctggtccgaaaatgcattcgaaaagacgattgcgttttacggccgcacgctaacctgggtgctgaagcaccagaccgtgacactgctggtcgctgtgctcacgctgattttcaccgtcgttcttttcatcatcgtgcccaagggcttcttcccgatacaagacactggcgtgatccagggcatatccgaagcggcgcaaagcacctcgttcgatgccatgcaacgccaccagcaagacctggcgaaggtgattctcgacgatccggcggttgaaagcctctcttcgttcatcggtgtagacggcaccaatatgacgatgaacagcgggcgcattcagatcaatttgaagccgctggaagaacgtcacatccgtgcgaccgaagttattcgcagactgcaaacaaagctgcaggacgtgcagggggtgacgctctacatgcaaccggtgcaggacctcacggtggaagatcgcgtgagccgcacccagtatcaatacacgctggaagagcccgaccaaaccgatctgaacaaatggacggcccaactggttgacaagatgaagcagttgccgcagatccgcgacgtggcaaccgaccagcaaaccgaaggcatggcggcaaacctggtcattgatcgcgtgaccgcatcgcggcttggcatttctccgcagatgatcgactcgacgttgtatgacgccttcggccaacgactggtcactacgttgtacacgcagttgaaccagtaccacgtggtgctggaaaccttgccggagttccagaaaaatccgaataatctgcacgatatctacgtgcgcagcggcgcagccagcagcaatagcagcagcggtagtagcagccagacgaacaacaatgggctcctcatcgtgagcggcacggcatcgagccaggctggtggcggtgccggaaataccagcagcgcgggatcgagtacgccgagcacattcgccggtacgcccggtggcaatgccgtcccgctcagtgcgtttacacacttcgagcagcagcacgcgccgctctccatcaaccaccagggacagttccccgtggtgacgatctcgttcaatctcgcaccgggctattcgctcggtgacgcgaccaaggcaatcaaccaggcccaaaaagacctgaacatgccgctcagcgttcaggcggcattccagggcacagcggcttccttccagtcatcgctggccaacgaaccgatcctgatcctggcggctctgatcgtcgtttacatcgtgctgggcgtgttgtacgagagctatatccacccgatcacgattctctccaccctgccttccgccggtgtaggcgcattcctggcgctgcttatctgcggacaggagttcgatgtcgtcgcgctcattggcatcatcctgttgatcggcatcgtgaagaaaaacggaatcatgatggtggacttcgcgctggaagccgagcgcgagcatggcaagaactcggaagaagcgatttaccaggcagctctcctgcgtttccgcccaatcatgatgacgaccatggcggccttgctcggcggattgccactggcgcttggcagcggcatcggctccgaattgcgccgaccacttggcatttcgatggtcggcggtctcttgctgagccaggtgctcactctctacaccacgcccgtcatctacatttacttcgatcgtcttggacagcgaatgctcggccgccgagtctcggaccgcggtccaaccggcgaattcgcgccgtcgccgggagattag

SEQ ID NO: 2774 - protein, 1092 aa, Acidobacteria bacterium Ellin345
MSPSRPFILRPVATSLLMAAILLAGMVAYFQLPVSALPQVDYPTIQVITFYPGASPDVTASAVTAPLERQFGEVPGLQQMTSTSSSGASVIVLQFELNLNIDVAEQEVQAGINAAQSYLPTDLPTPPIYSKTNPADAPILTLALTSKTVPLTQVEDLADTRLAQKIAQLPGVGLVSISGGQKPAVRIQVNPTQLSSYGLNLEDVRTAIQNTSLDQAKGSFDGPHQNFQIQANDQLLSSADFKNIVVAYRNNSPVFMKDVANVVDGAENEKQAAWINTTPAVIMNIQRQPGANIIQVVDRITRLLPQLKTNLPASVDVSVVTDRTTTIRASVKDVEFELMLTVGLVVMVIFLFLRSVSATIIPSVAVPLSLIGTFGIMYLCGYSLNNLTLMALTISTGFVVDDAIVMIENISRFIEEGDPPLQAALKGAEQIGFTIVSLTISLIAVLIPLLFMGDIVGRLFREFAITLSVTILVSAVVSLTLTPMMSARLLKHTPESKRSNFYRWSENAFEKTIAFYGRTLTWVLKHQTVTLLVAVLTLIFTVVLFIIVPKGFFPIQDTGVIQGISEAAQSTSFDAMQRHQQDLAKVILDDPAVESLSSFIGVDGTNMTMNSGRIQINLKPLEERHIRATEVIRRLQTKLQDVQGVTLYMQPVQDLTVEDRVSRTQYQYTLEEPDQTDLNKWTAQLVDKMKQLPQIRDVATDQQTEGMAANLVIDRVTASRLGISPQMIDSTLYDAFGQRLVTTLYTQLNQYHVVLETLPEFQKNPNNLHDIYVRSGAASSNSSSGSSSQTNNNGLLIVSGTASSQAGGGAGNTSSAGSSTPSTFAGTPGGNAVPLSAFTHFEQQHAPLSINHQGQFPVVTISFNLAPGYSLGDATKAINQAQKDLNMPLSVQAAFQGTAASFQSSLANEPILILAALIVVYIVLGVLYESYIHPITILSTLPSAGVGAFLALLICGQEFDVVALIGIILLIGIVKKNGIMMVDFALEAEREHGKNSEEAIYQAALLRFRPIMMTTMAALLGGLPLALGSGIGSELRRPLGISMVGGLLLSQVLTLYTTPVIYIYFDRLGQRMLGRRVSDRGPTGEFAPSPGD

SEQ ID NO: 2775 - DNA, 3081 bp, Rhodobacter sphaeroides 2.4.1
  CDS (1)..(3081)
atgaacatctcggaaatcttcatccgccgccctgtcgcctcgacggtgctggcgagcttcatcctgctgatcgggctctattccatcttcaacctgccggtccggcaatatcccgaggtggaggagacggtcgtcaccatcaccaccacctatccgggggcctcgcccgacctgatccagggcttcatcacggcccccatcgcccgcgccgtcgcgacgaccgagaacatcgactatgtgaccagccagagccggccttcggcctcggtcgtctcggtgcagatgaagctcggcgcgaattcggacgtggcgctgaccgaggtgctggccaaggtccagcaggtgcggggcgaactgccctcggaggccgaggatccggtgatcgtgaagggcacgggcgacaatttcgcgctcatgtatcttgcggcgctgaaccccaacatgtccgccgagcagatgacggaatatctcgagcgggtgatccggccgcggatgtccaccatcgagggcgtggccgagatccagatcatcggcgcggccgaatatgcgatgcgggtctggatcgatccgatgaagctcgccgcgcgcaacgtgaccgcctcggaagtgctgacggcgatccgggcctcgaacttcctgtcggcgccggggcgcaccgagggcgaatatttcgcccggtcgatcaagctgcaatcgacgctgcagacccccgaggccttcggggcgctgccgatccgttcgcagggtgacgaggtcgtgcgcctgcgcgacgtggccgatgtggagctggcctcggccgagcccgacagcatcgtgaccttcaacggccagcccggcaccttcatcgggatcttcccgacaccggccgcgaacccgctgaccaccgaggccgcagtgaatcgaggaactgcccgcgaatcaatgccaccctgccgagggggatggagatcaacctcgtctacgactcgaccgagaacgatcaccgactcgatctacgaggtgttcaagacgctcgccgaggacgtggacatcgtggtggtcgtgatcctcctgttcctcggctcgttccgctcggtgctgatgcccatcgtgacgatcccgctctcgctgatcggggtctgcgcggtgctgctggcgctcggctattcgatcaaccttctgtcgcttctggccatggtgctcgccatcgggctcgtggtggacgatgcgatcgtggtggtcgagaacatccaccggcacatcgacgaggggatgagcccctatcacgcggcgttgaaggggatgcgcgagatcaccggccccgtcatcgccatgacgatcacgctggccgccgtgctggcgccgctcggcttctcgggcgggctcaccgggtcactgttcgcggaattcgccttcgcgctggcgggatcggtcatcatctcgggggtggtcgcgctgacgatcacgccgatgatgtcggcgcgtctgctgaaggcgggcaccggcagccgcttccagcgcatcgtcgatcacacgctcgaaggcaccgccaactggtacgagcgccgggtctcctcgtcgctcgactaccggccggtgacgcttctcatggtggcggcgctcgtcgcggtcacgggcttcatgttcatgaacacgacgagcgagctggcgcccgaggaggatcagggcgcgatgttcgcgatcctgaacgggccgcggtacgccaccaaggactataccacgctctacaccgaccggatctcggacgtgaccaaggacattcccgaggtgcgcaccgaattctccatcgcgggcttcggcgggcaggccaatcagggcatctacatctgggcgctgaaggactgggccgaccgcgaccggagccaggccgaggtgcagcaggaggtgcaggcgcggctcgatccggtgccgggggtgcagggcttcgtcttctcgccgccgagcctgccgggcacgggcggcgggttgccgatctcgatggtgctgcagtcgatccagtcgcccgaccgcgtgttcgagatctcggaggagatccgccgtcgcgccgaggcctcgggccgcttcatcgcggtgcagaactcgctcgccttcgatgcgccggaggtggtggccaccatcgaccgggaccgggcagcgacgctgaacgtgccgatctcggacatcggcaacacgctgggacttctggtgggcggggcctcggtcgcgcagttcgaccgcgagtcgaacagctacgacatcatcccgcaggtgccgcgcgactggcgcaacaatccggaacggctgagccagttcttcgtgcgcgccgcctcgggggcgatggtgccgctgacctcggtggtgaatttcgagaccggcgcctcggcggcctcgatcgaacagttcaatcagctcaactccgccacgatctcggccctgccgatgatcggcatctcgaccggcgacggtctggccgagctgcagcagatcgccaacgaggtgatgcccgacggcttcttcctcgactattccggccagtcgcggctcgaggtcgagcagggcaacacgatccttctggccttcgcggcggcggtggtggtgatctacctcgtgctcgccgcgcagttcgagagcttccgcgatccgttcatcatcatgatgtcggtgccgctctcgatcttcggggcgatcctgccgctgaacctcgggcttggcacgctgaacatctacacgcaggtgggcctcatcacgctgatcggcctcatcaccaagcacgggatcctgatggtggaattcgccaaccagcagcgcgaggagcacgggctgaaccggcggcaggccatcgtggcggcggccaaggtgcggctgcggccgatcctgatgacgacggcggccatggcgctggcggtggtgccgctcatcatcgcggaaggtgcgggcgccgaggcgcggcaggcgatggggatcgtgatcttcacgggcctgctgatcggcacctgcttcacgctcttcgtggtgccgatgttctacaccttcatctcgaagccggacaaggaatggcaggcccatcgtgcgatgctggaggcgcgcgaggcctcggcctga

SEQ ID NO: 2776 - protein, 1026 aa, Rhodobacter sphaeroides 2.4.1
MNISEIFIRRPVASTVLASFILLIGLYSIFNLPVRQYPEVEETVVTITTTYPGASPDLIQGFITAPIARAVATTENIDYVTSQSRPSASVVSVQMKLGANSDVALTEVLAKVQQVRGELPSEAEDPVIVKGTGDNFALMYLAALNPNMSAEQMTEYLERVIRPRMSTIEGVAEIQIIGAAEYAMRVWIDPMKLAARNVTASEVLTAIRASNFLSAPGRTEGEYFARSIKLQSTLQTPEAFGALPIRSQGDEVVRLRDVADVELASAEPDSIVTFNGQPGTFIGIFPTPAANPLTTEAAVNRGTARESMPPCRGGWRSTSSTTRPRTITDSIYEVFKTLAEDVDIVVVVILLFLGSFRSVLMPIVTIPLSLIGVCAVLLALGYSINLLSLLAMVLAIGLVVDDAIVVVENIHRHIDEGMSPYHAALKGMREITGPVIAMTITLAAVLAPLGFSGGLTGSLFAEFAFALAGSVIISGVVALTITPMMSARLLKAGTGSRFQRIVDHTLEGTANWYERRVSSSLDYRPVTLLMVAALVAVTGFMFMNTTSELAPEEDQGAMFAILNGPRYATKDYTTLYTDRISDVTKDIPEVRTEFSIAGFGGQANQGIYIWALKDWADRDRSQAEVQQEVQARLDPVPGVQGFVFSPPSLPGTGGGLPISMVLQSIQSPDRVFEISEEIRRRAEASGRFIAVQNSLAFDAPEVVATIDRDRAATLNVPISDIGNTLGLLVGGASVAQFDRESNSYDIIPQVPRDWRNNPERLSQFFVRAASGAMVPLTSVVNFETGASAASIEQFNQLNSATISALPMIGISTGDGLAELQQIANEVMPDGFFLDYSGQSRLEVEQGNTILLAFAAAVVVIYLVLAAQFESFRDPFIIMMSVPLSIFGAILPLNLGLGTLNIYTQVGLITLIGLITKHGILMVEFANQQREEHGLNRRQAIVAAAKVRLRPILMTTAAMALAVVPLIIAEGAGAEARQAMGIVIFTGLLIGTCFTLFVVPMFYTFISKPDKEWQAHRAMLEAREASA

SEQ ID NO: 2777 - DNA, 2979 bp, Magnetospirillum magnetotacticum MS-1
  CDS (1)..(2979)
ttgccggtctcggctctgccccaggtggactttcccaccatccaggtgaccacccaactgccgggcgccagcgccgagaccgtcgccaccctgatcaccacgccgctcgagcgtcagttcggcctgattccgggccttgccgtgatgacctccacctcgtcccagggcaccagcgcgctgaccctgcaattcgatctttccaaaagcatcgacgtggcgtcggaagaagtgcaggcggccatcgacgcggccaggggcgttctgcccacccaactgccctatcccccggtctattccaaggtcaatcccgccgatccgcccatcatgaccctggcgctgacctcggacagcttgcccattacgcgcttgaacgacgtggccgacaccttgctggcccagaagctcagccagatcggcggcgtgggccgcgtgctgatcgagggcggccagcgcccagcggtgcgcgtgcgcatggatccggcccgccttgccgcctatggcctgtccctggaagacgtgcgctcggctttgtccaaggccaatgtggacatgcccaagggcagcttcgatggcgtggcccaggccctttccatcggcgccaacgaccagatttccgaccccctggcctatcccgcccaggtggtggcctggaagaacaatgctccggtgcgcatctccgatctgggcgatgtggtggaaggcgtcgagaattcccgcgtggcgggctggttcgacggcaagcccgcggtgatcctcaacatccagcgccaaccgggcgccaatatcgtcgccacggtggatcgcctgcaggccaagctgcccgagttgaagcggggcgtgccgacgggcatcaagctttcggttctggccgatcgcaccgagaccatccgcgcctcggtggccgatgtggaattcaccctggtgctgaccgttatcttggtgatcggggtgatctgggcctttctgcggtcggtgcgcgccacgctcattcccgccgtcgccctgcctttgtccctgattggcactttcggcgtgatggccctggccgggttcagcctggacaacctgtccctgatggcgctgaccatctcggccggtttcgtggtcgacgacgccatcgtgatgatcgagaacatcgtgcgctatatcgagaagggcatgaagcccttcgaggccgccctggctggtgcccaggaaatcggcttcaccatcgtgtcgctgaccgtttcgctggtggcggtgttcattcccttgctgttcatgaccggcatcgtcgggcggctgttccgcgaattcgccctgacgctggccgtggcggtggtggtctcggcggtggtgtcgctgacgctcactcccatgatgtgcgcccatctgctgaagggcggccacgaagaggccaagtcgggccgctttttcgatgcccttcgtgatgcctatgcccggtcgctggactgggtgctgggccgacaggtggcgaccctgtgggtggccttcgccaccctggtcctgaccatcgggctttacgtcttcatgcccaagggctttttgcccacccaggataccggggtgatcgtggcgaccaccgatgcccgcgccgatgtgtcgtttgccaccatgatggacatgcagcgccgggtgtccgatctggtgcgcaccgaccccgatgtgacggcggtggcctccttcatcggggcgggacccatcaatcccaccgccaataccggccagatgaccatcgtcttgaagcccaggaagcaacgttcggcttccgccgagcaggtgatcgcccggctggccgagctggtggcgccggtggccgggatggagacgcatttccgccctgcccaggatatccagatcagccaccgcaccagccgcacccagtatcagtatacgctgaccgatatcgacgccgccgaactggcccaatgggtgccccagatggtggagcggctgaaagcttcgcccttgctgatggatgtggccaccgattcccaggaaggggggctacaggccgagatccgcatcgaccgcgacaaggcggcgcgcctgggcgtgctgccccaggccatcgacgacatcttgtacgattcttacggccaacgtcagatctccaccatctattcccaggtcaaccagtacaaggtggtgctggaagtgacgccggaataccagggcgggccggaggccctgggctcgctctatgtgcgctcgtccaacggcgccctggtgccgctatcggcggtctcctcggtgagccgggcacgggtgccgctggtcatcacccatcagggccagttcccggcggtgaccatcagcttcaatctggcaccgggtgtgtcgctgggcgccgccacggctgccatcgatggtctgcagcaggagatgggcctgcccgagaccatcaccggcgattattccggcgacgccgccgagttccgccgctcgctggaaagccagccctggctgatcgccgcagccatggtggtgatctacatcgttttgggcgtgctgtatgaaagcaccatccacccggtgaccatcatgtccaccctgccatcggcggggattggggcgctgctggccttggccgccagcgggcacgatctgtccctggtggggctgatcggcatcgtgctgttgatgggtatcgtcaagaagaacgccatcatgatgatcgactttgccatcgaggccgagcgccaccatggcaaaagccccagggaagccatcgtcagcgccagcctgctgcggttccgccccatcatgatgaccaccatggcggccctgctgggcgcccttccgctggccatcgacagcggaaccggggccgagctacggcgtccgctgggcatttccatcgtcggcggtctggtgctcagccagatgatcaccctttacaccaccccggtgatctatctcgccttcgaacggctgaagcggcgattcgcgcccaaggccctggagcaggcgccatga

SEQ ID NO: 2778 - protein, 992 aa, Magnetospirillum magnetotacticum MS-1
MPVSALPQVDFPTIQVTTQLPGASAETVATLITTPLERQFGLIPGLAVMTSTSSQGTSALTLQFDLSKSIDVASEEVQAAIDAARGVLPTQLPYPPVYSKVNPADPPIMTLALTSDSLPITRLNDVADTLLAQKLSQIGGVGRVLIEGGQRPAVRVRMDPARLAAYGLSLEDVRSALSKANVDMPKGSFDGVAQALSIGANDQISDPLAYPAQVVAWKNNAPVRISDLGDVVEGVENSRVAGWFDGKPAVILNIQRQPGANIVATVDRLQAKLPELKRGVPTGIKLSVLADRTETIRASVADVEFTLVLTVILVIGVIWAFLRSVRATLIPAVALPLSLIGTFGVMALAGFSLDNLSLMALTISAGFVVDDAIVMIENIVRYIEKGMKPFEAALAGAQEIGFTIVSLTVSLVAVFIPLLFMTGIVGRLFREFALTLAVAVVVSAVVSLTLTPMMCAHLLKGGHEEAKSGRFFDALRDAYARSLDWVLGRQVATLWVAFATLVLTIGLYVFMPKGFLPTQDTGVIVATTDARADVSFATMMDMQRRVSDLVRTDPDVTAVASFIGAGPINPTANTGQMTIVLKPRKQRSASAEQVIARLAELVAPVAGMETHFRPAQDIQISHRTSRTQYQYTLTDIDAAELAQWVPQMVERLKASPLLMDVATDSQEGGLQAEIRIDRDKAARLGVLPQAIDDILYDSYGQRQISTIYSQVNQYKVVLEVTPEYQGGPEALGSLYVRSSNGALVPLSAVSSVSRARVPLVITHQGQFPAVTISFNLAPGVSLGAATAAIDGLQQEMGLPETITGDYSGDAAEFRRSLESQPWLIAAAMVVIYIVLGVLYESTIHPVTIMSTLPSAGIGALLALAASGHDLSLVGLIGIVLLMGIVKKNAIMMIDFAIEAERHHGKSPREAIVSASLLRFRPIMMTTMAALLGALPLAIDSGTGAELRRPLGISIVGGLVLSQMITLYTTPVIYLAFERLKRRFAPKALEQAP

SEQ ID NO: 2779 - DNA, 3180 bp, Magnetospirillum magnetotacticum MS-1
  CDS (1)..(3180)
atgcgcctgtcccacttctttatcgaccgccccatcttcgccaccgtggtctcggtgctgatcaccatcatcggcgccatcacctatttcgctcttccggtggcgcagtatcccgagatcgcgccgccgaccatcgtggtcagcgcctcttatcccggcgcctcggcccaggtggtggccgacaccgtggcgacgccgctggaacagcagatcaacggcgtcgagaacatgctgtatctgaacagccaggccaccggcgacggcaatctgaagctgaccgtgaccttcgcactgggcaccaatctcgacaccgcccaggtgctggtgcagaaccgggtggcggtggccacggcgcggctgcccgacgacgtcaagcgcatcggcatcaccgtggccaagaactcgcccgacatgctgatggtggtgcatctcaactcgcccgacggctcgcgcgaacagctgtatctgtccaacttcgccacccttcagatgatcgacgtgctggcccgcctggatggcgtcggcgaagtgcgcatcttcggcgcgcgcgattacgccatgcgcgtctggatcgacccggacaaggcggcggcccgcaacctcacagcgggcgaggtggtcaaggcgctgcaggcccagaacgtccagatcgccgccggtgtgctggaccagccgcccatccccaatcagggcgctttccagttttccgtccagacccagggccgccttctcgaccccgcccagttcggcgatgtcatcgtcaaggccgatgccacgggccgcatggtgcgcctcaaggatgtggcgcgcatcgaactgggcgcccaggattacagcgtcaacggctatctcaacggcaagaatgccgtgccggtggcggtgttccagcgccccggctccaacgccctggccaccgccgaccgggtcatcgccaaggtggaggaactgtccaagaccttcccctcgggcgtctcctacaccatcgcctacaatcccacccagttcatcgcccagtcggtcaaggcggtgatcaagaccatcttcgaggcggtcttgctggtggtcgtagtggtgatcttgttcctccagacctggcgggcctcgctgattccgctggccgccattccggtctcgctggtgggcaccttcgcggtgctgggcgcgctcggctattcgctgaacaacctatcgctgttcggcctggtcctggcggtgggcatcgtggtggacgacgccatcgtggtggtggaaaacgtcgagcgcaacatgaaggacggcatgaatgcccggtccgccgcccaccagaccatggacgaggtgggcagcgcgctgatctccatcgccctggtcctgtgcgcggtgttcatcccggctgccttcattccgggcatctcgggccagttcttccgtcagttcgcggtgaccatcgccgcctcgacggtgatttcgctgatcgtgtcgctgaccttgtcgcccgctttgtgcgccctgctgttcaggggccacggcccgctggaccatcatgacgagaccggctggcgcaaggtggtggcccgattcttcgcctggttcaaccacaatttcgaccgcctggccgggggctatggctccctgacccgcacggtggtgcgcaaatcggctctgatgctggtcatttatggcgggctgatcggcgcggcgggggtggagttcttccagacccccaagggcttcatccccgagatggaccagggctatctgatcaccgtggtccagttgccgcccggttcatcactgtcgcgcaccgatgcggtggtcaagaaggtcgcggacgtcatggccgagacccccggcgtcgcccataccctggccttcgccggtctggacggcgccactttcaccaatgcctccaacggcgccgccatcttcacgcccctaaagcccttcgaggaacgctacgcccagggcctgtcggccaatgtgatcctggccgatcttagaaagcgcctgagttccgttcaggacgcctttatcatcaccatccagcctcccccggtgcgcggtatcggcacggcgggcggcttcaagatgatgctgcaggacaagggcgggcgtggctccaaggcgctggaggacgtggccctggacatggcggccgaggccaacaagattcccggactgcaaggtatcttcaccctgttcaacacccgcacgcccaatgtctacgccgatatcgaccgagtgcgcgcccagatgctgggcgtgcccaccgaccgggtgtccgaggcgttgcaggtctatctgggctcggccttcgtcaacgaattcaactatctgggccgcaccttccgggtcaccgcccaggccgacgcgcccttccgccaggaggtggaggacatcgccaatatcaaggtgagaaacgacaagggccagatggtgcccattggcgccgtagcctcgttccgcttcgacaccgggccctatcgcgtgccccgctacaacctgttcccggccgccgaggtgcagggctcggccgcgccgggctatgccagcggctatgcgctcgagcagatgcgcgccctggccgccgagcgcctgcccgagggcttcggcttcgaatggaccgaactggcgctgcaggaattgctggcgggtaataacggattgttcgtgttcgcggcttcggtgctgttcgtcttcctgctgctggctgcccagtatgaaagctggtccctgcccgccgccgtggtgctgatcgtacccatgtgcctgctggccgccgtcaccggactgatcatccggggactgcccatcaatatcctggcccagatcggcttcatcgtgctgatcggactggccgccaagaacgccatcctgatcgtggaattcgccagacagggcgaatccgaaggcctcgaccgcatcgaggccgccgtccatgcgggacggacccgcctgcggcccattctgatgacctccctggccttcatcctgggcgtgctgcccttggtggcggggaccggagcgggcgccgaaatgcgccagagcttaggcacaaccgtgttctacggcatgctgggcgtcaccggttttgggttggtcttcacgcccatcttctatgtggtgatccgaaagatggtggccgggcatcacgcccgcgccgccgccgcccatgcggccgaggaagcgcgggggcgctaa

SEQ ID NO: 2780 - protein, 1059 aa, Magnetospirillum magnetotacticum MS-1
MRLSHFFIDRPIFATVVSVLITIIGAITYFALPVAQYPEIAPPTIVVSASYPGASAQVVADTVATPLEQQINGVENMLYLNSQATGDGNLKLTVTFALGTNLDTAQVLVQNRVAVATARLPDDVKRIGITVAKNSPDMLMVVHLNSPDGSREQLYLSNFATLQMIDVLARLDGVGEVRIFGARDYAMRVWIDPDKAAARNLTAGEVVKALQAQNVQIAAGVLDQPPIPNQGAFQFSVQTQGRLLDPAQFGDVIVKADATGRMVRLKDVARIELGAQDYSVNGYLNGKNAVPVAVFQRPGSNALATADRVIAKVEELSKTFPSGVSYTIAYNPTQFIAQSVKAVIKTIFEAVLLVVVVVILFLQTWRASLIPLAAIPVSLVGTFAVLGALGYSLNNLSLFGLVLAVGIVVDDAIVVVENVERNMKDGMNARSAAHQTMDEVGSALISIALVLCAVFIPAAFIPGISGQFFRQFAVTIAASTVISLIVSLTLSPALCALLFRGHGPLDHHDETGWRKVVARFFAWFNHNFDRLAGGYGSLTRTVVRKSALMLVIYGGLIGAAGVEFFQTPKGFIPEMDQGYLITVVQLPPGSSLSRTDAVVKKVADVMAETPGVAHTLAFAGLDGATFTNASNGAAIFTPLKPFEERYAQGLSANVILADLRKRLSSVQDAFIITIQPPPVRGIGTAGGFKMMLQDKGGRGSKALEDVALDMAAEANKIPGLQGIFTLFNTRTPNVYADIDRVRAQMLGVPTDRVSEALQVYLGSAFVNEFNYLGRTFRVTAQADAPFRQEVEDIANIKVRNDKGQMVPIGAVASFRFDTGPYRVPRYNLFPAAEVQGSAAPGYASGYALEQMRALAAERLPEGFGFEWTELALQELLAGNNGLFVFAASVLFVFLLLAAQYESWSLPAAVVLIVPMCLLAAVTGLIIRGLPINILAQIGFIVLIGLAAKNAILIVEFARQGESEGLDRIEAAVHAGRTRLRPILMTSLAFILGVLPLVAGTGAGAEMRQSLGTTVFYGMLGVTGFGLVFTPIFYVVIRKMVAGHHARAAAAHAAEEARGR

SEQ ID NO: 2781 - DNA, 3174 bp, Azotobacter vinelandii
  CDS (1)..(3174)
atgaacttctcgcaattcttcatccaccggccgatcttcgccgccgtgctctcgctgctgaccctgatcggcggcgccatcgcactgttccagttgccgatcagcgaatacccggaagtggtgccgcccaccgtggtggtgcgcgccaacttcccgggcgccaaccccaaggtgatcggtgaaacggtcgcctcgccgctggaacaggccatcgtcggcgtcgagggaatgctctacatgtcgtcccaggccacctccgacggcaagttgaccctgaccatcaccttcgccctcggcaccgatctggacaacgcccaggtgcaggtgcagaaccgcgtgacccgcaccatgccgaccctgcccaccgaagtgcagcgcctcggcgtgaccgtcgacaaggcctcgccggacctgaccatggtggttcacctgacctcgccggacgaacgctacgacatgctctacctgtccaactacgccacgctcaacgtcaaggacgagctggcgcgtctcgacggcgtgggcgacgtgcaactgttcggcctcggcaactactccctgcgcgtctggctcgatccgcaccgggtggcctcgcgcggcctcaccgccatggacgtggtcgacgccatccgcgagcagaaccgccaggtcgccgccggctccctcggcgcaccgccggcaccgggcgacaccggcttccagctgtcgatcaacacccagggccgcctggtcagcgaggaggagttcgaaaacatcatcgtccgtgcaggtgaggacggtgagatcacccgcctgaaggacatcgcccgcatcgaactgggctccagccagtacgccctgcgctcgcaactgaacaaccggccggccgtggccatgccggtcttccagcgccccggctccaacgccatcgatatctccgacgcggtgcgcgcgcgcatggccgagctgaagcagagctttccgcagggcgtcgactactccatcgtctacgacccgaccgtgttcgtgcgcggctccatcgaggcggtggtgcacaccctgttcgaggcgatcgtcctggtggtgctggtggtgatcctgttcctgcagacctggcgcgcctcgatcattcccctggcggcggtaccggtgtcgctgatcggtaccttcgcggtgatgcacctgttcggcttctcgctcaacgccctgtcgctgttcggcctggtgctggccatcggcatcgtggtggacgacgcgatcgtggtggtggagaacgtcgagcgcaacatcgccctcggcaagccgcccctggaggcgacccgccaggccatgcaggaggtgaccggccccatcgtcgccacggccctggtgctttgcgcggtgttcgtgccgacggcgttcatctccggcctgaccggacagttctaccagcagttcgccctgaccatcgccatctccacggtgatctcggcattcaattcgctgaccctgtcgccggccctggccgccgtgctgctcaaggaccaccacgcgcccaaggaccgtttctcccgggtgctcgacaggctgctcggcggctggctgttcgggcccttcaaccgcctgttcgagcgcgccagccacggctatgtcgctaccgtgcgccacgtgctgcgcggcagtgccatcgccctgctggtctacggcgggctgatgggcctgacctggctgggcttctccagcaccccgacaggcttcgtaccgccgcaggacaagcagtacctggtcgccttcgcccagttgccggacgccgccaccctcgaccgcaccgatgcggtgatccagcgcatgtcggagatcgccggccggcatccgggggtagccgacaccgtggccttccccggcctgtcgatcaacggcttcaccaacagcccgaacagcggcatcgtcttcacccccctcaagtccttcgaggaacgccaggacccgtcgctgtcggcggatgccatcgccgccgagctgaaccgccggttcgccgagatccaggacgcctacatcgccatcttcccgccgccgccggtgcagggcctcggcaccatcggcggcttccgcgtgcaggtccaggaccgtggcggcctcggctacgaggagctgtatcggcaggtgcagaacgtcatcgccaagagccgcacggtgccggagctggccggcctgttcaccagctaccaggtgaacgtgccgcaggtcgacgccgacatcgaccgggaaaaggccaagacccacggcgtggccatcagcgacattttcgacaccctgcaggtgtatctgggatcgctgtacgccaacgacttcaaccgcttcggccgtacctatcaagtcaatgtccaggccgagcagcggtttcgcctggaaccggcacagatcggccagctcaaggtgcgcaacaaccgtggcgagatggtgccgctgtcgaccttcgtcaggatcgaaggcagcgccggtcccgatcgagtgatgcactacaacggcttcctcaccgccgagatcaacggcgccgccgcccccggctacagctccggccaggccgaggcggcgatggagcggctgctgcgcgaggaactgccgggcggcatgaccttcgagtggaccgagctgacctaccagcagatcctcgccggcaacaccgccatcttcgtgttcccgctctgcgtgctgctggcgttcctggtcctggccgcccagtacgagagctggggcctgccgctggcggtgatcctgatcgtgcccatgaccctgctgtcggccatcgtcggcgtcaggatcgcgggcggagacaacaacgtcttcacccagatcggcctgatcgtgctggtggggctggcctgcaagaacgccatcctcatcgtcgagttcgccaaggatcggcaggcggagggcctggaccgcatcgccgccgtgctggaggcctgccgcctgcgcctgcggccgatcctgatgacctccatcgccttcatcatgggcgtggtgccgctggtgctgtcctccggggccggcgccgagatgcgccatgccatgggggtggcagtgttctccgggatgatcggcgtgacgctcttcggcctgctgttgaccccggtattcttcgtgctggtacgggctttcgtcgaacgacgcgaagcccgtcggaaccggcaggcactcgaagcgcagggatga

SEQ ID NO: 2782 - protein, 1057 aa, Azotobacter vinelandii
MNFSQFFIHRPIFAAVLSLLTLIGGAIALFQLPISEYPEVVPPTVVVRANFPGANPKVIGETVASPLEQAIVGVEGMLYMSSQATSDGKLTLTITFALGTDLDNAQVQVQNRVTRTMPTLPTEVQRLGVTVDKASPDLTMVVHLTSPDERYDMLYLSNYATLNVKDELARLDGVGDVQLFGLGNYSLRVWLDPHRVASRGLTAMDVVDAIREQNRQVAAGSLGAPPAPGDTGFQLSINTQGRLVSEEEFENIIVRAGEDGEITRLKDIARIELGSSQYALRSQLNNRPAVAMPVFQRPGSNAIDISDAVRARMAELKQSFPQGVDYSIVYDPTVFVRGSIEAVVHTLFEAIVLVVLVVILFLQTWRASIIPLAAVPVSLIGTFAVMHLFGFSLNALSLFGLVLAIGIVVDDAIVVVENVERNIALGKPPLEATRQAMQEVTGPIVATALVLCAVFVPTAFISGLTGQFYQQFALTIAISTVISAFNSLTLSPALAAVLLKDHHAPKDRFSRVLDRLLGGWLFGPFNRLFERASHGYVATVRHVLRGSAIALLVYGGLMGLTWLGFSSTPTGFVPPQDKQYLVAFAQLPDAATLDRTDAVIQRMSEIAGRHPGVADTVAFPGLSINGFTNSPNSGIVFTPLKSFEERQDPSLSADAIAAELNRRFAEIQDAYIAIFPPPPVQGLGTIGGFRVQVQDRGGLGYEELYRQVQNVIAKSRTVPELAGLFTSYQVNVPQVDADIDREKAKTHGVAISDIFDTLQVYLGSLYANDFNRFGRTYQVNVQAEQRFRLEPAQIGQLKVRNNRGEMVPLSTFVRIEGSAGPDRVMHYNGFLTAEINGAAAPGYSSGQAEAAMERLLREELPGGMTFEWTELTYQQILAGNTAIFVFPLCVLLAFLVLAAQYESWGLPLAVILIVPMTLLSAIVGVRIAGGDNNVFTQIGLIVLVGLACKNAILIVEFAKDRQAEGLDRIAAVLEACRLRLRPILMTSIAFIMGVVPLVLSSGAGAEMRHAMGVAVFSGMIGVTLFGLLLTPVFFVLVRAFVERREARRNRQALEAQG

SEQ ID NO: 2783 - DNA, 3192 bp, Nostoc punctiforme PCC 73102
  CDS (1)..(3192)
atgtttgttgacttctttattaagcgaccaatctttgcgtcggtctgcgcgatcgtcatacttttaatcggattaatcagtattcccacactaccgatcgctagattcccagaaattagtcccacccaaatcactgtaacttccaactatagcggagctagtgcagaagttgtagaaagcggagtgacaaatatcttagaaaggcaaatcaacggggttgagggactaagatatctcacttccagcagcagtaatgatggtactagtactattacagccacctttgattcatcgcgggataaagatattgcggctgtggatgtgcaaaatcgtgtttctgttgcccaaccacaactaccagattctgtgcagcgcacaggagtgcgggtatcaaaagaatctagcaacattctcttggcgattggtttatacgctgaaaatagagagtacgacaatatattcttaagcaactatgccgacctttacttagcagatgccttaaaaagagtcaaaggcgtgagcaacgctcaaatttttggtgaacgtcgctatgcaatgcgtctgtggttagatcctagtcgccttgctaatcgggggctaacgaccaaggatgtagcgaatgctttatccgaacaaaacttgcaagttggtgcagggagaattggacaagaaccggctcctgaaggacaaaggtatcaacttgatgtgcgtgctgctagccgattagcagaaccagcagaatttgaagaaattgtcctcaaaactggagatgatggcacattagtcaagctcaaagatgtcgggagagcggaactgggtgcagaaaactatagttcatttctgcgatttcgtggtaatgatgctgtcggtttagggatttatcaagttcctggtagtaatgccttggatgtggcaaagggagtcaaagacgaactagtgcgattagctccgagttttcccccagggctgaaatatcaggtagcttttgacacgacatcctttgtagaagagtcgatgtcagaagttatcaagactctgattgaagcggtagtgctagttgtaattgtaatttttgtgttcttacaagactggcgaactactttaattccagcacttaccattccgctttccttaattgggacatttgccttcgtcaaagtttttaacttttccatcaatagtttgactttatttggtctgactttagcatcggggatggtggtcgatgatgcgatcgttgtggtggagcaaatcagccgctttattcaggataaaggaattaatcctcgtcgagccgctagtgaatcaatgagggaactatttggcgcggttattgccacttcattagtattgatggcggtgtttgtgccagtggcgttttttccgggaaccacaggcgcactttatcggcaatttgcgctaacgatcgctttctccattgcgatttcaacttttttggctttgaccttgacaccttccttatgtgcgctgctgctgcgtcaaggacaaaaaccttcaggctggctgggttggatttttggaaagattaatcggtttcttgactgggtacagaatggttataagcgatcgcttaccttcttaacacacatcaaaggtattgtgattgggttatttatcgtctctttgggaatgactgcttggttgtacaccacagtaccaacagcttttctacccgatgaagacgaaggctacttcatcaccattatccaagggccacaaggggtttcgctgcaatatactagcgatgtgattgcacaggtagaaaaagaaattctgcaaattccagaagtactggggacttttgcgatcggaggatttggttttagtggtaacacagctaacagtggcatcatatttaccactttaaaatcttgggacgagcgctcaaaacccggtcaatcagtacaggcgattattggcagcttgcaagggaagttgatggcaatcccagaagctagagttttccctgtgaatcctccaccaatccagggtttaggtaactttgggggcttcgtctttcaactgcaagaccgcagaggtaacagtggtttagaaaatctagtccagtcgatgggtaagttgctgggtcaggctaatcaaacaccaggattacaagctgtatttagcacctttgccgcagatacaccacaattgcttgtagaagtagaccgcaataaagccaaatcattgcaagtttctatagatgatgtcttcagtactttacaaactgctttgggatcgcaatatgtaaatgattttaatctccagcagcgtaattatcgggtgtatatccaggcagatcaacagtttcgttccaatccaaaagatattggcaaactatacgttcgttctcaaaagaatcaaatggttcctttgagtaacttagttaaagttactcagactgtgggagcgcaaacgataaatcactataatctgttccgctcgattgaaattaatggttccgccgctcctggctctagttcgggagacgcaattaaagcaatggaaaaagttgctaaagaagttttaccagccggctatggttatgaatggtcagggactgcattagaagaaatagattctggtggtttagcacccataatctttggattaggaataatttttgtatttttggtactagccgctcaatacgaaaactacgttgacccctttatcattctgttatcagttcctttagctatctttggagcgctgatagctcaatcaatgcggggttttgcaaatgatgtttactgtcaaattggtctagtaatgttgatcggtttagctagtaagaacgcaattttgattgtggaatttgctaatcaattacgagagcaagggctttcgattactaaagcagtaattgaggcttcgcaagagcggttacgcccaattttgatgactgctttttctacattattagggattttcccgttagctgttgccacaggtgccggtgcgggaagtcgtcaatctttgggaacagcagtttttggtgggatgttaattgcgactttcttgagtttgtttgtagtaccgattttgtatatcgtcattaagacgacaacagagcgctttatccaaccaaatcggcatcaagaactgcaaacagatgcagtttcattagatggtaaaagtgctgtatattcaacaaaaggagagaattag

SEQ ID NO: 2784 - protein, 1063 aa, Nostoc punctiforme PCC 73102
MFVDFFIKRPIFASVCAIVILLIGLISIPTLPIARFPEISPTQITVTSNYSGASAEVVESGVTNILERQINGVEGLRYLTSSSSNDGTSTITATFDSSRDKDIAAVDVQNRVSVAQPQLPDSVQRTGVRVSKESSNILLAIGLYAENREYDNIFLSNYADLYLADALKRVKGVSNAQIFGERRYAMRLWLDPSRLANRGLTTKDVANALSEQNLQVGAGRIGQEPAPEGQRYQLDVRAASRLAEPAEFEEIVLKTGDDGTLVKLKDVGRAELGAENYSSFLRFRGNDAVGLGIYQVPGSNALDVAKGVKDELVRLAPSFPPGLKYQVAFDTTSFVEESMSEVIKTLIEAVVLVVIVIFVFLQDWRTTLIPALTIPLSLIGTFAFVKVFNFSINSLTLFGLTLASGMVVDDAIVVVEQISRFIQDKGINPRRAASESMRELFGAVIATSLVLMAVFVPVAFFPGTTGALYRQFALTIAFSIAISTFLALTLTPSLCALLLRQGQKPSGWLGWIFGKINRFLDWVQNGYKRSLTFLTHIKGIVIGLFIVSLGMTAWLYTTVPTAFLPDEDEGYFITIIQGPQGVSLQYTSDVIAQVEKEILQIPEVLGTFAIGGFGFSGNTANSGIIFTTLKSWDERSKPGQSVQAIIGSLQGKLMAIPEARVFPVNPPPIQGLGNFGGFVFQLQDRRGNSGLENLVQSMGKLLGQANQTPGLQAVFSTFAADTPQLLVEVDRNKAKSLQVSIDDVFSTLQTALGSQYVNDFNLQQRNYRVYIQADQQFRSNPKDIGKLYVRSQKNQMVPLSNLVKVTQTVGAQTINHYNLFRSIEINGSAAPGSSSGDAIKAMEKVAKEVLPAGYGYEWSGTALEEIDSGGLAPIIFGLGIIFVFLVLAAQYENYVDPFIILLSVPLAIFGALIAQSMRGFANDVYCQIGLVMLIGLASKNAILIVEFANQLREQGLSITKAVIEASQERLRPILMTAFSTLLGIFPLAVATGAGAGSRQSLGTAVFGGMLIATFLSLFVVPILYIVIKTTTERFIQPNRHQELQTDAVSLDGKSAVYSTKGEN

SEQ ID NO: 2785 - DNA, 3090 bp, Pseudomonas aeruginosa UCBPP-PA14
  CDS (1)..(3090)
atgacctttaccgacctgttcgtccgccggccggtgctggcgctggtggtcagcacgctgatcctgctgctcggcctgttctccctgggcaagctgccgatccgccagtacccgctgctggaaagctcgaccatcaccgtcaccaccgagtaccccggcgcctccgccgatctcatgcaaggcttcgtcacccagccgatcgcccaggcggtgtcgtcggtggagggcatcgactacctttcctcgacctcggtgcaggggcgtagcgtggtgaccatccgcatgctgctcaaccgcgattcgacccaggcgatgaccgagaccatggccaaggtcaactcggtgcgctacaagctgcccgagcgtgcctacgactcggtgatcgaacgctcttccggcgagaccaccgcggtggcctacgtcggcttttccagcaagaccctgccgatcccggcgttgaccgactacctgtcgcgggtggtcgagccgatgttctcttccatcgacggcgtggccaaggtccagacctttggcggccagcgcctggccatgcgcctctggctcgacgccgaccgcctcgccgggcgcggcctgaccgcctccgacgtggccgaggcgatccgccgcaacaactaccaggcggcgccggggatggtgaaggggcagtacgtgctgtccaacgtgcgggtcaacaccgacctgaccaacgtcgacgacttccgcgagatggtcatccgcaacgatggcaacggcctggtgcgcctgcgcgacgtcggtaccgtcgaactgggcgccgcggccaccgagaccagcgcactgatggacggcgacccggcggtgcacctggggttgttcccgacgcccaccggcaacccgctggtgatcgtcgacggcatccgcaagctgctgccggagatccagaagaccctgccgccggatgtccgcgtcgacctcgcctacgagacttcgcgcttcatccaggcctccatcgacgaggtggtgcggaccctggtggaagcgctgctgatcgtggtgctggtgatctacctctgcctcggctcgctgcgcagcgtgctgatcccggtggcgaccattcccctgtcgatgctcggcgccgccgcgctgatgctggccttcggcttcagcgtcaacctgctgaccctgctggcgatggtgctggccatcgggctggtggtggacgacgccatcgtggtggtggagaacgtccaccgccacatcgaggaaggcaagtcgccggtggcggcggcgctgatcggcgcccgcgaagtggccggcccggtgatcgccatgaccatcaccctggccgccgtgtacacccccatcggcctgatgggcggcctcaccggcgcactgttccgcgagttcgccctgaccctggcgggcgcggtgatcgtgtccggggtggtggcgctgaccctgtcgccggtgatgagttcgctgctgctccaggcgcaccagaacgaggggcgcatgggccgcgccgccgagtggttcttcggcggcctgacgcggcgctacgggcaggtcctggagttctccctgggccaccgctggctgaccggcggcctggccttgctggtgtgcatcagcctgccgctgctgtattcgatgcccaagcgcgaactggcgccgaccgaggaccaagccgcggtgctcaccgcgatcaaggcgccgcagcacgccaacctcgactacgtcgaactgttcgcgcgcaagctcgaccaggtctacaccagcatcccggaaaccgtgagcacctggatcatcaacggcaccgacggcccggcggcgagcttcggcgggatcaacctggcggcctgggaaaaacgcgagcgcgacgcctcggcgatccagtccgagctgcaaggcaaggtcggcgacgtcgagggcagcagcatcttcgccttccagttggccgccctgcccggctccaccggcggcctgccggtgcagatggtgctgcgcagcccgcaggactatccggtgctctaccggaccatggaagagatcaagcagaaggcccggcagagcgggctgttcgtggtggtcgacagcgacctcgactacaacaacccggtggtccaggtccgcatcgaccgcgccaaggccaacagcctgggcatccgcatgcaggacatcggcgagtcgctggcggtgctggtgggcgagaactacgtcaaccgcttcggcatggaaggccgctcctacgacgtgatcccgcagagcctgcgcgaccagcgtttcactccgcaagcgctggcacgacagttcgtgcgcacccaggacggcaacctggtgccgctgtcgacggtggtccgggtggagcttcaggtcgaaccgaacaagctgatccagttcgaccagcagaacgccgcgaccctccaggcgatccccgcgcccggcgtctccatgggccaggcggtggccttcctcgacgacgtggcgcgcggcctgccggccggcttcagccacgactggcaatccgactcgcggcaatacacccaggaaggcaacaccctggtgttcgccttcctcgccgccctggtggtgatctacctggtgctcgccgcgcagtacgagagcctggccgacccgctgatcatcctgatcaccgtgccgctgtcgatctgcggcgcgctgctgccgctggcgctgggctacgcgacgatgaacatctatacgcagatcggcctggtcaccctgatcggcctgatcagcaagcacggcatcctcatggtcgagttcgccaacgaactgcaactccacgagcgcctcgaccgccgcgcggcgatcctgcgcgccgcacagatccgcctgcggccggtgctgatgaccaccgcggcaatggtcttcggcctggtgccgctgctcttcgccagcggcgccggcgccgccagccgcttcggcctgggcgtggtgatcgtctccgggatgctggtcggcaccctcttcaccctgttcgtgctgcccaccgtctataccctgctggcgcgcaaccacgcggaagtcgacaagagcccgcgcagccggcaactggccgaggccgatctgctggtgaacaaggcatga

SEQ ID NO: 2786 - protein, 1029 aa, Pseudomonas aeruginosa UCBPP-PA14
MTFTDLFVRRPVLALVVSTLILLLGLFSLGKLPIRQYPLLESSTITVTTEYPGASADLMQGFVTQPIAQAVSSVEGIDYLSSTSVQGRSVVTIRMLLNRDSTQAMTETMAKVNSVRYKLPERAYDSVIERSSGETTAVAYVGFSSKTLPIPALTDYLSRVVEPMFSSIDGVAKVQTFGGQRLAMRLWLDADRLAGRGLTASDVAEAIRRNNYQAAPGMVKGQYVLSNVRVNTDLTNVDDFREMVIRNDGNGLVRLRDVGTVELGAAATETSALMDGDPAVHLGLFPTPTGNPLVIVDGIRKLLPEIQKTLPPDVRVDLAYETSRFIQASIDEVVRTLVEALLIVVLVIYLCLGSLRSVLIPVATIPLSMLGAAALMLAFGFSVNLLTLLAMVLAIGLVVDDAIVVVENVHRHIEEGKSPVAAALIGAREVAGPVIAMTITLAAVYTPIGLMGGLTGALFREFALTLAGAVIVSGVVALTLSPVMSSLLLQAHQNEGRMGRAAEWFFGGLTRRYGQVLEFSLGHRWLTGGLALLVCISLPLLYSMPKRELAPTEDQAAVLTAIKAPQHANLDYVELFARKLDQVYTSIPETVSTWIINGTDGPAASFGGINLAAWEKRERDASAIQSELQGKVGDVEGSSIFAFQLAALPGSTGGLPVQMVLRSPQDYPVLYRTMEEIKQKARQSGLFVVVDSDLDYNNPVVQVRIDRAKANSLGIRMQDIGESLAVLVGENYVNRFGMEGRSYDVIPQSLRDQRFTPQALARQFVRTQDGNLVPLSTVVRVELQVEPNKLIQFDQQNAATLQAIPAPGVSMGQAVAFLDDVARGLPAGFSHDWQSDSRQYTQEGNTLVFAFLAALVVIYLVLAAQYESLADPLIILITVPLSICGALLPLALGYATMNIYTQIGLVTLIGLISKHGILMVEFANELQLHERLDRRAAILRAAQIRLRPVLMTTAAMVFGLVPLLFASGAGAASRFGLGVVIVSGMLVGTLFTLFVLPTVYTLLARNHAEVDKSPRSRQLAEADLLVNKA

SEQ ID NO: 2787 - DNA, 3189 bp, Dechloromonas aromatica RCB
  CDS (1)..(3189)
atgaacatttcaaaattcttcatcgaccggccaatcttcgccggcgtgctgtccatcctgctgctgctggccggcgtgctggcgctgttccagctgccgatctcggagtatccggaggtcgtgccgccctcggtggtggtgcgtgcccagtaccccggcgccaaccccaaggtgatcgccgaaacggtggcctcgccactcgaggagtcgatcaacggcgtcgagaacatgctctacatgcagtcgcaggccaacagcgacggcaacctgacggtgacggtcaatttcaagctcggcgtcgatcccgacaaggcgcagcaactggtccagaaccgcgtctcgcaggccctgccgcgcctgcccgaggacgtccagcgcctcggcgtgacgacgatcaagagctcgccgacgctgaccatggtggtgcacctgatctcgcccgacgaccgctacgacatgacctacctgcgcaactacgcggtgctcaacgtcaaggatcggctggcccgcatccagggcgtcggcgaagtcggcctgttcggttccggcaactacgccatgcgcgtctggctcgacccgcagaaagtggcccagcgcggcctgaccgccagtgaagtggtgcgcgccatccgtgagcagaacgtgcaggtcgcggccggcgtcattggcgcctcgccgagcgccgccgacgtgccgctgcagctcaacgtcaatgcccagggccgcctgcaaagcgaaggggaattcggcgaaatcgtgctcaagacctcaccggacggtgccgtcacgcgcctggccgacgtcgcccgcatcgaactggcggcatccgaatacggcctccgttccctgctcgacaacaagccggcagtggccattcccattttccaggcgccaggcgccaacgcgctcgatgtctcggccaaggtgcgcgaagcgatggccgagctgtccaaggacttcccggcttcggtcgagtaccgcatcgtctatgacccgacgcagttcgtgcgggccagcatcaaggccgtcgtccataccctgctcgaagccatcgccctggtcgtgctggtcgtcatcgtcttcctgcagacctggcgcgcctcgatcatcccgctgctcgccgtgccggtttccatcgtcggtaccttctcgttgctgctcggcttcggctattcgatcaacgccctgtcgctgttcggcatggtgctggccatcggcatcgtggtcgatgacgccatcgtcgtcgtcgaaaacgtcgagcgcaacatcgaggccgggctgacgccgcgcgaagccacctaccgggcgatgcgcgaagtcagcgggccgatcatcgccatcgccctgacgctggtcgccgtcttcgtgccgctcgccttcatgaccggcctgaccggccagttctacaagcagttcgcgatgaccatcgccatctcgacggtgatctcggccttcaattcgctaaccctgtcgccggcgctggccgccatgctgctcaagggccacggcgaagcgccggactggctgacccggcagatgaaccgctacttcggccgtttcttcgccgccttcaaccgcttcttcggccgcgcttcagaaaactacggccgcggcgtcaccggcgtgatcggccgcaaggcttcggcgatgggcgtctatgccgtgctgctcgggctgaccgtcggcatttcctacctggtgcccggcggcttcgtgccggcccaggacaagcaatacctgatcggcttcacgcagctgccgaacggcgcctcgctcgaccgcaccgaggcggtgatccgcaagatgggcgaaatcgccctggcccagcccggcgtcgaaagcgccgtcgccttccccggcctgtcgatcaacggcttcaccaacagctcgagcgccggcatcgtcttcgcgacgctcaagcccttcgacgaacggcgcagcccggaactctcggccggcgccatcgccggcgcgctgaaccagaaatacgcggccatccaggaagccttcatcgccgtcttcccgccgccgccggtgatgggtctgggcaccgtgggcggtttcaagatgcagatcgaggatagaggcgcggtcggctatgccgagctcaacgccgcggcccaggccttcatggccgctgccgccaagaccccggagctggggccgatgttttccagctatcagatcaatgtgccccagctcgacgttgatctcgaccgcgtcaaggctaagcagcagggggtttcggtgaccgacgtcttcgacaccatgcagatctacctcggctcgctctacgtgaacgacttcaaccgcttcggccgtacctaccaggtccgtgcccaggccgatgcgccgttccgtgcccacccggaagacatcctgcaactgaagacccgcaacagccagggcgagatggtgccgctttcctcgctggtcaaggtgcgctccaccttcgggccggaaatggttgtccgctacaacggctacaccgcggccgacatcaacggcggtccggcccccggctactcctcggcgcaggccgaggccgcggccgaacgcatcgcggcggaaaccctgccgcgcggcgtgcgcttcgaatggaccgacctgacctaccagaagattctggctggcaacgccggcatctgggtcttcccgatcagcctgctgctcgtcttcctggtgctggccgcgcagtacgaaagcctgaccctgccgctggccgtgatcatgatcgtgccgatgagcatcctggcggcgctgaccggcgtctggctgaccggtggcgacaacaacatcttcacccagatcgggctgatggtgctggtcgggctggcctgcaagaacgctatcctgatcgtcgagttcgcccgcgaactggaactgcagggcgcgacgccgctgcaggccgccatcgacgccagccggctgcggctgcgcccgatcctgatgacctcgatcgccttcatcatgggcgtcatcccgctcgtcacctcgaccggcgccggttccgaaatgcgccacgccatgggcatcgccgtcttcttcggcatgctcggcgtgaccactttcggtctgttcctgaccccggttttctacgtgctgctacggacgctggacaagggccacaagttgcacaccgccgccccgcacgaggcgccgattgccccagcccatagcgcggcctga

SEQ ID NO: 2788 - protein, 1062 aa, Dechloromonas aromatica RCB
MNISKFFIDRPIFAGVLSILLLLAGVLALFQLPISEYPEVVPPSVVVRAQYPGANPKVIAETVASPLEESINGVENMLYMQSQANSDGNLTVTVNFKLGVDPDKAQQLVQNRVSQALPRLPEDVQRLGVTTIKSSPTLTMVVHLISPDDRYDMTYLRNYAVLNVKDRLARIQGVGEVGLFGSGNYAMRVWLDPQKVAQRGLTASEVVRAIREQNVQVAAGVIGASPSAADVPLQLNVNAQGRLQSEGEFGEIVLKTSPDGAVTRLADVARIELAASEYGLRSLLDNKPAVAIPIFQAPGANALDVSAKVREAMAELSKDFPASVEYRIVYDPTQFVRASIKAVVHTLLEAIALVVLVVIVFLQTWRASIIPLLAVPVSIVGTFSLLLGFGYSINALSLFGMVLAIGIVVDDAIVVVENVERNIEAGLTPREATYRAMREVSGPIIAIALTLVAVFVPLAFMTGLTGQFYKQFAMTIAISTVISAFNSLTLSPALAAMLLKGHGEAPDWLTRQMNRYFGRFFAAFNRFFGRASENYGRGVTGVIGRKASAMGVYAVLLGLTVGISYLVPGGFVPAQDKQYLIGFTQLPNGASLDRTEAVIRKMGEIALAQPGVESAVAFPGLSINGFTNSSSAGIVFATLKPFDERRSPELSAGAIAGALNQKYAAIQEAFIAVFPPPPVMGLGTVGGFKMQIEDRGAVGYAELNAAAQAFMAAAAKTPELGPMFSSYQINVPQLDVDLDRVKAKQQGVSVTDVFDTMQIYLGSLYVNDFNRFGRTYQVRAQADAPFRAHPEDILQLKTRNSQGEMVPLSSLVKVRSTFGPEMVVRYNGYTAADINGGPAPGYSSAQAEAAAERIAAETLPRGVRFEWTDLTYQKILAGNAGIWVFPISLLLVFLVLAAQYESLTLPLAVIMIVPMSILAALTGVWLTGGDNNIFTQIGLMVLVGLACKNAILIVEFARELELQGATPLQAAIDASRLRLRPILMTSIAFIMGVIPLVTSTGAGSEMRHAMGIAVFFGMLGVTTFGLFLTPVFYVLLRTLDKGHKLHTAAPHEAPIAPAHSAA

SEQ ID NO: 2789 - DNA, 3174 bp, Anabaena variabilis ATCC 29413
  CDS (1)..(3174)
atgtttgttgacttctttatcaggcgacctgtatttacaagtgtctgcgccattatcattttgctggtaggcgcaatcagtatacccaccctacctactgatcgctatccagaaattagccctacacaaattgttgttaatgctaactacactggggctagcgcggaagtcgtggaaaatacggtgacaagtatcttggagcgccaaatcaacggcgttcaaggtatgaagtacatgacatctagcagtagtaacgatggtactagcaccattaccgtcacctttgacccatcacgggacaaagatattgccgccgttgatgtccaaaaccgcgtatctattgcccagccccagttaccagaggctgtacaacgtactggagtcacagtcagcaaacagtctaacaatatcctgttagcgatggggctgtatagcgaacaacaggaatatgacaccgtatttttaagtaactacgccgaccaatatatagtagatgccctgaaaaggcttgatggtgtgggcgaggcgcggatttttggtgaacggcgctatgctatgcgattgtggcttgacccgaatcgtctaaccagtcgcaagctgactgctcaagatgtaattgatgccatcaacgaacaaaacatacaggtaggggtggggcaaattggtcagcagccgtccctgccagaccagatgtatcaaatagacttacaggctcgcggcagactttccgaagcaacggaatttgccgacatggtaattaagactggaaccgatggcacacttatcaagctcaaagatgtgggtcgggcagaattaggggcagaaaattatagttcgtttctgcgattccgaggtaatgagggtgtgggtatagggatatttcctacccctggtagtaatgctttggaagtatccaaggcagtaaaagccgaaatggctcggttagcacaaagctttcccccagggttgaaatatcaagtggcgtttgatacgaccctgtttgtggaagaatccctcgcggaagtggtcaagacactgatagaagccctgattctggttgtcttggtgatttttctcttcttgcaagactggcgtacaaccctgattccggtaattaccattcccttaactttaattgggacttttgcctttatcaaagtctttggattttccattaacaccttaactttgtttggtttgacattagctacggggttagtggtagacgatgcgattatcgtggtggaaaacatctcccggttaattgaggaagagggaatgtcgccccgtcaggctgcatccgagtccatgcgggaactgtttggggctgtaattgccacttccttagtgttgatggcggtatttgttcctgttgcctttttcccaggtactacaggacagatttataaacagtttgccctgaccatcgccttttcgatggctatttccacctttttggctctgacactcacaccctccctttcagccttattattacgtcggggacagcgcccccgtggttggttaggcaaaatttttcaccagattaataggtttttggattggatgcgccggggatatgagcgatcgctcaatattcttgtgaaggttagggcgatcgttgtcttattattcctagcttccatcgccttgacaggctgggtttatctcagcgtacccacagcatttatccctgacgaagatcaaggctatttcatcaccatcatccaagggccagaaggagtttccctcaactacaccagcaatgtcatggctcaggtggaaaaagaaatcctcaaattaccggaagttacaggaacctttgccattggtggctttagttttagtggtaacagtgccaacagtggggtaatttttactaccctccagccttgggatgagcgccaacaaccaggacaatcagcaccagaaattattggcaagttggcaggagtcttcgccaacatcaccgaagccagaattttccccgttagtcctccaccaatcaatggtttaggcaacttcggcggttttcaatttgaactgcaagatagagcaggtaacagtggcttagataatctgctgcaagtcatgggtcagatcatgatgaaggggaatcagactcctggtttgcaaggtgtatttagtacttttagtgctaacacaccccagatgttaatagacatcgaccgcaacaaagtcaaagccttacaagttaatgtagatgacgtgttcaacaccctgcaatcttacttgggttccaggtacgtcaacgattttaatttccaacaaagaacttaccgggtttacgtgcaagcagatgcgccatttcgctctaaccctgaggatatcggtaagttatatgtccgctctgccaacgatcaaatgatttccctgagtaacctagtgaaaattactccggcgactggagcgcaaacaatcaaccactacaacctattccgctcaattaccatcaacggtgcggctgcgcctggttatagttctggtcaagcaactacagcgatggagaaattagcaaaagaagttttacccgccagtatgggttacgaatggtcggggataactgcggaagaacaagaatcaggaggtcaagcacctgtaatttttggattagggttagtctttgtttttctcgtgttggcagctcaatatgagaactacgttgacccattaattattatgctgtcagttcccctagctattttaggagccttatcagctcagtggctgcggggtctgagtaatgatgtcttttgccaagtaggtttagtcatgttgattggcttggctagtaaaaacgccattttgattgtggaatttgccaatcaattgcgcgaacggggcttgcccattatcaaagccacagtgcaagcatcacaagaaaggttgcgacctattctcatgacttccctatcttttattcttggtgtctggccattgattaatcctataggagcaggtgcagcgagtagaaaatctctcggtacagccgtggcagggggaatgattgtctcaactgtgttgagtctatttgttgtccccattctctacatcgtaattagtaaaatccgcgatcgctttagaccaaaacccccacacataccactagattctacccgtgatgacaaaattccctcgactagtcatagatga

SEQ ID NO: 2790 - protein, 1057 aa, Anabaena variabilis ATCC 29413
MFVDFFIRRPVFTSVCAIIILLVGAISIPTLPTDRYPEISPTQIVVNANYTGASAEVVENTVTSILERQINGVQGMKYMTSSSSNDGTSTITVTFDPSRDKDIAAVDVQNRVSIAQPQLPEAVQRTGVTVSKQSNNILLAMGLYSEQQEYDTVFLSNYADQYIVDALKRLDGVGEARIFGERRYAMRLWLDPNRLTSRKLTAQDVIDAINEQNIQVGVGQIGQQPSLPDQMYQIDLQARGRLSEATEFADMVIKTGTDGTLIKLKDVGRAELGAENYSSFLRFRGNEGVGIGIFPTPGSNALEVSKAVKAEMARLAQSFPPGLKYQVAFDTTLFVEESLAEVVKTLIEALILVVLVIFLFLQDWRTTLIPVITIPLTLIGTFAFIKVFGFSINTLTLFGLTLATGLVVDDAIIVVENISRLIEEEGMSPRQAASESMRELFGAVIATSLVLMAVFVPVAFFPGTTGQIYKQFALTIAFSMAISTFLALTLTPSLSALLLRRGQRPRGWLGKIFHQINRFLDWMRRGYERSLNILVKVRAIVVLLFLASIALTGWVYLSVPTAFIPDEDQGYFITIIQGPEGVSLNYTSNVMAQVEKEILKLPEVTGTFAIGGFSFSGNSANSGVIFTTLQPWDERQQPGQSAPEIIGKLAGVFANITEARIFPVSPPPINGLGNFGGFQFELQDRAGNSGLDNLLQVMGQIMMKGNQTPGLQGVFSTFSANTPQMLIDIDRNKVKALQVNVDDVFNTLQSYLGSRYVNDFNFQQRTYRVYVQADAPFRSNPEDIGKLYVRSANDQMISLSNLVKITPATGAQTINHYNLFRSITINGAAAPGYSSGQATTAMEKLAKEVLPASMGYEWSGITAEEQESGGQAPVIFGLGLVFVFLVLAAQYENYVDPLIIMLSVPLAILGALSAQWLRGLSNDVFCQVGLVMLIGLASKNAILIVEFANQLRERGLPIIKATVQASQERLRPILMTSLSFILGVWPLINPIGAGAASRKSLGTAVAGGMIVSTVLSLFVVPILYIVISKIRDRFRPKPPHIPLDSTRDDKIPSTSHR

SEQ ID NO: 2791 - DNA, 3081 bp, Methylobacillus flagellatus KT
  CDS (1)..(3081)
atgaccttgccggaaatatcgatcaagcgccatgtattggcgtggatggtctccggcttgctggtactgctcggcatcattagctaccagcgcatcggggtcgatcggctgccctacatcgaattcccggtcatttcaatcaccaccaccttgaccggcgccaaccccgacgtcatcgatgccagcatcaccagcatcatcgaatcctcggtcaacaccacaccgggcatcgagcatatccagtcatcctcttcaccaggcgtttctgtcatcaccattaccttcagcctcgagaagaacatcgacgtggcatacaacgaggtgcaggccaaggttagccaggtgctgcgccgcctgccagatgatgccgatccgccgcaggtacagaaagtggaaaccaacgcccagcccattatgtggctagcattgcgcggcgaccgcaccatccagcaaatcaacctgtacgggttcaacgtcatcaagaaaaagctagagacgattaatggtgtcggcgaggtacgcctgggaggacgacgcgaccgcaccatccgcgtcaatgtgctgcctgaacgtatggccgcttacaatattacggctactgacctgatcgatgcgttcaggcgcgaacatgtgcaactgcctggcggtttcctggtaggcgagaatgcggaatatctcatgaagctggacatggaattccacaacctgcgcgacatggcggaaatgatcgtggcataccgcgatggtgctgccatcaagctcagacagattgccgaattggaggatggagttgccgactaccggcaactggcacgttataaaggcaaccctgcagtaggcctggggattgtcaaggtatccaatgccaataccgtggcgatcattgatgaagtattgcgcaagctggatacggaaatccgccccagcttgccgcccggcatgacgctggatatctcgaccaacgatgcgctgttcattgaggaaatcgtcggcgcattgcaggagcatctcgtcgaaggcaccctgcttgccgccttgatcgtttggctgttcctgcgttccgtccgctctaccctgatcatcgccactgcgatcccggtgtcgctgttgggctcgatcgcggtcatgtatttctccggctttactttcaacaccatgacgctgctagccttgctattactgatcggcgtggttgtggatgacgccattgtggtactcgagaatatctaccgccacctgaggctacgtgcgcaacaggagcccgctgccgactctggcaccattgcccgggcggctgccatcacgggcagccgggaggtggcttttgccgtgattgccgccacattttcgctggtctgtattttcgctcctgtgattttcatggaaggcatcatcggcaagttcttcaagtcgtttgcggtagtcgtcaccttcggcgtactggtctcgctgctggtctcactcacactgacacccatgctatgctcgcgctatctcaagacgcatgagccagaaggccgcttctatggctggatggaccgcctctttcaccgcatggaccatctctatgccggcatgttggcatggacgcttcgacaccgctggaaagtgatgctgctcaccgtgctggtagtggtcagcagcgggttcttctttggcaaggtgcagaaggaattcatcccagactcagatgaaggccgcttcctgatttccttccgtaccccgctgggctccagcattgaatacaccaacagtcgcctggagaaaatggaagcagtattgcaacgctatgatgcgcagatcgccagctacttcagtaccataggcgtgggcgcgcagggccaggtgaataagggcacggtcagcattcgcctcaaggatcggcgggagcgcgacatgagccagcaggcattgatacgcgccatccgcgctgaactggaccagattcccggtgtacgggcctttcctgtgcctgttgccattgttggaggccagcgctcggaaaaactccagttcaatatcaccggcgccaatctcgagcaggtcagccagctcggcaaaaccatgcaacgcaaactaggggatattccgggaatcggcaaggtagacctggacctggatctcgacctgccccagctcacattgaaaatagacaggatacgcgccgccagcctgggcatttccgctgtcgacatcgcaacagcgctcaatttgtacaccggcggcattgatattgccgatttcaacgacgaacccggagacggccagcgttacgagatccgcttgaaggccaaggaaggcagcctgcaaaccccggacgacctcaagaagatttatctgcgcagcggcacgggggagctcgtgcgcctggatagcgtcgcaagcttcaagcagacattgggcgcggccgtgatcggacgcttcgatctgcaatatgctgccagcctctactctaaccccatcatgcccttgggcgacgctgtcgagcacgtacgccggttggccgcagaaacactaccgccgggctaccaattcaacctggtgggtcaggccgaagagctgcagaaaaccgtaagcagcatgctattcgcgtttggcctggcgctggtattgctttatatggtgctcgccagccagttcaactcgttcctgcagcccttgatcatcatgctggcgcagcccctggcgattatcggcggggtgtttgcgttatggatcaccaacaactcgctcaatatcttctcgatgatcgggctggtattgctgatcggcctggtagccaagaactccattctgctcatcgacctcaccaaccagctgcatgaggaaggtaaatcagtggacgacgcattgcgcgaagcctgccccatcaggttgcgccctgtgctcatgacctcgctgaccatcatcctggccctgctgcctgcagcctttggattaggggcaggggcagagaccaacggtccactttccatcgccgtcatcggcggcatgatctcttccacactgttgacattggtagtggtgccagcggcctattccttgatcatgaacaaaatgtcccatcaccataatctataa

SEQ ID NO: 2792 - protein, 1026 aa, Methylobacillus flagellatus KT
MTLPEISIKRHVLAWMVSGLLVLLGIISYQRIGVDRLPYIEFPVISITTTLTGANPDVIDASITSIIESSVNTTPGIEHIQSSSSPGVSVITITFSLEKNIDVAYNEVQAKVSQVLRRLPDDADPPQVQKVETNAQPIMWLALRGDRTIQQINLYGFNVIKKKLETINGVGEVRLGGRRDRTIRVNVLPERMAAYNITATDLIDAFRREHVQLPGGFLVGENAEYLMKLDMEFHNLRDMAEMIVAYRDGAAIKLRQIAELEDGVADYRQLARYKGNPAVGLGIVKVSNANTVAIIDEVLRKLDTEIRPSLPPGMTLDISTNDALFIEEIVGALQEHLVEGTLLAALIVWLFLRSVRSTLIIATAIPVSLLGSIAVMYFSGFTFNTMTLLALLLLIGVVVDDAIVVLENIYRHLRLRAQQEPAADSGTIARAAAITGSREVAFAVIAATFSLVCIFAPVIFMEGIIGKFFKSFAVVVTFGVLVSLLVSLTLTPMLCSRYLKTHEPEGRFYGWMDRLFHRMDHLYAGMLAWTLRHRWKVMLLTVLVVVSSGFFFGKVQKEFIPDSDEGRFLISFRTPLGSSIEYTNSRLEKMEAVLQRYDAQIASYFSTIGVGAQGQVNKGTVSIRLKDRRERDMSQQALIRAIRAELDQIPGVRAFPVPVAIVGGQRSEKLQFNITGANLEQVSQLGKTMQRKLGDIPGIGKVDLDLDLDLPQLTLKIDRIRAASLGISAVDIATALNLYTGGIDIADFNDEPGDGQRYEIRLKAKEGSLQTPDDLKKIYLRSGTGELVRLDSVASFKQTLGAAVIGRFDLQYAASLYSNPIMPLGDAVEHVRRLAAETLPPGYQFNLVGQAEELQKTVSSMLFAFGLALVLLYMVLASQFNSFLQPLIIMLAQPLAIIGGVFALWITNNSLNIFSMIGLVLLIGLVAKNSILLIDLTNQLHEEGKSVDDALREACPIRLRPVLMTSLTIILALLPAAFGLGAGAETNGPLSIAVIGGMISSTLLTLVVVPAAYSLIMNKMSHHHNL

SEQ ID NO: 2793 - DNA, 3189 bp, Methylobacillus flagellatus KT
  CDS (1)..(3189)
atgaacatctcaaaattcttcatcgaccgcccgatctttgcgggcgtactgtcgatgctcatcttgctgggcggagcgctggccatgttccagctgcccatctcggaatatcccgaagtcgtgccgccctccgtggtggtacgcgcacaataccccggcgccaaccccaaggtgatcgccgaggcggtggcttcgccgctggaggaatccatcaacggcgtggaagacatgatctacatgcagtcgcaggccaacagcgacggcaacctcaccatcaccgtcaacttcaagcttggcgtggacccggacaaggcacagcaactggtgcagaaccgtgtcaaccaagcattgcccaggctgccgcccgacgtgcagcggctgggcctcaccacgctgaaaagctcgcccaccctcaccatggtggtgcacctggcctcgccggacaaccgctatgacatgacttacctgcgcaactatgccgtgatcaacgtcaaggataggctggcgcgcatccagggcgtgggcgaggtcggcctgttcggctccggcaactacgccatgcgcgtctggctcgatccgcagaaagtcgcccagcgcggcatgactgcatccgacgtggtgcaggcaatccgcgagcagaacgtgcaggtggcggccggcgtgatcggcgcgtcgcccaacaatgtgccgttgcagctgtcagtcaatgcccagggtcgcctcaagaccgaggaggaatttgctgcgattatcctcaagacttccgccgacggcgccatcacgcgcctgtccgacgtggcgcgcatcgagctcgccgcctccgaatacggcctgcgctccttgctggacaacaagcctgcggtcgccattccgatcttccaggcacccggcgccaacgcgctggcgatttctgatgccgtgcgcgccaccatgaaggagttggccgccgatttccccgaatcggtggaataccatattgtctacgacccgacgcagttcgtgcgctccagcatccgcgccgtggtgaccacgctgctggaagcgatcgccctggtggtgctggtggtgatcctgttcctgcaaacctggcgcgcatccatcatcccattgctggcggtcccggtctccatcatcggcactttctcgctgatgctggcgttcggctactctatcaacgcgctgtcgctgttcggcatggtgctggcgatcggcatcgtggtggatgacgccatcgtcgtcgtggaaaacgtcgagcgcaacatcgaatcgggcctgagtccgcgcgatgccacctaccaggccatgcgcgaggtgagcgggcccatcatcgccatcgcgctgaccctgattgcggtgttcgtcccattggcgttcatgaccggcctcaccgggcagttctacaagcagttcgccatgaccatcgccatttccaccgtgatctcggcgttcaactccctgaccttgtcccccgccctgtccgccatgctgctcaagggccacggcgacaagaaggactggctcacgcgcttcatggaccgttggctgggcggcttctttgccaggttcaaccgcatgttcagccgtgcctccgacagctacggcaagggcatcaagggcatcatcaaccataagggcgcagccatgggcgtctatgccgtgctgctcggcctgaccgtgggcgtgtcgctcgccgtgcccggcggcttcgtaccggcgcaggacaagcaatacctggtgggcttcgcccagctgcccagtggcgcctcgctggaacgcacggaggaagtcatccgccgcatgagcgagatcgcattgcagcagcccggcgtggaaaatgcggtcgccttccctggcctctccatcaacggcttcaccaacagttccagcgccggtatcgtcttcaccccgctcaagccgttcagcgaacgtaaagacaaggcactgtcggctgctgcgattgcacaatcgctgaacgagaaattcggccagatacaggacgcctatatcgccgtgttcccgccgcccccggtcatgggcctgggcaccatcggcggcttcaagctgcagatcgaggaccggggggcgctgggctatgccgagctggacaaggcggtaaacgccttcgttgccggggcttccaaggcgcaggaactcggcccgatgttcaccaattaccagatcaacgtgccgcagctgaacgtggacctggaccgcgccaaggccaagcaattgggcgtaccggtgaccgaagtgttcgacaccatgcagatctacctcggctcactttacatcaacgacttcaaccgcttcggtcgcgtgttccaggtgcgcgcgcaagccgatgcaccctaccgcgccaaggccgaggacatcctgcagctgaaaacgcgcaatatggcgggcgacatggtgccactgtcctcgctggtcagggtgacacccacctacggcccggaaatggtggtgcgctacaacggttataccgctgccgacatcaacggcggggcagcgccaggttattccaccgggcaggcccaggcggcagtggaaaggatagccgcgcagaccctgccgcccggcatcaagttcgagtggaccgacctgacctaccagcagatcctcgcgggcaatgccggtatctgggtgttcccgatcagcgttctgctcgtgttcctggtactggccgcactgtacgagagcctgaccttgccgctagcggtgatcctcatcgtgccgatgagcatcctggcggcgctcacgggcgtgtggctgaccaagggggacaacaacatcttcacccagatcgggctgatggtgctggtcgggctgtctgcgaagaacgccatcctcatcgtcgagttcgcacgcgaactggagctgcaaggcagcagcatcgtcaaggcggccatcgaggccagccgcttgcgtttacgccccatcctcatgacctccatcgccttcatcatgggcgtggtaccgctggtgacttccagcggcgcgggctcggaaatgcgctatgccatgggtatcgccgtgttcttcggcatgctgggcgtgaccctgttcggcctgttcctcacgcccgtgttctacgtgctgttgcgcaagctgagcggaggccgccggctgcactcggccaccaagcacgaaccccatgttgtcggcccagccgccagccatttgatatag

SEQ ID NO: 2794 - protein, 1062 aa, Methylobacillus flagellatus KT
MNISKFFIDRPIFAGVLSMLILLGGALAMFQLPISEYPEVVPPSVVVRAQYPGANPKVIAEAVASPLEESINGVEDMIYMQSQANSDGNLTITVNFKLGVDPDKAQQLVQNRVNQALPRLPPDVQRLGLTTLKSSPTLTMVVHLASPDNRYDMTYLRNYAVINVKDRLARIQGVGEVGLFGSGNYAMRVWLDPQKVAQRGMTASDVVQAIREQNVQVAAGVIGASPNNVPLQLSVNAQGRLKTEEEFAAIILKTSADGAITRLSDVARIELAASEYGLRSLLDNKPAVAIPIFQAPGANALAISDAVRATMKELAADFPESVEYHIVYDPTQFVRSSIRAVVTTLLEAIALVVLVVILFLQTWRASIIPLLAVPVSIIGTFSLMLAFGYSINALSLFGMVLAIGIVVDDAIVVVENVERNIESGLSPRDATYQAMREVSGPIIAIALTLIAVFVPLAFMTGLTGQFYKQFAMTIAISTVISAFNSLTLSPALSAMLLKGHGDKKDWLTRFMDRWLGGFFARFNRMFSRASDSYGKGIKGIINHKGAAMGVYAVLLGLTVGVSLAVPGGFVPAQDKQYLVGFAQLPSGASLERTEEVIRRMSEIALQQPGVENAVAFPGLSINGFTNSSSAGIVFTPLKPFSERKDKALSAAAIAQSLNEKFGQIQDAYIAVFPPPPVMGLGTIGGFKLQIEDRGALGYAELDKAVNAFVAGASKAQELGPMFTNYQINVPQLNVDLDRAKAKQLGVPVTEVFDTMQIYLGSLYINDFNRFGRVFQVRAQADAPYRAKAEDILQLKTRNMAGDMVPLSSLVRVTPTYGPEMVVRYNGYTAADINGGAAPGYSTGQAQAAVERIAAQTLPPGIKFEWTDLTYQQILAGNAGIWVFPISVLLVFLVLAALYESLTLPLAVILIVPMSILAALTGVWLTKGDNNIFTQIGLMVLVGLSAKNAILIVEFARELELQGSSIVKAAIEASRLRLRPILMTSIAFIMGVVPLVTSSGAGSEMRYAMGIAVFFGMLGVTLFGLFLTPVFYVLLRKLSGGRRLHSATKHEPHVVGPAASHLI

SEQ ID NO: 2795 - DNA, 3087 bp, Burkholderia cepacia R1808
  CDS (1)..(3087)
atgagccagaccacgcaaggcgcgcgtttcaccgacatcttcgtgcggcggccggtgctgtcgatcgtctgcagcctgctgattttgctggtgggcctgcgctcgctcggtgcgctgccggtgcgccagtatccgatgctggagagcgcgacgatcagcgtcgagacggcctatcccggtgcgtcgcaggcgttgatgcagggcttcgtgacgacgccgatcgcccagtcgatcgcaaccgcggacggcatcgagtatttgacctccacgtccacgcagggcaagagcgtcgtgaaggcgcggctgcgcctgaatgcgaacgccgatcgcgcgatgaccgaaatcatggcgaaggtgcaggaggtcaagtacaagatgcccgagggtgcgtacgactcggtgatcaccaagctgaccgacgcgcccacggccgtgatgtatctgggcttctcgagcgatacgttgtcgatccccgagatcaccgactacgtggtgcgcgtggcgcagccgctggtcaccacggtgccgggcgtcgcctccgccgaaatcgtcggcggccagaatctcgcgatgcgcgtctggctcgacgcgtcgcggctcgccgcgcacgggctgtcggccggcgatgtcgcggccgcgctgaaggcgaacaacgtgcaggctgcgccgggccagttgaagggcgcgctgaccgtcgccgacatttccgcgaacaccgacctgaccgacgtcggcgcgttcggcaacctcgtcgtgaaatcggaggcgaacggcagtttcgtgcgcttgcgcgacgtcgcgacgatcgagctgggcggccagcaatacaacgcgagcgcgctgatgaacgggcgccgcgcggtcaacatcgcgatcaacgcgacgccgtcgggcaacccgctcgacatcgtgcgcggcgtacaggcgttgctgccgacgatggagcgcagcaagccggccagcatcaggatcggcgacgtgttcgacgtcgcgcgcttcgtcaacgcgtcgatcgacgaggtgcgcgagacgatcatcgaggcgatcgcgatcgtcgtggtcgtgatcttcctgttcctcggctcgttccgtgcggtcgtgatcccggtcgtgacgattccgctcgcgctcgtcggctcggccgcgctgatgctggccgcgggcttctcgctgaacctgctcacgttgctcgcgatggtgctggcgatcgggctcgtcgtggacgacgcgatcgtcgtcgtcgagaacattcaccggcacatcgaatccggcgagccgcccgcgcgcgcggcgctgctcggcgcgcgcgagatcgcgtcgccggtgatcgtgatgaccatcacgctcgttgcggtgtatgcgccgatcgggctgatgggcgggctgaccggctcgttgttccgcgagttcgctttcacgctcgcgggggcggtgtgcgtgtccgcggtgatcgcgttgacgctctcgccgatgctcagctcgctgctgctcgacagccggatgtcggagggccgtgtcgcgcgggcgatcgaacacacgctgtcgcgcgtcacgcacgcgtaccggcgcctgctgcatgcgagcctcggcgcgcggccggcggtgctggttttcggagcgggcgtcctgttgggcatcggcctgctgttcagcggcgtgaagcgcgaactggcgccgcaggaggaccagggctcgatcatgctgcaggtgaaggcgccgcagtacgcgaatctggactacctcgaacgctacgcgccgcagatcgagaaggtgttccgctcgctgccggaagcggataccagcttcgtgttgaacggtgtcggcggtgcgaatctcggcttcgccggcgtgaacctcgtcgactggtcgaagcgcacgcgcagtgcggccgacctgcaggcgcgggtgcaggcgggcgcgaacgcgatcgccggcgaccaggtgttcacgttcctgctgccgtcgctgcccgcgtcgagcggcggcctgccgatccagatggtgctgcgcgcgccggccgatttcaacggcatcttcgcgacgatggacaaattgaaggctgccgcgtcgaagagcgggctgttcgcggtggtcgacagcgatctgacgttcgacagccgtgcggtcggcgtaacgatcgaccgcaaccaggcgaatgcgctcggcgtgacgatgaaggacatcgccgatacgctcgcggtgctcgtgggcgagaactacgtgaaccgcttcgatcacgacggccgctcgtacgacgtgattccgcaggtcgcgcgcgccgagcgcctgtcgtcggacatgctgaaccgctactacgtgaagacgcgcggcggcaagatggtggcgctgtcgaccgtcgtgcgcgtgtcgaacggcagccaggccaacgcgctcacgcagttcaatcagatgaactcggcgaccctgtcggcggtgggcgcgccgggcgtgacgatggggcaagcggtcgagtttctgcagaaacagccgctgccggccggctacgagatcgactggctcggcgaatcgcggcagtacgtgcaggaaggcaaccggctgacggtcacgttcgtgttcgcgctcgtcgtgatctttctggtgctcgccgcgcagttcgagagcctgcgcgatccactggtgatcctcgtgtcggtgccgctgtcggtgtgcggcgcgttggtgcctctgtacctcggcttcgcgacgctgaacatctatacgcagatcgggctcgtgacgctgatcggcctgatttccaagcacgggatcctgatggtgagcttcgcgaacgaactgcaacgcacgcagcacctcgaccgccgcgcggcgatcgagcacgcggccgcggtacggctgcggccgatcctcatgacgacggccgcgatggtcgccgggctcgtgccgctgattttcgcacgcggcgcgggcgcggccagccgcttcgcgatcgggatcacggtctcgaccggcatgctggtcggtacgctgttcacgctgttcgtgctgccgaccgtgtacacgctgatcgcgaagcgccatcgcgaggccgcgaacagcgagcgcgcccgcgtgctggagaccgtatga

SEQ ID NO: 2796 - protein, 1028 aa, Burkholderia cepacia R1808
MSQTTQGARFTDIFVRRPVLSIVCSLLILLVGLRSLGALPVRQYPMLESATISVETAYPGASQALMQGFVTTPIAQSIATADGIEYLTSTSTQGKSVVKARLRLNANADRAMTEIMAKVQEVKYKMPEGAYDSVITKLTDAPTAVMYLGFSSDTLSIPEITDYVVRVAQPLVTTVPGVASAEIVGGQNLAMRVWLDASRLAAHGLSAGDVAAALKANNVQAAPGQLKGALTVADISANTDLTDVGAFGNLVVKSEANGSFVRLRDVATIELGGQQYNASALMNGRRAVNIAINATPSGNPLDIVRGVQALLPTMERSKPASIRIGDVFDVARFVNASIDEVRETIIEAIAIVVVVIFLFLGSFRAVVIPVVTIPLALVGSAALMLAAGFSLNLLTLLAMVLAIGLVVDDAIVVVENIHRHIESGEPPARAALLGAREIASPVIVMTITLVAVYAPIGLMGGLTGSLFREFAFTLAGAVCVSAVIALTLSPMLSSLLLDSRMSEGRVARAIEHTLSRVTHAYRRLLHASLGARPAVLVFGAGVLLGIGLLFSGVKRELAPQEDQGSIMLQVKAPQYANLDYLERYAPQIEKVFRSLPEADTSFVLNGVGGANLGFAGVNLVDWSKRTRSAADLQARVQAGANAIAGDQVFTFLLPSLPASSGGLPIQMVLRAPADFNGIFATMDKLKAAASKSGLFAVVDSDLTFDSRAVGVTIDRNQANALGVTMKDIADTLAVLVGENYVNRFDHDGRSYDVIPQVARAERLSSDMLNRYYVKTRGGKMVALSTVVRVSNGSQANALTQFNQMNSATLSAVGAPGVTMGQAVEFLQKQPLPAGYEIDWLGESRQYVQEGNRLTVTFVFALVVIFLVLAAQFESLRDPLVILVSVPLSVCGALVPLYLGFATLNIYTQIGLVTLIGLISKHGILMVSFANELQRTQHLDRRAAIEHAAAVRLRPILMTTAAMVAGLVPLIFARGAGAASRFAIGITVSTGMLVGTLFTLFVLPTVYTLIAKRHREAANSERARVLETV

SEQ ID NO: 2797 - DNA, 3243 bp, Rubrivivax gelatinosus PM1
  CDS (1)..(3243)
atgaacctgtccaagtttttcatcgatcggccgatcttcgccggcgtgctgtcgctgctgatgctgatcgccggcctgatcgcgctgcgcggcctgccgatctccgagtaccccgaggtcgtgccgccctcggtggtggtgcgtgcgcagtacccgggcgccaaccccaaggtgatcgccgagacggtcgccacgccgctcgaggaggccatcaacggcgtggaaggcatgctctacatgggcagccaggccacgactgacggcctgatgacgctgaccgtcaccttccgcctcggcaccgaccccgacaaggcccagcagctggtgcagaaccgcgtctcgcaggccgagccgcggctgccggaggaggtgcgccgcctcggcatcaccaccgtgaagagttcgccggacctgacgatggtggtgcacctgctgtcgccgaacgaccgctacgacatgacctacctgcgcaactacgcggtgctcaacgtcaaggaccggctggcgcgcatcgacggcgtgggccaggtgcagctgttcggctcgggcgactacgcgatgcgcgtctggctcgacccgcagaaggtggccgagcgcggcctgtcggccagcgacgtggtggcggcgatccgccagcagaacgtgcaggccgccgccggcgtggtgggcgcctcgccgggcctgccgggcgtggacctgcagctgtcgatcaatgcgcagggacggctgcagaacgaggaggagttcggcgacatcatcgtcaagaccggcgccgacggcgcggtgacgcggctgcgcgacctgggccgcatcgagctcggcgcggccgagtacgcgctgcgctcgctgctcgacaacaagtcggccgtcgcggtgccgatcttccaggcgccgggctccaacgccatcgagatctcgaaccaggtgcgcgccaccatggccgagctcaagaagtacatgcccgagggcgtggactacgagatcgtctacgaccccacgcagttcgtgcgcgcctccatcgaatcggtgatccacacgctgctcgaggcggtggcgctggtggtgctggtggtgatcctgttcctgcagacctggcgagcgtcgatcatcccgctgctggcggtgccggtgtcggtgatcggcaccttcgcggtgatgcacctgttcggcttctcgatcaacgcgttgagcctgttcggcctggtgctggcgatcggcatcgtggtggacgacgcgatcgtggtggtcgagaacgtggaacgcaacatcgaggccggcctgtcgccgcgagacgccacctaccgcgcgatgcgcgaggtctcgggaccgatcatcgcgatcgcgctggtgctgatcgcggtgttcgtgccgctggccttcatcagcgggctcaccgggcagttctaccgccagttcgcgctgacgatcgcgatctccacggtgatctcggcgatcaactcgctcacgctgtcgccggcgctcgccgcgatgttgctgaagggtcacggcgcgccgaaggatgcgctgacgcgcggcatggaccgcgtgttcggccgcttcttctcgctgttcaaccgcgccttcaagcgcggcgccgagggctacagcggcggcgtcacgcgcgccatctcgcgcaaggccgtgatgatcggcgtgtacctggtgttcctggcggtgacggtgggcctgttcaaggccgtgcccagcggcttcgtgccggcgcaggacaagcagtacctgatcggcttcgcgcagctccccgacggcgccacgctcgaccgcaccgaggacgtgatccgccgcatgggcgacatcgcgctgaagacgccgggcgtcgagcacgcggtggccttccccggcctgtcgatcaacggcttcaccaacagctccaactccggcatcgtgttcacgccgctgaagcccttcgacgagcggcgcgacccgagcctgagcggcgcggcgatcgcggccgacctgaaccgccagttctcgcagatcgaggacgccttcatcgtgatgttcccacccccgccggtgcagggcctgggcaccacgggcggcttcaagctgcagctcgaggaccgcggctcgctcggctacgcggcgatggacggcgcggtcaaggccttcatggcgaaggcccagcaggcgcccgagctggccgggctgttctcgagctaccaggtcaacgtgccgcagctctatgccgacatcgaccgcaccaaggcgcgccagctcggcgtcgcggtgaccgacgtgttcgacacgatgcagatctacctcggctcgctgtacgtcaacgacttcaacaagttcggccgcacctacaccgtgcgcgtgcaggccgatgccacgcaccgcgcgcgcgccgaggacgtgggcctgctgaaggtgcgctcggcctcgggcgagatggtgccgctgtcggcgctgatgacggtgcagccgagcttcggcccggagcgcgcgatgcgctacaacggctacctgtcggccgacatcaacggcggcccggccccgggctactcgtcgggtcaggcgcaggatgccgtgaaccgcatcgccgccgagacactgccgccgggcatcagctacgaatggaccgagctgacctaccaggagatcctggccggcaactcggcgatgtgggtgttcccgctcgcgatcctgctggtgttcctggtgctcgccgcgcagtacgagagcctgacgctgccgctgtccatcatcctgatcgtgccgatgggtctgctcgcggcgatgaccggcgtgtggctcgacggcggcgacaacaacgtgttcacgcagatcgggctgatcgtgctggtggggctgagcgcgaagaacgcgatcctgatcgtggagttcgcgcgcgagctggagttcgccggccgcacgccggtgcaggcggcgatcgaggccagccggttgcggctgcgcccgatcctgatgacgtcgctggccttcgtgatgggtgtgctgccgctggtgctgtcgagcggtgccggtgccgagatgcgccaggcgatgggcgtcgcggtgttcgccgggatgatcggggtgaccgccttcggcctcttcctcacgccggtgttctatgtgctgctgcgccgcctggccggcaaccgcccgctgacgcagcacggcgaggtgccgcacgccgaggcctttgccggcacccccggcaccggtggcgcgagcctgaagccgctgccggccgcgccggtggcccaccacgactga

SEQ ID NO: 2798 - protein, 1080 aa, Rubrivivax gelatinosus PM1
MNLSKFFIDRPIFAGVLSLLMLIAGLIALRGLPISEYPEVVPPSVVVRAQYPGANPKVIAETVATPLEEAINGVEGMLYMGSQATTDGLMTLTVTFRLGTDPDKAQQLVQNRVSQAEPRLPEEVRRLGITTVKSSPDLTMVVHLLSPNDRYDMTYLRNYAVLNVKDRLARIDGVGQVQLFGSGDYAMRVWLDPQKVAERGLSASDVVAAIRQQNVQAAAGVVGASPGLPGVDLQLSINAQGRLQNEEEFGDIIVKTGADGAVTRLRDLGRIELGAAEYALRSLLDNKSAVAVPIFQAPGSNAIEISNQVRATMAELKKYMPEGVDYEIVYDPTQFVRASIESVIHTLLEAVALVVLVVILFLQTWRASIIPLLAVPVSVIGTFAVMHLFGFSINALSLFGLVLAIGIVVDDAIVVVENVERNIEAGLSPRDATYRAMREVSGPIIAIALVLIAVFVPLAFISGLTGQFYRQFALTIAISTVISAINSLTLSPALAAMLLKGHGAPKDALTRGMDRVFGRFFSLFNRAFKRGAEGYSGGVTRAISRKAVMIGVYLVFLAVTVGLFKAVPSGFVPAQDKQYLIGFAQLPDGATLDRTEDVIRRMGDIALKTPGVEHAVAFPGLSINGFTNSSNSGIVFTPLKPFDERRDPSLSGAAIAADLNRQFSQIEDAFIVMFPPPPVQGLGTTGGFKLQLEDRGSLGYAAMDGAVKAFMAKAQQAPELAGLFSSYQVNVPQLYADIDRTKARQLGVAVTDVFDTMQIYLGSLYVNDFNKFGRTYTVRVQADATHRARAEDVGLLKVRSASGEMVPLSALMTVQPSFGPERAMRYNGYLSADINGGPAPGYSSGQAQDAVNRIAAETLPPGISYEWTELTYQEILAGNSAMWVFPLAILLVFLVLAAQYESLTLPLSIILIVPMGLLAAMTGVWLDGGDNNVFTQIGLIVLVGLSAKNAILIVEFARELEFAGRTPVQAAIEASRLRLRPILMTSLAFVMGVLPLVLSSGAGAEMRQAMGVAVFAGMIGVTAFGLFLTPVFYVLLRRLAGNRPLTQHGEVPHAEAFAGTPGTGGASLKPLPAAPVAHHD

SEQ ID NO: 2799 - DNA, 3114 bp, Rhodospirillum rubrum
  CDS (1)..(3114)
atggacgtcagcagcctttttatccgccgcccggttttcgccaccgtgctcagcttgttgctggtggtcatgggcatcgcggcgatgacccggctggcggtgcgcgaactgcccgatatcgattccgccgtggtcagcgtcaccaccccctataccggggcggcgcccgagatcgtcgataccgatatcaccgaggtcattgaaaacgccgtcgccggcgtctcgggcattcgcaccatcacctcgcaaagccgccgtggccaggggcggacggtgatcgaattcgaaagcggcgtgtcgatggacgaggcggtcaacgacgtgcgcgacgccgtggccaaggtgcgcggcgatctgcccgacgatatcgaggagccgcgcatcgccaaaagcgacacggattccgatccggtgatgcgcctcagcctgaccagcccgcggatgacgccgatcgagctgaccgatttcgccgatcgctacatcgtcgaccggctggcgaccatcgatggcgtcgcccaggtcgatctctatggcgagcgccgccaggccatccgcctgtggctggaccgccgggcgatggccgcccgtcaagtgacggttcaggatgtggaagcggccctgcgccgggccaatgtcgaactgcccgccggcgagatcgaaagcgcctcccgcctgctgaccgtgcgggcggcgaccctgttgaccagccccgaggcctttggcagcacggttatcaaggtcgtcgacggctatccgctgcgggtgcgcgatgtcgcccgcgtcgaactgggagtggagaacgacgacaccaccgtgcgcgtcgaaggccgcgacgccctgaccatgggcgtgctgcgccagtcccaggccaatacggtggcgatttccaatcgcatccgcgccgagatcgaccgcttgcgtcccagcctgcccgaggggatgagcctggaggtgtcgtccgacgacgccctgttcatcaaccgctcgatccacgaggtgatcttgaccctcggcctgtcggggctgatcgtcatcatcgtcaatttcgcctttctcggctcgatccgcgccaccttggtgccgacggtgaccatcccggtggcggtgatcggcaccttcatcggcattttgctgctgggcttttcgatcaacctgctgaccttgctcgccttgatcttgtcgatcgggctggtggtcgatgacgccatcgtcgtgcttgagaacatccagcgccgcatcgaggccggcgagcccaagctggtggcggcggcgcgcggcacccggcaggtcactttcgccgtggtcgccacctcgttgaccctgatcgccgtcttcgtgccgatttccttcatggagggcacggtcggccggctgttcaccgaattcggtttcgtgctggcctgcgcggtggcgatctcgatgctggtcgccctgacgctctgcccgccgctggccgctggcgtgctggccgagggcaaggccgagggccggctggcccatgccctcaattacgccttcggcaccctgagccggggctatcagcgggccctgtcggcggttctcggcctgccgatggtcgtgttgacggtcgccctgctctgcggcggcgcgtcgttctggctctatcaggggctgcccaaggaattggttccggtcgaggatcgcggggtggtggtggtcagcctcaacggaccgcaaggggccaatacgcgttataccgatacccaaatccgcgccgtggaggccgccgttcagccggtgctcgatcgcggcgaggcggtgggggttctggcccaggtcggccaatggaaccgcccccatcgtggctatgtcgtcatccgcctggacgattgggaaaaccgcgggcgcaccgcctccgccctggccgagagcctgcgcaaggacctgggcaagctggccggggcgacggcgacgccggtggtgcccgccggcctggggctgcgcggcagccgcacccccttgcaggtggtgatcggcggccccgattacgccgaggtcgaggtctgggccaacgccctgctcaagcgggccgaggaattgcccgggttgatcaatcccgaactcgatttcgaacaaaaccaaccccagctcagcgtcggcatcgaccgcgaccgcgccgatgatctgggggtcggggtggaggccatcggccaaaccctgcagaccatgctggcctcgcgcgaggtgacgcgcttcgttgatcgcgggcgcgagtatcaggtggtggtccaggcccggcccgaggatcggcggacaccctcggatttgagcaataccttcgtgcgcgccgaaaagggcggcgctctggtgccgctcgatgccctggtgatcctcaaggaaaccgccggcgcccccgatctcaatcgctacgcccgcctgccgtcgatcaccttgcaaagcgcgctggcgcccggttacgacatggggcaggcgatcgacgacgtgatggcgctcgccagccaaaccgtgccgcccgaagcccggctttccctggccgggcaatccaaggaattcctggaaacctcggggggggtgctgttcacctttttgatggccctggtcatcgtctatctggtgctggccgcccagttcgaaagcttcctccatcctttgatcatcatgctgtcggtgccgctggcggtgtcgggggctttgctgtcgctatgggcgacgggcaattcgatcaatgtttacagccagatcggcatcgttttgctgatcggcctgacggcgaagaatggcatcttgatcgtggagttcgccaatcagctgcgcgacgaggggcgaagcgtgcgcgaggccatccttgaagccgccagcctgcgcctgcggccgatcctgatgaccgtcatctgcaccattcttggcgcggtgccgctggcctggtcgtcgggggcgggggcggaaagccgcgaggcgatcggcatcgtcgtcatcggcggtctggggctggcctcgctgctcaccctgttcgtcaccccggttctctatgatctgctggcgcccttcacccgctcggccggcgccgtgggccaagcccttgaccgcgccctggccgaaacccccgagggcgcgggcaagccggcggaataa

SEQ ID NO: 2800 - protein, 1037 aa, Rhodospirillum rubrum
MDVSSLFIRRPVFATVLSLLLVVMGIAAMTRLAVRELPDIDSAVVSVTTPYTGAAPEIVDTDITEVIENAVAGVSGIRTITSQSRRGQGRTVIEFESGVSMDEAVNDVRDAVAKVRGDLPDDIEEPRIAKSDTDSDPVMRLSLTSPRMTPIELTDFADRYIVDRLATIDGVAQVDLYGERRQAIRLWLDRRAMAARQVTVQDVEAALRRANVELPAGEIESASRLLTVRAATLLTSPEAFGSTVIKVVDGYPLRVRDVARVELGVENDDTTVRVEGRDALTMGVLRQSQANTVAISNRIRAEIDRLRPSLPEGMSLEVSSDDALFINRSIHEVILTLGLSGLIVIIVNFAFLGSIRATLVPTVTIPVAVIGTFIGILLLGFSINLLTLLALILSIGLVVDDAIVVLENIQRRIEAGEPKLVAAARGTRQVTFAVVATSLTLIAVFVPISFMEGTVGRLFTEFGFVLACAVAISMLVALTLCPPLAAGVLAEGKAEGRLAHALNYAFGTLSRGYQRALSAVLGLPMVVLTVALLCGGASFWLYQGLPKELVPVEDRGVVVVSLNGPQGANTRYTDTQIRAVEAAVQPVLDRGEAVGVLAQVGQWNRPHRGYVVIRLDDWENRGRTASALAESLRKDLGKLAGATATPVVPAGLGLRGSRTPLQVVIGGPDYAEVEVWANALLKRAEELPGLINPELDFEQNQPQLSVGIDRDRADDLGVGVEAIGQTLQTMLASREVTRFVDRGREYQVVVQARPEDRRTPSDLSNTFVRAEKGGALVPLDALVILKETAGAPDLNRYARLPSITLQSALAPGYDMGQAIDDVMALASQTVPPEARLSLAGQSKEFLETSGGVLFTFLMALVIVYLVLAAQFESFLHPLIIMLSVPLAVSGALLSLWATGNSINVYSQIGIVLLIGLTAKNGILIVEFANQLRDEGRSVREAILEAASLRLRPILMTVICTILGAVPLAWSSGAGAESREAIGIVVIGGLGLASLLTLFVTPVLYDLLAPFTRSAGAVGQALDRALAETPEGAGKPAE

SEQ ID NO: 2801 - DNA, 3090 bp, Rhodospirillum rubrum
  CDS (1)..(3090)
atgaaggccttcgatcttttcatccgccggccggtgctggccacggtcatcagcctgctgatcctggtggtcggcttccaggcgctgatgcgcctgcccatccgccaatatccggagatgagcaatacggtcatcaccgtcaccaccacctatccgggggcgaattccgatctgatccagggcttcgtcacccagccgatccagaaggcggtctcgacctccaagggtctggattatctgacctcgagctcgtcgcagggcgtcagcaccgtcaaggccttcgtccgcctgaacgaggatcccgacgcggcgatgaccgaggtgacggccaaggtcaacgaggtccgctcgctgctgccgcgcaacgtcgataatccggtgatctccaaggagaccggcgagaccttccccgccgccttcatcgccttttcctcgaaaagccattcccaagaacagatcaccgattacgtcaaccgggtgatccagcccaagctggccgcggtcagcggcgtttccaatcccgaggtcttcggcgccaagaacttctcgatccgcgtctggctcgatcccgaaaagatggcccagcaggggctgacggccagcgatgtccagaccgccctgacggcgaacaacttctcctcggccgccgggtcgatcaagggcagcctggatatcatcaacaccaaggccgaaaccgatctgaccgatatcgccgagttccgcaagctggtggtccgcaatgacggggcgcggctgatccgccttcaagatatcggcgaggtgtcgctggccgccgaaagcagcgacatgagcgtgttcgccagcggtcaggcggcgatcttcgtcggcgtcttcaccaccccggaagccaatccgctgtcggtgatcgccgagatccgcgagaccgccctgccggcgatcatcgaccagttgcccgagggcatgaccgccttgatggcctatgattcgacggtgttcatcaccgaatcgatccgcgaggtggtcaagaccatcgtcgaagccgcgatcatcgtcatggtggtgatcttcctgttcatgggatcggtgcggtcggtggtcattcccctggtcaccgtgccgctgtcgctggttggcgtcgccatcttgctgatggtcttgggtttttcgatcaatcttctgaccttgctggccatggttctggcgatcgggttggtggtcgacgacgccatcgtcgtcgtcgagaacgtccatcgccatatcgaggagggatccacccccttccaggcggcgatcgacggcacccgcgaaatcgccctgccggtgatttcgatgaccatcaccctggccgccgtctatgccccgatcgcctttatgggcgggctgaccggcgcgctgtttcgtgaattcgccctcgccctggccggctcggtggtggtgtcgggggtggtggcgctgacgctgtcgccgatgatgtgttcaaagatcctgcgccacgaggtgaccaagaaaggcttcgccgccaagctcgattcgttgttcgagcgccttcagggacgctatgggcgcctgctggacgcctcgctggccgaccgcccgaccacggtggtcttcgccctgatcgtcatgggatcgctgtacttcctgttctcggccatccccagcgaactggcccccgacgaggaccagggcgcggtgctgaccgccttcaacggcccggcctcggccagcaacgactatatgaacgtcttcgtgcaccagatcgatgacgcgctgcgcgcctatcccgaaaccgagcataccttcctgatcgccggcatcggcacccccaacagcggcttcggcggcgcctcgctcaagccctgggccgagcgcgagcgcgatgccaaggcgttgatcggcgcggtgcaaacgacgatgaacggcatcgccggggtcaaggcctcggtgttctcgcccgccgccctgcccggtgccgatggcctgcccgtgcagttcgtcatctcctcgaccaccccctatgaggcgatttccgacatccaggacgagatgatgaagcgggcccaggcctcggggcgcttcatcttcaccgatacggatctgaaattcgaaagcccgcagaccgtggtgtcggtcgaccgcgacaaggcggcggcctatggcatcaccatggatcagatcggtggcgccctggcgacgatgaccggcggcaactacgtcaatctggtcaatatccagggccgctcctacaaggtgatcccccaggttcccgacagcgcccgcatggatcccgactccctggggcgcttctatatccgcacccatagcggcaccgccattccgctgtcgtcgctggtgaccctggagcggcgcgtgctgccgcaatcgctcaaccagttcaaccagcttaacgccttcaccatctcgggcttcccgatgcccggggtgaccctgggtcaggccctggccgttctggagcaaagcgcggccgaggtgctgccctcgggctacaccatcgattacgccggccagtcgcggcagttcatccaggaaggcagcagcctgatcggcaccttcgtgttcgccctgatcatcatcttcctggtgctggccgcccagttcgaaagcttccgcgatccgctggtcatcatgatctcggtgccgttgtcgatttgcggcgccttgctgcccctggcgctcggcgccaccaccatgaacatctatacccaggtcggtctggtgacgttgatcgggctgatcaccaagcacggcatcttgatgtgcgaggtggcccgtgaacgccaggaagagcagggcctgacccgcgcccaggcgatcgaggtcgcggccaagctgcgactgcggccgatcctgatgacgacggcggcgatggtcgctgggttgattcccctgatgttcgccagcggcgccggcgccaacagccggttttccatcgccgtggtcatcgtcgcggggatgagcatcggcacgctgttcaccctgttcgtgctgccggtgatctataccttccttgccgaggatcgcagcaaggggcgcgacggctcctcgggcgccgagggcggcgtgtcgctttcgaaggcggccgaatag

SEQ ID NO: 2802 - protein, 1029 aa, Rhodospirillum rubrum
MKAFDLFIRRPVLATVISLLILVVGFQALMRLPIRQYPEMSNTVITVTTTYPGANSDLIQGFVTQPIQKAVSTSKGLDYLTSSSSQGVSTVKAFVRLNEDPDAAMTEVTAKVNEVRSLLPRNVDNPVISKETGETFPAAFIAFSSKSHSQEQITDYVNRVIQPKLAAVSGVSNPEVFGAKNFSIRVWLDPEKMAQQGLTASDVQTALTANNFSSAAGSIKGSLDIINTKAETDLTDIAEFRKLVVRNDGARLIRLQDIGEVSLAAESSDMSVFASGQAAIFVGVFTTPEANPLSVIAEIRETALPAIIDQLPEGMTALMAYDSTVFITESIREVVKTIVEAAIIVMVVIFLFMGSVRSVVIPLVTVPLSLVGVAILLMVLGFSINLLTLLAMVLAIGLVVDDAIVVVENVHRHIEEGSTPFQAAIDGTREIALPVISMTITLAAVYAPIAFMGGLTGALFREFALALAGSVVVSGVVALTLSPMMCSKILRHEVTKKGFAAKLDSLFERLQGRYGRLLDASLADRPTTVVFALIVMGSLYFLFSAIPSELAPDEDQGAVLTAFNGPASASNDYMNVFVHQIDDALRAYPETEHTFLIAGIGTPNSGFGGASLKPWAERERDAKALIGAVQTTMNGIAGVKASVFSPAALPGADGLPVQFVISSTTPYEAISDIQDEMMKRAQASGRFIFTDTDLKFESPQTVVSVDRDKAAAYGITMDQIGGALATMTGGNYVNLVNIQGRSYKVIPQVPDSARMDPDSLGRFYIRTHSGTAIPLSSLVTLERRVLPQSLNQFNQLNAFTISGFPMPGVTLGQALAVLEQSAAEVLPSGYTIDYAGQSRQFIQEGSSLIGTFVFALIIIFLVLAAQFESFRDPLVIMISVPLSICGALLPLALGATTMNIYTQVGLVTLIGLITKHGILMCEVARERQEEQGLTRAQAIEVAAKLRLRPILMTTAAMVAGLIPLMFASGAGANSRFSIAVVIVAGMSIGTLFTLFVLPVIYTFLAEDRSKGRDGSSGAEGGVSLSKAAE

SEQ ID NO: 2803 - DNA, 3192 bp, Ralstonia metallidurans CH34
  CDS (1)..(3192)
atgaatctctcgaaattctttatcgaccgccccattttcgcgggtgtgctatcggtgctgatcttcctgatcggcgccatatcgatgttcaagttgccgatctcggagtacccggaagtggtgccgccgtcggtggtggtgcgcgcgcagttcccgggcgccaacccgaaggtgatcgccgagaccgtggccacgccgctggaagagcagatcaacggcgtcgaggacatgctctacatgaactcgcaggccaacagcgacggcacgctgacgctgacggtgaccttcaagctgggcacggacccggacaaggcccagcagctcgtgcagaaccgcgtctcgcaggccgagccgcgtctgcccgaggacgtgcgtcgcctgggcattaccacggtcaagagctcgcctgatctgaccatggtggtgcacctggtctcgccgaacaatcgctatgacatgacgtatctgcgcaactacgcgctgatcaacgtcaaggaccgcctggcgcgtatccagggcgtcggtcaggtgcagatgttcggctcgggcgactactcgatgcgtgtgtggctgaaccccgacaagatcgccgagcgtcatctggcggcctcggacgtggtcaaggccatccgcgagcagaacgtgcaggtggcagccggcgtgatcggacaatcgccctcgctgccgggcaccgatctgcaactgtcggtcaacgcgcagggccgtctgcagacggtggaggagtttggcgacatcatcgtcaacacctcgccggacggcgcggtgacgtacctcaaggacatcgcccgcgtcgagctgggtgcctccgagtacgcactgcgttcgctgctcgacaacaagtccgccgtggcgctgccgatcttccaggcgccgggttccaacgcgatccagatctcggacgatgtgcgcaagacgatggccgagctgaaagcgaacatgccggagggcgtggactacagcatcgtctatgacccgacccagttcgtgcgccacagcatcgaggccgtgacgcacacgctgttcgaggccatcgcgctggtggtgctggtggtgatcctgttcctgcagacctggcgcgcgtcgatcattccgctgctggccgtgccggtgtcgatcgtcggcacgttcgggctgatgcacgcgttcgggttctcgatcaacgcgctgagcctgttcggtctggtgttggcgatcggtatcgtggtggacgatgcgatcgtggtagtggagaacgtcgagcgcaatatcgaggaagggttgtcgccgaaggaagccacgtacaaggccatgcgcgaggtaagtggtccgatcatcgccatcgcgctgacgctgatcgccgtgttcgtgccgctggcattcatgactggcctgaccgggcagttctacaagcagttcgcgctgacgatctcgatctcgacgatcatctcggcgttcaactcgctgacgctgtcgcccgcgctgtccgcgctgctgctcaagagccacgacgcgccgaaggattggctgacgcgcgccatggacaaggtgctcggcaagttcttcgtccgcttcaaccagttcttccgccgcagctcggacaactatggccggggcgtgaagggcgtgattcgccgcaagggctcggtgttcggcgtgtacgcgctgatgctggtcgcgacctggggcgtgttccagatggtgccgaagggcttcgtaccggcgcaggacaagcagtacctggtgagcttcgccaagctgcctgacggcgcgacgctggatcgcacggaagacgtgatccgccgcatgtcggatatcgcgctcaagcatccgggcgtggagtcggcggtggcattcccgggcctgtcgatcaacggcttcaccaatagcccgagcgccggcatcgtgttcgtcacgctcgatccgttcgacaagcgcaagagcaaggaactgtctggcaatgcgatcgcggctgatctgaacaagcagtacggctcgatccaggacgccttcattgcggtgttcccgccgccgccggtgcagggcctcggtacgatcggcggtttcaagatgatgatcgaggaccgcgccgcgctgggctatgacgaactgtttaacgcgaccaacgcgttcatggccaaggcgcgcgccacgcccgaactggctggcatcttcagcaactatcaggtgaacgtgccgcagctagacgtgaagctggaccgcaccaaggccaagcaactcggcgtgcccgtgaccgatgtgttcgacacgctccagacctacctcggctctgcgtacgtcaacgacttcaacaagtttggtcgcacgtaccaggtcaaggtgcaggccgatgcgcagttccgccagcatgcggaggacatcctgcagctgaagacgcgcaacgtgagtggtgagatggtgccgctgtcgtcgctggtgcaggtcaagcagagcttcggccccgacagcgtgatccgctacaacggcttcacggctgccgatatgaatggtggtccggctcctggcttctcgtcgggccaggcgcaggccgccgccgagcggatcgccgcggagacgctgcccaagggtatcgccttcgagtggaccgagctgacgtatcaggacatcctggccggcaatgcgggcgtctggatcttcccgctgtgcgtgttgctggtgttcctggtgctggccgcccagtacgaaagcctgacgctgccgctggcggtgatcctgatcgtgccgctgagcctgctggccgccatgactggcgtgtggctgacccgtggcgataacaacatcttcacgcagatcggtttcatcgtgctggtggggttatccgcgaagaacgcgattctgatcgtcgagttcgcgcgtgaactggaacatcacggccgtacggtggtgcaggccgcgatcgaggccagccgcctgcgtctgcgcccgatcctgatgacgtcgttcgctttcatcatgggtgtggtgccgctggtggtgtccaccggcgccggcgcggaaatgcgccatgcgatgggcgtggccgtgttcgcggggatgctgggggtgacgttcttcggcctgttcctgacgccggtcttctatgtggcgctgcgtttgctggccacgcgaggccagcgccagaaggtggctgagcagcctgcgtcggcgtcgcaggcggtggcatcggcagaataa

SEQ ID NO: 2804 - protein, 1063 aa, Ralstonia metallidurans CH34
MNLSKFFIDRPIFAGVLSVLIFLIGAISMFKLPISEYPEVVPPSVVVRAQFPGANPKVIAETVATPLEEQINGVEDMLYMNSQANSDGTLTLTVTFKLGTDPDKAQQLVQNRVSQAEPRLPEDVRRLGITTVKSSPDLTMVVHLVSPNNRYDMTYLRNYALINVKDRLARIQGVGQVQMFGSGDYSMRVWLNPDKIAERHLAASDVVKAIREQNVQVAAGVIGQSPSLPGTDLQLSVNAQGRLQTVEEFGDIIVNTSPDGAVTYLKDIARVELGASEYALRSLLDNKSAVALPIFQAPGSNAIQISDDVRKTMAELKANMPEGVDYSIVYDPTQFVRHSIEAVTHTLFEAIALVVLVVILFLQTWRASIIPLLAVPVSIVGTFGLMHAFGFSINALSLFGLVLAIGIVVDDAIVVVENVERNIEEGLSPKEATYKAMREVSGPIIAIALTLIAVFVPLAFMTGLTGQFYKQFALTISISTIISAFNSLTLSPALSALLLKSHDAPKDWLTRAMDKVLGKFFVRFNQFFRRSSDNYGRGVKGVIRRKGSVFGVYALMLVATWGVFQMVPKGFVPAQDKQYLVSFAKLPDGATLDRTEDVIRRMSDIALKHPGVESAVAFPGLSINGFTNSPSAGIVFVTLDPFDKRKSKELSGNAIAADLNKQYGSIQDAFIAVFPPPPVQGLGTIGGFKMMIEDRAALGYDELFNATNAFMAKARATPELAGIFSNYQVNVPQLDVKLDRTKAKQLGVPVTDVFDTLQTYLGSAYVNDFNKFGRTYQVKVQADAQFRQHAEDILQLKTRNVSGEMVPLSSLVQVKQSFGPDSVIRYNGFTAADMNGGPAPGFSSGQAQAAAERIAAETLPKGIAFEWTELTYQDILAGNAGVWIFPLCVLLVFLVLAAQYESLTLPLAVILIVPLSLLAAMTGVWLTRGDNNIFTQIGFIVLVGLSAKNAILIVEFARELEHHGRTVVQAAIEASRLRLRPILMTSFAFIMGVVPLVVSTGAGAEMRHAMGVAVFAGMLGVTFFGLFLTPVFYVALRLLATRGQRQKVAEQPASASQAVASAE

SEQ ID NO: 2805 - DNA, 3093 bp, Cytophaga hutchinsonii
  CDS (1)..(3093)
atgagcatctcaagtctaagtattaagcgccctgtatttacaatcgtaatcaatctgttgctgattgtttttggaatcattggttatacgtttttaggtatccgggaatatccatccattgaccctgcaactatttctgtgcgtaccaactattccggcgccaatgccgatatcattgaatcgcagattacagaaccgctggagaaagccatcaatgccattgacggtatcaaaagtataaactctaccagtaatcagggaagcagtaacattacgattgaatttaacctggataaaaatttagaggaagccgccaacgatgtgcgggataaggtttctcaggcaacacgaagcctgccgctggatattgatgcaccgcctgtagtatcaaaagccgatgctgattcagagcccattgtaatccttacggtacgaagcaattcacgtgatgtactgcaattaagcgattacgcggaaaattccattgcacaacggttacaaaccataccaggcgtaagtagtgtgcaaatatacgggcaaaaaaaatatgccatgcgtttatggattgatccgatgaaactttcttcctacggccttaccgtagctgaagtaaagacggctttaaacaaagaaaacgttcagcttccgtccggaaaaatcaccggtgcaaatacagaactaagtgtgaacacgcttggaaaccttgctacagaagagcagtttcagaatctgatcatccgtacacaaggtaataaaatcatacgtttcagcgatatcgggaaagtgcagcttgggccggaaaacctggaaacacaaatgaccgaatcaggcacacctatggttggccttgctattactcctcaacccggaactaattacattgaaattgcaaacagcttttatgaacagcttgcaaaaataaaacaggaattaccttccgatcttgaactgaacgttgcggtagataatacattattcattaaacaatccgttacagaagttgccgaaacaattttaatctcgctggtcttagtaatcattatcatttacttattcttcagagattggggcgttgccttcagaccgcttattgatattcctgtgtcgcttattgcaacattcttcatcatgtacctgtgcggcttttctgtgaatgtattaaccctgcttgctattgtactggcaacaggtttagtggtagatgatggtattgttgttacggaaaacatttacaaaaaagttgaagaaggaatgtcccctatagaggccgcaattaaaggatcgaatgaaatattaattcctgttatctccatttcgattacattagctgccgtgtttcttccggtgatatttttacagggctttgtggggcagcttttccgtgaatttggtattgtaatcgcttctgcagtattgatctctgcatttgtatccttaaccttaacccctatgctaaatgcatacctgatgaaaggcggcgtacataaaaaatcaagattctatgaatggacagaaccattttttgtaaaaatgaatgccatgtatgcagatgcacttggtgtattcatgaaacgtaaatggatcagctacccgatcatctttggatgcatcggtttgattgttttgttttattccttgttgaaaaaagaaacagcgccttacgatgaccgcagttacctgcgtgtacagatcaacacacccgaaggtgccagctatgattacacgaaccggtttatgcaggaaatgacaaaactggtgaacgattccattcctgaaaaatatataaaccttgtcattacctctccgggctttggctcttcttccgttaacagcggccgtatgatcatgtctctgattcaacccaatgagcggcatcgttctcaaaaacaaattgcaaataagcttacgcaactgacaaaaaaatattcagaggcacgcgcgatggttacagaacagccgactattgcggtaaataaaaaaggcggcctgccggttcagtataacattaaagcattgaattttgataaactgaaagaaaaagtaccggaatttatgaatgctgcggcaaacgaccctacattctctactacagatgtgaacttaaaattcaacaaaccggaattgaatgtaaccattgaccgcgataaagcacaaagccttggtgtatccgtacttgacgtggcacaaacgttacagctttctttaagcgggcagcgcttctcttatttctacatgaatggaaaacaatatcaggtaattgctcagtttgataaaacagaccgcgatgcacccattgatttaacatctatttttgtaaaaaataattccgggcaattgattcagctggacaatgtgatcacaatcaacgaacgcagcagcccgccacagctataccacaccgaccggtatttatctgcgaccgtatcggcgggtcttgcaccgggaaaaagtatcggagatggtattgaagcgatggaccgcatcgctgaagaagtacttgatgaaagtttctctacatcacttacaggtgaatcacgcgactttgttgaaagcagctcaaacacgctgtttgcattcagcttagccatcttattgatctatttaattctttccgcacaatttgaaagttttcttgatccgttcatcatcatccttaccgtacccatggcggttgggggcgccttgttctcgctttggctgtttggccagacctggaatattttcagccagatcggcaccatcatgcttatcggtctggttaccaaaaatggcatactcattgttgaatttgcaaatcagttaaaagagcaaggcaaatcaaaagcggaagccatacttgaagcctctgaagcacgtttacggccaattttaatgaccagccttgccattgcattaggcgcgttacctattgcactagccttaggagctgcagccaaaagccgcataggaatgggtgttgtaattgtagggggaacattgtttgccttagtattaaccttatttgttatccctgcattctacgccatgtggtcaaaagaacacaaacataacaccgctttagaagaagcgcacaaagctgaaaaaagcatctaa

SEQ ID NO: 2806 - protein, 1030 aa, Cytophaga hutchinsonii
MSISSLSIKRPVFTIVINLLLIVFGIIGYTFLGIREYPSIDPATISVRTNYSGANADIIESQITEPLEKAINAIDGIKSINSTSNQGSSNITIEFNLDKNLEEAANDVRDKVSQATRSLPLDIDAPPVVSKADADSEPIVILTVRSNSRDVLQLSDYAENSIAQRLQTIPGVSSVQIYGQKKYAMRLWIDPMKLSSYGLTVAEVKTALNKENVQLPSGKITGANTELSVNTLGNLATEEQFQNLIIRTQGNKIIRFSDIGKVQLGPENLETQMTESGTPMVGLAITPQPGTNYIEIANSFYEQLAKIKQELPSDLELNVAVDNTLFIKQSVTEVAETILISLVLVIIIIYLFFRDWGVAFRPLIDIPVSLIATFFIMYLCGFSVNVLTLLAIVLATGLVVDDGIVVTENIYKKVEEGMSPIEAAIKGSNEILIPVISISITLAAVFLPVIFLQGFVGQLFREFGIVIASAVLISAFVSLTLTPMLNAYLMKGGVHKKSRFYEWTEPFFVKMNAMYADALGVFMKRKWISYPIIFGCIGLIVLFYSLLKKETAPYDDRSYLRVQINTPEGASYDYTNRFMQEMTKLVNDSIPEKYINLVITSPGFGSSSVNSGRMIMSLIQPNERHRSQKQIANKLTQLTKKYSEARAMVTEQPTIAVNKKGGLPVQYNIKALNFDKLKEKVPEFMNAAANDPTFSTTDVNLKFNKPELNVTIDRDKAQSLGVSVLDVAQTLQLSLSGQRFSYFYMNGKQYQVIAQFDKTDRDAPIDLTSIFVKNNSGQLIQLDNVITINERSSPPQLYHTDRYLSATVSAGLAPGKSIGDGIEAMDRIAEEVLDESFSTSLTGESRDFVESSSNTLFAFSLAILLIYLILSAQFESFLDPFIIILTVPMAVGGALFSLWLFGQTWNIFSQIGTIMLIGLVTKNGILIVEFANQLKEQGKSKAEAILEASEARLRPILMTSLAIALGALPIALALGAAAKSRIGMGVVIVGGTLFALVLTLFVIPAFYAMWSKEHKHNTALEEAHKAEKSI

SEQ ID NO: 2807 - DNA, 3165 bp, Trichodesmium erythraeum IMS101
  CDS (1)..(3165)
atgtgttccctactaattatcctaattggattagtcggttatatcagtctaccagtacaagaatttcctagcattgataccccagtagtcagtgtacgaaccaactacccaggagctagcccagaagtagtagaaacagaagtaacagaaattctggaagcagaaattaatggtgttgaaggtgtgaaaactctgacatctagcaccagggaaggttcaagttccataaacgttgaatttcaactgagtcgcaatatagaagcagcagctcaagatgttcgtagtcgtgtctcccgtgccatgagaagacttcccaatgaagttgatgcaccagtagtttctaaacgaagtagcgatgaagaaagaattatttggctttccctaactggggaaaaatattcatcattagaattaagcaactatgccgataaattcattaaaaatatcttagaaactgttaatggagtgggtagtgtttttatcggaggcgaacgtcgttacgccatgcgactatggttaaacccccaaaaaatggctgctcgaaatattactgctttagatgtcaaacaagctcttagacaacaaaacgtagaaattcccagtggtagaatagaaggaaaatctacagaataccccatccgcactattggtcgtctacaaacaccagaagcttacgaaaacttggtgatcagacgcaatgatgacacctctctgacaagattcaaagatattggtagagcagaaattggagcagaaagtaatcgcacaattgctcgctataatggtaaaccagcaataggtattggaattagtaagctttccggagcaaatatcatagaagttgccacaagtgtcaaaactaggatgaaagaattatctaaagattttcccgatggaatggaatactacgtcagcgttgactactcaacatttgtggaagttgccatcaaagaagtctggaaaagtttgctattcgccatctgtttagttgtcttagttatctatatgtttttgcaaaattggcgggcaacaattattcctactatcaccattcccatttccctcattggtgcctttggggtaatgtttttcatgggattttctatcaacactctcaccttatttgctctaacactttcaacaggtttggtagtagatgatgctattgtgatcttagaaaatattgttcgatatattcaacagaaaggcaaaactcccatggaagctgcaatattaggagtcggggaagttgtatttgctgtcattgccacaaccattgtcttaattgcagtatttctacctgtaggattttccggtgggggtgcagggcgaatatttaatgaatttgccctaactattgcagtgtcagtagtgttttctacctttgttgctctgacattagcaccatcattgtcagggcgaattcttaaaaaacaagaaccagaggaacaaaaaaattttatctctcgtttatttaccattccccttaatttatttgattatgctctcagtcgcatttcagtaatatacgatcgctcattacgtctgttgatgagaatcaaaccattagtaattttaggatttatcctatctttttggataatagtttggttatttcaacagttgccccaaggatttttgcccacagaagatcgcggaagagtatttgtttctgtaactgcaccagaaggggtaagcattgaatatactgacaatgtcatgggtcaggtagaaaataaacttgctcaagttcccgaaatgaaaggttatttcagtattactgggttcggtcgttcagctcaagctaaccgagcttttgctttcaccaacttgaaaccctggtcagaacggacaaaaccagggcaagcacaacaagaagttgtcaaaaagttatttagagcatttgcaccaattacagatgcacgaatatttccaattaatcctggttcattacctggtactggtcttagtcgctccatacagtttgtcttgcagggaaatgattttgaagagttagtgcgagtatctgaagaatttaacaatgaggcgcaacagttaccccaactaaaaaatgttgacacagatttaaaaattaataagcctgagatcgtagtagaaataaatcgttaccaagctgctaatttagggatatcggtagagaatattgctcagacattacaaattatgatgggtggggaagatattacgaattttactcaaggaaaccagcgctatgatgtaattgtgcgggctgaggatgagtttcgcaataatctccaagatattgaggatctatatgtgcgaactgagcaaggggtgatgatacctttgagtaatgtggtgactgtgaagacaagcacaactcctcctgagattaatcattttaaccgctttcgttcggcaacaattacaggaagtccggctccaggagttagtttgggtgaggcattgcaagcattatacgatttggcggatcgggttttacctgctgatatgcggatagatctaaagggtgagtcatcccagtttcgagatgctggtcaggcaacgacatatatttttgggttggcattaatttttattttcttaactttggcagctcagtttgagagttatatcgacccgctggtgattttattgtcggtacctttatctttgttgggtgcttttggggcgttatggttggcagatttagaggtgaatgtttacagtcgtattgggttaattatgttaattggtttggcaactaagaattcaattttgattgtggaatttgctaaccagttattggcagagggaatgtctattactaaagctgctattgaggcatcgcggttgcggtttcgtccgattttgatgacagggttttcgacaatttttggggtgatgcccttggcgtttgcttctggtccaggcgctgctagtcgggtttccatcggaatgtcggttatgggtggaatgttggtgtctacagttttgactttgtatgtagtgcctgtgttttatgtggtgatggggaagagtttgcagttcggtttatttcgtaagcatgctcaatattcggcagatggtgatgagattagtaatggttctgttaatggaaatagtaaaactgctcctgttaatgataaaaatcaggatagtgcggaaaaattgagcaggtga

SEQ ID NO: 2808 - protein, 1054 aa, Trichodesmium erythraeum IMS101
MCSLLIILIGLVGYISLPVQEFPSIDTPVVSVRTNYPGASPEVVETEVTEILEAEINGVEGVKTLTSSTREGSSSINVEFQLSRNIEAAAQDVRSRVSRAMRRLPNEVDAPVVSKRSSDEERIIWLSLTGEKYSSLELSNYADKFIKNILETVNGVGSVFIGGERRYAMRLWLNPQKMAARNITALDVKQALRQQNVEIPSGRIEGKSTEYPIRTIGRLQTPEAYENLVIRRNDDTSLTRFKDIGRAEIGAESNRTIARYNGKPAIGIGISKLSGANIIEVATSVKTRMKELSKDFPDGMEYYVSVDYSTFVEVAIKEVWKSLLFAICLVVLVIYMFLQNWRATIIPTITIPISLIGAFGVMFFMGFSINTLTLFALTLSTGLVVDDAIVILENIVRYIQQKGKTPMEAAILGVGEVVFAVIATTIVLIAVFLPVGFSGGGAGRIFNEFALTIAVSVVFSTFVALTLAPSLSGRILKKQEPEEQKNFISRLFTIPLNLFDYALSRISVIYDRSLRLLMRIKPLVILGFILSFWIIVWLFQQLPQGFLPTEDRGRVFVSVTAPEGVSIEYTDNVMGQVENKLAQVPEMKGYFSITGFGRSAQANRAFAFTNLKPWSERTKPGQAQQEVVKKLFRAFAPITDARIFPINPGSLPGTGLSRSIQFVLQGNDFEELVRVSEEFNNEAQQLPQLKNVDTDLKINKPEIVVEINRYQAANLGISVENIAQTLQIMMGGEDITNFTQGNQRYDVIVRAEDEFRNNLQDIEDLYVRTEQGVMIPLSNVVTVKTSTTPPEINHFNRFRSATITGSPAPGVSLGEALQALYDLADRVLPADMRIDLKGESSQFRDAGQATTYIFGLALIFIFLTLAAQFESYIDPLVILLSVPLSLLGAFGALWLADLEVNVYSRIGLIMLIGLATKNSILIVEFANQLLAEGMSITKAAIEASRLRFRPILMTGFSTIFGVMPLAFASGPGAASRVSIGMSVMGGMLVSTVLTLYVVPVFYVVMGKSLQFGLFRKHAQYSADGDEISNGSVNGNSKTAPVNDKNQDSAEKLSR

SEQ ID NO: 2809 - DNA, 3198 bp, Polaromonas sp. JS666
  CDS (1)..(3198)
atgctgtcgctgctcatgctcatctcgggcctgattgcgctgcgctcgctgccgattgccgaataccctgacgtggtgccgcccaccgtggtggtgcgcgccaactaccccggcgccaaccccaaggtgattgccgagaccgtggccacgccgctggaggaagccatcaacggcgtggacggcatgctctacatgagcagccaggcgaccaccgacggcctgatgacgctcaacgtcaccttcaagctcggcaccgaccccgacaaggcccagcagctggtgcaaaaccgcgtctcgcaagccgagccgcgcctgccggaagaagtgcgccgcctcggcattaccacgatcaagagctcacccgacctcacgatggtggtgcacttgctgtcgcccagcggccgctatgacatgacctatctgcgcaactacggggtgctcaatgtcaaggacaggctggcccgcatcaacggcgtgggccaggtgcagctgttcggctcgggcgactactcgatgcgcgtctggctggacccgcaaaaggtggccgagcgcggcctgtccgccggtgacgtggtgcgcgccatccgcgagcagaacatccaggctgcggccggcgtggtgggtgcctcgcccggattgcccggcgtggacatgcaactgtccatcaacgcccagggacgcctgcaaagtgaagaagaattcggcgacatcattgtcaaaaccgaaaaggccgaaaaaggcggcgcagtcacgcgcctgcgcgacatcgcccgcctggaactgggcgcctccgactatgcgctgcgctcgctgctcgacaacaagcaggccgtggccgtgccggtgttcgccgcgccgggctccaatgccatccagatttccgatgacgtgcaggccgtgatgaaggacctgaaaaagaacatgcccgaaggcgtggactacgagatcgtttacgacaccacccagttcgtgcgctcgtccattgaagccgtggtgcacacgctgctcgaggccgtggccctggtggtgctggtcgtgatcatctttttgcagacctggcgcgcttccatcattccgctgctggccgtgcccatctcggtcatcggcacctttgcggtgatgcatctcttcggcttttccatcaacgcgctcagcctgttcgggctggtgctggccatcggtatcgtggtggacgacgccatcgtggtggtcgaaaacgtggagcgcaatatcgaggcgggcctgagtccgcgcgacgccacctaccgcgccatgcgcgaggtgtcggggcctatcatcgcgattgccctggtgctgatcgccgtgttcgtgccgctggccttcatcaccggcctgtcgggccagttctacaagcagttcgcgctgacgattgcgatttccaccgtgatctctgccatcaattcgctgacgctgtcgccagcgctggccgccttgctgctcaagagccatgacgcaccgaaagacgcgctgacccgcggcatggacaaggtgttcggccgcttctttgccgccttcaacaaggcctttggccgcggctctgacaactacagccgcggtgtcaagggtgcgatctcgcgcaaggccgtgatgctgggcgtgtacctggtgctggtgctggccacggcaggcctgttcaaggccgttcccagcggctttgtgcccgggcaggacaagcagtacctgatcggctttgcccagttgcccgacggcgccacgctggaccgcaccgaagacgtgatccgcaagatcagcgacatcgccatgaaacaacccggcgtggaacacgcgattgctttccccggcctgtcgatcaacggcttcaccaacagctccaactcgggcatcgtgtttctctcgctcaagccgttcgatgagcgcaagagtgcggacatgagtgcaggcgccatcgccggccagctcaacggcaaattcggaggcatccaggaagcgtttatcgcgatgttcccgccgcctccggtgcagggcctgggcaccaccggcggcttcaagctgcagctggaagaccgcggctcgctcggctatgccgcgctggacgccgccaccaaggctttcatggccaaggcttatcagacgcctgaactggcggggctgttctccagcttccaggtcaacgtgccgcagctctatgccgacatcgaccgcaccaaggcgcgccaattgggtgtgccgataaccgatgtgttcgacaccatgcagatctacctgggcagcctgtacgccaacgacttcaacaagttcggccgcacctattccgtgcgggtgcaggccgatgcgccttaccgggcccgtgccgaagacatcggccagctcaaggtgcgctcgaccaccggcgagatggtgccgctgtcggcgctgatgaaagtcacgccgagcttcggccctgaacgcgccatgcgctacaacggcttcctgtcggccgacatcaatggcggcgctgcccccggctattcgtcgggccaggcgcaggatgcggtcgcgcgcatcgcggccgagacgctgccgcccggcatcagctacgagtggacggatctgacctaccaggaaatcattgccggcaactcggccatgtgggtgttcccgctggcgctgctgctggtgttcctggtgctggccgcgcagtatgaaagcttgaccctgccgatcgccatcgtgctgatcgtgcccatgggcctgctggctgccatgctgggggtgaagctgaccggtggcgacaacaacatcttcacgcagatcggtttgattgtgctggtggggctgtcggcgaagaacgccattttgattgtggaatttgcgcgcgagctggagtttgccgggcgcacgccgctgcaggctgccattgaagccagccgcctgcgcctgcgtcccattctgatgacctcgctggctttcatcatgggcgtgctgcccctggtgctgtcgacgggcgccggtgccgaaatgcgccatgccatgggcgtggccgtgttctcgggaatgattggtgtcacggcttttggcctgttcctcacgccggtgttttacgtgaccctgcgccgcctcacgggcaaccgcccgctcaagctgcatggcgaagtgccgcatctcgaggccttcgcgggcagcggcggtgccggcgcgcatgcccagccggcggcgcccctcaagcatcacgaataa

SEQ ID NO: 2810 - protein, 1065 aa, Polaromonas sp. JS666
MLSLLMLISGLIALRSLPIAEYPDVVPPTVVVRANYPGANPKVIAETVATPLEEAINGVDGMLYMSSQATTDGLMTLNVTFKLGTDPDKAQQLVQNRVSQAEPRLPEEVRRLGITTIKSSPDLTMVVHLLSPSGRYDMTYLRNYGVLNVKDRLARINGVGQVQLFGSGDYSMRVWLDPQKVAERGLSAGDVVRAIREQNIQAAAGVVGASPGLPGVDMQLSINAQGRLQSEEEFGDIIVKTEKAEKGGAVTRLRDIARLELGASDYALRSLLDNKQAVAVPVFAAPGSNAIQISDDVQAVMKDLKKNMPEGVDYEIVYDTTQFVRSSIEAVVHTLLEAVALVVLVVIIFLQTWRASIIPLLAVPISVIGTFAVMHLFGFSINALSLFGLVLAIGIVVDDAIVVVENVERNIEAGLSPRDATYRAMREVSGPIIAIALVLIAVFVPLAFITGLSGQFYKQFALTIAISTVISAINSLTLSPALAALLLKSHDAPKDALTRGMDKVFGRFFAAFNKAFGRGSDNYSRGVKGAISRKAVMLGVYLVLVLATAGLFKAVPSGFVPGQDKQYLIGFAQLPDGATLDRTEDVIRKISDIAMKQPGVEHAIAFPGLSINGFTNSSNSGIVFLSLKPFDERKSADMSAGAIAGQLNGKFGGIQEAFIAMFPPPPVQGLGTTGGFKLQLEDRGSLGYAALDAATKAFMAKAYQTPELAGLFSSFQVNVPQLYADIDRTKARQLGVPITDVFDTMQIYLGSLYANDFNKFGRTYSVRVQADAPYRARAEDIGQLKVRSTTGEMVPLSALMKVTPSFGPERAMRYNGFLSADINGGAAPGYSSGQAQDAVARIAAETLPPGISYEWTDLTYQEIIAGNSAMWVFPLALLLVFLVLAAQYESLTLPIAIVLIVPMGLLAAMLGVKLTGGDNNIFTQIGLIVLVGLSAKNAILIVEFARELEFAGRTPLQAAIEASRLRLRPILMTSLAFIMGVLPLVLSTGAGAEMRHAMGVAVFSGMIGVTAFGLFLTPVFYVTLRRLTGNRPLKLHGEVPHLEAFAGSGGAGAHAQPAAPLKHHE

SEQ ID NO: 2811 - DNA, 3156 bp, Polaromonas sp. JS666
  CDS (1)..(3156)
atgcaactcgctgaagtctccatacgccgcccggtatttgccaccgtgctgtcgctgctcatcgtgttggttggcgctgtgagtttcaatcgcctcacggtgcgtgaataccccaagatcgacgagcccgtggtcaccgtgagcgtgcgctacgccggggcctccgccgaggtgatcgagtcgcaggtgaccaagccgctggaggactccatcgcgggcattgatgcggtggatgtgatcacctccatcagccgggccgaccaggcgcagatcagcgtgcgcttccggctcgaaaaagacgccgactcagcggccgccgaggtgcgcgaccgcacctcgcgtgtgcgcaaccgcctgccgcaagcgattgacgagcccgtcattgcaaaggtcgaggctgacgccttcccggtcattcaaatcgctttttccagcgagtcgatgacgccgctgcagatcaacgacctggtcaaccgcattgtcaagccacgcctgcagaccgtgacgggtgtggccgatgtccgcatttttggggagcgcaagtacgccatgcgggtctggctggacaccgacaggctggcggcctaccggctgaccacccaggatgtcgaggatgcgatccgccgcagcaacctggagttgcctgccggccggatcgaatcgcagcagcgcgagttcagcgtgacctcgcaaaccgaccttgtgaagccttcgcaatttggcgagatcgtgatcaagaacgtcaacgggttttccgtcaaggtccgcgatgtggcccgggtgcaggagggcccggcagacgagcgcaccgccgtccggctcaacggccgctcggtggtggcggtgggcgtgattcgccaggcgacagccaatccgctcgacctgtccaagggtgtacgggacgtcattcccaggctgcgggctgacctgccaccgggcatgctgattgatattgccaatgacaattcggtcttcattgaccgttcggtcaggaacgtctaccgcacgattgccgaggcggtgggactggtggccttggtgatttttgtgtttttgcgcaccttgcgcgcctctctcattcccatcgtcaccattcctgtcagtctgattggcacttttgccctgatggccctggccggtttcaccatcaacaccctgacgctgctggccctggtgctggcgatcggccttgtcgtggatgatgccatcgtgatgctggaaaacatttttcgccacattgaagagggcatggatcccttctcggccgggatccggggtgcgcgcgaaatcggttttgcggtggtcaccatgaccgccacgctggtcgctgtgtatgcgccgctggccttcacaccggggcgcaccgggcgcctgtttgtggagtttgcactggcgctggccggtgccgtggtggtgtccggttttgtggcgctgacgctgacgcccatgctgtgtacccagctgctcaggcacaaccccaagcccaatctgtttgaccgcacgatggaacgcgtgctgacggccacctctgaccgctatggcgctgtgctgcgctggctggtcaccatgcgctaccaacccgcggccgctggcggcatggggcagcggatcaagggctgggtatttcaggcgcgctggttggtggtgggggtgatgctgctcagcggactggcgatcgcgttggttttcccgtccatgaagcaggaactctcgcccatcgaagaccgcggcgtgatcctggccaacgtcaatgcgcccgacggcgccaccctggactacaccaaccggtatgcccaggcgcttgagaaaatggggcagtccttcaaggagtttgaccgcatcttcgccaacgtgggtaatccgacggttgcgcaggccagtgtggtgtatcggacggtggactgggacgaccgcaagcgcaccaccatggagatggcgcgtgagttgcaaccgaaattcaacgcgctgcctggcgttacggcctttccgatcacgccgccttctctcggccagggctttcgcgagcggcccctcaattttgtgatccagacctcggacagctaccagaacctgaacacggtcgtgcgccagatgctcgatgagattgccaaaaatcccggcatcgtctctcccgatgtggacttgcgcctgaacaagcccgaactgcgcatcgaggtggagcgcgacaaggcggctgatttgggcgtgagcgtcgaagtggtggccaaggcgattgaaaccctgctgggtggacgcaatgtgacgcgctacaagcgtgatgccgagcagtacgatgtgatcgtgcagacccaggccagcgggcgcagcacacccgaagacattgaccgcatatacgtgcgcggccgcaacgacgtggtgataccgctgtcggccttggtgaaagtgcatgaaagcgtgtcaccacgcgagctgaaccacttcggccagcgccggtcggtgtcgattaccgccagcctggcggccgactactcgctgggtgaggccctgaagttcatggaccagaccgcagccaaggtgctgaagacgggctacagcaccgacttgaacggcacctcccgcgagttcaggaactcccaaggcgcgctggcgattgttttcgtgctggcgctggtgtttattttcctggtgctgtctgcacagttcgagagctttatcgacccgctggtgatcatgctgtcggtcccgctgtccatgattggcgcgttgctggccctgaaatggagcggcggctcgctcaacgtgtattcgcagatcgggctgatcacgctggtggggctgatcaccaagcacggcatcctgattgtcgagttcaccaaccagctgcgcgggcagggcatggagatggttgatgcgctcgtgaaggcgtcgtcgcagcgtttgcgcccgatcctgatgaccaccggcgccatggtgctgggtgccgtgcccctggcgctggcggatggcgccggcgctgaaagccgcatccagatcggctgggtcattgtgggcggcatgtcgttgggcaccttgctgaccatttttgtcgtgccaaccatgtattcgctgtttgcccgcgccaaaatcccgggtgccaacaaggccgtggtcaaggatgcgggagcgcaccacaagggcgatctggtagcaaaatag

SEQ ID NO: 2812 - protein, 1051 aa, Polaromonas sp. JS666
MQLAEVSIRRPVFATVLSLLIVLVGAVSFNRLTVREYPKIDEPVVTVSVRYAGASAEVIESQVTKPLEDSIAGIDAVDVITSISRADQAQISVRFRLEKDADSAAAEVRDRTSRVRNRLPQAIDEPVIAKVEADAFPVIQIAFSSESMTPLQINDLVNRIVKPRLQTVTGVADVRIFGERKYAMRVWLDTDRLAAYRLTTQDVEDAIRRSNLELPAGRIESQQREFSVTSQTDLVKPSQFGEIVIKNVNGFSVKVRDVARVQEGPADERTAVRLNGRSVVAVGVIRQATANPLDLSKGVRDVIPRLRADLPPGMLIDIANDNSVFIDRSVRNVYRTIAEAVGLVALVIFVFLRTLRASLIPIVTIPVSLIGTFALMALAGFTINTLTLLALVLAIGLVVDDAIVMLENIFRHIEEGMDPFSAGIRGAREIGFAVVTMTATLVAVYAPLAFTPGRTGRLFVEFALALAGAVVVSGFVALTLTPMLCTQLLRHNPKPNLFDRTMERVLTATSDRYGAVLRWLVTMRYQPAAAGGMGQRIKGWVFQARWLVVGVMLLSGLAIALVFPSMKQELSPIEDRGVILANVNAPDGATLDYTNRYAQALEKMGQSFKEFDRIFANVGNPTVAQASVVYRTVDWDDRKRTTMEMARELQPKFNALPGVTAFPITPPSLGQGFRERPLNFVIQTSDSYQNLNTVVRQMLDEIAKNPGIVSPDVDLRLNKPELRIEVERDKAADLGVSVEVVAKAIETLLGGRNVTRYKRDAEQYDVIVQTQASGRSTPEDIDRIYVRGRNDVVIPLSALVKVHESVSPRELNHFGQRRSVSITASLAADYSLGEALKFMDQTAAKVLKTGYSTDLNGTSREFRNSQGALAIVFVLALVFIFLVLSAQFESFIDPLVIMLSVPLSMIGALLALKWSGGSLNVYSQIGLITLVGLITKHGILIVEFTNQLRGQGMEMVDALVKASSQRLRPILMTTGAMVLGAVPLALADGAGAESRIQIGWVIVGGMSLGTLLTIFVVPTMYSLFARAKIPGANKAVVKDAGAHHKGDLVAK

SEQ ID NO: 2813 - DNA, 3114 bp, Burkholderia vietnamiensis G4
  CDS (1)..(3114): transl_table=11
atgaatccatcccgcctgttcattctccggccggtcggcactgcgctgctgatggctgcgatcatgctggccggcctcgtcgcgttgcgcttcctgccgctcgccgcgctgcccgaagtcgactatccgacgatccaggtccagaccttctatccgggcgcgagcccggaggtgatgacgtcgtcggtcaccgcgccgctcgagcggcagttcgggcagatgccgtcgctgaaccagatgtcgtcgcagagctcggccggcgcatcggtgatcacgctgcagttctcgctcgacctgccgctcgacatcgccgagcaggaagtgcaggccgcgatcaacgcggccggcaacctgctgccgtccgatctccctgccccgccgatctatgcgaaggtgaacccggccgacgcgccggtgatcacgctcgcgatcacgtcgaagacgctgccgctcacgcaggtgcaggacctgaccgacacgcgcctcgcgatgaagatctcgcagatcgcgggcgtcggcctggtgagcctgtcgggcggcaaccggccggccgtgcggatccaggcgaacccgaccgcgctcgcgaagtacgggatgaacctcgacgatctgcgcacgacgatctcgaacctgaacgtcaacacgccgaagggcaatttcgacggcccgacgcgcgcctacacgatcaacgcgaacgaccagctcacgagcgccgaccagtacaacgacgcggtggtcgcatacaagaacggccgcccggtgatgctcaccgacgtcgcgcagatcgtcgccggctcggagaacaccaagctcggcgcctgggtgaatgcggagccggcgatcatcctgaacgtgcagcgccagccgggcgcgaacgtgatcgcgaccgtcgacgcgatcaaggcgcagttgccgaagctccaggagacgctgcccgccgcactcgacgtgcagatcgtcaccgaccgcacgacgatgatccgcgccgccgtgcgcgacgtgcagttcgagctgctgctcgcggtcgcgctggtcgtgctggtgatgtacctgttcctcgcgaacgtgtacgcgacgctcatcccgagcctgtcggtgccgctgtcgctgatcggcacgctggcggtgatgtacatggccggcttctcgctgaacaacctgtcgctgatggcgctcaccatcgcgaccggcttcgtcgtcgacgatgcgatcgtgatgatcgagaacatcgcgcgctacgtcgaggaaggcgactccgggctcgaggccgcgctgaagggttcgaagcagatcggcttcacgatcatctcgctgacggtgtcgctgatcgccgtgctgatcccgctgctgttcatgggcgacgtggtcggacgcctgttccacgaattcgcgatcacgctcgcggtgacgatcgtgatctcggcgatcgtgtcgctcacgctcgtgccgatgatgtgcgcgacgctgctgcgccattcgccgccgcatgaaagccatcgcttcgaagcgcgcgtgcaccgcgcgatcgactgggtgatcgcccgctacgcggtcgcgctcgaatgggtgctgaaccgccagcgctcgacgctggtggtcgcgctgctcacgctcgcgctgaccgcgctgctctacgtgtacgtgccgaagggcttctttcccgcgcaggacaccggcgtgatccaggcaatcacgcaggcgccgcagtcgatctcgtacggcgcgatggccgagcgccagcaggcgctcgccgccgagatcctgaaggatccgaacgtcgagagcctcacgtcgttcatcggcgtcgacggcaccaacatcacgctgaacagcggccgcatgctgatcaacctgaaggcgcgcgacgcgcgcagcgagtcggccgcgcagatcattcgcgacctgcagcggcgcgtcgcgaacgtgaccggcatctcgctgttcatgcaggccgtgcaggatctgacgatcgactcgaccgtgagcccgacgcaataccagttcatgctgacgagcccgaaccccgaagagttcgcgacctgggtgccgaagctcgtcgcgcggctgcagcaggagccgtcgctcgccgacgtcgcgaccgatctgcagagcaacgggcagtcggtctacgtcgagatcgaccgcgcgagcgccgcgcgtttcggcatcacgccggcgaccgtcgacaacgcgctgtacgacgcgttcggccagcgcatcgtgtcgaccatcttcacgcagtcgaaccagtaccgcgtgattctcgaatcggagccgcgcgagcagcattacgcgcagtcgctgaacgacatctatctgccgtcggccggcggcggccaggtgccgctcgcgtcgatcgcgacgttccacgaacggccgtcgccgctgctggtcgcgcacctgtcgcagttcccgtcgacgacgatctcgttcaacctcgcgccgggcgcgtcgctcggcgaggccgtgaaggcgatcggcgcggccgagcacgacatcggcctgcccggctcgttccagacgcgcttccagggcgcggcgctcgcgttccaggcgtcgctgtcgaaccagctgttcctgatcctcgcggcgatcgtcacgatgtacatcgtgctcggcgtgctgtacgagagctacatccatccgatcacgatcctgtcgaccctgccgtcggccggcgtcggcgcgctgctcgcgctgatgatcaccggccacgacctcgacatcatcggcatcatcggcatcgtgctgctgatcggcatcgtcaagaagaacgcgatcatgatgatcgacttcgcgctcgaagccgagcgcgtcgaaggcaagccgccgcgcgaggcgatctaccaggcgtgcctgctgcgcttccggccgatcctgatgacgacgctcgccgcgctgctcggcgcggtgccgctgatcgtcggcgccggcgcgggctccgagctgcgccagccgctcggcatcgcgatcgcgggcggcctgatcgtgtcgcaggtgctgacgctgttcacgacgccggtgatctatctcggcttcgacagcctcgcgcgccggacgcgcggctggttcgagcggcacggccccggcgccggcaagcggaccggtgcgtaa

SEQ ID NO: 2814 - protein, 1037 aa, Burkholderia vietnamiensis G4
MNPSRLFILRPVGTALLMAAIMLAGLVALRFLPLAALPEVDYPTIQVQTFYPGASPEVMTSSVTAPLERQFGQMPSLNQMSSQSSAGASVITLQFSLDLPLDIAEQEVQAAINAAGNLLPSDLPAPPIYAKVNPADAPVITLAITSKTLPLTQVQDLTDTRLAMKISQIAGVGLVSLSGGNRPAVRIQANPTALAKYGMNLDDLRTTISNLNVNTPKGNFDGPTRAYTINANDQLTSADQYNDAVVAYKNGRPVMLTDVAQIVAGSENTKLGAWVNAEPAIILNVQRQPGANVIATVDAIKAQLPKLQETLPAALDVQIVTDRTTMIRAAVRDVQFELLLAVALVVLVMYLFLANVYATLIPSLSVPLSLIGTLAVMYMAGFSLNNLSLMALTIATGFVVDDAIVMIENIARYVEEGDSGLEAALKGSKQIGFTIISLTVSLIAVLIPLLFMGDVVGRLFHEFAITLAVTIVISAIVSLTLVPMMCATLLRHSPPHESHRFEARVHRAIDWVIARYAVALEWVLNRQRSTLVVALLTLALTALLYVYVPKGFFPAQDTGVIQAITQAPQSISYGAMAERQQALAAEILKDPNVESLTSFIGVDGTNITLNSGRMLINLKARDARSESAAQIIRDLQRRVANVTGISLFMQAVQDLTIDSTVSPTQYQFMLTSPNPEEFATWVPKLVARLQQEPSLADVATDLQSNGQSVYVEIDRASAARFGITPATVDNALYDAFGQRIVSTIFTQSNQYRVILESEPREQHYAQSLNDIYLPSAGGGQVPLASIATFHERPSPLLVAHLSQFPSTTISFNLAPGASLGEAVKAIGAAEHDIGLPGSFQTRFQGAALAFQASLSNQLFLILAAIVTMYIVLGVLYESYIHPITILSTLPSAGVGALLALMITGHDLDIIGIIGIVLLIGIVKKNAIMMIDFALEAERVEGKPPREAIYQACLLRFRPILMTTLAALLGAVPLIVGAGAGSELRQPLGIAIAGGLIVSQVLTLFTTPVIYLGFDSLARRTRGWFERHGPGAGKRTGA

SEQ ID NO: 2815 - DNA, 3294 bp, Solibacter usitatus Ellin6076
  CDS (1)..(3294): transl_table=11
gtgagcccttcccgtactttcattcttcgtcccgtggcgacttccctcctgatggtgggcattctgctggcaggaatcgtcgcctatcaacagcttccggtgtcggcgttgcccgaagtggactatccgacaatccaggtcaccacgttttatcccggcgccagtcccgacgtcatggcctcctccgtgaccgcgccgctggagcgccagttcggccaggtacccggactccagcagatgacctccactagttcggacggcgcgagcgtcattacattgcaattcaaattgagcctgaacatcgatgtggccgagcaggaagtgcagcaatcgatcaacgcgtcgggaacatttctaccgcctgacctgccgaccccgccgctgtacagcaagaccaatccggcggacaccccgattctgacgctgtcgctgacctctaagacaatggcgctttcaaaggtggaggacctggccgatacgcggctggcgcccaagatttcgcagttgcccggcgttggcctggtcacgatcagcggcggtcaaaagccggcggtacggattcaggcgaaccccacgatgctggcctcgtacggcctcaatctggaggacgtgcgcagcgcgattacagccgccaacgtgaatcaggcgaagggcacgttcgacgggcgctttcagagttaccagatcggcgccaacgaccaactgctctccagcagcgactactccaccgtaatcctggcgtaccgcaacggcgcgcccgtgaagctcaccgacgtggcggtggtgaaggacgataccgagaacaccaggcaggcggcgtggatgaaccagtcgccggccgtgatcgtcaacatccagcgtcaacccggggccaacattatcgcggtagtggacggcgtgaagaagctgctgccgcagctcaccgcaaccctgccgcgcgacgtggagatgaaggttctcaccgaccgcaccaacaccattcgcgcctcggtgaaggacgtggaattcgaactcggcctcaccgtggtgctggtgatcctggtgatcttcgtcttccttcgcaatttctccgcgaccatcattccaagcgttgcggtaccgctttcgctggtaggtacgctcgccatcatgtacctgctcgggtatagcctcaacaacctcactctcatggcgctgaccatctcgacaggctttgtggtggacgacgcgatcgtgatgatcgagaacatcgaacgctatatcgagcagggggagaagcctctcgccgccgcgctgaagggcagcgagcagatcggcttcacaattatttcattgacggtctcgctgatcgcggtgctgatccccctgttgttcatgggcgatatcgtgggccggctgttccgcgaattcgccgttaccttgagcgtgaccatcctggtctcggccgtagtatccctcacgctcactccgatgatggccgccaagcttttgaagcaccgcacgcaggcacaggaaggccgattctaccgggccagcgagaacgccttcaacaagatcatcgagtattacggcaagacgctgaccttcgtgctgcgccaccagaccaccaccctgcttgttgcggtcggcactctgggagtcacgatcctgctgttcatggtgatcccgaagggcttcttcccgattcaggataccggcgtgatccagggcatctcggaggctgcgcagaccgtatcgttccccgaaatgtcggcacgccagcaggcgctcacgaagatcattttgcaggatcccgcggtagagagcctctcctccttcatcgggatcgatggcaccaacaatacgctcaatagcggacgcatccagatcaatctcaagccgctcgaggagcggcaccagaatgcctccgaagtgatccgccggctgcagccgaagctcgccgaagtggcgggaatcacgctcttcatgcagccggtgcaggacctgagcgtggaagatcgcgttagccggacgcagttccagtacacgctggaaaatccgaatgtggacgatctgaacacctacgctccgcgcatgctcgagaagctcaaggccctgccggaactgcgtgacgtggccagcgatcagcaggatcagggccttcgcgcccaactggtttacgatcgcgacaccgcgtcgcgtctcggcatcacgccgaccaccatcgaccagacgctctacgacgcctacggccagcggcaggtctccaccatcttcacgcagttgaaccagtatcacgtggtgttggaactgatgcccggcttccagcggaacccgatggacctgcgcgacctctacatccgcaccggagccaccgccaccagcggcgcgtcggggctggtctccggcggatcctccactaccggtctctcgcgcgggcccaccaactccggagccaacgcggccaccagcattgtcaccggcgggtcgggcgcgaacgcatccagtaccgcgttcaacgggaccaacgcggcgtcggcggcatttcccaacggcggacaggtgcctcttggcgcgttctcgcatgtggaactggccagcgctcccatcacggtgaatcaccagggacagttccccgtggtaacgctctccttcaacctggcgccgaatgcctcgctgggtgaagccatgaacgccgtgaaccgcgcgaaggaagagatcggcctgccggccagtttccaggcggagttccagggaacagcggcggccttccaggcatcgctcgccaatgagcccgtgctgattctggcggctctggtcacagtctatatcgtgctcggcgtgctgtacgaaagctacatccacccgatcacgattctctccacgctgccatcagcaggcgtgggcgcgctgctggcgctgatcatctgccgccaggatttcagcgtgattgcattgatcggcatcgtcctgttgatcggcatcgtgaagaagaacgccatcatgatgatcgatttcgcgctcgaggcggagcgcgaggaaggcaaggcgccccctgacgcgatattccaggcagcgatgctgcgcttccgccccatcatgatgaccacgatggcggcgctgctgggcgcggtcccgctggcgctgggctccggcaccgggagcgagctgcggcggcctttaggcatcgccatcatcggcggcctgatcctcagccaggcgctgacgctatacaccactcccgtaatctacctgtggttcgaacgcctggcacggcgcttctcgcgctcgcatgaacccgaaccgggcggcgaactttccccggcacagtcatga

SEQ ID NO: 2816 - protein, 1097 aa, Solibacter usitatus Ellin6076
MSPSRTFILRPVATSLLMVGILLAGIVAYQQLPVSALPEVDYPTIQVTTFYPGASPDVMASSVTAPLERQFGQVPGLQQMTSTSSDGASVITLQFKLSLNIDVAEQEVQQSINASGTFLPPDLPTPPLYSKTNPADTPILTLSLTSKTMALSKVEDLADTRLAPKISQLPGVGLVTISGGQKPAVRIQANPTMLASYGLNLEDVRSAITAANVNQAKGTFDGRFQSYQIGANDQLLSSSDYSTVILAYRNGAPVKLTDVAVVKDDTENTRQAAWMNQSPAVIVNIQRQPGANIIAVVDGVKKLLPQLTATLPRDVEMKVLTDRTNTIRASVKDVEFELGLTVVLVILVIFVFLRNFSATIIPSVAVPLSLVGTLAIMYLLGYSLNNLTLMALTISTGFVVDDAIVMIENIERYIEQGEKPLAAALKGSEQIGFTIISLTVSLIAVLIPLLFMGDIVGRLFREFAVTLSVTILVSAVVSLTLTPMMAAKLLKHRTQAQEGRFYRASENAFNKIIEYYGKTLTFVLRHQTTTLLVAVGTLGVTILLFMVIPKGFFPIQDTGVIQGISEAAQTVSFPEMSARQQALTKIILQDPAVESLSSFIGIDGTNNTLNSGRIQINLKPLEERHQNASEVIRRLQPKLAEVAGITLFMQPVQDLSVEDRVSRTQFQYTLENPNVDDLNTYAPRMLEKLKALPELRDVASDQQDQGLRAQLVYDRDTASRLGITPTTIDQTLYDAYGQRQVSTIFTQLNQYHVVLELMPGFQRNPMDLRDLYIRTGATATSGASGLVSGGSSTTGLSRGPTNSGANAATSIVTGGSGANASSTAFNGTNAASAAFPNGGQVPLGAFSHVELASAPITVNHQGQFPVVTLSFNLAPNASLGEAMNAVNRAKEEIGLPASFQAEFQGTAAAFQASLANEPVLILAALVTVYIVLGVLYESYIHPITILSTLPSAGVGALLALIICRQDFSVIALIGIVLLIGIVKKNAIMMIDFALEAEREEGKAPPDAIFQAAMLRFRPIMMTTMAALLGAVPLALGSGTGSELRRPLGIAIIGGLILSQALTLYTTPVIYLWFERLARRFSRSHEPEPGGELSPAQS

SEQ ID NO: 2817 - DNA, 3216 bp, Xylella fastidiosa Dixon
  CDS (1)..(3216): transl_table=11
gtgggcttttcgacgatctttatccgccgcccaatcgccacttcactgctgatgttcggcgtactcctacttgggatcctgggctacaagaaattaccgatgtcggcactccctgaggtcgatgcacctagcctggtcgtcaccacccagtatccgggtgccaacgccaagacaatggccgcattggtgaccaccccactagaacatcagctcgggcagatttctggcttggacatgatgagttctgattcctccgctgggttatcaacaataaccctgcaattctcaacacacaaaaatctcgacatcgccgcacaagacgtacaagcagcgatccatcaggccaccctgccctcaacattacctcaccaaccgatctacaaccgggtgaatccagctgacgcggccatcatcaccctcaaactcacctctgataccctgccactacgcgaactcaatacatacgcagacgctatcctggcacaacgcctctcacaaatatcaggcgttggtctggtctcgattgctggcaacgtccgaccagcggtgcgtatccaagtgaatccggcgcagctatccaacatgggcctgaccatggaatcgctgcgcaatacgctgacccaagccaacgtcaacgcacctaaaggctcgctcaatggcaagaaccagtcctacagcatcggtaccaacgatcagctgaaagatgcttcgcaatatcgggacaccatcatccattaccaaaatggacatccggttcgcctctcagaggtcgccaatgtggtggacggcgtcgaaaatgaccagatctccgcttgggccaacgcaaaaccagccgtgctgctggagattcgccgccagcccggcgccaacattattcagaccgtcgaacaaatccgcgcgatcctgccgcagttgcgtgcggtactacctaatgatgtccatcttgacgttttctccgaccgcaccgagaccatccgctcttccgtgcatgaagtgaaattcaccctgctactgaccattggtctggtggtcgctgtgatctttgtattcctgcgccgactatgggccacgctcattccatcggtggcggtccccctatcactggccggcaccttcagcgtgatggcgttcaacgggatgtcactagacaacttctccctgatggcactggtcgtcgccaccggctttgtcgttgatgacgcgattgtgatgatcgaaaacatcgtccgctacattgaacaaggcaagagcggacgcgaagcagcggagattggagcacgtcaaattggtttcaccatactctcgctcaccatttcgctggtcgccgtgtttctccccctgctgttgatgcctggcgtcaccggccgactgttccacgagttcgcctgggtcctgtcgaccgccgtcgtcatctcgatgctggtatcactgaccctgacaccgatgatgtgtgcctacctactcaaacccgatactctgcccgaaggtgatagcccaacaccaagcaccaagatcaccctgtggacacgcactgtcgcactatacgaacgcaccttagactgggtgctgatgcaccaacaactgaccttagttgtagcactagtgacagtagcactcaccatcgtactgtatgtaacgatccccaaggggctactgccagaacaagacactggactcatcatcggcgttgtgcaagccgaccaggacatcgcattctcacagatggaacagcgtacccgggccgtggccgatgcactgcgcaaggatcccgccgtgacaggcgtctccgcatttatcggtgccggcaccatcaaccccacactcaatcatggccaactatcgatcgttctcaagccacgcaaccaacgtgaggggttgaacaccatacgcccacgactgcaacgcgccgcagccggcatcccaggcatcgtcctctatctaaagccggtacaggatgtgactctggatacccacgtcgctgcaaccgaataccaatactcactctcaaacgtcgatgcaacggagctggctacctgggccacacgcatgaccgaggcaatgcgccagattccggcactggccgacgtagacaacaacttggccgaccaagggcgtgccttacagatcactgttgatcgtgataaagccagcctccttggcgtaccgatgcagactatcaacgacaccctatatgacgcattcggccagcgccaaatctccacgattttcaccgaactcaaccaatatcgggtcgtcctggaagtggccccacacttccgcaccagcaccgcactgatgcagcaactgggagtcgccagcaacggcagcggcgcactgactggcagcaatgccacgagcttcggccaagccgtctcatcaaactcttccacggccacaggtattggcaacctcaacaccggaatgaccgtcggtactggccgtatcatcccgctgtcagcccttgccgatgctaaggtcaccaacgctcctcgcgttatcagccatcagcagcaacttcccgccgtaacgatctcattcaacctggcccaggggtattccctctcccatgccgtgaaagccatcgaacaggcacgtacccaactacagatacctccccaggtacgcgcccagttcatcggtaaagccgtcgaattcaccagtagccagagtgacatcgtgtggttgctgctcgcttcgattgtggtgatctacatcgtgctgggggtgctatacgaaagttatatccatccgctgacgatcatctccacactaccgtcggcaggcgttggcgcattgctggcactgatgctctgcggactgagcctgtcggtggatagcattgtcggtatcgtgctgctgattggtatcgtcaagaaaaacgcaatcatgatgattgacttcgccatcgaagcacgcagcacagggagcagcgcccacgatgcgatccgccgcgcctgtctgttgcgcttccgtccgatcatcatgactactgccgccgcactgctcggcgcattaccgctagcactgagcgacggcatcggctcggaattgcgccgtccactgggcattactattgtcggtggcttgctgctatcgcagttgatcaccttgtacaccacgcctgtcatctacctgttcttcgaacggttatccgagcgcctacgcctctggcgtacacaccgtacctcgatccaggccacaccacagcgcgtatga

SEQ ID NO: 2818 - protein, 1071 aa, Xylella fastidiosa Dixon
MGFSTIFIRRPIATSLLMFGVLLLGILGYKKLPMSALPEVDAPSLVVTTQYPGANAKTMAALVTTPLEHQLGQISGLDMMSSDSSAGLSTITLQFSTHKNLDIAAQDVQAAIHQATLPSTLPHQPIYNRVNPADAAIITLKLTSDTLPLRELNTYADAILAQRLSQISGVGLVSIAGNVRPAVRIQVNPAQLSNMGLTMESLRNTLTQANVNAPKGSLNGKNQSYSIGTNDQLKDASQYRDTIIHYQNGHPVRLSEVANVVDGVENDQISAWANAKPAVLLEIRRQPGANIIQTVEQIRAILPQLRAVLPNDVHLDVFSDRTETIRSSVHEVKFTLLLTIGLVVAVIFVFLRRLWATLIPSVAVPLSLAGTFSVMAFNGMSLDNFSLMALVVATGFVVDDAIVMIENIVRYIEQGKSGREAAEIGARQIGFTILSLTISLVAVFLPLLLMPGVTGRLFHEFAWVLSTAVVISMLVSLTLTPMMCAYLLKPDTLPEGDSPTPSTKITLWTRTVALYERTLDWVLMHQQLTLVVALVTVALTIVLYVTIPKGLLPEQDTGLIIGVVQADQDIAFSQMEQRTRAVADALRKDPAVTGVSAFIGAGTINPTLNHGQLSIVLKPRNQREGLNTIRPRLQRAAAGIPGIVLYLKPVQDVTLDTHVAATEYQYSLSNVDATELATWATRMTEAMRQIPALADVDNNLADQGRALQITVDRDKASLLGVPMQTINDTLYDAFGQRQISTIFTELNQYRVVLEVAPHFRTSTALMQQLGVASNGSGALTGSNATSFGQAVSSNSSTATGIGNLNTGMTVGTGRIIPLSALADAKVTNAPRVISHQQQLPAVTISFNLAQGYSLSHAVKAIEQARTQLQIPPQVRAQFIGKAVEFTSSQSDIVWLLLASIVVIYIVLGVLYESYIHPLTIISTLPSAGVGALLALMLCGLSLSVDSIVGIVLLIGIVKKNAIMMIDFAIEARSTGSSAHDAIRRACLLRFRPIIMTTAAALLGALPLALSDGIGSELRRPLGITIVGGLLLSQLITLYTTPVIYLFFERLSERLRLWRTHRTSIQATPQRV

SEQ ID NO: 2819 - DNA, 3216 bp, Xylella fastidiosa Ann-1
  CDS (1)..(3216): transl_table=11
gtgggcttttcgacgatctttatccgccgcccaatcgccacttcactgctgatgttcggcgtactcctacttgggatcctgggctacaagaaattaccgatgtcggcactcccggaggtcgatgcacctagcctggtcgtcaccacccagtatccgggtgccaacgccaagacaatggccgcattggtgaccaccccactagaacatcagctcgggcagatttctggcttggacatgatgagttctgattcctcggctggcttatcaacaataaccctgcaattctcaacacacaaaaatctcgacatcgccgcacaagacgtacaagcagcgatccatcaggccaccctaccctcaacattacctcaccaaccgatctacaaccgggtgaatccagctgacgcggccatcatcaccctcaagctcacctctgataccctgccactacgcgaactcaatacatacgcagacgctatcctggcacaacgcctctcacaaatatcaggcgttggtctggtctcgattgctggcaacgtccgaccagcggtgcggatccaagtgaatccggcgcagctatccaacatgggcctgaccatggaatcgctgcgcaatacactgacccaagccaacgtcaacgcacctaaaggctcgctcaatggcaaaaaccagtcctacagcatcggtaccaacgatcagctgaaagatgcttcgcaatatcgggacaccatcatccattaccaaaatggacatccggttcgcctctcagaggtcgccaatgtggtggacggcgtcgaaaatgaccagatctccgcttgggccaacgcaaaaccagccgtgctgctggagattcgccgccagcccggcgccaacattattcagaccgtcgaacaaatccgcgcgatcctgccgcagttgcgtgcggtactacctaatgacgtccatcttgacgttttctccgaccgtaccgagaccatccgctcttccgtgcatgaagtgaaattcaccctgctactgaccattggtctggtggtcgctgtgatctttgtattcctacgccgactatgggccacgctcattccatcggtggcggtccccctatcactggccggcaccttcagtgtgatggcgttcaacgggatgtcactagacaacttctccctgatggcactggtcgtcgccaccggctttgtcgttgatgacgcgattgtgatgatcgaaaacatcgtccgctacattgaacaaggcaagagcggacgcgaagcagcggagattggagcacgtcaaattggtttcaccatactctcgctcaccatttcgctggtcgccgtgtttctccccctgctgttgatgcctggcgtcaccggccgactgttccacgagttcgcctgggtcctgtcgaccgccgtcgtcatctcgatgctggtatcactgaccctgacaccgatgatgtgtgcctacctactcaaacccgatactctgcccgaaggcgatagcccaacacaaatcaccaagatcaccctgtggacacgcactgtcgcactatacgaacgcaccttagactgggtgctgatgcaccaacaactgaccttagttgtagcgctagtgacagtagcactcaccatcgtgctgtatgtaacgatccccaaggggctactgccagaacaagacactggactcatcatcggcgttgtgcaagccgaccaggacatcgcattctcacaaatggaacagcgtacccgggccgtggccgatgcactgcgcaaggatcccgccgtgacaggcgtctccgcatttatcggtgccggcaccatcaaccccacactcaatcatggccaactatcgatcgttctcaagccacgcaaccaacgtgaggggctgaacaccatacgcccacgactacaacgcgccgcagccggcatcccaggcatcgtcctctatctaaagccggtacaggatgtgactctggatacccacgtcgctgcaaccgaataccaatactcactctcaaacgtcgatgcaacggagctggctacctgggccacacgcatgaccgaggcaatgcgccagattccagcactagccgacgtagacaacaacttggccgaccaagggcgtgccttacagatcactgttgatcgtgataaagccagcctccttggcgtaccgatgcagacgatcaacgacaccctatatgacgcattcggccagcgccaaatctccacgattttcaccgaactcaaccaatatcgggtcgtcctggaagtggccccacacttccgcaccagcaccgcactgatgcagcaactgggagtcgccagcaacggcagcggcgcactgactggcagcaataccacgagcttcggccaagccgtctcatcaaactcttccacggccacaggtattggcaacctcaacaccggaatgaccgtcggtactggccgtatcatcccgctgtcagcccttgccgatgctaaggtcaccaacgctcctcgcgttatcagccatcagcagcaacttcccgccgtaacgatctcattcaacctggcccaggggtattccctctcccatgcagtgaaagccatcgaacaggcacgtacccaactacagatacctccccaggtacgcgctcagttcatcggtaaagccgtcgaattcaccagtagccagagtgacatcgtgtggttgctgctcgcttcgattgtggtgatctacatcgtgctgggggtgctatacgaaagttatatccatccgctgacgatcatctccacactaccgtcggcaggcgttggcgcattgctggcactgatgctctgcggactgagcctgtcggtggatagcattgtcggtatcgtgctgctgattggtatcgtcaagaaaaacgcaatcatgatgattgacttcgccatcgaagcacgcagcaccgggagcagcgcccacgatgcgatccgccgcgcctgtctgttgcgcttccgtccgatcatcatgactactgccgccgcactgctcggcgcattaccgctagcactgagcgacggcatcggctcggaattgcgccgtccactgggcattactattgtcggtggcttgctgctatcgcagttgatcaccttgtacaccacgcctgtcatctacctgttcttcgaacggttatccgagcgcctacgcctctggcgtacacaccgtacctcggtccaggccacaccacagcgcgtatga

SEQ ID NO: 2820 - protein, 1071 aa, Xylella fastidiosa Ann-1
MGFSTIFIRRPIATSLLMFGVLLLGILGYKKLPMSALPEVDAPSLVVTTQYPGANAKTMAALVTTPLEHQLGQISGLDMMSSDSSAGLSTITLQFSTHKNLDIAAQDVQAAIHQATLPSTLPHQPIYNRVNPADAAIITLKLTSDTLPLRELNTYADAILAQRLSQISGVGLVSIAGNVRPAVRIQVNPAQLSNMGLTMESLRNTLTQANVNAPKGSLNGKNQSYSIGTNDQLKDASQYRDTIIHYQNGHPVRLSEVANVVDGVENDQISAWANAKPAVLLEIRRQPGANIIQTVEQIRAILPQLRAVLPNDVHLDVFSDRTETIRSSVHEVKFTLLLTIGLVVAVIFVFLRRLWATLIPSVAVPLSLAGTFSVMAFNGMSLDNFSLMALVVATGFVVDDAIVMIENIVRYIEQGKSGREAAEIGARQIGFTILSLTISLVAVFLPLLLMPGVTGRLFHEFAWVLSTAVVISMLVSLTLTPMMCAYLLKPDTLPEGDSPTQITKITLWTRTVALYERTLDWVLMHQQLTLVVALVTVALTIVLYVTIPKGLLPEQDTGLIIGVVQADQDIAFSQMEQRTRAVADALRKDPAVTGVSAFIGAGTINPTLNHGQLSIVLKPRNQREGLNTIRPRLQRAAAGIPGIVLYLKPVQDVTLDTHVAATEYQYSLSNVDATELATWATRMTEAMRQIPALADVDNNLADQGRALQITVDRDKASLLGVPMQTINDTLYDAFGQRQISTIFTELNQYRVVLEVAPHFRTSTALMQQLGVASNGSGALTGSNTTSFGQAVSSNSSTATGIGNLNTGMTVGTGRIIPLSALADAKVTNAPRVISHQQQLPAVTISFNLAQGYSLSHAVKAIEQARTQLQIPPQVRAQFIGKAVEFTSSQSDIVWLLLASIVVIYIVLGVLYESYIHPLTIISTLPSAGVGALLALMLCGLSLSVDSIVGIVLLIGIVKKNAIMMIDFAIEARSTGSSAHDAIRRACLLRFRPIIMTTAAALLGALPLALSDGIGSELRRPLGITIVGGLLLSQLITLYTTPVIYLFFERLSERLRLWRTHRTSVQATPQRV

SEQ ID NO: 2821 - DNA, 3135 bp, Xanthobacter autotrophicus Py2
  CDS (1)..(3135): transl_table=11
atgaatatctccgctcctttcatccatcgccccatcgccaccacgttgctgatggcggccctcgtcctcgtgggcgctgtggcctatgccatgctgccggtggcgccgctgccgcaggtggacttcccgaccatccaggtgtcggcgagcctgccgggcgcgagcccagagaccatggcgtcgtcggtctccacgccgctggagcggcagttcagccagatttccggcgtcacccagatgacgtccacaagcgcgctcggcgtcacctccatcaccgtccagttcgacctcaaccgcaacattgacgccgcggcgcaggacgtgcagtcggccatcaacgcggccgccggccaattgcccaagaacctccccagcccgcctacgttccgaaaggtcaatccggccgatgcgccgatcctgatcctgtcggtgcagtcggacctctacccgctgaccaagctcgacgatgccgccgacaccattctggcgcagcagatcagccagatcgccggcatcgcgcaggttgcgatcaccggcgagcagaagccggcggtgcgggtgcaggtggacccctccaagatcgcggccctcggcatgagccttgaggatgtgcgggccgtgctcgccgccgccaccgtggaccagcccaagggcagtttcgacggcgcggcccagggcttcaccatctatgccgacgaccaactcctcgctgccacgccctggaacgaggtggttgtagcctatcgcaacggcgcgccggtgcgcatccgcgacatcggccgggccgtggacggccccgagaatgcgcgcctcgcctcgtggcagaacggcaagcgcggcatccagctcatcgtgttcaagcagcccggcgccaatgtgatcgagaccgtggaccgggtgcgcgccatgatcccgcgcctcgaggcggcgctgccgccgggcatcaatgtggagatcatcgccgaccggacccagaccatccgcgcctcggtggaggacgtgcagttcaccatgctgcttaccatcgcgctggtggtgggggtgatcttcgccttcctgcgcaacctgtgggcgacggtgatcccctccgtcacggtgcctatggcgctgatcggcaccttcgcggtcatgtacgtgctgggctacagcatcgacaacctgtccctcatgggcctgaccatcgcggtggggttcgtggtggacgatgccatcgtcatgctggagaacgtctaccgccatatcgaggagggcctgccgccctttcaggcggcgctgaagggggcgggggagatcggcttcaccatcatctccatcagcctgtcgctggtggcggtgttcatcccggtgctgatgatgggcggcatcgtcggccggctgctgcgggaattcgcggtcacggtgaccatcaccatcctggtgtcggtggtggtgtcgctcaccctcacccccatgatgtgcgcgctgttcctgaagaatgaccatggcgcgaagcacggccgcgcctacatggcggcggaagccttcttcgacggcatgctcaaggtctacgacaccggcctgaaatgggtgctgaagcaccagttcgcgaccctcatgagcctgttcgtcaccatggccgccaccggctatctctatgtggtgatccccaagggcttcttcccgcagcaggacaccggcttcatccagggcttctccgaagcggggcaggacatttcctttgccgccatgacgcagaagcagatggcgctgatggcggtggtggcgcgcgatccggcggtggaggccgtctccggcgcggccggcgccaccggcggctcgcagaccgtgaacaccggccgcgtctggatcacactgaagccgcgcaatgagcgggatgccagcgccgaccaggtcatcgcccggctgcggccgcagcttgccaaggtggagggcatcgccctgttcctccaggcgtcacaggacatcaacgtgggcggccggccctcgcgcacgcagtatcaatacacattgcaggacgccaatctcgacgaactgaacgcctggggcccgcgcatgcttgccaagctccgcgccctgccgcagctgcaggacgtggccaccgaccagcagaccaatgcgcccacggtctccctgaccatcgaccgcgacaccgcggcgcgcttcggcatcctgccccaggtgatcgacgacacgctctacgacgccttcggccagcggcaggtggcgcagtatttcacccagctgtcccagtaccacgtgatcctggaggtggatcccacgctgcagggtgacccgagcgcgctggaaaagctctatgtgcgctcgcctcgcacgggcgaggagatcccgctctcggccttcgtgaaggtggatacgtcaaagtccgcctatctctccatctcccaccagggccagttcccggcggtgacgctgagcttcaacctcagccccggcaccgcgctggggcaggcggtggacgccatcaagcaggcagagcgcgagatgggcatgccggcgaccctgatcggcaccttccagggcacggcgcaggcgttccagaattccctgagcagccagccctacctgatcctggccgccatcatcgccgtctacatcatcctgggggtgctctacgagagctacatccacccgctcaccatcctgtcgagcctgccgtcggcgggggtcggcgcgctcctgatcctctatctcttcggctacgacctgagcgtgatcgcgctcatcggcattctgcttctcatcggcatcgtcaagaagaacgccatcatgatgatcgacttcgccctcgcgcgggagcgggaggaggggatggcgccggaggagtccatctaccaggcctgcctcatccgcttccggcccatcatgatgaccaccatggcggcactgctcggcgggctgccgctgatgctgggcaccggcaccggatcggagctgcgccgtccgctgggctttgccatcgtcggcggcctgctggtgagccaggtgctgaccctctacaccacgccggtggtctatctctacatgaaccgcctgcagcgctttttcgccgatcgccgacgcccggcgccaccatcgccggcggtgatgccgccgctggatgtggccgctgagtga

SEQ ID NO: 2822 - protein, 1044 aa, Xanthobacter autotrophicus Py2
MNISAPFIHRPIATTLLMAALVLVGAVAYAMLPVAPLPQVDFPTIQVSASLPGASPETMASSVSTPLERQFSQISGVTQMTSTSALGVTSITVQFDLNRNIDAAAQDVQSAINAAAGQLPKNLPSPPTFRKVNPADAPILILSVQSDLYPLTKLDDAADTILAQQISQIAGIAQVAITGEQKPAVRVQVDPSKIAALGMSLEDVRAVLAAATVDQPKGSFDGAAQGFTIYADDQLLAATPWNEVVVAYRNGAPVRIRDIGRAVDGPENARLASWQNGKRGIQLIVFKQPGANVIETVDRVRAMIPRLEAALPPGINVEIIADRTQTIRASVEDVQFTMLLTIALVVGVIFAFLRNLWATVIPSVTVPMALIGTFAVMYVLGYSIDNLSLMGLTIAVGFVVDDAIVMLENVYRHIEEGLPPFQAALKGAGEIGFTIISISLSLVAVFIPVLMMGGIVGRLLREFAVTVTITILVSVVVSLTLTPMMCALFLKNDHGAKHGRAYMAAEAFFDGMLKVYDTGLKWVLKHQFATLMSLFVTMAATGYLYVVIPKGFFPQQDTGFIQGFSEAGQDISFAAMTQKQMALMAVVARDPAVEAVSGAAGATGGSQTVNTGRVWITLKPRNERDASADQVIARLRPQLAKVEGIALFLQASQDINVGGRPSRTQYQYTLQDANLDELNAWGPRMLAKLRALPQLQDVATDQQTNAPTVSLTIDRDTAARFGILPQVIDDTLYDAFGQRQVAQYFTQLSQYHVILEVDPTLQGDPSALEKLYVRSPRTGEEIPLSAFVKVDTSKSAYLSISHQGQFPAVTLSFNLSPGTALGQAVDAIKQAEREMGMPATLIGTFQGTAQAFQNSLSSQPYLILAAIIAVYIILGVLYESYIHPLTILSSLPSAGVGALLILYLFGYDLSVIALIGILLLIGIVKKNAIMMIDFALAREREEGMAPEESIYQACLIRFRPIMMTTMAALLGGLPLMLGTGTGSELRRPLGFAIVGGLLVSQVLTLYTTPVVYLYMNRLQRFFADRRRPAPPSPAVMPPLDVAAE

SEQ ID NO: 2823 - DNA, 3108 bp, Xanthobacter autotrophicus Py2
  CDS (1)..(3108): transl_table=11
atgaacccgtcgcgtccgttcatcctgcggccggtggccaccacgctggcgatggtggcgatcctgctctcgggtgccatcgcgctgttgttcctgccggtgtccgccctgccgcaggtggattaccccaccatccaggtgcagaccttctatcccggcgccagccccgacgtgatgacctcgtcggtgaccgcgccgctggaagtgcaactgggccagatccccaacctcgcgcagatggcctccaccagctcggccggcgcctccatgatcacgctccagttcaaccttgcagtgccgctggatgtggccgagcagcaggtgcaggcggcgctgaacgcggcgggaaatctcctgccttccgaccttccggccccgcccatctatgccaaggtcaatcccgccgacgccccggtgctgaccctggccctcacctcgaagaccatgaacctgcgggagatccaggcgctggccgacacaaggctggcgcagaagatttcgcagctgcccggcgtcgggctcgtcagcatcagcggaggccagcggccggcggtgcgggtccgggccgatccgcgccgcctcgccgcccacggcctgaacctcgacgacctgcgctccaccctcgccaacgccaacgtgaacacgcccaagggcggctttgacgggccaacgcgcgcctccaccatcaatgccaacgaccagctccagagcgccgcgcagtacgaggatgtcatcgtcgcctatcgcaacggcgcggcggtgcggctgcgcgaggtcgcgactgtcgtggacggggtcgagaacgacaagctcgccggctggatgaacgatgccccggccatcatcctgaacatccagcgccagcccggcgccaatgtgatcaatgtggtggaccgggtgaaggcgctgctgccgcagctgcaggccgcgctccccgccgagatcgacgtggcggtgctgaccgaccgcaccaccaccatccgcgcctcggtgcgcgacgtgggctacgagctggcgctggccgtcatgctggtgatcctcgtcatcttcgccttcctgcgcagcgcgcgggcgaccttgatccccagcctgtcggtgccgctttcgctggtgggcacgctgggggtgatgtacctgttcggctacagcctcaacaacctgaccctgatggcgctgaccatcgccaccggcttcgtggtggacgacgccatcgtggtgatcgagaacatcacccgctacatcgaggagggcgaaagcccgcttcaggcggcgctgaagggatcggagcagatcggcttcaccatcatctcgctgaccgtctcgctgatcgcggtgatgatcccgctcctgttcatgagtgatgtggtggggcggctgttccgcgagttcgcggtcaccctctccaccaccatcctggtgtcgggggtggtgtcgctcaccctcgtgcccatggcctgcgccaagctgctgcggccttatgccgaggctcatgagaaccgcttccagcgggcgagccgcaccttcttcgacggcatcatccgcgcctatgcccgggcgctggatgtggtgctggcgcggcagggcctgaccctggcggtcttcttcggcacggtggtcctcaccggctatctctatgtgatcattcccaaggggttctttccccagcaggacaccggcgtgatccaggccatgacgcaggcctcccagtcggtctcgttcgcacggatgggggacctgcaacgggaggtcgcccgcatcgtcctcgccgatcgcgacgtggaaagcctgtcctccttcatcggcgtggacggcgccaataccacgccgaacatcggccgcatgctcatcaacctgaagccgcacgcggtgcgttcgtcctcggtcgaagccgtgatcgcccggctgaagcatgccgcggcagtggtgccgggcatggagctgttcctccagccggtgcaggacctcaccatcgatgggggcgtcagccggacccagtatcaattcgtgctgcaggatgccaacggggcggaactggcggaatggacgcccaagctcctcgcccggctcgccagcctgccccagctcgccgacgtggcgagcgacctgtcgcagaccggcctgtcggtgcggctcgacatcgaccgcgaccgtgccgcccgcttcggcatcacccccgccaccatcgacaacgcgctctatgacgccttcggccagcgcatcgtctccaccatcttcaccacgtcgagccagcagcgggtgatcctggaggcggacccgacgctgaagacctcgctggaggcgctgtcctcgctctacctgccgtctgcctcaggcacgcaggtgccgctgtccgtgctcaccaccacccatgtggagacggccccgcttctggtctcccatctgggccagtttccggccaccaccatctccttcaacctcgcgcccagcgcctccctcggcgaggccatcgccgccatccgcaagacgaccgaagagatggggatgccggcgagcatcgtcgcgagcttccagggggcggcccgggcgttcgaggcctcgctcgcgaaccagttgctgctggtgctggcggcgctggtcaccgtctacatcgtgctcggcgtgctctacgagagcttcgtccacccgctgaccatcctctccaccctgccgtccgccggcatcggcgcgctgattgccctgatgatggccggggaggagctgaccatcatcgccatcatcgggctcatcctgctcatcggcatcgtcaagaagaacgcgatcatgatgatcgacttcgcccttgatgcgcagcgccgcgagggcatgacggcggaggccgccatccgcgacgcctgcctgctgcgtttccgaccgatcctgatgacgacgcttgccgccatcctcggcgccctgccgctgatggtgggcaccggcgtgggctcggagctgcgccatccgctgggcgtctccatcgtcggcggcctgctgctgagccagcttctgaccctgttcaccacgccggtgatctacctgtggttcgactgccgtcgcgccggttcgaccgcgccgggcggcctttccgccgcgcagccgggcgttgtgccatga

SEQ ID NO: 2824 - protein, 1035 aa, Xanthobacter autotrophicus Py2
MNPSRPFILRPVATTLAMVAILLSGAIALLFLPVSALPQVDYPTIQVQTFYPGASPDVMTSSVTAPLEVQLGQIPNLAQMASTSSAGASMITLQFNLAVPLDVAEQQVQAALNAAGNLLPSDLPAPPIYAKVNPADAPVLTLALTSKTMNLREIQALADTRLAQKISQLPGVGLVSISGGQRPAVRVRADPRRLAAHGLNLDDLRSTLANANVNTPKGGFDGPTRASTINANDQLQSAAQYEDVIVAYRNGAAVRLREVATVVDGVENDKLAGWMNDAPAIILNIQRQPGANVINVVDRVKALLPQLQAALPAEIDVAVLTDRTTTIRASVRDVGYELALAVMLVILVIFAFLRSARATLIPSLSVPLSLVGTLGVMYLFGYSLNNLTLMALTIATGFVVDDAIVVIENITRYIEEGESPLQAALKGSEQIGFTIISLTVSLIAVMIPLLFMSDVVGRLFREFAVTLSTTILVSGVVSLTLVPMACAKLLRPYAEAHENRFQRASRTFFDGIIRAYARALDVVLARQGLTLAVFFGTVVLTGYLYVIIPKGFFPQQDTGVIQAMTQASQSVSFARMGDLQREVARIVLADRDVESLSSFIGVDGANTTPNIGRMLINLKPHAVRSSSVEAVIARLKHAAAVVPGMELFLQPVQDLTIDGGVSRTQYQFVLQDANGAELAEWTPKLLARLASLPQLADVASDLSQTGLSVRLDIDRDRAARFGITPATIDNALYDAFGQRIVSTIFTTSSQQRVILEADPTLKTSLEALSSLYLPSASGTQVPLSVLTTTHVETAPLLVSHLGQFPATTISFNLAPSASLGEAIAAIRKTTEEMGMPASIVASFQGAARAFEASLANQLLLVLAALVTVYIVLGVLYESFVHPLTILSTLPSAGIGALIALMMAGEELTIIAIIGLILLIGIVKKNAIMMIDFALDAQRREGMTAEAAIRDACLLRFRPILMTTLAAILGALPLMVGTGVGSELRHPLGVSIVGGLLLSQLLTLFTTPVIYLWFDCRRAGSTAPGGLSAAQPGVVP

SEQ ID NO: 2825 - DNA, 3084 bp, Burkholderia cepacia
  CDS (1)..(3084): transl_table=11
atgaacatttccaaattctttatcgaccggccgatctttgcaggagtcctatcggtgatcatcctgctcggcggggtgatcgcgatgttcctgctgccgatttcggaatatccggaagtcgtgccgccttcggtgatcgtgaaggcgcagtacccgggcgcgaacccgaaagtgatcgccgagacggtcgcgtcgccacttgaagagcagatcaacggcgtcgagaacatgctctacatgcagtcgcaggcgaacagcgacggcaacatgacgatcaccgtcacgttcaagctgggcaccgatccggacaaggccacgcagctcgtgcagaaccgcgtgaaccaggcgctgccgcgcttgccggaagacgtgcagcggctcggcatcaccacggtgaagagctcgccgacgctgacgatggtggtccacctgatctcgccggacaaccgctacgacatgacctacctgcgcaactacgcgctgatcaacgtgaaggatcgcctgtcgcggatccagggcgtcggccaggtgcagctgtggggttcgggcgactacgcgatgcgcgtgtggctcgatccgcagaaggtcgcgcagcgcgggctgtcggccgaggacgtcgtgcaggcgatccgcgagcagaacgtgcaggtcgcggccggcgtgatcggcgcatcgccgtcgctgcccggcacgccgctgcagctgtcggtgaacgcgcgcggccgtctgcagacggaagacgaattcggcgacatcgtcgtgaagacgacgccggatggcggcgtcacgcacctgcgcgacatcgcgcggatccagctcgacgcgtccgagtacgggctgcgctcgctgctcgacaacaagccggccgtcgcgatggcgatcaaccagtcgccgggcgcgaactcgctgcagatctcggacgaagtgcgcaagacgatggccgaactgaagcaggacatgccggcgggcgtcgactacaagatcgtctatgacccgacgcagttcgtgcgctcgtcgatcaaggccgtcgtgcacacgctgctcgaagcgatcgcgctggtcgtgatcgtcgtgatcgtgttcctgcagacctggcgcgcgtcgctgattccgctgatcgcggtgccggtgtcgatcatcggcacgttctcgctgctgctcgcgttcgggtattcgatcaacgcgttgtcgctgttcgggatggtgctcgcgatcgggatcgtggtcgacgatgcgatcgtcgtcgtcgagaacgtcgagcgcaacatcgagaacgggatgaacgcgcggcaggcgacctacaaggcgatgcaggaagtgagcgggccgatcatcgcgatcgcgctgacgctggtcgccgtgttcgtgccgctcgcgttcatgtcgggcctgaccggccagttctacaagcagttcgcgatgaccatcgcgatctcgacggtgatctcggcgttcaactcgctgacgctgtcgccggcgctgtccgcgatcctgctgaaggggcacggcgacaaggaagactggctcacgcgtgtgatgaaccgcgtgctcggcggcttcttccgcggcttcaacaaggtgttccatcgcggggcggagaactacggccgcggcgtgcgcggcgtgctgtcgcgcaagacgctgatgctcggcgtgtatctcgtgctggtgggcgcgacggtgctcgtgtcgaaggtcgtgccgggcggcttcgtgcccgcgcaggacaaggaatacctgatcgcgttcgcgcagctgccgaacggtgcgtcgctcgaccgcaccgagaaggtgatccgcgacatgggttcgatcgcgctgaagcagccgggcgtcgagagcgcggtcgcgttcccggggctgtcggtgaacggcttcaccaacagctcgagcgcgggcatcgtgttcgtcacgctcaagccgttcgcggaacggcacggcaaggcgctgtcggccggcgccatcgcgggtgcgctgaaccagaagtacggcgcgatgaaggattcgttcgtcgcggtgttcccgccgccgccggtgctcggcctcggtacgctcggcgggttcaagatgcagatcgaggatcgcggcgcggtcggctacgcgaagctgtcggatgcgaccaacgacttcatcaagcgcgcgcagcaggcgcctgaactcggcccgctgttcacgagctaccagatcaacgtgccgcagctcaacgtcgatctcgaccgcgtgaaggcgaagcagctcggcgtgccggtgaccgacgtgttcaacacgatgcaggtgtatctgggttcgctgtacgtgaacgacttcaaccgcttcggacgcgtgtaccaggtgcgcgtgcaggccgatgcgccgttccgccagcgcgcggacgacatcctgcaactgaagacgcgcaacgacaagggcgagatggtgccgctgtcgtcgctggtcaccgtgacgccgacgttcggcccggaaatggtcgtgcgctacaacggctacacggcggccgacatcaacggcggcccggcgcccggcttctcgtcggggcaggcgcaggccgcggtcgagcgcatcgccgacgagacgctgccgcgcggcgtgcgcttcgagtggaccgacctcacgtaccagcagatcctcgcgggcgattcggcgatgtgggtgttcccgatcagcgtgctgctcgtgttcctcgtgctcgccgcgctgtatgaaagcctgacgctgccgctcgcggtgatcctgatcgtgccgatgagcattctgtcggcgctgacgggcgtgtggctcacgcagggcgacaacaacatcttcacgcagatcggcctgatggtgctggtggggctgtcggcgaagaacgcgatcctgatcgtcgaattcgcgcgcgagctcgaacacgacggcaggacgccgctcgaggccgcgatcgaggcgagccggctgcggctgcgcccgatcctgatgacgtcgatcgctttcatcatgggcgtggtgccgctcgtcacgtcgaccggcgcgggttcggaaatgcgtcatgcgatgggggtcgcggtgttcttcgggatgctcggcgtgacgctgttcgggctgatctga

SEQ ID NO: 2826 - protein, 1027 aa, Burkholderia cepacia
MNISKFFIDRPIFAGVLSVIILLGGVIAMFLLPISEYPEVVPPSVIVKAQYPGANPKVIAETVASPLEEQINGVENMLYMQSQANSDGNMTITVTFKLGTDPDKATQLVQNRVNQALPRLPEDVQRLGITTVKSSPTLTMVVHLISPDNRYDMTYLRNYALINVKDRLSRIQGVGQVQLWGSGDYAMRVWLDPQKVAQRGLSAEDVVQAIREQNVQVAAGVIGASPSLPGTPLQLSVNARGRLQTEDEFGDIVVKTTPDGGVTHLRDIARIQLDASEYGLRSLLDNKPAVAMAINQSPGANSLQISDEVRKTMAELKQDMPAGVDYKIVYDPTQFVRSSIKAVVHTLLEAIALVVIVVIVFLQTWRASLIPLIAVPVSIIGTFSLLLAFGYSINALSLFGMVLAIGIVVDDAIVVVENVERNIENGMNARQATYKAMQEVSGPIIAIALTLVAVFVPLAFMSGLTGQFYKQFAMTIAISTVISAFNSLTLSPALSAILLKGHGDKEDWLTRVMNRVLGGFFRGFNKVFHRGAENYGRGVRGVLSRKTLMLGVYLVLVGATVLVSKVVPGGFVPAQDKEYLIAFAQLPNGASLDRTEKVIRDMGSIALKQPGVESAVAFPGLSVNGFTNSSSAGIVFVTLKPFAERHGKALSAGAIAGALNQKYGAMKDSFVAVFPPPPVLGLGTLGGFKMQIEDRGAVGYAKLSDATNDFIKRAQQAPELGPLFTSYQINVPQLNVDLDRVKAKQLGVPVTDVFNTMQVYLGSLYVNDFNRFGRVYQVRVQADAPFRQRADDILQLKTRNDKGEMVPLSSLVTVTPTFGPEMVVRYNGYTAADINGGPAPGFSSGQAQAAVERIADETLPRGVRFEWTDLTYQQILAGDSAMWVFPISVLLVFLVLAALYESLTLPLAVILIVPMSILSALTGVWLTQGDNNIFTQIGLMVLVGLSAKNAILIVEFARELEHDGRTPLEAAIEASRLRLRPILMTSIAFIMGVVPLVTSTGAGSEMRHAMGVAVFFGMLGVTLFGLI

SEQ ID NO: 2827 - DNA, 3123 bp, uncultured Acidobacteria bacterium
  CDS (1)..(3123): transl_table=11
atgttcgtagacacgttcatcagccggcccatcctggcctccgtctgctcgctcgtcctgattctcgccggagcgatcgcgatcccgacgatgcccgtggcacagtacccgccgctggcgccgccggtcatcagcgtgtccacgttctatacgggcgccgatgcgcaggcggtcgagacggcggtcacgaccccgctcgagcaggcgattaacggcgtcgagggcatgctctacatgacctcgtcgagcaccaacagcggcgcggccagcatcagcgtggtcttcgacgtgacgcgcgactcggacattgccgccgtcgacgtgcagaaccgcgtgtcgacggcgctcgcgcggctgccgagcgaggtccggacaaacggcgtgaccgtgcagaagggccagaccggcttcgtgctggccgccggagtctatgcagaaaagggcgagtacgattccctcttcatcagcaactacatcgacgtctacgtgaaggacgcgctgaagcgcgtggagggggtcggcaacgtccagatcttcggcgagcggcggtactcgatgcggctgtggctcgatcccggcaagctcgccagccgcgctttgacggcaggcgacgtggtcaatgcgctgcgcgagcagaacatccaggtggcggcaggggccatcgggcagtcgccctcccgggacaatcagcggttccagatcagcgtgcgggcggcgggccggctgcacgaggccggcgagttcgaaaacgtcatcatcaaggcgggaaggggcggctcgctcgtccggatgaaggacatcggcaccgtggagctcggcgccgaaacctacggatcgcagcttcgctttcagggcatcgacgccgtcggtttcggcgtcacgcagctgccgtcggccaacgcgctcgacgtcgaacgcggcgtccgggcggagctcgaccgcctcgccgtgcacttcccgcctgggttgaagtatcaggtcgcgttcaacacgacccaggtcgtcgccgaatcgatccgcgaggtcctcatcacgctcgtcgaggccatcgcgctcgtcgtgctcgtcatgttcctgttccttcagagctggcgcagcacgctcatcccgacgatcacgatccccgtctcgctcatcggcgccttcgcgttcgtcaagctgatggacttttccatcaacacgctgacgctgttcggcatcatcctcgccaccgggatcgtcgtggacgatgcaatcgtggtgatcgagaacatcgagcgccacatccaggagttcaagacgccggccaggaaggcggcctcggatgcgatgcgcgaagtgttcggcgccgtcatcgcgacggcgctcgtgctcatcgcggtgttcgtgccggtggcgttctttcccggcacgaccgggcggctctacgcgcagttctcgatgacgattgcgttctcggtcgcactgtcggcgttcaacgcgctgacgctcacgccggcgctgtcggcgctgctgctggatcgcggccaccacggcaaaggggccttcttctcgagggtcgagcgcgtcatctcgggcggcaccaacgcgtatgtgtccgtgctgtcccgcctgctgcccctccggtgggtggtggtgctcgttttcgtgatctgcctcggcctgacgtggctgatgtaccgcatcgtcccgcaggcgttcgtgccggccgaggatcagggctacttcatcagcatcgtgcaggcgcccgcgggtgcgtcgttgcagtacaccggcgagattgcgcggcaggcggagcagatcctgctgaaggatccggaggtcctgggagtgttctcggtgatggggttcagcttcagcggcgcagcgccgaaccaggggctgatcttcacgagcctgaagcccttcgccgagcgcgaagggccggaacattccgcccagacggtgatcaaccgcgtccgcggccagttcgccggaatcagcggcgcgaacgtgtttcccacgccgcccgcctcaatccccgggctcggcgcgttcggcgggttcgagttccaggtgctcgaccaggggggcaccgacatcaacgcgctggccgccgccacgtacgcgatggcgggcgcgggcaaccagtcgccgaggctgcgcgggttgttcacgtcgttcaccgtgaacgatccgcagatctccgtccagatcgaccgcgatcgcgccctggcgctggggttgccggtcggcgagatcacggaggcgctgcagatctatctcggctcgcagtacgtcaacgacttcgacttcaacaaccgcgcttaccgggtgtacgtgcaggccgacaaagcgttccgttcggagccgggcgcgttgaagcagttctacgtgcggaaccgcgcgggggagatgatcccgctcgaaagcgtcgtgcgcctcagcgaggcgacggcgccgcaggtcatcagccatttcaacctgttccggtcggcctcgatcaacgggtcggccgcgcccggctacagctcgggccaggcgctccaggagatgcaggaccttgcggcgcgaacactgccgcagggcatgggttacgcgtggtccgggttgtcgctcgaggagagcaaggccggccgtcagtcgttcctcattttcggtctcgcgatcctgctcgtgtatctcacgctctccgcgcagtacgaaagcctcgtgctgccgttcatcgtgctgctgggggtcccgctcgcggtgctcggcgccctgaccgcgcagtgggcgcgggggtttgccaacgacgtctactgccagatcggcctggtcatgctgatcgggctggcggccaagaactcgatcctgattgtggagttcgccgaacagctgcgccacaaaggggcgacggtggtcgaggccgccgtgcaggccgcgcggatccggttgcggccgattctgatgacgtcgctcgcgttcatcctcggcgtgctgccgctcgtcttcgcctccggcgccggagcggaagcccggaattcggtcggcacggcggtggcgggcggcatgctggtctcgacgttcctgaacctcatcttcatccccgttctttacgtcgtggtgcagacgattcggggcgggggacggggtcaggcggggacgcaacaggccaactaa

SEQ ID NO: 2828 - protein, 1040 aa, uncultured Acidobacteria bacterium
MFVDTFISRPILASVCSLVLILAGAIAIPTMPVAQYPPLAPPVISVSTFYTGADAQAVETAVTTPLEQAINGVEGMLYMTSSSTNSGAASISVVFDVTRDSDIAAVDVQNRVSTALARLPSEVRTNGVTVQKGQTGFVLAAGVYAEKGEYDSLFISNYIDVYVKDALKRVEGVGNVQIFGERRYSMRLWLDPGKLASRALTAGDVVNALREQNIQVAAGAIGQSPSRDNQRFQISVRAAGRLHEAGEFENVIIKAGRGGSLVRMKDIGTVELGAETYGSQLRFQGIDAVGFGVTQLPSANALDVERGVRAELDRLAVHFPPGLKYQVAFNTTQVVAESIREVLITLVEAIALVVLVMFLFLQSWRSTLIPTITIPVSLIGAFAFVKLMDFSINTLTLFGIILATGIVVDDAIVVIENIERHIQEFKTPARKAASDAMREVFGAVIATALVLIAVFVPVAFFPGTTGRLYAQFSMTIAFSVALSAFNALTLTPALSALLLDRGHHGKGAFFSRVERVISGGTNAYVSVLSRLLPLRWVVVLVFVICLGLTWLMYRIVPQAFVPAEDQGYFISIVQAPAGASLQYTGEIARQAEQILLKDPEVLGVFSVMGFSFSGAAPNQGLIFTSLKPFAEREGPEHSAQTVINRVRGQFAGISGANVFPTPPASIPGLGAFGGFEFQVLDQGGTDINALAAATYAMAGAGNQSPRLRGLFTSFTVNDPQISVQIDRDRALALGLPVGEITEALQIYLGSQYVNDFDFNNRAYRVYVQADKAFRSEPGALKQFYVRNRAGEMIPLESVVRLSEATAPQVISHFNLFRSASINGSAAPGYSSGQALQEMQDLAARTLPQGMGYAWSGLSLEESKAGRQSFLIFGLAILLVYLTLSAQYESLVLPFIVLLGVPLAVLGALTAQWARGFANDVYCQIGLVMLIGLAAKNSILIVEFAEQLRHKGATVVEAAVQAARIRLRPILMTSLAFILGVLPLVFASGAGAEARNSVGTAVAGGMLVSTFLNLIFIPVLYVVVQTIRGGGRGQAGTQQAN

SEQ ID NO: 2829 - DNA, 3150 bp, Xanthomonas maltophilia
  CDS (1)..(3150): transl_table=11
atggttcgtttcttcatcgaccggccgatcttcgcctgggtgatcgccatcgcggtcagcctgctcggcctgctcgcgatcctgatcctgccggtggaccgctacccgcagatcgccccgcccaccatcaccatccgcgccacctacaccggcgcctcgtcgcagaccgtggaaaacgcggtcacccaggtcatcgagcagtcccagcaaagcctcgatcacctgatgtacatgacctcgaccagtgcctccgacggctcggcgcaggtcaacctggtgttcgccaccggtaccaatccggataccgcgcaggtgcaggtgcagaaccagctgcaggccgccatggccacgctgccgcaggcggtgcagcagaacggcctgaccatcaccaagtccagtggttcgatcttcgaggtgctgtcgttcaccagcgaagacggcagcatggacaacttcgatgtcgccaacttcatggaagcgcgcatcgatgaccagatcagccgcgtcagcggtgtcggcaacatccagccgatcggccaggaatacgccatgcgcatctggctggatccggagaagatgcgccagtacgcgctgatgccctgggacatcgagaccgcattgcaggcacagaacaccgatgtctccgccggtgagctgggtggccagccggcgctgaagggccagcagctcgacgccacggtaaccgcgcgcagccgcctgcacacgcccgagcagttcgcgcaggtggtgctcaaggccgatgccaacggcagcgtggtgcgtctgggcgacgtggcaaagatcggcctcgggccggaaagctacgacagcatcagcaccttcaatggcaagccgtcggcgtcgctgggcattgaactcaatgccggtgccaacgcgatcgccgtctccaaggccatcgatgcacggcttcagcagctgcagaagtactggccgcatggctacaccgcccacgtggccttcaccaccaccccattcgtgaccatttcgctgaaggaagtggtgatcaccctgatcgaagcgatcatcctggtggtgctggtgatgtacctgttcctgcagaactggcgcgccacgctgatcccgaccatcgcggtgccggtggtgctgctgggcacgttcggcgtgctggctgcattcgggtattcgatcaacaccctgaccatgttcgcactggtgctggccatcggcctgctggtggacgatgccatcgtggtggtggagaacgtagagcgggtgatgaccttcgaagggctggcgccgaagccggccacgctgaaggcgatgggccagatcaccggcgcgctggtcggcatcgtgctggtgctgaccgcggtgttcctgccgatggcgttcttcagcggtgtaaccggggtgatctatcgccagttctcggtgacgatcgccgccgcgatgatcctgtcggtgctggtggcgatgaccatcaccccggcactgtgtggcagcatcctgcaccagattcccaagggcggccatccgcatggcgaccacggtggcgagccgagcctgctgggcaagttcttcatctggttcaaccaccgcttcgagcgcacctccaacggcctgcgccatcgcgtggatcgtttcctcggccgccgcacgctcggcgtgctgttctacctggtgctgagcgtggccaccggcctgttgctgtggcacctgccgggcgcgttcctgcccgatgaagaccagggcatgctcaacgcgctggtgaagctgccggccggttccacgctggagcagacgcgggcggtgatggatcgtctgagtgccgtcgcggtgaaggacgacggcgtgctctcgatccaggccaccgccggtttcagtgttaccggcagcggccagaacgtcggccaggccttcatccggctgaaggactgggatgaccgcaaggacgacgccgataccatcgccgcacgcttgacgcgggcgatggccagcgtgcccgatgcgcaggtgttcatcacctcgccaccggccatcctgggcctcggcgatgcgggtggcttcaccctggaactgcaggacgaaggcggtgcaggccatgccgccgccgtggccgcgcgcaacacgctgctgaaggaagccgccaaggacccgaagctggtcaacgtgcgctacgccagcctggaagacgcgccggtatacgcggtgaaggtggacgacgccaaggcgcaggcgatgggcgtgaacccgcaggacgtcaatgacaccttgaacgcggcgttgggcggcgacttcgtcaacaacttcatctacaaggggcgcatcaagaaggtgttcatccagggcaccgccgaagcacgcatgcagccgcaggacatcgagcgctggagcgtgcgcaaccaggccgggcagatggtgccgctgtcgtcgttgatcagcacgcattggaccagcgcgccggccgcagtgcagcgctacaacggcatctcggcgatggaaatcaccggccagccggcaccgggcgtcagctccggcgaggcgatggccgagatcgcgcgcctggccgacacgctgccggaaggcttcagccatgcctggtcggacatggcctaccaggaacagctgtcgggcaaccaggcgccgatgctgtacgccatctcgctgctgttcgtgttcctgtgcctggccgcgctgtatgaaagctgggcggtgccgttcgcggtgatgctggcggtgccggtgggcatgttcggcgccgtgctgatgatgaacctgcgtggcctcaacaacgacgtgtacttccaggtcggcctgctgaccacgattggtctggcagcgaagaacggcatcctgatcgtcgagttcgcgcgcatcctcgaacagcagggcaagagcacccgcgaagcgatcctgcaggcggtctacctgcggctgcggccgatcgtaatgacctcgctggcgttcctgatgggcgtactgccgctggtgttcgccaccggcgccggttcggctgcgcgccgttcgctgggtaccggcgtggccggtggtacggttgcctcgatggtgctgggcatgttcttcgtgccgttgttctacctgctggtgcgccgcctgttcccgggccgcgcgccggccgacgccactgtcccggagacaagcccatga

SEQ ID NO: 2830 - protein, 1049 aa, Xanthomonas maltophilia
MVRFFIDRPIFAWVIAIAVSLLGLLAILILPVDRYPQIAPPTITIRATYTGASSQTVENAVTQVIEQSQQSLDHLMYMTSTSASDGSAQVNLVFATGTNPDTAQVQVQNQLQAAMATLPQAVQQNGLTITKSSGSIFEVLSFTSEDGSMDNFDVANFMEARIDDQISRVSGVGNIQPIGQEYAMRIWLDPEKMRQYALMPWDIETALQAQNTDVSAGELGGQPALKGQQLDATVTARSRLHTPEQFAQVVLKADANGSVVRLGDVAKIGLGPESYDSISTFNGKPSASLGIELNAGANAIAVSKAIDARLQQLQKYWPHGYTAHVAFTTTPFVTISLKEVVITLIEAIILVVLVMYLFLQNWRATLIPTIAVPVVLLGTFGVLAAFGYSINTLTMFALVLAIGLLVDDAIVVVENVERVMTFEGLAPKPATLKAMGQITGALVGIVLVLTAVFLPMAFFSGVTGVIYRQFSVTIAAAMILSVLVAMTITPALCGSILHQIPKGGHPHGDHGGEPSLLGKFFIWFNHRFERTSNGLRHRVDRFLGRRTLGVLFYLVLSVATGLLLWHLPGAFLPDEDQGMLNALVKLPAGSTLEQTRAVMDRLSAVAVKDDGVLSIQATAGFSVTGSGQNVGQAFIRLKDWDDRKDDADTIAARLTRAMASVPDAQVFITSPPAILGLGDAGGFTLELQDEGGAGHAAAVAARNTLLKEAAKDPKLVNVRYASLEDAPVYAVKVDDAKAQAMGVNPQDVNDTLNAALGGDFVNNFIYKGRIKKVFIQGTAEARMQPQDIERWSVRNQAGQMVPLSSLISTHWTSAPAAVQRYNGISAMEITGQPAPGVSSGEAMAEIARLADTLPEGFSHAWSDMAYQEQLSGNQAPMLYAISLLFVFLCLAALYESWAVPFAVMLAVPVGMFGAVLMMNLRGLNNDVYFQVGLLTTIGLAAKNGILIVEFARILEQQGKSTREAILQAVYLRLRPIVMTSLAFLMGVLPLVFATGAGSAARRSLGTGVAGGTVASMVLGMFFVPLFYLLVRRLFPGRAPADATVPETSP

SEQ ID NO: 2831 - DNA, 3123 bp, Erwinia carotovora subsp
  CDS (1)..(3123): transl_table=11
atgcaggataacgttccagccagcggcggcggaccgtctcgcctgtttattctgcgaccggtcgccaccacgctgctgatgatcgccattctattggccggtattatcggctatcgggcactgccggtttcagcactgcccgaggttgattatccgacgattcaggtcattactctgtatccgggggctagccccgacgtggtgacctcagcgattaccgcaccgctggagcggcaattcggccagatgtccgggctaaaacagatgtcgacgcagagcgcaggcggcgcatcagtcatcacgcttcagttccaacttgagctatcgctggacgtcgccgaacaggatgtgcaggccgctatcaacgcggcaagcaacctgctgccgaacgatctgccctacccaccgacctacagcaaagtgaatccggcggatccgccgattatgacgctggccgtcacctccagcgccatgtcgatgacgcaggtgcaggacatggtagacaatcgcatcgcgcagaaaatctcgcaggtggcgggtgtcgggttggtgtcattagccggtggacaacgccccgccgtgcgggtaaggctaaacgcgccagcgctggcggcttacggcctgaccagcgaaacaatccgcactgcgattaccgctgccaacgtgaattccgccaagggtagtctggatggtccgacacgttcggtaacgctctccgccaacgatcagatgaagtccgttgatgattatcgcaagctgattgtcgcgtggaagaatggcgcaccggtaaggcttcaggatgtcgccactattgagcaggccgccgagaatatttatcttggtgcctgggcgaaccggcagcaggcgatcattatcaacgttcagcgccagccgggtgccaacgtcattacgaccacggacagcattaacaagatgctgcctgcgttaaaagccagcctgccgaattccgttgaggtcgccacgctgaccgaccgcaccaccagcattcgcgcctcggtcaaagacgtccagttcgagctgctgctggctattgccctcgtcgtaatggtgatttatctgttcttgcgtaacgccgtcgccacgctaatcccaagcattgccgtaccgctgtcgctggttggcacctttgccgctatgtattttctcggtttttccatcaataacctgacgctgatggcgctcaccatcgccaccggtttcgtggtggatgatgccatcgtggtgattgaaaacatcgcccgctatatcgaaaaaggggaaaaaccgcttaacgcggcgctaaaaggcgcgggagaaattggctttaccattatttccctgacgttctccctcattgccgtcttgatcccactgctgtttatgggcgatatcgtcggacgcctgttccgcgagtttgccgtcacgctggcggtatctatcctgatttccgccgtcgtgtcgctcacgctcactccgatgatgtgcgcccggatgctaagtcatcagtcgctgcgtaaacagaaccgctttacccgcgccagcgagcgtttcttcacgcgcctgattgatacctacggcacgtggctgcgtaaagtactgaaccatccgtggctaacgctcagcgttgcactcggtacgctgctgctgaccatcctgctctatatctggatcccgaaaggcttcttcccgatacaggataacggcattatacagggcaccgtgcaggcaccgcagacggtctcgttcagcaatatggccgaccgccaacagcgcgttgcgtccattatcatgaaggatccgacggtggagagcgtgtcctcgttcatcggcgttgacggcaccaacgcggcgctgaacagtggtcgattgcaaatcaacctgaaaccgctcagtgaacgtagcgaacgcattccagagattatcagtcgcctgcaacagcaaaccgcacagattcccggtattcagctgtatctgcaaccggtgcaggatctcaccatcgacacccagattagccgcacgcaataccagtttacgttgcaggcgatgtcgctggacgaactcagcgtctgggtgccgaagctgatgaccgaattgaaaaagctgccgcagctagaggatgtcagcagcgactggcaagacggtgccgcagtcgcctatgtcaacgtcgatcgtgacagcgccagccgtctgggtatcacgatgtcgcaggttgacagcgcgctgtacaacgcctttggtcagcggttggtttccaccatctatacgcaggcaagccagtaccgcgtggtactggaacatgatacgaccaacaacacggggctggacgcgctaaacgatgtgcgcctcatcagcagcgacggtggtacgattccgctcagcagcattgccaccattgaagagcgtcaggggccactggcgatcaaccatatcgaccagttcccgtcgacgacgatctctttcaacgtcgccagcggctatgcactgggcgaagcggttgatgccatcactcaggccgagcagcagatgaatctacctgcggatatcaccacccgttttcagggcagcacgctggcgttccagtcggcgctgagcagcaccgtgtggctcatcgtcgcggcgattgtcgccatgtatatcgtgctcggcgtgctgtacgaaagctttatccatccgatcacgatcttgtctacgctgccaacggcgggggtcggcgcgctactggcactgatgatggcggggaaagatctggatgtgatcgccattatcgggatcatcttgctcatcgggatcgtgaagaagaacgccatcatgatgatcgacttcgcgctggcggcagagcgagaacagggtatgaaaccctatgacgccatttatcaggcttgtctgctgcgtttccggccgattttgatgaccacgatggccgcactgctaagtgcactgccgctgatgctcagtaccggcgttggcgctgagctacgccagccgctaggggtctgtatggtcggtggcctgatcatgagccagattctgacgctgtttaccacaccggtgatttacctgctgtttgaccgcttagcgacacgcttccgtcgtgtaccgcgtcaggaggaagaaaccgagtga

SEQ ID NO: 2832 - protein, 1040 aa, Erwinia carotovora subsp
MQDNVPASGGGPSRLFILRPVATTLLMIAILLAGIIGYRALPVSALPEVDYPTIQVITLYPGASPDVVTSAITAPLERQFGQMSGLKQMSTQSAGGASVITLQFQLELSLDVAEQDVQAAINAASNLLPNDLPYPPTYSKVNPADPPIMTLAVTSSAMSMTQVQDMVDNRIAQKISQVAGVGLVSLAGGQRPAVRVRLNAPALAAYGLTSETIRTAITAANVNSAKGSLDGPTRSVTLSANDQMKSVDDYRKLIVAWKNGAPVRLQDVATIEQAAENIYLGAWANRQQAIIINVQRQPGANVITTTDSINKMLPALKASLPNSVEVATLTDRTTSIRASVKDVQFELLLAIALVVMVIYLFLRNAVATLIPSIAVPLSLVGTFAAMYFLGFSINNLTLMALTIATGFVVDDAIVVIENIARYIEKGEKPLNAALKGAGEIGFTIISLTFSLIAVLIPLLFMGDIVGRLFREFAVTLAVSILISAVVSLTLTPMMCARMLSHQSLRKQNRFTRASERFFTRLIDTYGTWLRKVLNHPWLTLSVALGTLLLTILLYIWIPKGFFPIQDNGIIQGTVQAPQTVSFSNMADRQQRVASIIMKDPTVESVSSFIGVDGTNAALNSGRLQINLKPLSERSERIPEIISRLQQQTAQIPGIQLYLQPVQDLTIDTQISRTQYQFTLQAMSLDELSVWVPKLMTELKKLPQLEDVSSDWQDGAAVAYVNVDRDSASRLGITMSQVDSALYNAFGQRLVSTIYTQASQYRVVLEHDTTNNTGLDALNDVRLISSDGGTIPLSSIATIEERQGPLAINHIDQFPSTTISFNVASGYALGEAVDAITQAEQQMNLPADITTRFQGSTLAFQSALSSTVWLIVAAIVAMYIVLGVLYESFIHPITILSTLPTAGVGALLALMMAGKDLDVIAIIGIILLIGIVKKNAIMMIDFALAAEREQGMKPYDAIYQACLLRFRPILMTTMAALLSALPLMLSTGVGAELRQPLGVCMVGGLIMSQILTLFTTPVIYLLFDRLATRFRRVPRQEEETE

SEQ ID NO: 2833 - DNA, 3147 bp, Photorhabdus luminescens subsp
  CDS (1)..(3147): transl_table=11
atgcaggcaggctccccaatcccaggtggcggaccatcacgcctgttcatcttacgacctgttgccaccactctgtttatggcagcaatcctgctagcaggtattatcggctatcgcatgttgcccgtgtctgcattaccggaagtggactatcccaccattcaggttgtcacactctaccccggtgcaagccccgatgtgatgacttcggcagtcaccgcaccacttgagcgccaactcggacagatgtctggccttaaacagatggcctctcaaagttccggcggggcttctgttatcacattacaattccagctaactttgccgttagatgtcgccgagcaggaagtgcaggcggctatcaatgcagccagtaatttattgccgaatgacctgccttatccccctatctacagcaaagttaatcccgctgatccaccgattctaatgctagcagtcacctccgatgcaatgccaatgacacagattcaagatatggtggaaacccgtattgcgcagaaaatttcacaggtcaacggtgtaggattggtgacactcgccggcggccagcgaccagccgtcagagtgaagctaaatgcccaagcggtcgctgcacagggattggatagcgaaaccatccgcaccgctatcaacaatgctaacgttaattccgccaaaggtagccttgatggtccgactcgctctgtcacgctttcggccaacgatcaaatgaagtcagtaaatgattaccgcaacttgatcatcgcctataaaaatggctcaccggtacggttacaagatgtcgcaaccattgaacaaggcgctgaaaataccaaactaggtgcatggtccaataacacacaagcgattgtgattaatgttcagcgccagccaggtgccaatgtgattgaaactacagataacattcgccagatgttgccggaactcatcagcagcttgccaaaatccgtcgatatgaaaatcctgactgaccgcacaacaaccattcgcgcctcagtgaaagatgttcagtttgagctattactggcaattgcactggttgttatggtgatttatctgtttttacgtaacggtatcgcaacacttatccccagtatcgccgttcccctttcactgatcggcacattcgcagtgatgtatttctgcggtttctccgtcaataatctgacgctaatggcgctcaccattgctaccggttttgtcgtagacgatgccattgtggtcattgaaaatatctctcgttatatagaacaaggcgagaaaccgatgacagccgcattgaaaggcgcgggtgaaatcggttttaccattatctccctgactttctctttgattgcggtgctgatcccgctgctttttatgggcgatatcgttggccgcctgtttcgtgagtttgcaattaccctggccgtggcaattctgatttcagccgttgtctcactgacattaacccccatgatgtgcgctcgaatcctgaaaccggaatcacagataaaacacaatcgttttgaacaagccagtggacgattttttgaacaaatgattgccggttatgctgtatggctaaaaagagcactgaatcacccgtggatcacctttggcatcgccctaagtacattggcgctaactgccctgctctatctgatgattccaaaaggattttttccatcacaggataatgggctgattcagggaacactggaagcgccacaatccatttccttcaccgcaatggtgaataaacaacaacaggtttcatccttattgctgcaagacccggcagtagaaaatatcaccacttttgtgggcgttgatggcagtaacccaacattgaataacgggcgactgcaaatcacactaaaaccactcaatcagcgtgatgacagaatcgttgacattattccgcgtttgcaggaaaaagttgccgctatacccggcataaagctctatctgcaaccgatgcaggatttgacgattgacactcaggttacccgtacccaataccaattcactttgcaggcaacctctctggatgaactgagtatctgggtgccaaaattgctggctgaactaaagcagagagcagagctagttgatatcagcagtgactggcaagatcaggggctgatcgcctacgttaaagtagaccgagacattgccagccgattgggcatctcaatggctgctatagataacgcactctataacgcattcggccagcggctaatttcaaccatttatacgcaagctaatcagtatcggatcatcttggaacatgatgtaacatcgactccggggctggcagcatttgataacatccgccttaacggaactgatggccatgtcgtacctctcagaactattgcaactattgaacaaaaatttggcccactggcaatcaatcacctagctcaatttccctcagcaacattttctttcaacgttgccgaggatgcttctctcgaacaggcggtcaatgctgttcgtgatgccgcgcaattgatcaacatgcccaaagacatttccacccaattccaaggaacaacactggcatttgaaagcgcactgggtaatacattgtggctaatcgcggctgccattatcgccatgtatatcgtgctaggcatactgtatgaaagcttcatccatccggtgaccattctctccacattgccaacagcaggagtaggtgcactattagcgctgatgatggcaggtcatgaactggatgtcattgcgatcatcggcattatcttgttgataggtattgtgaagaaaaacgccatcatgatgatcgattttgcgttggcagcggagcgtgaacagggactatcgccttacgaagccatttatcaagcgtgcttattgcgcttccgtccgattctgatgaccacaatggcggcgttgcttggggcactccccttgatgctcagcaccggtgtcggtgctgaattacgtcgtcctttgggtatctgtatggtaggtggattgattatgagccagatcctgacactgtttactacgccagtgatctatttgctgtttgatcgtctggcccactatcgccgcaatcgccagctctcagtttcaaacacgccatctattgatcatcaggagccgcggtga

SEQ ID NO: 2834 - protein, 1048 aa, Photorhabdus luminescens subsp
MQAGSPIPGGGPSRLFILRPVATTLFMAAILLAGIIGYRMLPVSALPEVDYPTIQVVTLYPGASPDVMTSAVTAPLERQLGQMSGLKQMASQSSGGASVITLQFQLTLPLDVAEQEVQAAINAASNLLPNDLPYPPIYSKVNPADPPILMLAVTSDAMPMTQIQDMVETRIAQKISQVNGVGLVTLAGGQRPAVRVKLNAQAVAAQGLDSETIRTAINNANVNSAKGSLDGPTRSVTLSANDQMKSVNDYRNLIIAYKNGSPVRLQDVATIEQGAENTKLGAWSNNTQAIVINVQRQPGANVIETTDNIRQMLPELISSLPKSVDMKILTDRTTTIRASVKDVQFELLLAIALVVMVIYLFLRNGIATLIPSIAVPLSLIGTFAVMYFCGFSVNNLTLMALTIATGFVVDDAIVVIENISRYIEQGEKPMTAALKGAGEIGFTIISLTFSLIAVLIPLLFMGDIVGRLFREFAITLAVAILISAVVSLTLTPMMCARILKPESQIKHNRFEQASGRFFEQMIAGYAVWLKRALNHPWITFGIALSTLALTALLYLMIPKGFFPSQDNGLIQGTLEAPQSISFTAMVNKQQQVSSLLLQDPAVENITTFVGVDGSNPTLNNGRLQITLKPLNQRDDRIVDIIPRLQEKVAAIPGIKLYLQPMQDLTIDTQVTRTQYQFTLQATSLDELSIWVPKLLAELKQRAELVDISSDWQDQGLIAYVKVDRDIASRLGISMAAIDNALYNAFGQRLISTIYTQANQYRIILEHDVTSTPGLAAFDNIRLNGTDGHVVPLRTIATIEQKFGPLAINHLAQFPSATFSFNVAEDASLEQAVNAVRDAAQLINMPKDISTQFQGTTLAFESALGNTLWLIAAAIIAMYIVLGILYESFIHPVTILSTLPTAGVGALLALMMAGHELDVIAIIGIILLIGIVKKNAIMMIDFALAAEREQGLSPYEAIYQACLLRFRPILMTTMAALLGALPLMLSTGVGAELRRPLGICMVGGLIMSQILTLFTTPVIYLLFDRLAHYRRNRQLSVSNTPSIDHQEPR

SEQ ID NO: 2835 - DNA, 3123 bp, Salmonella typhi
  CDS (1)..(3123): transl_table=11
atgcaggtattacctccgggcagcacgggcggcccttcgcgtctgtttattctgcgccccgtggccaccactctgctgatggcggcgattttactcgccgggattatcggctatcgcttcctgcccgtcgccgctttgccggaggtcgactaccccactattcaggtggttacgctctaccctggcgccagcccggatgtcatgacctcctccgtcaccgcgccgcttgagcgccagttcggccagatgtcaggacttaagcagatgtcgtcgcaaagctccggcggcgcatcggtggtgacgctacagtttcagttgacgctgccgctggacgttgccgagcaggaagtacaggcggcgattaacgcagccaccaatttattgccttccgacctgccgaatccgccgatttatagcaaagtcaatccggcggacccgccgattatgacgcttgccgtcacctcaaacgcgatgccgatgacccaggtagaggacatggtagaaacccgcgtggcgcagaagatctcacaggtctccggcgtcgggctggtgacgcttgccggcgggcagcgccctgcggtacgcgtaaaactgaatgctcaggctatcgccgcgctcggtctgaccagcgaaacagtccgtaccgcaattaccggcgccaacgtcaactcggcgaaaggcagtctggatggccccgaacgggcggtgacgctttctgctaacgatcagatgcagtctgccgacgaataccgcaagcttatcatcgcgtatcaaaacggcgcgccggtacggctgggcgatgtcgccaccgtcgaacagggggcggaaaatagctggctcggcgcatgggcgaatcaagctccggctatcgtgatgaacgttcaacgccagcccggcgccaatatcattgcgacagcggacagcattcgccagatgctgccccagcttaccgaaagcctgccgaaatcggtgaaggtcacggtcctgtccgatcgcaccaccaatattcgcgcttccgtgcgcgatacccagtttgaactgatgctggcgatcgcgctggtcgtcatgattatctatctgtttttacgtaatattcccgccacaattattcccggcgtcgccgtaccgctgtcgcttatcggcacctttgcagtgatggtgtttttggatttttccattaataacctgacgctgatggcgctcactatcgccacgggtttcgtggtggacgatgcgattgtggtgatcgagaacatctcgcgctacatcgaaaaaggagaaaaaccgctggcggcggcgctcaaaggcgcgggcgaaatcggctttaccattatttccctcaccttttccctgattgcggtactgatcccgttgctctttatgggcgatattgttggtcgactgttccgcgaatttgcggtgacgttggcggtagcgattttaatctccgccgtcgtctctttgacgcttacgcccatgatgtgcgcgcgtatgctcagccggcagtctctgcgtaaacaaaaccgcttttcccgcgcctgcgagcggatgtttgaccgcgtgatcgccagctacggacgcggattagcgaaagtgctcaaccatccatggcttacattgagcgtggcattcgccacgctcctgctcagcgttatgctgtggataaccatcccgaaagggttctttccggtacaggataacggcattatccaggggacgctgcaggcgccacaatcatcatcgtatgccagtatggcgcaacgtcagcgccaggtggcggagcggatattacaggacccggcggtgcaaagcctgacgacttttgttggcgtagacggcgctaatcccacgctgaatagcgcgcgcctgcaaattaacctcaagccgctggatgcgcgtgatgaccgcgtgcagcaggtgatctcccggctgcaaaccgccgtggcgacgattcccggcgtggcgctgtatctccagccgacgcaggatttaaccatcgacacgcaggtcagccgcacgcagtatcagtttaccctgcaggccacgacgctcgatgcgctcagccactgggtgccaaaactgcagaacgcgctacagtcgttaccacagctctctgaggtaagcagcgactggcaagatcggggattagcggcctgggtgaatgtcgaccgcgacagcgccagccgtctgggtatcagcatggcggatgtggataacgcgctctacaacgcgttcggacaacgcctgatttcaacgatttatacccaggcgaaccagtaccgcgtcgtgctggaacataataccgccagcacgccgggtctggcggcgctggagacgattcgcctgacgagccgcgacggcggcaccgtaccgctcagcgcgattgcccgcattgagcagcgcttcgccccgctctccatcaatcatttagatcagttcccggttacgacattttcgtttaacgtgccggagggctattcgctcggcgatgcggtgcaggcgattctcgatacggaaaaaacgctcgccctgccagcggatattacaacgcagtttcagggcagtacgctcgccttccaggcggcgctgggcagcaccgtctggcttattgtcgccgccgtggtggcgatgtatatcgtgcttggcgtgctgtatgagagttttatccatccgattacgattctctcaacgctgcctacggcgggcgtcggcgcgctgctggcgctgatcatcgctggtagcgagctcgatattatcgccattatcggcattattttactgatcggtatcgtgaagaaaaacgccatcatgatgattgacttcgccctcgccgccgaacgcgaacaggggatgagtccgcgcgacgctatcttccaggcctgtctgctgcgttttcgaccgattctgatgaccacgctggcggcgttgctcggggcattgccattaatgttgagtaccggcgttggcgcggaattacgtcgcccgttggggatcgcgatggtgggcggcttactggtcagccaggtattaactctgtttaccactccggtgatttatctcctgtttgaccgcctgtcgctgtacgtgaaaagtcgctttccgcgccataaagaggaggcgtag

SEQ ID NO: 2836 - protein, 1040 aa, Salmonella typhi
MQVLPPGSTGGPSRLFILRPVATTLLMAAILLAGIIGYRFLPVAALPEVDYPTIQVVTLYPGASPDVMTSSVTAPLERQFGQMSGLKQMSSQSSGGASVVTLQFQLTLPLDVAEQEVQAAINAATNLLPSDLPNPPIYSKVNPADPPIMTLAVTSNAMPMTQVEDMVETRVAQKISQVSGVGLVTLAGGQRPAVRVKLNAQAIAALGLTSETVRTAITGANVNSAKGSLDGPERAVTLSANDQMQSADEYRKLIIAYQNGAPVRLGDVATVEQGAENSWLGAWANQAPAIVMNVQRQPGANIIATADSIRQMLPQLTESLPKSVKVTVLSDRTTNIRASVRDTQFELMLAIALVVMIIYLFLRNIPATIIPGVAVPLSLIGTFAVMVFLDFSINNLTLMALTIATGFVVDDAIVVIENISRYIEKGEKPLAAALKGAGEIGFTIISLTFSLIAVLIPLLFMGDIVGRLFREFAVTLAVAILISAVVSLTLTPMMCARMLSRQSLRKQNRFSRACERMFDRVIASYGRGLAKVLNHPWLTLSVAFATLLLSVMLWITIPKGFFPVQDNGIIQGTLQAPQSSSYASMAQRQRQVAERILQDPAVQSLTTFVGVDGANPTLNSARLQINLKPLDARDDRVQQVISRLQTAVATIPGVALYLQPTQDLTIDTQVSRTQYQFTLQATTLDALSHWVPKLQNALQSLPQLSEVSSDWQDRGLAAWVNVDRDSASRLGISMADVDNALYNAFGQRLISTIYTQANQYRVVLEHNTASTPGLAALETIRLTSRDGGTVPLSAIARIEQRFAPLSINHLDQFPVTTFSFNVPEGYSLGDAVQAILDTEKTLALPADITTQFQGSTLAFQAALGSTVWLIVAAVVAMYIVLGVLYESFIHPITILSTLPTAGVGALLALIIAGSELDIIAIIGIILLIGIVKKNAIMMIDFALAAEREQGMSPRDAIFQACLLRFRPILMTTLAALLGALPLMLSTGVGAELRRPLGIAMVGGLLVSQVLTLFTTPVIYLLFDRLSLYVKSRFPRHKEEA

SEQ ID NO: 2837 - DNA, 3123 bp, Salmonella typhimurium
  CDS (1)..(3123): transl_table=11
atgcaggtattacctccgggcagcacgggcggcccttcgcgtctgtttattctgcgccccgtggccaccactctgctgatggcggcgattttactcgccgggattatcggctatcgcttcctgcccgtcgccgctttgccggaggtcgactaccccactattcaggttgttacgctctaccctggcgccagcccggatgtcatgacctccgccgtcaccgcgccgcttgagcgccagttcggccagatgtcaggactgaagcagatgtcgtcgcaaagctccggcggcgcgtcagtggtaacgctacagtttcagttgacgctgccgctggacgttgccgagcaggaagtacaggcggcgattaacgcagccaccaatttattgccttccgacctgccgaatccgccgatttacagcaaagtcaatccggcggacccgccgattatgacgcttgccgtcacctcaaactcgatgccgatgacccaggtagaggacatggtagaaacccgcgtggcgcagaagatctcacaggtctccggcgtcgggctggtgacgcttgccggcgggcagcgccctgcggtacgcgtaaaactgaatgctcaggctgtcgccgcgctcggtctgaccagcgaaacggtccgtaccgcaattaccggcgccaacgtcaactcggcgaaaggcagtctggatggccccgaacgggcggtgacgctttctgctaacgatcagatgcagtctgccgacgaataccgcaggcttatcatcgcgtatcaaaacggcgcgccggtacggctgggcgatgtcgccaccgtcgaacagggggcggaaaatagctggctcggcgcatgggcgaatcaagcgccggctatcgtgatgaacgttcaacgccagcctggcgccaatatcattgcgacagcggacagcattcgccagatgctgccccagcttaccgaaagcctgccaaaatcggtgaaggtcacggtcctgtccgatcgcaccaccaatattcgcgcttccgtgcgcgatacccagtttgaactgatgctggcgatcgcgctggtcgtcatgattatctatctgtttttacgtaatattcccgccacaattattcccggcgtcgccgtaccgctgtcgcttatcggcacctttgcggtgatggtgtttttggatttttccattaataacctgacgctgatggcgctcactatcgccacgggtttcgtggtggacgatgcgattgtggtgatcgagaacatctcgcgctacatcgaaaaaggagaaaaaccgctggcggcggcgctcaaaggcgcgggtgaaatcggctttaccattatttccctcaccttttcactgattgcggtgctgatcccgttgctctttatgggcgatattgttggtcgactgttccgcgaatttgcggtgacgttggcggtagcgattttaatctccgccgtcgtctctttgacgctcacgcccatgatgtgcgcgcgtatgctcagccagcagtctctgcgtaaacaaaaccgcttttcccgcgcctgcgagcggatgtttgaccgcgtgatcgccagctacggacgtggattagcgaaagtgctcaaccatccgtggcttacattgagcgtggcattcgccacgctcctgctcagcgttatgctgtggatagtcattccgaaagggttctttccggtacaggataacggcattatccagggaacgctgcaggcgccgcaatcgtcatcgtatgccagtatggcgcaacgtcagcgccaggtggcggagcggatattacaggacccggcggtgcaaagcctgacgacttttgttggcgtagacggcgctaaccccacgctgaatagcgcgcgcctgcaaattaacctcaagccgctggatgcgcgtgatgaccgcgtgcagcaggtgatctcccggctgcaaaccgccgtggcgacgattcccggcgtggagctgtatctccagccgacgcaggatttaaccatcgacacgcaggtcagccgcacacagtatcagtttaccctgcaggccacgacgctcgatgcgctcagccactgggtgccaaaactgcagaacgcgctacagtcgttgccacagctctctgaggtaagcagcgactggcaagatcggggattagcggcctgggtgaatgtcgaccgcgacagcgccagccgtctgggtatcagcatggcggatgtggataacgcgctctacaacgcgttcggacaacgcctgatttcaacgatttatacccaggcgaaccagtaccgtgtcgtgctggaacataataccgccagcatgccgggcctggcggcgctggagacgattcgcctgacgagccgcgacggcggcaccgtaccgctcagcgcgattgcccgcattgagcagcgcttcgctccgctctccatcaatcatttagatcagttcccggttacgacattttcgtttaacgtgccggagagctattcgctcggcgatgcggtgcaggcgattctcgatacggaaaaaacgctcgccctgccagcggatattacaacgcagtttcagggtagtacgctcgccttccaggcggcgctaggcagcaccgtctggcttattgtcgccgccgtggtggcgatgtatatcgtgctcggcgtgctgtatgagagttttatccatccgattacgattctctcaacgctgcctacggcgggcgtcggcgcgctgctggcgctgatcatcgctggtagcgagctcgatattatcgccattatcggcattattttgctgatcggcatcgtgaagaaaaacgccatcatgatgattgacttcgccctcgccgccgaacgcgaacaggggatgagtccgcgcgacgctatcttccaggcctgtctgctgcgttttcgaccgattctgatgaccacgctggcggcgttgctcggggcattgccattaatgttgagtaccggcgttggcacggaattacgtcgcccgttggggatcgcgatggtaggcggcttactggtcagccaggtattaactctgtttaccacaccggtgatttatctcctgtttgaccgcctgtcgctgtacgtgaaaagtcgctttccgcgccataaagaggaggcgtag

SEQ ID NO: 2838 - protein, 1040 aa, Salmonella typhimurium
MQVLPPGSTGGPSRLFILRPVATTLLMAAILLAGIIGYRFLPVAALPEVDYPTIQVVTLYPGASPDVMTSAVTAPLERQFGQMSGLKQMSSQSSGGASVVTLQFQLTLPLDVAEQEVQAAINAATNLLPSDLPNPPIYSKVNPADPPIMTLAVTSNSMPMTQVEDMVETRVAQKISQVSGVGLVTLAGGQRPAVRVKLNAQAVAALGLTSETVRTAITGANVNSAKGSLDGPERAVTLSANDQMQSADEYRRLIIAYQNGAPVRLGDVATVEQGAENSWLGAWANQAPAIVMNVQRQPGANIIATADSIRQMLPQLTESLPKSVKVTVLSDRTTNIRASVRDTQFELMLAIALVVMIIYLFLRNIPATIIPGVAVPLSLIGTFAVMVFLDFSINNLTLMALTIATGFVVDDAIVVIENISRYIEKGEKPLAAALKGAGEIGFTIISLTFSLIAVLIPLLFMGDIVGRLFREFAVTLAVAILISAVVSLTLTPMMCARMLSQQSLRKQNRFSRACERMFDRVIASYGRGLAKVLNHPWLTLSVAFATLLLSVMLWIVIPKGFFPVQDNGIIQGTLQAPQSSSYASMAQRQRQVAERILQDPAVQSLTTFVGVDGANPTLNSARLQINLKPLDARDDRVQQVISRLQTAVATIPGVELYLQPTQDLTIDTQVSRTQYQFTLQATTLDALSHWVPKLQNALQSLPQLSEVSSDWQDRGLAAWVNVDRDSASRLGISMADVDNALYNAFGQRLISTIYTQANQYRVVLEHNTASMPGLAALETIRLTSRDGGTVPLSAIARIEQRFAPLSINHLDQFPVTTFSFNVPESYSLGDAVQAILDTEKTLALPADITTQFQGSTLAFQAALGSTVWLIVAAVVAMYIVLGVLYESFIHPITILSTLPTAGVGALLALIIAGSELDIIAIIGIILLIGIVKKNAIMMIDFALAAEREQGMSPRDAIFQACLLRFRPILMTTLAALLGALPLMLSTGVGTELRRPLGIAMVGGLLVSQVLTLFTTPVIYLLFDRLSLYVKSRFPRHKEEA

SEQ ID NO: 2839 - DNA, 3159 bp, Yersinia pestis
  CDS (1)..(3159): transl_table=11
atgcaagtgatgcctccaacacccggtggcgggccgtcacggctgtttattctgcgcccggtcgccaccacattatttatgatcgcgattttactggccgggattatcggttaccgcgccttgccggtctcggccctgccagaggtcgattacccaaccattcaggtggtgacgctctaccctggggcgagcccggatgtcgtgacatcgtcgattaccgcgccgctggaacgccagttcggccagatgtccggcctgaaacagatggcctcccaaagctcggggggcgcatcggtcattaccttgcaattccagctcaccttgccgctggatgtagcagaacaagaagtgcaggccgccattaacgcagcgaccaacctactgccttccgacctgccttatccaccaatttacaataaagtgaatcctgcggatccccccattctaacgctggctgtaaccgcgaccgccatccccatgacacaagtagaagacatggtggaaacccgcattgcgcagaaaatttcacaagtcacgggtgtcggtttagttaccctctccggtggtcagcgcccggcggtacgggtgaaattaaatgcgcctgccgtggcggcactggggctggacagcgagaccattcgcaccgccatcagtaatgccaacgtcaattccgccaaaggcagtttggatgggccaacccgttcggtgacgctatcagccaatgatcagatgaagtccgccgaagagtaccgtgacctgatcatcgcctaccaaaatggtgcgcccatccgcttacaagatgtcgccaccattgaacaaggggcggaaaataacaaactggccgcctgggccaatactcaatcagcaattgtgttgaatatccaacgtcaacctggggtcaatgtgatcgccaccgctgacagtattcgcgaaatgctgcctgagctgatcaaaagcctgcccaaatcggttgatgtcaaggtgctgaccgaccgcaccagcaccatccgcgcctcggtcaatgatgtgcaattcgagttactgctggccattgcactggtcgtgatggtgatttatctgtttctgcgtaatgccgccgcaaccattattcccagtatcgcggtgccgttatcgctggtcggtaccttcgccgccatgtattttctgggcttttcgatcaataacctgacattgatggccctcaccatcgccaccggttttgtggtggatgacgctatcgtggtgattgaaaatatctcccgttatatcgaaaagggagagaagccgctcgatgccgcgttgaagggggccggtgagatcggttttaccattatttcactgaccttctcattgattgccgtgttaattccgctgctgtttatggaggatatcgttggccggttgttccgcgaatttgccgtgacgctggcggtcgctatcctgatctcggcggtggtttccctgaccctaacaccgatgatgtgcgcgcggatgctcagttatgagtcactgcgtaaacaaaaccgcctgtctcgcgccagtgagaaattctttgactgggtgatcgcccattatgctgtcgccctgaaaaaagtcctgaatcatccgtggctgaccctaagtgtcgcgttcagcacactggtgctgacggtgatactttacttgctgatcccaaaaggctttttcccattacaagacaacgggctgattcaagggacactggaagcgccgcaatccgtttcgttcagtaatatggccgaacggcagcagcaggtggccgccattatcctcaaagatccggcagtagaaagcctgacctcgtttgtcggcgttgatggcaccaatgccaccctcaataatggccgtttgcagatcaaccttaaaccgttaagtgaacgggatgatcgcattccacagattattacccgtttacaggagagtgtcagtggggtgcccggtatcaaactgtatttgcagccggtacaagatttgaccattgatacccagctcagccggacacaatatcagttcacgctgcaagccacttcgctggaagaactcagtacctgggtgcccaaactggtcaatgaattgcagcaaaaagcgccgtttcaggatgtgaccagtgactggcaagatcaggggctggtggcgtttgttaatgtggatcgcgacagtgccagccgtttgggcattaccatggcagccatcgacaacgccttgtataacgcctttggtcaacggctgatttccaccatttatacgcagtccaaccaataccgggtggtgttagagcatgatgtgcaagccacgccaggactggcggcattcaatgatattcgcctgaccggtatcgatggcaaaggggtcccactgagcagcattgccaccattgaagagcgctttgggccactgtctatcaaccatttgaatcaattcccgtcagcaacggtatcgttcaatctggcgcagggttactccctcggagaggcggtagccgccgtgaccttggccgaaaaagagatccaactgcctgcggatatcaccacgcgtttccaaggctcgacgctggccttccaggccgcattgggcagtacgctttggctgattatcgccgccattgtggcgatgtatattgtgctcggcgtgttgtatgaaagttttattcatccaataactattttgtccaccttgccgaccgcgggtgtcggggccttgttagcgttgatgctaaccggcaatgaactggatgtgattgccatcatcgggattattttgttgataggcatcgtgaaaaagaacgccatcatgatgatcgactttgccctggctgccgagcgcgatcaggggatgacgccgtatgacgctatctatcaagcctgtctactgcgttttcgcccgatcctgatgaccacgctggccgcgctgttcggtgccttgccattgatgttgagtaccggtgtcggtgccgaactccgtcaaccgctgggggtgtgtatggtcggtgggctgattgtcagtcaggtgctgacgctgtttaccacgcccgttatttacctgctatttgataaattggcgcggaatactcgggggaaaaatcgccatcgtgatgaggatattgactcgtctgagttgctgaacggacaggagccacagtga

SEQ ID NO: 2840 - protein, 1052 aa, Yersinia pestis
MQVMPPTPGGGPSRLFILRPVATTLFMIAILLAGIIGYRALPVSALPEVDYPTIQVVTLYPGASPDVVTSSITAPLERQFGQMSGLKQMASQSSGGASVITLQFQLTLPLDVAEQEVQAAINAATNLLPSDLPYPPIYNKVNPADPPILTLAVTATAIPMTQVEDMVETRIAQKISQVTGVGLVTLSGGQRPAVRVKLNAPAVAALGLDSETIRTAISNANVNSAKGSLDGPTRSVTLSANDQMKSAEEYRDLIIAYQNGAPIRLQDVATIEQGAENNKLAAWANTQSAIVLNIQRQPGVNVIATADSIREMLPELIKSLPKSVDVKVLTDRTSTIRASVNDVQFELLLAIALVVMVIYLFLRNAAATIIPSIAVPLSLVGTFAAMYFLGFSINNLTLMALTIATGFVVDDAIVVIENISRYIEKGEKPLDAALKGAGEIGFTIISLTFSLIAVLIPLLFMEDIVGRLFREFAVTLAVAILISAVVSLTLTPMMCARMLSYESLRKQNRLSRASEKFFDWVIAHYAVALKKVLNHPWLTLSVAFSTLVLTVILYLLIPKGFFPLQDNGLIQGTLEAPQSVSFSNMAERQQQVAAIILKDPAVESLTSFVGVDGTNATLNNGRLQINLKPLSERDDRIPQIITRLQESVSGVPGIKLYLQPVQDLTIDTQLSRTQYQFTLQATSLEELSTWVPKLVNELQQKAPFQDVTSDWQDQGLVAFVNVDRDSASRLGITMAAIDNALYNAFGQRLISTIYTQSNQYRVVLEHDVQATPGLAAFNDIRLTGIDGKGVPLSSIATIEERFGPLSINHLNQFPSATVSFNLAQGYSLGEAVAAVTLAEKEIQLPADITTRFQGSTLAFQAALGSTLWLIIAAIVAMYIVLGVLYESFIHPITILSTLPTAGVGALLALMLTGNELDVIAIIGIILLIGIVKKNAIMMIDFALAAERDQGMTPYDAIYQACLLRFRPILMTTLAALFGALPLMLSTGVGAELRQPLGVCMVGGLIVSQVLTLFTTPVIYLLFDKLARNTRGKNRHRDEDIDSSELLNGQEPQ

SEQ ID NO: 2841 - DNA, 3159 bp, Yersinia pseudotuberculosis
  CDS (1)..(3159): transl_table=11
atgcaagtgatgcctccaacacccggtggcgggccgtcacggctgtttattctgcgcccggtcgccaccacattatttatgatcgcgattttactggccgggattatcggttaccgcgccttgccggtctcggcactgccagaggtcgattacccaaccattcaggtggtgacgctctaccctggagcgagcccggatgtcgtgacatcgtcaattaccgcgccgctggaacgccagttcggccagatgtccggcctgaaacagatggcctcccaaagctcggggggcgcatcggtcattaccttgcaattccagctcaccttgccgctggatgtagcagaacaagaagtgcaggctgccattaacgcagcgaccaacctactgccttccgacctgccttatccaccgatttacaataaagtgaatcctgcggatccccccattctaacgctggctgtaaccgcgaccgccatccccatgacacaagtagaagacatggtggaaacccgcattgcgcagaaaatttcacaagtcacgggtgtcggtttagttaccctctccggtggtcagcgcccggcggtacgggtgaaattaaatgcgcctgccgtggcggcactggggctggacagcgagaccattcgcaccgccatcagtaatgccaacgtcaattccgccaaaggcagtttggatgggccaacccgttcggtgacgctatcagccaatgatcagatgaagtccgccgaagagtaccgtgacctgatcatcgcctaccaaaatggtgcgcccatccgcttacaagatgtcgccaccattgaacaaggggcggaaaataacaaactggccgcctgggccaatactcaatcagcaattgtgttgaatatccaacgtcaacctggggtcaatgtgatcgccaccgctgacagtattcgcgaaatgctgcctgagctgatcaaaagcctgcctaaatcggttgatgtcaaggtgctgaccgaccgcaccagcaccatccgcgcctcggtcaatgatgtgcaattcgagttactgctggccattgcactggtcgtgatggtgatttatctgtttctgcgtaatgccgccgcaaccattattcccagtatcgcggtgccgttatcgctggtcggtaccttcgccgccatgtattttctgggcttttcgatcaataacctgacattgatggccctcaccatcgccaccggttttgtggtggatgacgctatcgtggtgattgaaaatatctcccgttatatcgaaaagggagagaagccgctcgatgccgcgttgaagggggccggtgagatcggttttaccattatttcactgaccttctcattgattgccgtgttaattccgctgctgtttatggaggatatcgttggccggttgttccgcgaatttgccgtgacgctggcggtcgctatcctgatctcggcggtggtttccctgaccctaacaccgatgatgtgcgcgcggatgctcagttatgagtcactgcgtaaacaaaaccgcctgtcccgcgccagtgagaaattctttgactgggtgatcgcccattatgctgtcgccctgaaaaaagtcctcaatcatccgtggctgaccctaagtgtcgcgttcagcacactggtgctgacggtgatactttacttgctgatcccaaaaggctttttcccattacaagacaacgggctgattcaagggacactggaagcgccgcaatccgtttcgttcagtaatatggccgaacggcagcagcaggtggccgccattatccttaaagatccggcagtagaaagcctgacctcgtttgtcggcgttgatggcaccaatgccaccctcaataatggccgtttgcagatcaaccttaaaccgttaagtgaacgggatgatcgcattccacagattattacccgtttacaggagagtgtcagtggggtgcccggtatcaaactgtatttgcagccggtacaagatttgaccattgatacccagctcagccggacacaatatcagttcacgctgcaagcgacttcgctggaagaactcagtacctgggtgcccaaactggtcaatgaattgcagcaaaaagcgccgtttcaggatgtgaccagtgactggcaagatcaggggctggtggcgtttgttaatgtggatcgcgacagcgccagccgtttgggcattaccatggcagccatcgacaacgccttgtataacgcctttggtcaacggctgatttccaccatttatacgcagtccaatcaataccgggtggtgttagagcatgatgtgcaagccacgccaggactggcggcattcaatgatattcgcctgaccggtagcgatggcaaaggggtgccactgaacagtattgccaccattgaagagcgctttgggccactgtctatcaaccatttgaatcaattcccgtcagcaacggtatcgttcaatctggcgcagggctactcccttggagaggcggtagccgccgtgaccttggccgaaaaagagatccaactgcctgcggatatcaccacgcgtttccaaggctcgacgctggccttccaggccgcattgggcagtacgctttggctgattatcgccgccattgtggcgatgtatattgtgctcggcgtgttgtatgaaagttttattcatccaataactattttgtccaccttgccgaccgcgggtgtcggggccttgttagcgttgatgctaaccggcaatgagctggatgtgattgccatcatcgggattattttgttgataggcatcgtgaaaaagaacgccatcatgatgatcgactttgccctggctgccgagcgcgatcaggggatgacgccgtatgacgctatctatcaagcctgtctactgcgttttcgcccgatcctgatgaccacgctggccgcgctgttcggtgccttgccattgatgttgagtaccggtgtcggtgccgaactccgtcaaccgctgggggtgtgtatggtcggtgggctgattgtcagtcaggtgctgacgctgtttaccacgcccgttatttacctgctatttgataaattggcgcggaatactcgggggaaaaatcgccatcgtgatgaggatattgactcgtctgagttgctgaacggacaggagccacagtga

SEQ ID NO: 2842 - protein, 1052 aa, Yersinia pseudotuberculosis
MQVMPPTPGGGPSRLFILRPVATTLFMIAILLAGIIGYRALPVSALPEVDYPTIQVVTLYPGASPDVVTSSITAPLERQFGQMSGLKQMASQSSGGASVITLQFQLTLPLDVAEQEVQAAINAATNLLPSDLPYPPIYNKVNPADPPILTLAVTATAIPMTQVEDMVETRIAQKISQVTGVGLVTLSGGQRPAVRVKLNAPAVAALGLDSETIRTAISNANVNSAKGSLDGPTRSVTLSANDQMKSAEEYRDLIIAYQNGAPIRLQDVATIEQGAENNKLAAWANTQSAIVLNIQRQPGVNVIATADSIREMLPELIKSLPKSVDVKVLTDRTSTIRASVNDVQFELLLAIALVVMVIYLFLRNAAATIIPSIAVPLSLVGTFAAMYFLGFSINNLTLMALTIATGFVVDDAIVVIENISRYIEKGEKPLDAALKGAGEIGFTIISLTFSLIAVLIPLLFMEDIVGRLFREFAVTLAVAILISAVVSLTLTPMMCARMLSYESLRKQNRLSRASEKFFDWVIAHYAVALKKVLNHPWLTLSVAFSTLVLTVILYLLIPKGFFPLQDNGLIQGTLEAPQSVSFSNMAERQQQVAAIILKDPAVESLTSFVGVDGTNATLNNGRLQINLKPLSERDDRIPQIITRLQESVSGVPGIKLYLQPVQDLTIDTQLSRTQYQFTLQATSLEELSTWVPKLVNELQQKAPFQDVTSDWQDQGLVAFVNVDRDSASRLGITMAAIDNALYNAFGQRLISTIYTQSNQYRVVLEHDVQATPGLAAFNDIRLTGSDGKGVPLNSIATIEERFGPLSINHLNQFPSATVSFNLAQGYSLGEAVAAVTLAEKEIQLPADITTRFQGSTLAFQAALGSTLWLIIAAIVAMYIVLGVLYESFIHPITILSTLPTAGVGALLALMLTGNELDVIAIIGIILLIGIVKKNAIMMIDFALAAERDQGMTPYDAIYQACLLRFRPILMTTLAALFGALPLMLSTGVGAELRQPLGVCMVGGLIVSQVLTLFTTPVIYLLFDKLARNTRGKNRHRDEDIDSSELLNGQEPQ

SEQ ID NO: 2843 - DNA, 3075 bp, Yersinia pestis
  CDS (1)..(3075): transl_table=11
gtgaaattcttcgctctgtttatccagcgcccggtcgccaccacactgttgacgctggcgatcaccctcagtggcataattggctttagcctactgccggtatcgccactgccgcaggttgactacccggtcattatggtcagcgcctcaatgcccggtgccgatccagaaaccatggcctcgtcggttgcgacaccgttggagcgcgccttgggaagaattgccggggtgaatgaaatgacctcgaccagttcgctgggtagcacgcggattattctgcaattcgatcttaaccgcgatatcaacggcgcggcccgtgatgtgcaggcggcgctcaatgccgcccagagcttgctgccgtcagggatgcccagccgcccaacctatcgtaaaatgaacccgtctgatgcgccgattatgatcatgacgctgacgtcagataccttctcacaggggcaactctatgattatgcctcgaccaaactggcgcaaaaaatcgcccagaccgagggggtcagtgatgtcacggtgggcggcagttctttacctgcggtgcgggtcgagctaaatcccagcgccttatttaatcagggcgtatcactggatgcggtgcgtcaagccatcagtgccgccaacgtgcgccgtccacaaggttcagtggatgccgcagagacacattggcaggtccaagccaacgatgaaatcaaaaccgccgagggctaccgcccgctgatcgtccactacaataatggctcgccggtacggctacaggatgtcgccaatgttatcgactcggtgcaggatgttcgcaatgcggggatgtccgcaggccaaccggccgtcctgttagtgatcagccgtgaaccgggggccaatattattgccaccgtagaccggatccgcgcggagttacccgccttacgcgcctcaatcccggcctcaattcagttaaatattgctcaagatcgctcacccaccattcgcgcttcactggatgaggtcgagcgttcattggtcattgcggtagccctggtcattctggtggtctttatcttcctgcgttcgggtcgagccacgttgatccccgccgttgcggtacccgtctcgttgatcggtacgtttgccgcgatgtacctgtgcggttttagtttgaataacctgtccctaatggcattgaccattgccaccggttttgtggtcgatgatgccatcgtggtgctggaaaatatttcccgccatttggaagcaggtgtgaaaccgaaggtggccgccctacgtggggtccgtgaagtgggttttaccgtgctatcaatgagtatttctctggtggcggtatttattcctctgctattgatggcggggctaccggggcgtttattccgtgaatttgctgtcacactgtcggtggcaataggcatttcactggtgatatccctgaccctaacgccaatgatgtgcgcctggttgctacgttcacacccaaaaggtcagcaacaacgtattcgcggttttggtaaagtgctattagctattcagcaaggctatggtcgttcactaaattgggccttaagccatacccgttgggtgatggttgtgctgctttccacaattgccctgaatgtctggctgtatatcagtatccccaaaacctttttccccgagcaggacaccggccggatgatgggctttattcaggccgatcagagtatttcgttccaatcgatgcagcaaaagctgaaagattttatgcagatcgtcggggcggatccggcagtggacagcgtcaccggctttacgggtggctcgcgcactaacagtggatcgatgtttatttcactgaagccgctcagcgaacgccaggaaaccgctcagcaggtgattactcgcttacgcggtaaactggcaaaagagccgggggccaacctgttcttgtcttccgtgcaagatatccgagttggtggccgtcattccaacgccgcctaccaatttaccctgttggcggatgatctggcagcactgcgcgagtgggaacccaaagtccgggcggcgctagccaaattgccacaattggcggatgtaaactcagatcagcaagataagggcgcggagatggcactgacttatgatcgcgaaaccatggcgcggctgggtattgatgtctctgaagcgaatgctctgctgaataatgctttcggccaacggcaaatatccaccatttatcagccgctgaaccaatacaaagtggtgatggaagtggctcctgaatatacgcaggatgtgagttcgctggataaaatgtttgtgattaacagcaatggtcaatccattccgctgtcctatttcgctaaatggcaacccgccaacgccccgctggcggtcaatcaccaaggcttatccgccgcgtcaaccatctcatttaacctgccagatggcggcagcttgtctgaggccacggcggctgtcgaacgagcgatgacagaactgggtgtcccctccaccgtgcgtggggcgtttgccggtaccgctcaggtattccaggaaacgctgaaatcgcagctctggctgattatggcggccatcgccacggtgtatatcgtgctggggattttatacgaaagttatgttcacccgctgaccatcctctccactttaccgtcggcaggggtcggggcgttgctggcgctggagttattcgatgcaccgttcagcctgatcgccttaatcggtattatgttgttgattggtattgtgaaaaagaacgccatcatgatggttgacttcgccctggatgcgcagcgtaatggcaatatcagcgcccgcgaggctatttttcaggccagtttactgcgtttccggccaatcatcatgaccaccttagccgcactgtttggggcgctccccttggtgcttagcagtggtgatggtgcagagttacgccagccgctggggattaccatcgtcggtgggctggtcgtgagccaattactgacgttgtacaccacaccggtgatttatctctattttgaccggttgcgtaaccgttttagcaagcaaccgctgatgaaattggaatag

SEQ ID NO: 2844 - protein, 1024 aa, Yersinia pestis
MKFFALFIQRPVATTLLTLAITLSGIIGFSLLPVSPLPQVDYPVIMVSASMPGADPETMASSVATPLERALGRIAGVNEMTSTSSLGSTRIILQFDLNRDINGAARDVQAALNAAQSLLPSGMPSRPTYRKMNPSDAPIMIMTLTSDTFSQGQLYDYASTKLAQKIAQTEGVSDVTVGGSSLPAVRVELNPSALFNQGVSLDAVRQAISAANVRRPQGSVDAAETHWQVQANDEIKTAEGYRPLIVHYNNGSPVRLQDVANVIDSVQDVRNAGMSAGQPAVLLVISREPGANIIATVDRIRAELPALRASIPASIQLNIAQDRSPTIRASLDEVERSLVIAVALVILVVFIFLRSGRATLIPAVAVPVSLIGTFAAMYLCGFSLNNLSLMALTIATGFVVDDAIVVLENISRHLEAGVKPKVAALRGVREVGFTVLSMSISLVAVFIPLLLMAGLPGRLFREFAVTLSVAIGISLVISLTLTPMMCAWLLRSHPKGQQQRIRGFGKVLLAIQQGYGRSLNWALSHTRWVMVVLLSTIALNVWLYISIPKTFFPEQDTGRMMGFIQADQSISFQSMQQKLKDFMQIVGADPAVDSVTGFTGGSRTNSGSMFISLKPLSERQETAQQVITRLRGKLAKEPGANLFLSSVQDIRVGGRHSNAAYQFTLLADDLAALREWEPKVRAALAKLPQLADVNSDQQDKGAEMALTYDRETMARLGIDVSEANALLNNAFGQRQISTIYQPLNQYKVVMEVAPEYTQDVSSLDKMFVINSNGQSIPLSYFAKWQPANAPLAVNHQGLSAASTISFNLPDGGSLSEATAAVERAMTELGVPSTVRGAFAGTAQVFQETLKSQLWLIMAAIATVYIVLGILYESYVHPLTILSTLPSAGVGALLALELFDAPFSLIALIGIMLLIGIVKKNAIMMVDFALDAQRNGNISAREAIFQASLLRFRPIIMTTLAALFGALPLVLSSGDGAELRQPLGITIVGGLVVSQLLTLYTTPVIYLYFDRLRNRFSKQPLMKLE

SEQ ID NO: 2845 - DNA, 3075 bp, Yersinia pseudotuberculosis
  CDS (1)..(3075): transl_table=11
gtgaaattcttcgctctgtttatccagcgcccggtcgccaccacactgttgacgctggcgatcaccctcagtggcataattggctttagcctactgccggtatcgccactgccgcaggttgactacccggtcattatggtcagcgcctcaatgcccggtgccgatccagaaaccatggcctcgtcggttgcgacaccgttggagcgcgccttgggaagaattgccggggtgaatgaaatgacctcgaccagttcgctgggtagcacgcggattattctgcaattcgatcttaaccgcgatatcaacggcgcggcccgtgatgtgcaggcggcgctcaatgccgcccagagcttgctgccgtcagggatgcccagccgcccaacctatcgtaaaatgaacccgtctgatgcgccgattatgatcatgacgctgacgtcagataccttctcacaggggcaactctatgattatgcctcgaccaaactggcgcaaaaaatcgcccagaccgagggggtcagtgatgtcacggtgggcggcagttctttacctgcggtgcgggtcgagctaaatcccagcgccttatttaatcagggcgtatcactggatgcggtgcgtcaagccatcagtgccgccaacgtgcgccgtccacaaggttcagtggatgccgcagagacacattggcaggtccaagccaacgatgagatcaaaaccgccgagggctaccgcccgctgatcgtccactacaataatggctcgccggtacggctacaggatgtcgccaatgttatcgactcggtgcaggatgttcgcaatgcggggatgtccgcaggccaaccggccgtcttgttagtgatcagccgtgaaccgggggccaatattattgccaccgtagaccggatccgcgcggagttacccgccttacgcgcctcaatcccggcctcaattcagttaaatattgctcaagatcgctcacccaccattcgcgcttcactggatgaggtcgagcgttcattggtcattgcggtagccctggtcattctggtggtctttatcttcctgcgttcgggtcgagccacattgatccccgccgttgctgtccccgtctcattgatcggtacgtttgccgcgatgtacctgtgcggttttagtttgaataacctgtccctaatggcattgaccattgccaccggttttgtggtcgatgatgccatcgtggtgctggaaaatatttcccgccatttggaagcgggtgtgaaaccgatggtggccgccctacgtggggtccgtgaagtgggttttaccgtgctatcaatgagtatttcactggtggcggtatttattcctctgctattgatggcggggctaccggggcgtttattccgcgaatttgctgtcacactgtcggtggcgattggcatttcactggtgatatccctgaccctaacgccaatgatgtgcgcctggttgctgcgttcacacccaaaaggtcagcaacaacgtattcgcggttttggtaaagtgctattagctattcagcaaggctatggtcgttcactgaattgggccttaggccatacccgctgggtgatggttgtgctgctttccacaattgccctgaatgtctggctgtatatcagtatccccaaaacctttttccccgagcaggacaccggccggatgatgggctttattcaggccgatcagagtatttcgttccaatcgatgcagcaaaagctgaaagattttatgcagatcgtcggggcggatccggcagtggacagcgtcaccggctttacggggggctcgcgcactaacagtggatcgatgtttatttcactgaagccgctcagcgaacgccaggaaaccgctcagcaggtgattactcgcttacgcggtaaactggccaaagagccgggggccaacctgttcttgtcttctgtgcaagatatccgagtcggtggccgtcattccaacgccgcctaccaatttaccctgttggcggatgatctggcagcactgcgcgagtgggaacccaaagtccgggcagcgctagccaaattgccacaattggcggatgtaaactcagatcagcaagataagggcgcggagatggcattaacttatgatcgcgaaaccatggcgcggctgggtattgatgtctctgaagcgaatgctctgctgaataatgctttcggccaacggcaaatatctaccatttatcagcctctgaaccaatacaaagtggtgatggaagtggctcctgaatatacgcaggatgtgagttcgctggataaaatgtttgtgattaacagcaatggtcaatccattccgctgtcctatttcgctaaatggcaacccgccaacgccccgctggcggtcaatcaccaaggcttatccgccgcttcaaccatctcatttaacctgccagatggcggcagcttgtctgaggccacggcggctgtcgaacgagcgatgacagaactgggtgtcccctccaccgtgcgtggggcgtttgccggtaccgctcaggtattccaggaaacgctgaaatcgcagctctggctgattatggcggccatcgccacggtgtatatcgtgctggggattttatacgaaagttatgttcacccgctgaccatcctctccactttaccgtcggcaggggtcggggcgttgctggcgctggagttattcgatgcaccgttcagcctgatcgccttaatcggtattatgttgttgattggtattgtgaaaaagaacgccatcatgatggttgacttcgccctggatgcgcagcgtaatggcaatatcagcgcccgcgaggctatttttcaggccagtttactgcgtttccggccaatcatcatgaccaccttagccgcactgtttggggcgctccccttggtgcttagcagtggtgatggtgcagagttacgccagccgctggggattaccatcgtcggtgggctggtcgtgagccaattactgacgttgtacaccacaccggtgatttatctctattttgaccggttgcgtaaccgttttagcaagcaaccgctgatgaaattggaatag

SEQ ID NO: 2846 - protein, 1024 aa, Yersinia pseudotuberculosis
MKFFALFIQRPVATTLLTLAITLSGIIGFSLLPVSPLPQVDYPVIMVSASMPGADPETMASSVATPLERALGRIAGVNEMTSTSSLGSTRIILQFDLNRDINGAARDVQAALNAAQSLLPSGMPSRPTYRKMNPSDAPIMIMTLTSDTFSQGQLYDYASTKLAQKIAQTEGVSDVTVGGSSLPAVRVELNPSALFNQGVSLDAVRQAISAANVRRPQGSVDAAETHWQVQANDEIKTAEGYRPLIVHYNNGSPVRLQDVANVIDSVQDVRNAGMSAGQPAVLLVISREPGANIIATVDRIRAELPALRASIPASIQLNIAQDRSPTIRASLDEVERSLVIAVALVILVVFIFLRSGRATLIPAVAVPVSLIGTFAAMYLCGFSLNNLSLMALTIATGFVVDDAIVVLENISRHLEAGVKPMVAALRGVREVGFTVLSMSISLVAVFIPLLLMAGLPGRLFREFAVTLSVAIGISLVISLTLTPMMCAWLLRSHPKGQQQRIRGFGKVLLAIQQGYGRSLNWALGHTRWVMVVLLSTIALNVWLYISIPKTFFPEQDTGRMMGFIQADQSISFQSMQQKLKDFMQIVGADPAVDSVTGFTGGSRTNSGSMFISLKPLSERQETAQQVITRLRGKLAKEPGANLFLSSVQDIRVGGRHSNAAYQFTLLADDLAALREWEPKVRAALAKLPQLADVNSDQQDKGAEMALTYDRETMARLGIDVSEANALLNNAFGQRQISTIYQPLNQYKVVMEVAPEYTQDVSSLDKMFVINSNGQSIPLSYFAKWQPANAPLAVNHQGLSAASTISFNLPDGGSLSEATAAVERAMTELGVPSTVRGAFAGTAQVFQETLKSQLWLIMAAIATVYIVLGILYESYVHPLTILSTLPSAGVGALLALELFDAPFSLIALIGIMLLIGIVKKNAIMMVDFALDAQRNGNISAREAIFQASLLRFRPIIMTTLAALFGALPLVLSSGDGAELRQPLGITIVGGLVVSQLLTLYTTPVIYLYFDRLRNRFSKQPLMKLE

SEQ ID NO: 2847 - DNA, 21 bp, Artificial sequence
  primer
atgcaggtgttacccccgagc

SEQ ID NO: 2848 - DNA, 22 bp, Artificial sequence
  primer
ttacgcctcctcttcatgacgg

SEQ ID NO: 2849 - protein, 1144 aa, Artificial sequence
  consensus sequence
  Variant (3)..(3): Xaa in position 3 is any amino acid
  Variant (6)..(14): Xaa in position 6 to 14 is any amino acid
  Variant (15)..(18): Xaa in position 15 to 18 is any or no amino acid
  Variant (20)..(25): Xaa in position 20 to 25 is any amino acid
  Variant (28)..(31): Xaa in position 28 to 31 is any amino acid
  Variant (33)..(36): Xaa in position 33 to 36 is any amino acid
  Variant (38)..(40): Xaa in position 38 to 40 is any amino acid
  Variant (42)..(46): Xaa in position 42 to 46 is any amino acid
  Variant (49)..(59): Xaa in position 49 to 59 is any amino acid
  Variant (63)..(69): Xaa in position 63 to 69 is any amino acid
  Variant (71)..(75): Xaa in position 71 to 75 is any amino acid
  Variant (77)..(77): Xaa in position 77 is any amino acid
  Variant (79)..(80): Xaa in position 79 to 80 is any amino acid
  Variant (81)..(81): Xaa in position 81 is any or no amino acid
  Variant (83)..(89): Xaa in position 83 to 89 is any amino acid
  Variant (91)..(98): Xaa in position 91 to 98 is any amino acid
  Variant (100)..(102): Xaa in position 100 to 102 is any amino acid
  Variant (104)..(111): Xaa in position 104 to 111 is any amino acid
  Variant (112)..(113): Xaa in position 112 to 113 is any or no amino acid
  Variant (116)..(163): Xaa in position 116 to 163 is any amino acid
  Variant (164)..(167): Xaa in position 164 to 167 is any or no amino acid
  Variant (170)..(171): Xaa in position 170 to 171 is any amino acid
  Variant (173)..(175): Xaa in position 173 to 175 is any amino acid
  Variant (177)..(179): Xaa in position 177 to 179 is any amino acid
  Variant (180)..(180): Xaa in position 180 is any or no amino acid
  Variant (182)..(182): Xaa in position 182 is any amino acid
  Variant (184)..(208): Xaa in position 184 to 208 is any amino acid
  Variant (210)..(214): Xaa in position 210 to 214 is any amino acid
  Variant (216)..(245): Xaa in position 216 to 245 is any amino acid
  Variant (246)..(257): Xaa in position 246 to 257 is any or no amino acid
  Variant (259)..(260): Xaa in position 259 to 260 is any amino acid
  Variant (261)..(261): Xaa in position 261 is any or no amino acid
  Variant (263)..(264): Xaa in position 263 to 264 is any amino acid
  Variant (266)..(295): Xaa in position 266 to 295 is any amino acid
  Variant (296)..(307): Xaa in position 296 to 307 is any or no amino acid
  Variant (309)..(310): Xaa in position 309 to 310 is any amino acid
  Variant (312)..(330): Xaa in position 312 to 330 is any amino acid
  Variant (331)..(332): Xaa in position 331 to 332 is any or no amino acid
  Variant (334)..(342): Xaa in position 334 to 342 is any amino acid
  Variant (344)..(347): Xaa in position 344 to 347 is any amino acid
  Variant (349)..(350): Xaa in position 349 to 350 is any amino acid
  Variant (352)..(354): Xaa in position 352 to 354 is any amino acid
  Variant (356)..(358): Xaa in position 356 to 358 is any amino acid
  Variant (360)..(364): Xaa in position 360 to 364 is any amino acid
  Variant (367)..(368): Xaa in position 367 to 368 is any amino acid
  Variant (370)..(372): Xaa in position 370 to 372 is any amino acid
  Variant (375)..(378): Xaa in position 375 to 378 is any amino acid
  Variant (380)..(381): Xaa in position 380 to 381 is any amino acid
  Variant (384)..(387): Xaa in position 384 to 387 is any amino acid
  Variant (389)..(389): Xaa in position 389 is any amino acid
  Variant (392)..(392): Xaa in position 392 is any amino acid
  Variant (394)..(397): Xaa in position 394 to 397 is any amino acid
  Variant (399)..(401): Xaa in position 399 to 401 is any amino acid
  Variant (403)..(403): Xaa in position 403 is any amino acid
  Variant (405)..(407): Xaa in position 405 to 407 is any amino acid
  Variant (409)..(409): Xaa in position 409 is any amino acid
  Variant (411)..(411): Xaa in position 411 is any amino acid
  Variant (413)..(415): Xaa in position 413 to 415 is any amino acid
  Variant (417)..(417): Xaa in position 417 is any amino acid
  Variant (419)..(419): Xaa in position 419 is any amino acid
  Variant (427)..(428): Xaa in position 427 to 428 is any amino acid
  Variant (431)..(432): Xaa in position 431 to 432 is any amino acid
  Variant (434)..(437): Xaa in position 434 to 437 is any amino acid
  Variant (438)..(447): Xaa in position 438 to 447 is any or no amino acid
  Variant (449)..(452): Xaa in position 449 to 452 is any amino acid
  Variant (453)..(453): Xaa in position 453 is any or no amino acid
  Variant (456)..(457): Xaa in position 456 to 457 is any amino acid
  Variant (459)..(471): Xaa in position 459 to 471 is any amino acid
  Variant (472)..(472): Xaa in position 472 is any or no amino acid
  Variant (474)..(474): Xaa in position 474 is any amino acid
  Variant (477)..(478): Xaa in position 477 to 478 is any amino acid
  Variant (480)..(487): Xaa in position 480 to 487 is any amino acid
  Variant (489)..(489): Xaa in position 489 is any amino acid
  Variant (491)..(492): Xaa in position 491 to 492 is any amino acid
  Variant (496)..(504): Xaa in position 496 to 504 is any amino acid
  Variant (506)..(509): Xaa in position 506 to 509 is any amino acid
  Variant (513)..(513): Xaa in position 513 is any amino acid
  Variant (515)..(520): Xaa in position 515 to 520 is any amino acid
  Variant (522)..(544): Xaa in position 522 to 544 is any amino acid
  Variant (545)..(569): Xaa in position 545 to 569 is any or no amino acid
  Variant (571)..(587): Xaa in position 571 to 587 is any amino acid
  Variant (588)..(600): Xaa in position 588 to 600 is any or no amino acid
  Variant (602)..(605): Xaa in position 602 to 605 is any amino acid
  Variant (607)..(608): Xaa in position 607 to 608 is any amino acid
  Variant (610)..(610): Xaa in position 610 is any amino acid
  Variant (612)..(680): Xaa in position 612 to 680 is any amino acid
  Variant (681)..(692): Xaa in position 681 to 692 is any or no amino acid
  Variant (694)..(732): Xaa in position 694 to 732 is any amino acid
  Variant (733)..(738): Xaa in position 733 to 738 is any or no amino acid
  Variant (740)..(773): Xaa in position 740 to 773 is any amino acid
  Variant (774)..(776): Xaa in position 774 to 776 is any or no amino acid
  Variant (779)..(780): Xaa in position 779 to 780 is any amino acid
  Variant (782)..(784): Xaa in position 782 to 784 is any amino acid
  Variant (786)..(794): Xaa in position 786 to 794 is any amino acid
  Variant (796)..(799): Xaa in position 796 to 799 is any amino acid
  Variant (801)..(813): Xaa in position 801 to 813 is any amino acid
  Variant (814)..(816): Xaa in position 814 to 816 is any or no amino acid
  Variant (818)..(818): Xaa in position 818 is any amino acid
  Variant (820)..(846): Xaa in position 820 to 846 is any amino acid
  Variant (847)..(907): Xaa in position 847 to 907 is any or no amino acid
  Variant (910)..(941): Xaa in position 910 to 941 is any amino acid
  Variant (942)..(942): Xaa in position 942 is any or no amino acid
  Variant (944)..(946): Xaa in position 944 to 946 is any amino acid
  Variant (947)..(948): Xaa in position 947 to 948 is any or no amino acid
  Variant (950)..(986): Xaa in position 950 to 986 is any amino acid
  Variant (987)..(991): Xaa in position 987 to 991 is any or no amino acid
  Variant (993)..(998): Xaa in position 993 to 998 is any amino acid
  Variant (1001)..(1003): Xaa in position 1001 to 1003 is any amino acid
  Variant (1007)..(1009): Xaa in position 1007 to 1009 is any amino acid
  Variant (1011)..(1012): Xaa in position 1011 to 1012 is any amino acid
  Variant (1014)..(1017): Xaa in position 1014 to 1017 is any amino acid
  Variant (1019)..(1022): Xaa in position 1019 to 1022 is any amino acid
  Variant (1025)..(1027): Xaa in position 1025 to 1027 is any amino acid
  Variant (1029)..(1040): Xaa in position 1029 to 1040 is any amino acid
  Variant (1041)..(1046): Xaa in position 1041 to 1046 is any or no amino acid
  Variant (1049)..(1051): Xaa in position 1049 to 1051 is any amino acid
  Variant (1053)..(1053): Xaa in position 1053 is any amino acid
  Variant (1055)..(1057): Xaa in position 1055 to 1057 is any amino acid
  Variant (1060)..(1060): Xaa in position 1060 is any amino acid
  Variant (1062)..(1065): Xaa in position 1062 to 1065 is any amino acid
  Variant (1068)..(1073): Xaa in position 1068 to 1073 is any amino acid
  Variant (1074)..(1074): Xaa in position 1074 is any or no amino acid
  Variant (1076)..(1080): Xaa in position 1076 to 1080 is any amino acid
  Variant (1082)..(1084): Xaa in position 1082 to 1084 is any amino acid
  Variant (1086)..(1088): Xaa in position 1086 to 1088 is any amino acid
  Variant (1090)..(1090): Xaa in position 1090 is any amino acid
  Variant (1094)..(1094): Xaa in position 1094 is any amino acid
  Variant (1097)..(1098): Xaa in position 1097 to 1098 is any amino acid
  Variant (1100)..(1102): Xaa in position 1100 to 1102 is any amino acid
  Variant (1104)..(1105): Xaa in position 1104 to 1105 is any amino acid
  Variant (1108)..(1111): Xaa in position 1108 to 1111 is any amino acid
  Variant (1113)..(1113): Xaa in position 1113 is any amino acid
  Variant (1115)..(1115): Xaa in position 1115 is any amino acid
  Variant (1117)..(1117): Xaa in position 1117 is any amino acid
  Variant (1119)..(1121): Xaa in position 1119 to 1121 is any amino acid
  Variant (1123)..(1127): Xaa in position 1123 to 1127 is any amino acid
  Variant (1129)..(1135): Xaa in position 1129 to 1135 is any amino acid
  Variant (1138)..(1138): Xaa in position 1138 is any amino acid
  Variant (1139)..(1140): Xaa in position 1139 to 1140 is any or no amino acid
  Variant (1142)..(1143): Xaa in position 1142 to 1143 is any amino acid
FIXRPXXXXXXXXXXXXXGXXXXXXLPXXXXPXXXXPXXXVXXXXXGAXXXXXXXXXXXPLEXXXXXXXGXXXXXSXSXXXGXXXXXXXFXXXXXXXXAXXXVXXXXXXXXXXLPXXXXXXXXXXXXXXXXXXXXXXXXXXXXXXXXXXXXXXXXXXXXXXXXXXXXGVXXVXXXGXXXXAXRXXXXXXXXXXXXXXXXXXXXXXXXXNXXXXXGXXXXXXXXXXXXXXXXXXXXXXXXXXXXXXXXXXXXXXXXXXGXXXRXXDXXXXXXXXXXXXXXXXXXXXXXXXXXXXXXXXXXXXXXXXXXPXXNXXXXXXXXXXXXXXXXXXXXXPXXXXXXXXXDXXXXIXXSXXXVXXXLXXXXXLVXXVXXXFLXXXXAXXIPXXXXPXSLXGXXXXMXXXGXSXXXLXLXAXXXAXGXVVDDAIVXXENXXRXXXXXXXXXXXXXXGXXXXXAAXXGXXXXXXXXXXXXXXLXAVXXPXXXXXXXXGXLXXEFAXXXXXXXXXSXXXXLTLXPXXXXXXLXXXXXXXXXXXXXXXXXXXXXXXXXXXXXXXXXXXXXXXXXXXXXXXXLXXXXXXXXXXXXXXXXXXXXXXXXXXXXXXPXXXXPXXDXGXXXXXXXXXXXXXXXXXXXXXXXXXXXXXXXXXXXXXXXXXXXXXXXXXXXXXXXXXXXXXXXXXXXXXXXXXXXXXXXXXLXXXXXXXXXXXXXXXXXXXXXXXXXXXXXXXXXXXXXXXXXXXXXLXXXXXXXXXXXXXXXXXXXXXXXXXXXXXXXXXXXXXDRXXAXXXGXXXXXXXXXLXXXXGXXXXXXXXXXXXXXXXYXVXXXXXXXXXXXXXXXXXXXXXXXXXXXXXXXXXXXXXXXXXXXXXXXXXXXXXXXXXXXXXXXXXXXXXXXXXXXXXXXXXXXXXXXXPLXXXXXXXXXXXXXXXXXXXXXXXXXXXXXXXXXGXXXXXAXXXXXXXXXXXXXXXXXXXXXXXXXXXXXXXXXXXXXXXXXXAXXXXXXVLXXXYESXXXPXXIXXXXPXXXXGAXXXLXXXXXXXXXXXXXXXXXXIGXXXLXGXXXKNXIXXXXFAXXXXXXXGXXXXXAXXXAXXXRXRPIXMTXXAXXXGXXPLXXXXGXGXEXRXXXGXXXXXGXXXXXXXTLXXXPXXY

SEQ ID NO: 2850 - protein, 55 aa, Artificial sequence
  protein pattern
  Variant (2)..(8): Xaa in position 2 to 8 is any amino acid
  Variant (9)..(9): Xaa in position 9 is any or no amino acid
  Variant (11)..(11): Xaa in position 11 is any amino acid
  Variant (12)..(12): Xaa in position 12 is Ala, Cys or Ser
  Variant (13)..(13): Xaa in position 13 is Ile, Leu or Val
  Variant (14)..(14): Xaa in position 14 is Ala, Ile, Leu or Val
  Variant (15)..(15): Xaa in position 15 is Ala, Gly, Ser or Thr
  Variant (16)..(16): Xaa in position 16 is Ala, Ser or Thr
  Variant (17)..(19): Xaa in position 17 to 19 is any amino acid
  Variant (20)..(20): Xaa in position 20 is Ile, Leu or Met
  Variant (21)..(25): Xaa in position 21 to 25 is any amino acid
  Variant (27)..(27): Xaa in position 27 is any amino acid
  Variant (28)..(28): Xaa in position 28 is Asp or Asn
  Variant (29)..(29): Xaa in position 29 is any amino acid
  Variant (30)..(30): Xaa in position 30 is Phe, Ile or Leu
  Variant (31)..(31): Xaa in position 31 is Ser or Thr
  Variant (33)..(33): Xaa in position 33 is Phe, Leu or Met
  Variant (34)..(34): Xaa in position 34 is Ala or Gly
  Variant (35)..(35): Xaa in position 35 is Ile, Leu or Met
  Variant (36)..(36): Xaa in position 36 is any amino acid
  Variant (37)..(37): Xaa in position 37 is Ile, Leu or Val
  Variant (38)..(38): Xaa in position 38 is Ala, Cys, Gly or Ser
  Variant (39)..(39): Xaa in position 39 is any amino acid
  Variant (41)..(41): Xaa in position 41 is Phe, Ile or Leu
  Variant (43)..(43): Xaa in position 43 is Ile or Val
  Variant (46)..(46): Xaa in position 46 is Ala, Gly, Ser or Thr
  Variant (47)..(47): Xaa in position 47 is Ile or Val
  Variant (49)..(49): Xaa in position 49 is Ile, Met or Val
  Variant (50)..(50): Xaa in position 50 is any amino acid
  Variant (53)..(53): Xaa in position 53 is Ile or Val
  Variant (54)..(54): Xaa in position 54 is any amino acid
  Variant (55)..(55): Xaa in position 55 is His, Lys or Arg
AXXXXXXXXPXXXXXXXXXXXXXXXSXXXXXLXXXXXXXGXVXDDXXVXXENXXX

SEQ ID NO: 2851 - protein, 41 aa, Artificial sequence
  protein pattern
  Variant (2)..(2): Xaa in position 2 is any amino acid
  Variant (6)..(6): Xaa in position 6 is any or no amino acid
  Variant (8)..(8): Xaa in position 8 is any or no amino acid
  Variant (10)..(10): Xaa in position 10 is Ala, Asn, Ser, Thr or Val
  Variant (11)..(11): Xaa in position 11 is any amino acid
  Variant (13)..(15): Xaa in position 13 to 15 is any amino acid
  Variant (16)..(16): Xaa in position 16 is Ala, Gly or Ser
  Variant (17)..(17): Xaa in position 17 is any amino acid
  Variant (18)..(18): Xaa in position 18 is Ile, Leu, Met or Val
  Variant (20)..(20): Xaa in position 20 is Ile, Leu or Met
  Variant (21)..(22): Xaa in position 21 to 22 is any amino acid
  Variant (23)..(23): Xaa in position 23 is Ala, Asp, Glu, Gly or Ser
  Variant (24)..(24): Xaa in position 24 is any amino acid
  Variant (25)..(25): Xaa in position 25 is Asp, Gly or Thr
  Variant (26)..(26): Xaa in position 26 is any amino acid
  Variant (27)..(27): Xaa in position 27 is Ala, Asp or Gly
  Variant (28)..(28): Xaa in position 28 is Ala, Gly, Ser or Thr
  Variant (29)..(30): Xaa in position 29 to 30 is any amino acid
  Variant (32)..(33): Xaa in position 32 to 33 is any amino acid
  Variant (34)..(34): Xaa in position 34 is Ile, Leu, Met or Val
  Variant (36)..(37): Xaa in position 36 to 37 is any amino acid
  Variant (38)..(38): Xaa in position 38 is Ile, Leu, Met or Val
  Variant (39)..(40): Xaa in position 39 to 40 is any amino acid
RXRPIXMXTXXAXXXXXXPXXXXXXXXXXXRXXXGXXXXXG

SEQ ID NO: 2852 - protein, 40 aa, Artificial sequence
  protein pattern
  Variant (2)..(5): Xaa in position 2 to 5 is any amino acid
  Variant (6)..(6): Xaa in position 6 is any or no amino acid
  Variant (8)..(9): Xaa in position 8 to 9 is any amino acid
  Variant (10)..(10): Xaa in position 10 is any or no amino acid
  Variant (12)..(12): Xaa in position 12 is any amino acid
  Variant (13)..(13): Xaa in position 13 is Phe, Ile, Leu, Met or Val
  Variant (14)..(15): Xaa in position 14 to 15 is any amino acid
  Variant (16)..(16): Xaa in position 16 is Glu, Gln or Ser
  Variant (18)..(18): Xaa in position 18 is Ala, Gly, Ser or Thr
  Variant (19)..(20): Xaa in position 19 to 20 is any amino acid
  Variant (21)..(21): Xaa in position 21 is Ile, Leu, Met or Val
  Variant (22)..(22): Xaa in position 22 is Ala, Cys, Gly, Ser, Thr or Val
  Variant (23)..(23): Xaa in position 23 is any amino acid
  Variant (24)..(24): Xaa in position 24 is Ala, Gly, Ser or Thr
  Variant (25)..(27): Xaa in position 25 to 27 is any amino acid
  Variant (29)..(31): Xaa in position 29 to 31 is any amino acid
  Variant (32)..(32): Xaa in position 32 is Ala or Ser
  Variant (35)..(35): Xaa in position 35 is any amino acid
  Variant (36)..(36): Xaa in position 36 is Ala, Cys, Ser, Thr or Val
  Variant (38)..(38): Xaa in position 38 is any amino acid
  Variant (39)..(39): Xaa in position 39 is Ile, Leu or Met
  Variant (40)..(40): Xaa in position 40 is Ala, Cys, Asn or Ser
PXXXXXGXXXGXXXXXFXXXXXXXXXXSXXXXLTXXPXXX

SEQ ID NO: 2853 - protein, 23 aa, Artificial sequence
  protein pattern
  Variant (2)..(4): Xaa in position 2 to 4 is any amino acid
  Variant (5)..(6): Xaa in position 5 to 6 is any or no amino acid
  Variant (8)..(8): Xaa in position 8 is any amino acid
  Variant (9)..(9): Xaa in position 9 is any or no amino acid
  Variant (11)..(11): Xaa in position 11 is Ile or Leu
  Variant (12)..(13): Xaa in position 12 to 13 is any amino acid
  Variant (16)..(16): Xaa in position 16 is Ala, Gly or Ser
  Variant (18)..(18): Xaa in position 18 is Leu or Met
  Variant (19)..(19): Xaa in position 19 is Ile, Leu or Met
  Variant (20)..(20): Xaa in position 20 is Ile or Val
  Variant (21)..(21): Xaa in position 21 is Asp or Glu
GXXXXXLXXGXXXKNXIXXXXFA

SEQ ID NO: 2854 - protein, 46 aa, Artificial sequence
  protein pattern
  Variant (2)..(7): Xaa in position 2 to 7 is any amino acid
  Variant (8)..(9): Xaa in position 8 to 9 is any or no amino acid
  Variant (11)..(13): Xaa in position 11 to 13 is any amino acid
  Variant (14)..(15): Xaa in position 14 to 15 is any or no amino acid
  Variant (17)..(17): Xaa in position 17 is any amino acid
  Variant (18)..(18): Xaa in position 18 is Ile or Val
  Variant (19)..(20): Xaa in position 19 to 20 is any amino acid
  Variant (22)..(22): Xaa in position 22 is any amino acid
  Variant (23)..(23): Xaa in position 23 is Ile, Leu or Val
  Variant (24)..(24): Xaa in position 24 is any amino acid
  Variant (25)..(25): Xaa in position 25 is Ile or Val
  Variant (26)..(26): Xaa in position 26 is any amino acid
  Variant (27)..(27): Xaa in position 27 is Ala, Cys, Thr or Val
  Variant (28)..(30): Xaa in position 28 to 30 is any amino acid
  Variant (33)..(33): Xaa in position 33 is Ala, Asp, Asn, Ser or Thr
  Variant (34)..(34): Xaa in position 34 is Ala, Pro or Ser
  Variant (35)..(37): Xaa in position 35 to 37 is any amino acid
  Variant (38)..(38): Xaa in position 38 is Ala, Glu, Gly, Asn, Gln, Ser or Thr
  Variant (39)..(40): Xaa in position 39 to 40 is any amino acid
  Variant (41)..(41): Xaa in position 41 is Ile, Leu or Val
  Variant (42)..(42): Xaa in position 42 is Ala, Gly, Ser or Thr
  Variant (43)..(43): Xaa in position 43 is any amino acid
  Variant (44)..(44): Xaa in position 44 is Ile, Leu, Pro or Val
  Variant (45)..(45): Xaa in position 45 is Ile, Leu or Val
GXXXXXXXXLXXXXXPXXXXPXXXXXXXXXGAXXXXXXXXXXXXXE

SEQ ID NO: 2855 - protein, 24 aa, Artificial sequence
  protein pattern
  Variant (2)..(2): Xaa in position 2 is Asp, Asn or Ser
  Variant (3)..(5): Xaa in position 3 to 5 is any amino acid
  Variant (7)..(7): Xaa in position 7 is Phe, Ile, Leu, Met or Val
  Variant (8)..(8): Xaa in position 8 is any amino acid
  Variant (9)..(9): Xaa in position 9 is Ile or Val
  Variant (10)..(10): Xaa in position 10 is Ile, Leu or Met
  Variant (11)..(11): Xaa in position 11 is any amino acid
  Variant (12)..(12): Xaa in position 12 is Ala, Gly, Ser or Thr
  Variant (13)..(13): Xaa in position 13 is Leu or Val
  Variant (15)..(15): Xaa in position 15 is any amino acid
  Variant (16)..(16): Xaa in position 16 is Ala, Gly or Ser
  Variant (17)..(18): Xaa in position 17 to 18 is any amino acid
  Variant (21)..(23): Xaa in position 21 to 23 is any or no amino acid
EXXXXPXXXXXXXPXXXXGAXXXL

SEQ ID NO: 2856 - protein, 33 aa, Artificial sequence
  protein pattern
  Variant (2)..(2): Xaa in position 2 is Ile or Val
  Variant (3)..(4): Xaa in position 3 to 4 is any amino acid
  Variant (5)..(5): Xaa in position 5 is Asp or Asn
  Variant (6)..(8): Xaa in position 6 to 8 is any amino acid
  Variant (9)..(9): Xaa in position 9 is Ile, Leu, Met or Val
  Variant (10)..(13): Xaa in position 10 to 13 is any amino acid
  Variant (14)..(14): Xaa in position 14 is Ile, Leu, Met or Val
  Variant (15)..(17): Xaa in position 15 to 17 is any amino acid
  Variant (18)..(18): Xaa in position 18 is Ala, Asp, Glu, Gly, Gln, Ser or Thr
  Variant (19)..(19): Xaa in position 19 is Ile, Leu or Val
  Variant (20)..(22): Xaa in position 20 to 22 is any amino acid
  Variant (23)..(23): Xaa in position 23 is Ile, Leu or Val
  Variant (24)..(26): Xaa in position 24 to 26 is any amino acid
  Variant (28)..(30): Xaa in position 28 to 30 is any amino acid
  Variant (31)..(32): Xaa in position 31 to 32 is any or no amino acid
RXXXXXXXXXXXXXXXXXXXXXXXXXNXXXXXG

SEQ ID NO: 2857 - protein, 33 aa, Artificial sequence
  protein pattern
  Variant (2)..(5): Xaa in position 2 to 5 is any amino acid
  Variant (6)..(7): Xaa in position 6 to 7 is any or no amino acid
  Variant (9)..(11): Xaa in position 9 to 11 is any amino acid
  Variant (12)..(12): Xaa in position 12 is Ile, Leu or Val
  Variant (13)..(13): Xaa in position 13 is any amino acid
  Variant (14)..(14): Xaa in position 14 is Ile, Leu or Val
  Variant (15)..(15): Xaa in position 15 is any amino acid
  Variant (17)..(22): Xaa in position 17 to 22 is any amino acid
  Variant (23)..(23): Xaa in position 23 is Asp, Glu, Gly, Asn or Ser
  Variant (24)..(24): Xaa in position 24 is any amino acid
  Variant (26)..(28): Xaa in position 26 to 28 is any amino acid
  Variant (30)..(30): Xaa in position 30 is any amino acid
  Variant (31)..(31): Xaa in position 31 is Ala, Asp, Glu, Asn, Gln, Ser or Thr
  Variant (32)..(32): Xaa in position 32 is any amino acid
  Variant (33)..(33): Xaa in position 33 is Ile, Leu or Val
SXXXXXXGXXXXXXXFXXXXXXXXAXXXVXXXX

SEQ ID NO: 2858 - DNA, 669 bp, Escherichia coli K12
  CDS (1)..(669): transl_table=11
atgccatcactcagtaaagaagcggccctggttcatgaagcgttagttgcgcgaggactggaaacaccgctgcgcccgcccgtgcatgaaatggataacgaaacgcgcaaaagccttattgctggtcatatgaccgaaatcatgcagctgctgaatctcgacctggctgatgacagtttgatggaaacgccgcatcgcatcgctaaaatgtatgtcgatgaaattttctccggtctggattacgccaatttcccgaaaatcaccctcattgaaaacaaaatgaaggtcgatgaaatggtcaccgtgcgcgatatcactctgaccagcacctgtgaacaccattttgttaccatcgatggcaaagcgacggtggcctatatcccgaaagattcggtgatcggtctgtcaaaaattaaccgcattgtgcagttctttgcccagcgtccgcaggtgcaggaacgtctgacgcagcaaattcttattgcgctacaaacgctgctgggcaccaataacgtggctgtctcgatcgacgcggtgcattactgcgtgaaggcgcgtggcatccgcgatgcaaccagtgccacgacaacgacctctcttggtggattgttcaaatccagtcagaatacgcgccacgagtttctgcgcgctgtgcgtcatcacaactga

SEQ ID NO: 2859 - protein, 222 aa, Escherichia coli K12
MPSLSKEAALVHEALVARGLETPLRPPVHEMDNETRKSLIAGHMTEIMQLLNLDLADDSLMETPHRIAKMYVDEIFSGLDYANFPKITLIENKMKVDEMVTVRDITLTSTCEHHFVTIDGKATVAYIPKDSVIGLSKINRIVQFFAQRPQVQERLTQQILIALQTLLGTNNVAVSIDAVHYCVKARGIRDATSATTTTSLGGLFKSSQNTRHEFLRAVRHHN

SEQ ID NO: 2860 - DNA, 732 bp, saccharomyces cerevisiae
  CDS (1)..(732)
atgcataacatccaattagtgcaagagatagaaagacatgaaaccccgttaaacattagacctacctctccatacactttaaaccctcctgtcgagagagatgggttttcttggccaagtgtgggtacaagacaacgtgcagaggaaactgaagaggaggaaaaggaacgaattcaacgcatttcaggcgctatcaagacaattttgaccgaactgggtgaagatgtcaacagagaaggtctactagatactccacaaagatacgctaaagccatgctttatttcactaaaggttaccaaacgaacattatggacgatgtcattaagaatgctgtctttgaagaagatcatgatgaaatggttattgttcgtgatattgaaatttactcgttatgtgaacatcatttggtgccatttttcggcaaggttcatatcgggtatataccaaataaaaaagtcatcgggttaagtaagttggccagattggcagaaatgtatgcgagaaggctccaagttcaagaaagacttacaaagcaaattgcaatggccctaagtgatattctaaaaccattaggtgtagccgttgttatggaagcttctcatatgtgcatggtttcaagaggcattcaaaaaacgggatcttctacggtaacttcttgtatgcttggagggtttagggctcataaaacaagagaagagtttttaactcttttaggaagaagaagtatttga

SEQ ID NO: 2861 - protein, 243 aa, saccharomyces cerevisiae
MHNIQLVQEIERHETPLNIRPTSPYTLNPPVERDGFSWPSVGTRQRAEETEEEEKERIQRISGAIKTILTELGEDVNREGLLDTPQRYAKAMLYFTKGYQTNIMDDVIKNAVFEEDHDEMVIVRDIEIYSLCEHHLVPFFGKVHIGYIPNKKVIGLSKLARLAEMYARRLQVQERLTKQIAMALSDILKPLGVAVVMEASHMCMVSRGIQKTGSSTVTSCMLGGFRAHKTREEFLTLLGRRSI

SEQ ID NO: 2862 - DNA, 573 bp, bacillus subtilis
  CDS (1)..(573)
atgaaagaagttaataaagagcaaatcgaacaagctgttcgtcaaattttagaagcgatcggagaagacccgaatagagaagggcttcttgatactccgaaaagagtcgcaaagatgtatgccgaagtattctccggcttgaatgaagatccaaaagaacatttccagactatcttcggtgaaaaccatgaggagcttgttcttgtaaaagatatagcgtttcattctatgtgtgagcatcaccttgttcccttttatggaaaagcacatgttgcatatatcccgcgaggcggaaaggtcacaggactcagcaaactggcacgtgccgttgaagccgttgcaaagcgcccgcagcttcaggaacgcatcacttctacaattgcagaaagcatcgtagaaacgcttgatccgcatggcgtaatggtagtggttgaagcggaacacatgtgcatgacgatgcgcggtgtaagaaaaccgggtgcgaaaactgtgacttcagcagtcagaggcgtttttaaagatgatgccgctgcccgtgcagaagtattggaacatattaaacgccaggactaa

SEQ ID NO: 2863 - protein, 190 aa, bacillus subtilis
MKEVNKEQIEQAVRQILEAIGEDPNREGLLDTPKRVAKMYAEVFSGLNEDPKEHFQTIFGENHEELVLVKDIAFHSMCEHHLVPFYGKAHVAYIPRGGKVTGLSKLARAVEAVAKRPQLQERITSTIAESIVETLDPHGVMVVVEAEHMCMTMRGVRKPGAKTVTSAVRGVFKDDAAARAEVLEHIKRQD

SEQ ID NO: 2864 - DNA, 609 bp, Mycobacterium tuberculosis
  CDS (1)..(609)
atgtcgcagctggattcgcgcagcgcatctgctcgtatccgtgtgttcgaccagcaacgtgccgaggccgcggtgcgcgaattgctgtacgcgatcggcgaggatccggatagggacggcttggtagccaccccgtcccgggttgcccggtcataccgcgaaatgttcgccgggctctacaccgaccccgactcggtgttgaacaccatgttcgacgaagaccacgacgagctggtgttggtcaaggaaatccctatgtactccacctgcgaacaccacctggtggcgttccacggtgtggcccacgtcggctacatcccgggcgacgacggcagggtgaccggcttgtcaaagatcgcgcgactggtcgatctgtacgccaagcgacctcaggtccaggagcggctcaccagtcagatcgccgatgccctgatgaaaaaactcgatccacgcggggtaatcgtggtgatcgaggctgagcatctgtgcatggcgatgcgcggggttcgcaagcccggctcggtcaccactacgtcggcggtgcgcggactgttcaaaaccaatgccgcttctcgagccgaagcgctcgacctcattttgcggaagtga

SEQ ID NO: 2865 - protein, 202 aa, Mycobacterium tuberculosis
MSQLDSRSASARIRVFDQQRAEAAVRELLYAIGEDPDRDGLVATPSRVARSYREMFAGLYTDPDSVLNTMFDEDHDELVLVKEIPMYSTCEHHLVAFHGVAHVGYIPGDDGRVTGLSKIARLVDLYAKRPQVQERLTSQIADALMKKLDPRGVIVVIEAEHLCMAMRGVRKPGSVTTTSAVRGLFKTNAASRAEALDLILRK

SEQ ID NO: 2866 - DNA, 1050 bp, Lactococcus lactis; IL1403
  CDS (1)..(1050)
atgcaaacaacttacttaagcatgggaagtaatattggtgaccgtcagtattatttacatgaagccattcgtttattgggaaaacaccctaaaattatgattgaaaaagtatcaaatttttatgaaagtactccagtcggcggcgtcaaacaagatgattttactaatttggcattaaaggtggcaacgctacttgaacctttggaattattatcttttattcatgaagttgagttatctttgaaccgtgagcgaaaaattcattgggggccaagaacaattgatattgatattattttctatgacgacttagaaatgcaagtagaaaacttggttattccacataaagaagcttttaatcgtctttttgtcttgaaacctatttttgaacttattgataaagactttaaatattatgcgtcaatagaaaaagcaatagccgaactttcagtaagtgaacaagagctccatgtaataaaagaagaaaaaacaccgagaaatcgtattgaagatgccgttaaagagattctctttgcagtaggtgaaaatccaaatcgagaaggattacttgaaactccagcaagagtagctaaaatgtatgaagaaattctttcgtcacaacgcttaagcaagtttaatgagtataaactttttgaaattgattcttctaaaacggattcaatcgtgttgattaaagatattcctttttattcaatgtgtgagcatcatatgttaccattttttgggaaagctcatgttgcatatattccagctgatggaaaaattattggcttgtcaaaaattccccgtttagttgattatgtttcgcgcaaactctcggttcaagaaaatatcactcatgatattggagatattttgactgatattttgaatcctaaaggagtggcagttcttgttgaaggacgtcatatgtgcgttgaaatgcgtggagtaaaaaaagtaaattctattactaaaacttcttattttttaggtgaatttaaagaaaataatgaaaaaagaatggaatttttagaaagtcttttatga

SEQ ID NO: 2867 - protein, 349 aa, Lactococcus lactis; IL1403
MQTTYLSMGSNIGDRQYYLHEAIRLLGKHPKIMIEKVSNFYESTPVGGVKQDDFTNLALKVATLLEPLELLSFIHEVELSLNRERKIHWGPRTIDIDIIFYDDLEMQVENLVIPHKEAFNRLFVLKPIFELIDKDFKYYASIEKAIAELSVSEQELHVIKEEKTPRNRIEDAVKEILFAVGENPNREGLLETPARVAKMYEEILSSQRLSKFNEYKLFEIDSSKTDSIVLIKDIPFYSMCEHHMLPFFGKAHVAYIPADGKIIGLSKIPRLVDYVSRKLSVQENITHDIGDILTDILNPKGVAVLVEGRHMCVEMRGVKKVNSITKTSYFLGEFKENNEKRMEFLESLL

SEQ ID NO: 2868 - DNA, 669 bp, Klebsiella pneumoniae
  CDS (1)..(669)
atgtcatcactgagtaaagaagccgtcctcgttcatgaagcgctggtcgctcgtgggctggagacgccgatgcgtgcgccagtacaagaaattgataacgaaacacgcaagcgtttgattaccggtcatatgaccgagattatgcaactgctgaatctggatctgagtgatgacagtctgatggagaccccgcatcgcatcgccaaaatgtatgtcgatgagatcttctccgggctggattactctcgcttcccgaaaatcaccgtcattgaaaacaaaatgaaggtcgatgaaatggtcaccgtgcgcgatatcaccctgaccagcacctgcgaacaccatttcgttaccatcgatggtaaagcgacggtagcctatatcccgaaagattcggtgatcggcctgtcgaaaatcaaccgcatcgtgcagttcttcgcccaacgtccgcaggtccaggagcgtctgacgcagcagatcctgatcgcgctgcagacgctgctcggcaccaacaacgtggcggtatccattgacgcggtgcattattgcgtgaaggcgcgcggcattcgcgacgcgaccagcgccaccaccactacctctctcggcggcctgtttaaatccagccagaatacccgccaggaattcctgcgcgcagtacgtcaccacgactaa

SEQ ID NO: 2869 - protein, 222 aa, Klebsiella pneumoniae
MSSLSKEAVLVHEALVARGLETPMRAPVQEIDNETRKRLITGHMTEIMQLLNLDLSDDSLMETPHRIAKMYVDEIFSGLDYSRFPKITVIENKMKVDEMVTVRDITLTSTCEHHFVTIDGKATVAYIPKDSVIGLSKINRIVQFFAQRPQVQERLTQQILIALQTLLGTNNVAVSIDAVHYCVKARGIRDATSATTTTSLGGLFKSSQNTRQEFLRAVRHHD

SEQ ID NO: 2870 - DNA, 831 bp, Candida albicans
  CDS (1)..(831)
atgtcaaacccatcacataatccaaaacatcatcttcgtgaagaagattccaatggaactcaagatggaccaaaatcaactgtacctatcaaaagatctaaattggttggctcatccaatttagtatctccaaattttttacctagagatttaatagaaactccattgcaaacacgtgctgcatctccattgactttaaacccaccaattgatagcgatggattatcatggccatctcaaggagcaagacttagaatagagcaaacctcagaagaagctaaagccagagaagaacgtattgcctcggccgtaaaagtaatcttggaagaattgggcgaggacacttcacgtgaaggattattagaaacacctgaacgatatgctcgtgccatgttatatttcacaaaaggatatgaagataatattagggatgttattaaaagagcagtttttgaagaagatcatgatgaaatggttattgttagagatattgagatttattcactttgtgaacatcatttagttccatttttcgggaaagctcatattgcatatattccaaataaaagagttttaggtttaagtaaattggcaagattggcagaaatgtattcaagaagatttcaggttcaagaaagactaaccaaacaaattgccatggcattaagtgaaatcttgaaaccaagaggtgttgcagtagtcattgaagccactcatatgtgtatggtcagtagaggggttcaaaaaactggctcttcaactactacaagttgtatgttgggttgtttccgtgatcaacaaaaaaccagagaagaggtcttaacatattag

SEQ ID NO: 2871 - protein, 276 aa, Candida albicans
MSNPSHNPKHHLREEDSNGTQDGPKSTVPIKRSKLVGSSNLVSPNFLPRDLIETPLQTRAASPLTLNPPIDSDGLSWPSQGARLRIEQTSEEAKAREERIASAVKVILEELGEDTSREGLLETPERYARAMLYFTKGYEDNIRDVIKRAVFEEDHDEMVIVRDIEIYSLCEHHLVPFFGKAHIAYIPNKRVLGLSKLARLAEMYSRRFQVQERLTKQIAMALSEILKPRGVAVVIEATHMCMVSRGVQKTGSSTTTSCMLGCFRDQQKTREEVLTY

SEQ ID NO: 2872 - DNA, 693 bp, Vibrio cholerae O1 biovar eltor str. N16961
  CDS (1)..(693): transl_table=11
ttgtcagccatccgaaaggggtatttaagaggtagaggaatgtcaggtcttagcgaatccgcgaagttggtgaaagatgcgctagagcgccgagggttggaaacaccaatgcagcccaacttggcgacaccagcagagaaaaaggaaaaaatcgaacagcatatgcgtgagatcctcaacctgctcggactggacttaacggatgacagtttggaagaaaccccacaacgcatcgctaagatgtatgtggatgagatcttctcagggttggattatgccaacttccccaagatcactgttatcgaaaataagatgaaagtgagtgagatggttaaagtgaaagacatcacactgaccagcacgtgtgaacaccacttagtcaccatcgatggcacggcagcggtggcgtacatcccgcgcggcaaaatcatcggcttatcgaaaattaaccgtattgtgcgcttttttgcccagcgtccgcaggtgcaagagcgtatgacgcagcagatcttagttgcgctgcaaacgttgcttgagtcggatgatgtggcagtcaccatcgatgcgactcactattgcgtgaaatcccgcggcgtgatggatgcaaccagcgtcaccacaacgaccgctttgggggggatttttaaatctaaccctgcgacgcgtgcggaattcctacacggtttgcgctaa

SEQ ID NO: 2873 - protein, 230 aa, Vibrio cholerae O1 biovar eltor str. N16961
MSAIRKGYLRGRGMSGLSESAKLVKDALERRGLETPMQPNLATPAEKKEKIEQHMREILNLLGLDLTDDSLEETPQRIAKMYVDEIFSGLDYANFPKITVIENKMKVSEMVKVKDITLTSTCEHHLVTIDGTAAVAYIPRGKIIGLSKINRIVRFFAQRPQVQERMTQQILVALQTLLESDDVAVTIDATHYCVKSRGVMDATSVTTTTALGGIFKSNPATRAEFLHGLR

SEQ ID NO: 2874 - DNA, 717 bp, Yersinia pestis KIM
  CDS (1)..(717): transl_table=11
gtgacccgcatcatgcttgtcttatctggatgcgtaagcctgttggagaaaagaatgtcatcgctaagtaaagaagctgagttggttcatcaagcgctgctggcccgtggtcttgaaacccctttacgtaaaccagaattagatgccgagacgcgcaaaactcggattcaggcccatatgacagaagtcatgcatttgctgaatcttgatttaaccgacgatagtctggctgatacaccaagacgcattgcgaagatgtatgttgatgagattttctccggattggattacgaaaatttccctaaaatcacactgattcaaaataaaatgaaagttgatgaaatggtaacggtacgggatatcactctgaccagcacctgcgaacatcattttgtgacgattgatgggaaagccaccgtcgcttatattccgaaagacagtgtcattggtttgtcgaaaatcaaccgtatcgtgcagttttttgcgcagcgtccgcaagtgcaggaacgattaacacagcagatcttgctcgcattacaaaccctgttgggtaccaataatgtcgcagtttctattgatgcagttcattattgcgttaaagcacgtggtatccgtgatgcgaccagcgcgacgaccaccacatcattaggcgggttatttaaatccagtcagaatacgcgtcaggaatttctgcgtgcggttcgtcaccacggctga

SEQ ID NO: 2875 - protein, 238 aa, Yersinia pestis KIM
MTRIMLVLSGCVSLLEKRMSSLSKEAELVHQALLARGLETPLRKPELDAETRKTRIQAHMTEVMHLLNLDLTDDSLADTPRRIAKMYVDEIFSGLDYENFPKITLIQNKMKVDEMVTVRDITLTSTCEHHFVTIDGKATVAYIPKDSVIGLSKINRIVQFFAQRPQVQERLTQQILLALQTLLGTNNVAVSIDAVHYCVKARGIRDATSATTTTSLGGLFKSSQNTRQEFLRAVRHHG

SEQ ID NO: 2876 - DNA, 729 bp, Bdellovibrio bacteriovorus HD100
  CDS (1)..(729): transl_table=11
atgacgatggcaaaaacaacaaagaagaccccccagaaaaccagcactaaaagtgtaaaagcaaagccggaatcccatgctgcggacgtgtcagcgtccgtaaagcagattctggaaaacgttcgcccaacaccgatgatccacaacggtctgaccaacgaagaaaagatcgaacgtatcaccgaaaagttcactgacatcatgaacactctgggcttggatctgaaagacgattctttgcgcgaaacaccgaagcgtgttgccaaaatgtacgtgaacgaagttttcggaggattggatcccaagaagttcccgaaaatgactgtgatcgacaataagatgaactacgatcaaatgattgtagtgcaaagtatcggctgcctgtctttctgcgaacaccacttcctgcccatcgacggcttcgcaactgtggcgtacatccccaataaaaaagtaatcggtctttccaagatcaaccgtatcgtgcagtacttctcccgccgtcctcaggtgcaggagcgtttgacaaaacaaatcgccgactgccttcaatacatcttggacaccgaacacatcgcagtccacatcaacgcaaaacactactgcgtaatgatgagaggcatcgaagacacttccagcacaaccagcacaagcgacctaagaggccacttcaaatccagaatggaaacccgcgaagagttcctagaacactgccgaacgaagtactaa

SEQ ID NO: 2877 - protein, 242 aa, Bdellovibrio bacteriovorus HD100
MTMAKTTKKTPQKTSTKSVKAKPESHAADVSASVKQILENVRPTPMIHNGLTNEEKIERITEKFTDIMNTLGLDLKDDSLRETPKRVAKMYVNEVFGGLDPKKFPKMTVIDNKMNYDQMIVVQSIGCLSFCEHHFLPIDGFATVAYIPNKKVIGLSKINRIVQYFSRRPQVQERLTKQIADCLQYILDTEHIAVHINAKHYCVMMRGIEDTSSTTSTSDLRGHFKSRMETREEFLEHCRTKY

SEQ ID NO: 2878 - DNA, 663 bp, Erwinia carotovora subsp. atroseptica SCRI1043
  CDS (1)..(663): transl_table=11
atgtcatcactaagtaaagaagccgttatggtgcacgaagcgctgctggcacgcggtctggaaacgccgctgcgtggggcgttgttggatcgggatacgcgtaagcaacgtattgccgagcatatgacggaaattatgaatttgctgagcctcgatctgggcgatgacagcctggctgaaacaccgactcgtatcgccaaaatgtacgttgatgaaatattctccggtttggactacgccaacttccccaaaatcaccatcattgaaaacaaaatgaaggtcgatgaaatggtcaccgtgcgtgatatcacattgaccagcacctgcgaacaccatttcgtgatgatcgatgggaaagctacggtggcgtatattccaaaagatggcgtcattggcttgtcgaagctcaaccgaatcgttcagtttttctctcagcgtcctcaggtgcaggagcgcttaactcagcagattttggttgcgctgcaaacgctgttgggaacaaacaatgttgcggtctcgattgatgcagtgcactactgcgtgaaggcacgcggtattcgtgatgcgactagcgcaacgaccacgacatcgttaggcggactgtttaaatccagccagaacacgcgtcaggaattcttgcgcgcggtacgccaccacaattaa

SEQ ID NO: 2879 - protein, 220 aa, Erwinia carotovora subsp. atroseptica SCRI1043
MSSLSKEAVMVHEALLARGLETPLRGALLDRDTRKQRIAEHMTEIMNLLSLDLGDDSLAETPTRIAKMYVDEIFSGLDYANFPKITIIENKMKVDEMVTVRDITLTSTCEHHFVMIDGKATVAYIPKDGVIGLSKLNRIVQFFSQRPQVQERLTQQILVALQTLLGTNNVAVSIDAVHYCVKARGIRDATSATTTTSLGGLFKSSQNTRQEFLRAVRHHN

SEQ ID NO: 2880 - DNA, 705 bp, Yersinia pseudotuberculosis IP 32953
  CDS (1)..(705): transl_table=11
atgcttgtcttatctggatgcgtaagcctgttggagaaaagaatgtcatcgctaagtaaagaagctgagttggttcatcaagcgctgctggcccgtggtcttgaaacccctttacgtaaaccagaattagatgccgagacgcgcaaaactcggattcaggcccatatgacagaagtcatgcatttgctgaatcttgatttaaccgacgatagtctggctgatacaccaagacgcattgcgaagatgtatgttgatgagattttctccggattggattacgaaaatttccctaaaatcacactgattcaaaataaaatgaaagttgatgaaatggtaacggtacgggatatcactctgaccagcacctgcgaacatcattttgtgacgattgatgggaaagccaccgtcgcttatattccgaaagacagtgtcattggtttgtcgaaaatcaaccgtatcgtgcagttttttgcgcagcgtccgcaagtgcaggaacgattaacacagcagatcttgctcgcattacaaaccctgttgggtaccaataatgtcgcagtttctattgatgcagttcattattgcgttaaagcacgtggtatccgtgatgcgaccagcgcgacgaccaccacatcattaggtgggttatttaaatccagtcagaatacgcgtcaggaatttctgcgtgcggttcgtcaccacggctga

SEQ ID NO: 2881 - protein, 234 aa, Yersinia pseudotuberculosis IP 32953
MLVLSGCVSLLEKRMSSLSKEAELVHQALLARGLETPLRKPELDAETRKTRIQAHMTEVMHLLNLDLTDDSLADTPRRIAKMYVDEIFSGLDYENFPKITLIQNKMKVDEMVTVRDITLTSTCEHHFVTIDGKATVAYIPKDSVIGLSKINRIVQFFAQRPQVQERLTQQILLALQTLLGTNNVAVSIDAVHYCVKARGIRDATSATTTTSLGGLFKSSQNTRQEFLRAVRHHG

SEQ ID NO: 2882 - DNA, 657 bp, Mannheimia succiniciproducens MBEL55E
  CDS (1)..(657): transl_table=11
atgagtaggatttcagcagaggcggaaaaagtccgccatgcattaatagaaaaagggattgaaaccccgatgattgcattgacgaaaagtaaaaacgaacgtcgtatcggtattgagaaccgtatgcgagaagttatgcaattaatcggcttggatttgacggacgacagcctggaagaaacgccggttcggttggctaaaatgtttattgatgagattttcagcgggctggattatacaaattttccgaaaattactaatatcgaaaatcgcatgaaggtcagcgaaatggtgttggtaaatgatgttactttaaccagcacctgcgagcatcatttcgtaactattgacggtttggtttcagtagcttattacccgaaaaaatgggttatcgggttatcgaaaattaatcgggtagtgcagtttttcgcccagcgtccgcaggttcaggaacgtttgaccgagcaaattttattggcttttcaaactattttagaaacggaagatgttgccgtttatatgaaagcaacgcatttttgtgtaaaatgccgtggcattaaagataccaacagctacacggttacttctgcttttggcggtgtatttcttgaagatcgcgaaacccgcaaagaatttttaagtttaatcaataaataa

SEQ ID NO: 2883 - protein, 218 aa, Mannheimia succiniciproducens MBEL55E
MSRISAEAEKVRHALIEKGIETPMIALTKSKNERRIGIENRMREVMQLIGLDLTDDSLEETPVRLAKMFIDEIFSGLDYTNFPKITNIENRMKVSEMVLVNDVTLTSTCEHHFVTIDGLVSVAYYPKKWVIGLSKINRVVQFFAQRPQVQERLTEQILLAFQTILETEDVAVYMKATHFCVKCRGIKDTNSYTVTSAFGGVFLEDRETRKEFLSLINK

SEQ ID NO: 2884 - DNA, 657 bp, Haemophilus influenzae 86-028NP
  CDS (1)..(657): transl_table=11
atgagcaaaatttcactggatgcactgaatgtaagaaatgccttgattgaaaaaggtattgagacacctatgattgatccaacacaggctaaagatgaacgtcgagaaagcattgcgaaacacatgcatgaagtaatgaagctgattggattagatttgcgagatgatagtttagaagaaacgccaaatcgtttagctaaaatgtttattgatgagatttttagtggaatggattatgccaattttcctaaaatgacgaaaatcaaaaatcagatgaaagtcagcgaaatggtgcaagtgaatgacatcactctaacaagcacttgtgaacatcattttgtgacgattgatggtaaagtttgtgtagcgtactatccaaaagattgggtgattggtctttctaaaattaatcgaattgtctcgttttttgcgcaacgtccacaggttcaagaacgcttaactgagcaacttttgacagcatttcaaaccattcttgaaaccgatgatgtggcggtatatgtgaaagcgacccatttttgcgtgaaagcacgtggtattagagatacaaatagttatactgtcacatctgcttatggtggcgtattcttagaagatagagatactcgtaaagaatttttagccacagttcaaaaatag

SEQ ID NO: 2885 - protein, 218 aa, Haemophilus influenzae 86-028NP
MSKISLDALNVRNALIEKGIETPMIDPTQAKDERRESIAKHMHEVMKLIGLDLRDDSLEETPNRLAKMFIDEIFSGMDYANFPKMTKIKNQMKVSEMVQVNDITLTSTCEHHFVTIDGKVCVAYYPKDWVIGLSKINRIVSFFAQRPQVQERLTEQLLTAFQTILETDDVAVYVKATHFCVKARGIRDTNSYTVTSAYGGVFLEDRDTRKEFLATVQK

SEQ ID NO: 2886 - DNA, 711 bp, Haemophilus somnus 129PT
  CDS (1)..(711)
ttgctagaatgtcaggcatttttaaaggatataacgattttacgggaagtagtcatgagcaatttatctccggaagcgattaaggttcgtaatgctttggttgaaaaaggaattgaaacaccaatgattgatcttgtgcaagataaagatcaacgtcgtcaaggtattgaacaacatatgcgtgaggttataaaactgattggtttagatttatctgatgacagtttggaagaaacaccggcacgtttatcaaaaatgtttattgatgagatttttagtggtttagattacgctaatttccctaaaattactaatattgaaaaccgcatgaaagtaagtgaaatggtgctagttgatgatgtgactttaaccagtacttgtgaacatcattttgtaactattgatggtaaagtatcagtagcttattacccgcaaaaatgggtgatcggtttatctaaaattaatcgtgttgttgctttttttgcacaacgtcctcaagttcaggaacgtctaacgcaacaaattttgttggcattccaaaccattttagaaacggaagatgtagccgtttatgttaaagctacgcatttttgcgtaaaatgccgtggaattaaagataccaatagttacactgtgacatcggcttttggcggagtatttttggacgacagagaaactagaaaagagtttttaaccttgttaaaaaaatga

SEQ ID NO: 2887 - protein, 236 aa, Haemophilus somnus 129PT
MLECQAFLKDITILREVVMSNLSPEAIKVRNALVEKGIETPMIDLVQDKDQRRQGIEQHMREVIKLIGLDLSDDSLEETPARLSKMFIDEIFSGLDYANFPKITNIENRMKVSEMVLVDDVTLTSTCEHHFVTIDGKVSVAYYPQKWVIGLSKINRVVAFFAQRPQVQERLTQQILLAFQTILETEDVAVYVKATHFCVKCRGIKDTNSYTVTSAFGGVFLDDRETRKEFLTLLKK

SEQ ID NO: 2888 - DNA, 657 bp, Haemophilus somnus 2336
  CDS (1)..(657)
atgagcaatttatctccggaagcgattaaggttcgtaatgctttggttgaaaaaggaattgaaacaccaatgattgatcttgtgcaagataaagatcaacgtcgtcaaggtattgaacaacatatgcgtgaggttataaaactgattggtttagatttatctgatgacagtttggaagaaacaccggcacgtttatcaaaaatgtttattgatgagatttttagtggtttagattacgctaatttccctaaaattactaatattgaaaaccgcatgaaagtaagtgaaatggtgctagttgatgatgtgactttaaccagtacttgtgaacatcattttgtaactattgatggtaaagtgtcagtagcttattacccgcaaaaatgggtgatcggtttatctaaaattaatcgtgttgttgctttttttgcacaacgtcctcaagttcaggaacgtctaacgcaacaaattttgttggcattccaaaccattttagaaacggaagatgtagccgtttatgttaaagctacgcatttttgcgtaaaatgccgtggaattaaagataccaatagttacactgtgacatcggcttttggcggagtatttttggacgacagagaaaccagaaaagagtttttaaccttgttaaaaaaatga

SEQ ID NO: 2889 - protein, 218 aa, Haemophilus somnus 2336
MSNLSPEAIKVRNALVEKGIETPMIDLVQDKDQRRQGIEQHMREVIKLIGLDLSDDSLEETPARLSKMFIDEIFSGLDYANFPKITNIENRMKVSEMVLVDDVTLTSTCEHHFVTIDGKVSVAYYPQKWVIGLSKINRVVAFFAQRPQVQERLTQQILLAFQTILETEDVAVYVKATHFCVKCRGIKDTNSYTVTSAFGGVFLDDRETRKEFLTLLKK

SEQ ID NO: 2890 - DNA, 657 bp, Actinobacillus pleuropneumoniae serovar 1 str. 4074
  CDS (1)..(657)
atgagcattatctccgcagaagcccaaaaagtgcgtgaagccttaattgcgaaaggcattgaaaccccaaccgttcaactgactaaagacaaagattcccgtcgtgccgaaattcaacagcatatgcgttcggtactggaattactgggattggatttacaagacgatagtttggaagaaactccgcaccgcttggcgaagatgtatgtcgatgaaatttttagcggcttggattatgcgactttcccgaaaattaccaatattgaaaatcgtatgaaagtcagcgaaatggtgttggtggacgatattaccctgacttccacttgcgaacaccattttgtgacgattgacggtaaagtggcggtggcgtattacccgaaaaaatgggtaatcggcttatctaaaattaatcgcgtggtgcaatttttcgctcaacgtccacaggtgcaagagcgttttaccgaacagatcctaaccgcattccaaacgattttagaaacggacgatgtcgcagtttttgttaaagcaacacatttctgcgtgaaatgccgcggcgtgaaagatacgaatagctatacggtaacgtcggcattcggcggcgttttcttagaagacagagaaacgcgcaaagaatttttgggtttaatcaataaataa

SEQ ID NO: 2891 - protein, 218 aa, Actinobacillus pleuropneumoniae serovar 1 str. 4074
MSIISAEAQKVREALIAKGIETPTVQLTKDKDSRRAEIQQHMRSVLELLGLDLQDDSLEETPHRLAKMYVDEIFSGLDYATFPKITNIENRMKVSEMVLVDDITLTSTCEHHFVTIDGKVAVAYYPKKWVIGLSKINRVVQFFAQRPQVQERFTEQILTAFQTILETDDVAVFVKATHFCVKCRGVKDTNSYTVTSAFGGVFLEDRETRKEFLGLINK

SEQ ID NO: 2892 - DNA, 759 bp, Cytophaga hutchinsonii
  CDS (1)..(759)
atgttactcttagacaatccaaaagttttaaatgtatttatggaaaaaagaattgttgaatcggacccgttacgcaatacccctgaaagttttaataccttatctgttgatgaaatcggtgatgaccatctttttaaggggatcgccaccccaatgctgccacaggcatttttaaaaacagatgaggaaaaaatagcatctatcgcaggacattttaaagccattatggaaacattgggcctcgatctcagtgacgatagtcttgcaggtactcctcagcgcgtagctaaaatgtatgtgcaggaaatctttagcggactggatgagcggaataagcctaagattgctttatttgagaacaaatacagatacggacagatgcttgtggaaaaaaatataaccttttacagcaactgcgagcatcactttgttcctatttttggcaaagtacatgttgcatatatttcatccggtaaagtaatcggtctttccaagctgaatcggatcgtgaactattttgcgaagcggcctcaagtgcaggaacgtctgacgatgcagattgcgggtgaaatggagagcgtactcaacacaaaggatatcgcagtgcttattgatgcaaagcatttgtgtgtttcatcccgtggaattaaagatgataactctgctaccatcaccgcgtattacggtggcaggtttagcgatgatgccgttaagaatgagtttttgaattatttgaatttaaatacaacctatgtgtaa

SEQ ID NO: 2893 - protein, 252 aa, Cytophaga hutchinsonii
MLLLDNPKVLNVFMEKRIVESDPLRNTPESFNTLSVDEIGDDHLFKGIATPMLPQAFLKTDEEKIASIAGHFKAIMETLGLDLSDDSLAGTPQRVAKMYVQEIFSGLDERNKPKIALFENKYRYGQMLVEKNITFYSNCEHHFVPIFGKVHVAYISSGKVIGLSKLNRIVNYFAKRPQVQERLTMQIAGEMESVLNTKDIAVLIDAKHLCVSSRGIKDDNSATITAYYGGRFSDDAVKNEFLNYLNLNTTYV

SEQ ID NO: 2894 - DNA, 642 bp, Cytophaga hutchinsonii
  CDS (1)..(642)
atggatgaattaggtgaagaccacgtttcaacatcagcagaaacacctcttagagaagatgcttttgaaaaagacgatgcgttaaagattgaattgatacaaaaacattttaaagaaatcatgctcattctgggcctggatcttacagatgacagcctgaagggtacacccaaccgtgttgcaaaaatgtatgtgcaggaaatattcagcggattaaatcctgcgaataaacccagcatacgtttatttgaaaataaatataaatacagtgaaatgctggtggagaaagatattacgctctactcctattgcgaacatcactttgtgcctatcattggaaaggcacatgtagcatacatttccaatggaaaagttattggtttatcaaaaataaaccggctggttgaacatttttctaaaagaccacaggtacaggaacgtttaaccgtacagatcgctgaagcattaaaagaagcgttgcaaacagaagatgtagccattgttattgatgcggcacatttatgtgtatcttcccgtggtgtaaaggataccgcaagtactacgattactgctcactattctggtaagtttaccgaagatcaaacgaaaaatgaatttctggcattcattcagaaaaaataa

SEQ ID NO: 2895 - protein, 213 aa, Cytophaga hutchinsonii
MDELGEDHVSTSAETPLREDAFEKDDALKIELIQKHFKEIMLILGLDLTDDSLKGTPNRVAKMYVQEIFSGLNPANKPSIRLFENKYKYSEMLVEKDITLYSYCEHHFVPIIGKAHVAYISNGKVIGLSKINRLVEHFSKRPQVQERLTVQIAEALKEALQTEDVAIVIDAAHLCVSSRGVKDTASTTITAHYSGKFTEDQTKNEFLAFIQKK

SEQ ID NO: 2896 - DNA, 684 bp, Cytophaga hutchinsonii
  CDS (1)..(684)
atgaacttagtacatatgaaaattacaaaagcggtacatattgaaaaggaagagctgaatgatgatcattattcatccaatccggaaacaccattgcgggttgatgcatttgaattagaggatgatatcaaagtggaattaatcagcaggaaatttaaggatatcatggaaattcttggtttggatctttctgatgatagtttgaaggatacgccgaaccgtgtagcaaaaatgtatgtaaaggaaatattcagcggcttgaatccattgaacaaaccagctgtggctttgtttgaaaataaatacaaatacgatgaaatgattctggaaaagaacattacattttattccaactgtgagcatcattttgttcctattattggaaaggctcatgttgcttacatttccaatggaaaggtaattggtttgtcaaaactcaacagaatcgttgattattttgcaagacgcccgcaagtgcaggaacgattaacggtacagattgcaaatgaattgaagtctattctgggaacagaagatgttgcaattgtactggatgcaaaacatttatgcgtttccatgcgcggtgtgaaagatgaagccagctcaacggttacggcgcattactccggaaagtttaaagaagaaggggttaaaaatgaattccttgcatatataaaggactaa

SEQ ID NO: 2897 - protein, 227 aa, Cytophaga hutchinsonii
MNLVHMKITKAVHIEKEELNDDHYSSNPETPLRVDAFELEDDIKVELISRKFKDIMEILGLDLSDDSLKDTPNRVAKMYVKEIFSGLNPLNKPAVALFENKYKYDEMILEKNITFYSNCEHHFVPIIGKAHVAYISNGKVIGLSKLNRIVDYFARRPQVQERLTVQIANELKSILGTEDVAIVLDAKHLCVSMRGVKDEASSTVTAHYSGKFKEEGVKNEFLAYIKD

SEQ ID NO: 2898 - DNA, 654 bp, Vibrio sp. Ex25
  CDS (1)..(654)
atgtcaggtcttagcgagtcagcaaagttagtgaaagaagcgctagagcaacgcgggttagaaacaccaatgcgccctaatgccgttagccgtgaagagaagaaggaaaagattgaataccacatgcgtgagattcttggtctgcttcagctcgaccttacggatgatagcttagaggaaacgccacaccgcattgcaaaaatgtacgtggacgagattttctctggtttggattactccaacttccccaagatcaccgttatcgaaaacaagatgaacgtgagcgaaatggttcgcgtgaaagacattactgtaaccagtacgtgcgaacaccatcttgtgacaatcgacggaaaagccgctgttgcttatattcctcgcggtaagatcattggcttgtctaagatcaaccgtattgttcgtttctttgcgcaacgccctcaagttcaagagcgtatgacccagcaaatccttgttgctttgcaaacattgcttgagtctgacgatgtagcggtgactatcgacgcgacgcattactgtgtgaaatcacgcggtgtgatggatgccaccagtgaaaccacgactacagcgttaggtggtatttttaagagcaacccagcgacccgtgctgaatttctgcatggcctgcgttaa

SEQ ID NO: 2899 - protein, 217 aa, Vibrio sp. Ex25
MSGLSESAKLVKEALEQRGLETPMRPNAVSREEKKEKIEYHMREILGLLQLDLTDDSLEETPHRIAKMYVDEIFSGLDYSNFPKITVIENKMNVSEMVRVKDITVTSTCEHHLVTIDGKAAVAYIPRGKIIGLSKINRIVRFFAQRPQVQERMTQQILVALQTLLESDDVAVTIDATHYCVKSRGVMDATSETTTTALGGIFKSNPATRAEFLHGLR

SEQ ID NO: 2900 - DNA, 651 bp, Shewanella sp. ANA-3
  CDS (1)..(651): transl_table=11
atggcattaagtgaagcagcagtaaaagtacaagccgccctacaagaacgcggacttgaaacccccatgctacccaatgtgtttacgcctgaagagcgtaaggacaagattgaattccatatgaaggaaatcctgacgctaatgtcactggatctttccgacgacagtcttgccgatactccacgccgcatcgccaaaatgtatgtcgacgaaattttctcaggcttagactatgagaacttcccgaagatcactgtcattgataacaaaatgggcttcgatgagatggtgcgcgtgcaggatatcagcctgaccagtacctgtgagcatcacttagtcactatcgatggcacagcgacgatcgcttatattcctcgtaagaaaattatcggtttatcaaagattaaccgcatagtgcgtttcttctcccagcgtccacaggtgcaagagcgcttaacccaacaagtgttagttgccttgcaaaccttgctcgaaaccaaagacgtagccgtgaaaatggatgcggtgcattactgcgtcaaatcccgcggcgtgatggactccaccagctccaccacgaccaccgccttagggggcatttttaaatctaaccccgccacccgtgccgagtttttaaatcaatccaaataa

SEQ ID NO: 2901 - protein, 216 aa, Shewanella sp. ANA-3
MALSEAAVKVQAALQERGLETPMLPNVFTPEERKDKIEFHMKEILTLMSLDLSDDSLADTPRRIAKMYVDEIFSGLDYENFPKITVIDNKMGFDEMVRVQDISLTSTCEHHLVTIDGTATIAYIPRKKIIGLSKINRIVRFFSQRPQVQERLTQQVLVALQTLLETKDVAVKMDAVHYCVKSRGVMDSTSSTTTTALGGIFKSNPATRAEFLNQSK

SEQ ID NO: 2902 - DNA, 651 bp, Shewanella sp. MR-7
  CDS (1)..(651): transl_table=11
atggcattaagtgaagcagcagtaaaagtacaagccgccctacatgaacgcggacttgaaacccccatgctccccaatgtgtttacgcctgaagagcgtaaggacaagattgaattccatatgaaggaaatcctgacgctaatgtcactggatctttccgatgacagtcttgccgatactccacgccgcatcgccaaaatgtatgtcgacgaaattttctccggcttagactatgaaaacttcccgaagatcactgtcattgataacaaaatgggcttcgatgagatggtgcgcgtgcaggacatcagcctaaccagtacctgtgagcatcacttagtcactatcgatggcacagcgacaatcgcttatattccacgtaagaaaattatcggtttatcaaagattaaccgcatagtacgtttcttctcccagcgtccgcaggtacaagagcgtttaactcagcaagtgttagttgccttgcaaaccctactcgaaaccaaagacgtggcagtgaaaatggatgcggtgcattactgcgtaaaatcccgcggcgtgatggactccaccagctccaccacgaccaccgccctagggggcatttttaaatctaaccccgccacccgtgccgagtttttaaatcaatccaaataa

SEQ ID NO: 2903 - protein, 216 aa, Shewanella sp. MR-7
MALSEAAVKVQAALHERGLETPMLPNVFTPEERKDKIEFHMKEILTLMSLDLSDDSLADTPRRIAKMYVDEIFSGLDYENFPKITVIDNKMGFDEMVRVQDISLTSTCEHHLVTIDGTATIAYIPRKKIIGLSKINRIVRFFSQRPQVQERLTQQVLVALQTLLETKDVAVKMDAVHYCVKSRGVMDSTSSTTTTALGGIFKSNPATRAEFLNQSK

SEQ ID NO: 2904 - DNA, 678 bp, Croceibacter atlanticus HTCC2559
  CDS (1)..(678): transl_table=11
atgaagctagacgatttattagaaaatgtagaagaacgtggtgacaatcacgcaggagcaagtagagagaccccattaagagacaacgcttttgatcttgatgaccaagaaaaaatcactttaatacaagatgatgtaaagcgtattttagaaactcttggtatggatcttacagacgacagtcttaagggcacacctttacgcgttgctaaaatgtttgttaaagaaatttttggcggtctacatccagacagaaagccaaaagcatctacttttgaaaacaagtaccaatacggtgaaatgctagttgaaaaaaacattactgtttactctacctgcgaacaccatttacttcctattgtaggaaaagcacacgtagcttacatctcaaaaggaaatgtagtaggcctctctaaaatgaacagaattgtagattactacgcaaagcgaccacaagtgcaagagcgattaactttacaaattgttgaagaacttcaaaaagtattaggcacagaagacgttgcctgtgttatagatgccaaacacctttgcgtaaacagtagaggaattcgtgatatagatagcagtactgttactagcgagtttggcggacaatttaaagacaaagagacaaaacgcgagtttttagattacataaaacttgataccgaattttaa

SEQ ID NO: 2905 - protein, 225 aa, Croceibacter atlanticus HTCC2559
MKLDDLLENVEERGDNHAGASRETPLRDNAFDLDDQEKITLIQDDVKRILETLGMDLTDDSLKGTPLRVAKMFVKEIFGGLHPDRKPKASTFENKYQYGEMLVEKNITVYSTCEHHLLPIVGKAHVAYISKGNVVGLSKMNRIVDYYAKRPQVQERLTLQIVEELQKVLGTEDVACVIDAKHLCVNSRGIRDIDSSTVTSEFGGQFKDKETKREFLDYIKLDTEF

SEQ ID NO: 2906 - DNA, 654 bp, Photobacterium sp. SKA34
  CDS (1)..(654): transl_table=11
atgacagcattaagtgaatctgcagtactagtacgtgatgcattagcagcccgtggtcttgaaaccccaatggttgaacaaaatgttagccgcgaagagaaaaaagaaaagattgaataccacatgcgtgagatcttatcgttactcgcgctagatctgactgatgatagcttggttgaaaccccgcaccgtattgcgaaaatgtacgttgatgaagtgttttctggcctagactatgccaattttcctaaaatcactgtcattgaaaataaaatgaagtgtgatgaaatggtgcgagttaaagacatcacgttaaccagtacgtgtgagcaccatttagtaacgattgatggtaaagcgactgttgcttatattccacgtgggaaaattattggtttatccaaaattaaccgtattgttcgtttctttgctcagcgtccacaagttcaagagcgtttaacacaacaagtattagtcgctcttcaaacattattagaaagtgatgatgttgcagtaactattgatgcaacgcattattgcgtgaaagcgcgtggtgttatggatgcaaccagtgtaaccactaccacagcacttggcggtatttttaagaaaaattcagcgacgcgtgcagagtttttgaacggtattcgttaa

SEQ ID NO: 2907 - protein, 217 aa, Photobacterium sp. SKA34
MTALSESAVLVRDALAARGLETPMVEQNVSREEKKEKIEYHMREILSLLALDLTDDSLVETPHRIAKMYVDEVFSGLDYANFPKITVIENKMKCDEMVRVKDITLTSTCEHHLVTIDGKATVAYIPRGKIIGLSKINRIVRFFAQRPQVQERLTQQVLVALQTLLESDDVAVTIDATHYCVKARGVMDATSVTTTTALGGIFKKNSATRAEFLNGIR

SEQ ID NO: 2908 - DNA, 639 bp, Oceanospirillum sp. MED92
  CDS (1)..(639): transl_table=11
atgatttctgcagaagccgctgcagtccgcgatcagttgatcgagaaagggctggaaacaccgctcgttgataatggtatgtctcaagaacaacgttatgaacgaatcaaaggactcatgaccgaggttgttagcacactgggccttaatttagaggatgatagcctgactgaaacacctcatcgtgtcgctaagatgtacgtctatgagcttttctctgggcttgattacgagaacttcccaaccatcgcaatgatagacaataaaatggatgtcgaagagatggttaaagtccgtgacattagcgttgtcagctcttgcgaacaccatttcgttactattgatggcacagcgaaagtggcgtacatacctagcaaaaaaattatcggcctttcaaagatcaatcgcttagtccgattttttagtcagcgcccgcaagtacaagagcggcttactaaacaaatccttattgccctgcaaacgcttttggaaacagacaacgtcgcagtttccattaacgcgactcattactgcgttaaatcacgcggggttatggacgttaattcgcaaaccgagaccacagccctgggcggaatttttaagtctaatcctcgtaccagagccgaatttctgacctag

SEQ ID NO: 2909 - protein, 212 aa, Oceanospirillum sp. MED92
MISAEAAAVRDQLIEKGLETPLVDNGMSQEQRYERIKGLMTEVVSTLGLNLEDDSLTETPHRVAKMYVYELFSGLDYENFPTIAMIDNKMDVEEMVKVRDISVVSSCEHHFVTIDGTAKVAYIPSKKIIGLSKINRLVRFFSQRPQVQERLTKQILIALQTLLETDNVAVSINATHYCVKSRGVMDVNSQTETTALGGIFKSNPRTRAEFLT

SEQ ID NO: 2910 - DNA, 645 bp, Oceanobacter sp. RED65
  CDS (1)..(645): transl_table=11
atgacagagttaagtgcagaggccgttatggtccgagatatgttagtggagaagggtttagaaactccgctcaacgacaatggtctgtcttctgaagttaagcgagaacgtatcgaaggttattttacggagatattgggaacgcttggcttagatcttgatgacgatagtttaaatgaaacaccgcatcgaatggctaagctctatgtgaatgagattttctctgggcttgattattcaaattttcctcgcattagtgtgattgaaaataaaatgtctgtagacgagatggtcaaaatctcggagattcaagtgagtagtacttgcgaacatcacttaatcacgattgacggcaaagcaaaagtggcatacatccccaacaaaaaaattatcggtctatcaaaaatcaacagactggttcgtttctttgctcaaaggccacaggtacaagagcgccttacacagcaaattttagttgcattacaggcgttattggaaaccgataatgttgccgtatctattgatgcgacgcattactgcgtcaaagctagaggggtgatggatgtgaatagtgaaacctcgacgacagctttgggtggaatattcaagactaatattcacactcgtgctgagttccttaactaa

SEQ ID NO: 2911 - protein, 214 aa, Oceanobacter sp. RED65
MTELSAEAVMVRDMLVEKGLETPLNDNGLSSEVKRERIEGYFTEILGTLGLDLDDDSLNETPHRMAKLYVNEIFSGLDYSNFPRISVIENKMSVDEMVKISEIQVSSTCEHHLITIDGKAKVAYIPNKKIIGLSKINRLVRFFAQRPQVQERLTQQILVALQALLETDNVAVSIDATHYCVKARGVMDVNSETSTTALGGIFKTNIHTRAEFLN

SEQ ID NO: 2912 - DNA, 666 bp, Blochmannia floridanus
  CDS (1)..(666): transl_table=11
atgtctacattaacgcaggaagcattgttggtacgtaatgctttgttattgcaaggattagaaaatcctataattgatttgaatatagatgataaaattcgcatgaattgtattgaaagtcatatgatatctattatgcatttattaaaattaaatttaaatcatgatagtttattgaatactccaaaacgtgtagcaaaaatgtatgtagaagaaattttttctggattggattatttaaattttccaaaaattacaattattgcaaatacaatgcagattagtgaaatgattacagtacgtaatataaatattactagtgtatgtgagcatcattttatcatatttaatggaaaagctacagtgtcatatattcctagaaaaagtgttattggattgtctaaaattaataagatagtagaatttttttctaaaagacctcagttacaggaacgactaactcagcaaatttttttagctttacaaacattattaaatactaataatgtggcaatttttattaatgcagtacattattgtgttaaagcgagaggtatacatgatatgactagtactacaaatactactgcattaggagggttatttaaatctaataagagtattcgaaaggaatttttacatactatcacatattgtaatagttag

SEQ ID NO: 2913 - protein, 221 aa, Blochmannia floridanus
MSTLTQEALLVRNALLLQGLENPIIDLNIDDKIRMNCIESHMISIMHLLKLNLNHDSLLNTPKRVAKMYVEEIFSGLDYLNFPKITIIANTMQISEMITVRNINITSVCEHHFIIFNGKATVSYIPRKSVIGLSKINKIVEFFSKRPQLQERLTQQIFLALQTLLNTNNVAIFINAVHYCVKARGIHDMTSTTNTTALGGLFKSNKSIRKEFLHTITYCNS

SEQ ID NO: 2914 - DNA, 657 bp, Buchnera aphidicola subsp
  CDS (1)..(657): transl_table=11
atgattaaaatcactaaagaagctaatattgcacgtaatgttttattattaaaaggtttagaaaatcctattttaaaagaatacaatgatataaaagaaaaagaaagagaattattaattgcagaatatttatataaaattatgtctttactaaatttagatctaaaaaacgaaagtttaaaagatacacctattcgaatatcaaaaatgtatgttaatgaaatattttctggtttagattataaaaattttccaaaaattatgttgatggataataaaataaaatttcatgaaatgattatagtacgcgatattctattaataagcacttgcgaacatcattttattactattaatggacaagctactattgcatatattcctgagaataaaattattggtttatctaaaataaatagaattgcacaattttttgcaaaaagacctcaaattcaagaacgtttaacaaaacaaatacttctagttctgcaagttttattacaaactaaaaatgttgcaataattattcatatggatcatttttgtgttaaagctcgaggagtatgtgataccagtagtagtactgttacttcatgtttagatggtttatttaaatctgataaaaatattcgagaagaatttttttttaaaaaataa

SEQ ID NO: 2915 - protein, 218 aa, Buchnera aphidicola subsp
MIKITKEANIARNVLLLKGLENPILKEYNDIKEKERELLIAEYLYKIMSLLNLDLKNESLKDTPIRISKMYVNEIFSGLDYKNFPKIMLMDNKIKFHEMIIVRDILLISTCEHHFITINGQATIAYIPENKIIGLSKINRIAQFFAKRPQIQERLTKQILLVLQVLLQTKNVAIIIHMDHFCVKARGVCDTSSSTVTSCLDGLFKSDKNIREEFFFKK

SEQ ID NO: 2916 - DNA, 657 bp, Haemophilus ducreyi
  CDS (1)..(657): transl_table=11
atgagcattatctcaagcgaagcccaaaaagtgcgtcaagcgttgattaaaaagggtatcgaaacgccaacaattgagttaacacaagataaagattcacgacgagctgaaattcaacaacatatgcgttcagtattagaattgcttggcctagatttacgtgatgatagtttagaagaaaccccgcatcgtttagcaaaaatgtatgtagatgaaatctttagcgggttagattacgcgacttttcctaaaattaccacgattgaaaatcgtatgaaagtgagcgaaatggtattagttgatgatattacattgacttcaacttgtgaacaccattttgtgacgatcgatggcaaagtagcggttgcttattatccgaaaaaatgggtgattggcttatcgaaaattaaccgagtagtacaattttttgctcaacgtccacaagtgcaagaacgttttactgagcagattttaaccgcatttcaaactattttagaaaccgaagatgttgcaatctatgtcaaagcaacgcatttttgtgttaagtgtcgcggcataaaggatagcaatagttatacagtgacttctgcatttggtggtgtgtttttagatgatcgtgaaacacgtaaagagtttttaaacctaattcacaaataa

SEQ ID NO: 2917 - protein, 218 aa, Haemophilus ducreyi
MSIISSEAQKVRQALIKKGIETPTIELTQDKDSRRAEIQQHMRSVLELLGLDLRDDSLEETPHRLAKMYVDEIFSGLDYATFPKITTIENRMKVSEMVLVDDITLTSTCEHHFVTIDGKVAVAYYPKKWVIGLSKINRVVQFFAQRPQVQERFTEQILTAFQTILETEDVAIYVKATHFCVKCRGIKDSNSYTVTSAFGGVFLDDRETRKEFLNLIHK

SEQ ID NO: 2918 - DNA, 657 bp, Haemophilus influenzae
  CDS (1)..(657): transl_table=11
atgagcaaaatttcactggatgcactgaatgtaagaaatgccttgattgaaaaaggtattgagacacccatgattgatccaacacaggctaaaaatgaacgtcgagaaagcattgcaaaacacatgcatgaagtaatgaagctgataggattagatttgcgagatgatagtttagaagaaacgccaaatcgtttagctaaaatgtttattgatgagatttttagtggaatggattatgcgaattttccaaagatgacaaaaatcaaaaatcaaatgaaagtcagcgaaatggtacaagtgaatgacattacgctaacaagcacttgtgaacatcattttgtgacgattgatggtaaagtttgtgtggcatactatccaaaagattgggtgattggtctttctaaaattaatcgaattgtctcgttttttgcgcaacgtccacaggttcaagaacgcttaactgagcaacttttgacagcatttcaaaccattcttgagaccgatgatgtggcggtatatgtgaaagcgacccatttctgtgtgaaagcgcgtggtattagagatacgaatagttatactgtcacatctgcttatggtggcgtattcttagaagatagagatactcgtaaagaatttttagctacagttcaaaaatag

SEQ ID NO: 2919 - protein, 218 aa, Haemophilus influenzae
MSKISLDALNVRNALIEKGIETPMIDPTQAKNERRESIAKHMHEVMKLIGLDLRDDSLEETPNRLAKMFIDEIFSGMDYANFPKMTKIKNQMKVSEMVQVNDITLTSTCEHHFVTIDGKVCVAYYPKDWVIGLSKINRIVSFFAQRPQVQERLTEQLLTAFQTILETDDVAVYVKATHFCVKARGIRDTNSYTVTSAYGGVFLEDRDTRKEFLATVQK

SEQ ID NO: 2920 - DNA, 657 bp, Pasteurella multocida
  CDS (1)..(657): transl_table=11
atgaacaagatttcaccagaagcagaaaaagtccgcaacgcattattaagtaaggggattgaaaccccaatgattaccccagaacaagacagagatacgcgtcgagcggggattgaacaacatatgcgtgaagtgatgaagctgattgggttagatttacgtgatgatagtttagaagaaacccccgtgcgtttggcgaaaatgtttgttgatgaaattttcagcggattagactatgcgaatttcccgaaaattactaacattgaaaatcgtatgaaagtcagtgaaatggtgttggtgaatgacgtgacgttaaccagtacttgtgaacaccattttgtgactattgatgggatggtttcggtggcgtattacccgaaaaaatgggtcattgggttgtctaaaattaatcgcatcgtggcgttttttgcacaacgtccacaagtacaagagcgtttgactgaacaaattttgttggcattccaaacgattttagaaacggacgatgtggcggtgtatgtaaaggctactcatttctgcgtgaaatgccgtggcattaaagataccaacagttatacggtgacatccgcatttggtggtgtctttttagatgaccgtgaaacgcgtaaagagtttttaaccttaattaataaataa

SEQ ID NO: 2921 - protein, 218 aa, Pasteurella multocida
MNKISPEAEKVRNALLSKGIETPMITPEQDRDTRRAGIEQHMREVMKLIGLDLRDDSLEETPVRLAKMFVDEIFSGLDYANFPKITNIENRMKVSEMVLVNDVTLTSTCEHHFVTIDGMVSVAYYPKKWVIGLSKINRIVAFFAQRPQVQERLTEQILLAFQTILETDDVAVYVKATHFCVKCRGIKDTNSYTVTSAFGGVFLDDRETRKEFLTLINK

SEQ ID NO: 2922 - DNA, 660 bp, Photorhabdus luminescens subsp
  CDS (1)..(660): transl_table=11
atgtcatccttaagtaaagaagctgagcttgtgcattcggcgctggaaactcgtggccttgaaacgcctttgcgtggtcaggcattggtaccggaagtgcgcaaagcgcggattgaggagcatatgacggaagttatgaaactgttgaatctcgatttgcgtgatgacagtttggcagaaaccccaggtcgtattgcgaaaatgtatgtcgatgagattttttcaggattggactacagcaatttcccgaaaatcacattgatagagaataaaatgaaagtggacgaaatggtgaccgttcgtgatatcacactcaccagtacctgcgaacaccattttgtgaccattgatggcaaggcgacggttgcctatattccaaaagataaagtgattgggttgtctaaaattaaccgtattgtgcaatttttttctcagcgtccacaggttcaggagcgcctgacccagcagattttgattgcattacagacactccttggtaccaataatgttgccgtatcgattgatgcggttcattactgtgtgaaagcgcggggtatccgtgatgcaaccagtaccacgacaacaacctctctggggggattgtttaaatctagccaaaatacccgtcaagagtttttacgtacaactcgccatgtgtaa

SEQ ID NO: 2923 - protein, 219 aa, Photorhabdus luminescens subsp
MSSLSKEAELVHSALETRGLETPLRGQALVPEVRKARIEEHMTEVMKLLNLDLRDDSLAETPGRIAKMYVDEIFSGLDYSNFPKITLIENKMKVDEMVTVRDITLTSTCEHHFVTIDGKATVAYIPKDKVIGLSKINRIVQFFSQRPQVQERLTQQILIALQTLLGTNNVAVSIDAVHYCVKARGIRDATSTTTTTSLGGLFKSSQNTRQEFLRTTRHV

SEQ ID NO: 2924 - DNA, 651 bp, Shewanella oneidensis
  CDS (1)..(651): transl_table=11
atgccattaagtgaagcagcagtaaaagtacaggccgccctgcaagagcgcggacttgaaacccccatgctccccagtgtgtttactcctgaagagcgtaaggacaagattgaacaccatatgaaggaaatcctgacgctcatgtcactggatctttctgacgacagtcttgccgataccccacgccgcatcgccaaaatgtatgtcgacgaaatcttctccggtctagattatgcaaacttcccgaagatcactgtgattgataacaaaatgggctttgatgaaatggtgcgagtgcaggatattagcctgaccagtacctgtgagcatcaccttgtcaccattgatggtacggcaaccatcgcgtatcttccacgtaaaaaaattatcggtttatcaaagattaaccgcattgtacgtttctttgcccaacgccctcaggtacaagagcgtttgactcagcaagtattagtcgcgctgcagaccttactcgagactaaagatgttgcggttaaaatggatgcggtacattactgcgtaaaatcccgcggcgtgatggattccaccagctccaccactaccacggccttaggtggcatttttaaatccaacccagcgacccgcgcagagtttttgcatcagtcaaagtaa

SEQ ID NO: 2925 - protein, 216 aa, Shewanella oneidensis
MPLSEAAVKVQAALQERGLETPMLPSVFTPEERKDKIEHHMKEILTLMSLDLSDDSLADTPRRIAKMYVDEIFSGLDYANFPKITVIDNKMGFDEMVRVQDISLTSTCEHHLVTIDGTATIAYLPRKKIIGLSKINRIVRFFAQRPQVQERLTQQVLVALQTLLETKDVAVKMDAVHYCVKSRGVMDSTSSTTTTALGGIFKSNPATRAEFLHQSK

SEQ ID NO: 2926 - DNA, 654 bp, Vibrio parahaemolyticus
  CDS (1)..(654): transl_table=11
atgtcaggtcttagcgagtcagcgaagttagtaaaagaagcgctagagcaacgcggtttagaaacaccaatgcgtcctaatgccgtgagccgtgaagagaagaaagaaaagatcgagcaccacatgcgtgagatcctaaccctgcttcaactcgaccttacggatgacagcctagaagagacgccacatcgcattgcaaaaatgtacgtggacgagattttctctggtttggattactccaacttcccaaaaatcacggttattgaaaacaagatgaacgtaagtgaaatggttcgcgtgaaagacatcaccgtaaccagcacgtgtgaacaccatcttgtcacgatcgacggcaaagcggccgttgcgtatattcctcgtggtaaaatcattggtctctctaagatcaaccgcattgtccgtttcttcgcgcaacgtcctcaagttcaagagcgtatgacacagcaaatcctagttgctttgcaaacattgcttgagtctgacgatgtggccgtgactatcgacgcgacgcactactgcgtgaaatcacgtggtgttatggatgcaaccagcgaaacgacaaccacagctttaggtggtatttttaagagcaacccagccactcgcgctgagtttctgcatggtttacgctag

SEQ ID NO: 2927 - protein, 217 aa, Vibrio parahaemolyticus
MSGLSESAKLVKEALEQRGLETPMRPNAVSREEKKEKIEHHMREILTLLQLDLTDDSLEETPHRIAKMYVDEIFSGLDYSNFPKITVIENKMNVSEMVRVKDITVTSTCEHHLVTIDGKAAVAYIPRGKIIGLSKINRIVRFFAQRPQVQERMTQQILVALQTLLESDDVAVTIDATHYCVKSRGVMDATSETTTTALGGIFKSNPATRAEFLHGLR

SEQ ID NO: 2928 - DNA, 654 bp, Vibrio vulnificus
  CDS (1)..(654): transl_table=11
atgtcaggtcttagcgaatccgcccaactggttaaacaagcgttagaaaagcgcggtttggaaacgccgatggtgccgaaccaattcagtcgtgaagaaaagaaagagaaaatcgaacaccacatgcgtgagatcctttctttgcttgaactggatctgaccgacgatagtttggaagagacgccaagacgcattgctaaaatgtacgtcgacgaagttttttccggccttgattatcagaacttccctaagatcacggtgattgaaaataagatgaacgtcagcgagatggttcgagtgaaagagatcaccttaaccagcacctgcgagcatcatttggtgaccatcgatggcaaagcggcagtggcctatattcctcgcggaaaaatcattggtttatctaagatcaaccgcattgttcgtttctttgcgcaacgccctcaggtgcaagagcgcatgacacaacagattctagtggcgttgcaaaccttactcgaatcggatgacgttgcggtaaccatcgacgcaacacactattgcgtgaagtctcgcggcgtgatggacgcgaccagtgaaaccaccacaaccgcattgggtggcatttttaagagtaacccagcgacacgagccgagtttctgcacggtctgcgttaa

SEQ ID NO: 2929 - protein, 217 aa, Vibrio vulnificus
MSGLSESAQLVKQALEKRGLETPMVPNQFSREEKKEKIEHHMREILSLLELDLTDDSLEETPRRIAKMYVDEVFSGLDYQNFPKITVIENKMNVSEMVRVKEITLTSTCEHHLVTIDGKAAVAYIPRGKIIGLSKINRIVRFFAQRPQVQERMTQQILVALQTLLESDDVAVTIDATHYCVKSRGVMDATSETTTTALGGIFKSNPATRAEFLHGLR

SEQ ID NO: 2930 - DNA, 651 bp, Wigglesworthia glossinidia brevipalpis
  CDS (1)..(651): transl_table=11
atggaagtcttaacaaaagaagctttactagtaaaaaatgctttattaaacaaaggcatagaaactccatttaaaaaaatttatgaaaaaaataaaccagatatacataaaatatctaaatacattaaaaaaataatggatcttttaaatttagatttaaacaatgatagcttgtcaaaaactcctaatagaattgcttatatgtatatagaagaaatattttcaggtctaaattataataattttccaaaaataacattaataaaaaatacctctaaaattaatgatttaattacagtaaataatattgttttaaacagcacatgtgaacatcattttttaatttttgaaggaaaagcaattgtatcatatattccagacaaaattttaattggactatctaaaataaatcgcattgttgattttttttctaaaagacctcaaattcaagaaagattaactaatcaaattttagttgctattcaaattttgcttgatactaaaaatgtagcagtagcaattaaagctaagcatctttgcgtgaaagctcggggaataaaagattctcacagtaaaactttaactctatctttgggtggagtttttaaatccaaacaaaacataaaaaaagaatttttaaaagatttttaa

SEQ ID NO: 2931 - protein, 216 aa, Wigglesworthia glossinidia brevipalpis
MEVLTKEALLVKNALLNKGIETPFKKIYEKNKPDIHKISKYIKKIMDLLNLDLNNDSLSKTPNRIAYMYIEEIFSGLNYNNFPKITLIKNTSKINDLITVNNIVLNSTCEHHFLIFEGKAIVSYIPDKILIGLSKINRIVDFFSKRPQIQERLTNQILVAIQILLDTKNVAVAIKAKHLCVKARGIKDSHSKTLTLSLGGVFKSKQNIKKEFLKDF

SEQ ID NO: 2932 - DNA, 663 bp, Yersinia pestis
  CDS (1)..(663): transl_table=11
atgtcatcgctaagtaaagaagctgagttggttcatcaagcgctgctggcccgtggtcttgaaacccctttacgtaaaccagaattagatgccgagacgcgcaaaactcggattcaggcccatatgacagaagtcatgcatttgctgaatcttgatttaaccgacgatagtctggctgatacaccaagacgcattgcgaagatgtatgttgatgagattttctccggattggattacgaaaatttccctaaaatcacactgattcaaaataaaatgaaagttgatgaaatggtaacggtacgggatatcactctgaccagcacctgcgaacatcattttgtgacgattgatgggaaagccaccgtcgcttatattccgaaagacagtgtcattggtttgtcgaaaatcaaccgtatcgtgcagttttttgcgcagcgtccgcaagtgcaggaacgattaacacagcagatcttgctcgcattacaaaccctgttgggtaccaataatgtcgcagtttctattgatgcagttcattattgcgttaaagcacgtggtatccgtgatgcgaccagcgcgacgaccaccacatcattaggcgggttatttaaatccagtcagaatacgcgtcaggaatttctgcgtgcggttcgtcaccacggctga

SEQ ID NO: 2933 - protein, 220 aa, Yersinia pestis
MSSLSKEAELVHQALLARGLETPLRKPELDAETRKTRIQAHMTEVMHLLNLDLTDDSLADTPRRIAKMYVDEIFSGLDYENFPKITLIQNKMKVDEMVTVRDITLTSTCEHHFVTIDGKATVAYIPKDSVIGLSKINRIVQFFAQRPQVQERLTQQILLALQTLLGTNNVAVSIDAVHYCVKARGIRDATSATTTTSLGGLFKSSQNTRQEFLRAVRHHG

SEQ ID NO: 2934 - DNA, 24 bp, Artificial sequence
  primer
atgccatcactcagtaaagaagcg

SEQ ID NO: 2935 - DNA, 24 bp, Artificial sequence
  primer
ttagttgtgatgacgcacagcgcg

SEQ ID NO: 2936 - protein, 200 aa, Artificial sequence
  consensus sequence
  Variant (4)..(7): Xaa in position 4 to 7 is any amino acid
  Variant (8)..(22): Xaa in position 8 to 22 is any or no amino acid
  Variant (24)..(35): Xaa in position 24 to 35 is any amino acid
  Variant (39)..(40): Xaa in position 39 to 40 is any amino acid
  Variant (44)..(45): Xaa in position 44 to 45 is any amino acid
  Variant (48)..(48): Xaa in position 48 is any amino acid
  Variant (50)..(50): Xaa in position 50 is any amino acid
  Variant (54)..(56): Xaa in position 54 to 56 is any amino acid
  Variant (58)..(58): Xaa in position 58 is any amino acid
  Variant (63)..(66): Xaa in position 63 to 66 is any amino acid
  Variant (67)..(67): Xaa in position 67 is any or no amino acid
  Variant (69)..(74): Xaa in position 69 to 74 is any amino acid
  Variant (76)..(80): Xaa in position 76 to 80 is any amino acid
  Variant (83)..(84): Xaa in position 83 to 84 is any amino acid
  Variant (86)..(87): Xaa in position 86 to 87 is any amino acid
  Variant (89)..(91): Xaa in position 89 to 91 is any amino acid
  Variant (93)..(93): Xaa in position 93 is any amino acid
  Variant (98)..(98): Xaa in position 98 is any amino acid
  Variant (100)..(100): Xaa in position 100 is any amino acid
  Variant (102)..(102): Xaa in position 102 is any amino acid
  Variant (104)..(106): Xaa in position 104 to 106 is any amino acid
  Variant (110)..(110): Xaa in position 110 is any amino acid
  Variant (112)..(115): Xaa in position 112 to 115 is any amino acid
  Variant (116)..(117): Xaa in position 116 to 117 is any or no amino acid
  Variant (126)..(126): Xaa in position 126 is any amino acid
  Variant (128)..(129): Xaa in position 128 to 129 is any amino acid
  Variant (131)..(132): Xaa in position 131 to 132 is any amino acid
  Variant (140)..(140): Xaa in position 140 is any amino acid
  Variant (142)..(142): Xaa in position 142 is any amino acid
  Variant (145)..(146): Xaa in position 145 to 146 is any amino acid
  Variant (148)..(151): Xaa in position 148 to 151 is any amino acid
  Variant (153)..(156): Xaa in position 153 to 156 is any amino acid
  Variant (160)..(162): Xaa in position 160 to 162 is any amino acid
  Variant (164)..(164): Xaa in position 164 is any amino acid
  Variant (166)..(166): Xaa in position 166 is any amino acid
  Variant (169)..(170): Xaa in position 169 to 170 is any amino acid
  Variant (173)..(174): Xaa in position 173 to 174 is any amino acid
  Variant (176)..(177): Xaa in position 176 to 177 is any amino acid
  Variant (179)..(179): Xaa in position 179 is any amino acid
  Variant (181)..(181): Xaa in position 181 is any amino acid
  Variant (183)..(186): Xaa in position 183 to 186 is any amino acid
  Variant (188)..(188): Xaa in position 188 is any amino acid
  Variant (190)..(194): Xaa in position 190 to 194 is any amino acid
  Variant (195)..(195): Xaa in position 195 is any or no amino acid
  Variant (197)..(197): Xaa in position 197 is any amino acid
ETPXXXXXXXXXXXXXXXXXXXIXXXXXXXXXXXXLDLXXDSLXXTPXRXAKMXXXEXFSGLXXXXXPXXXXXXNXXXXXEMXXVXXIXXXSXCEHHXVXIXGXXXVAYXPXXXXXXIGLSKINRXVXXFXXRPQVQERXTXQIXXAXXXXLXXXXVAVXXXAXHXCVXXRGXXDXXSXTXTXXXXGXFXXXXXXRXEFL

SEQ ID NO: 2937 - protein, 36 aa, Artificial sequence
  protein pattern
  Variant (2)..(2): Xaa in position 2 is any or no amino acid
  Variant (7)..(7): Xaa in position 7 is Ile or Leu
  Variant (10)..(10): Xaa in position 10 is Ile, Leu or Val
  Variant (11)..(11): Xaa in position 11 is Ala or Val
  Variant (12)..(12): Xaa in position 12 is any amino acid
  Variant (13)..(13): Xaa in position 13 is Phe, His or Tyr
  Variant (15)..(15): Xaa in position 15 is Ala or Ser
  Variant (16)..(16): Xaa in position 16 is any amino acid
  Variant (20)..(20): Xaa in position 20 is Ile or Val
  Variant (24)..(24): Xaa in position 24 is Phe, Leu or Met
  Variant (26)..(26): Xaa in position 26 is any amino acid
  Variant (28)..(28): Xaa in position 28 is Ile, Leu or Val
  Variant (29)..(29): Xaa in position 29 is Ala or Leu
  Variant (30)..(31): Xaa in position 30 to 31 is any amino acid
  Variant (32)..(32): Xaa in position 32 is Phe, Ile, Leu or Met
  Variant (33)..(34): Xaa in position 33 to 34 is any amino acid
  Variant (35)..(35): Xaa in position 35 is Ala, Ile, Leu or Val
IXGLSKXNRXXXXFXXRPQXQERXTXQXXXXXXXXL

SEQ ID NO: 2938 - protein, 39 aa, Artificial sequence
  protein pattern
  Variant (2)..(3): Xaa in position 2 to 3 is any or no amino acid
  Variant (5)..(7): Xaa in position 5 to 7 is any amino acid
  Variant (8)..(9): Xaa in position 8 to 9 is any or no amino acid
  Variant (11)..(11): Xaa in position 11 is Ile, Leu or Val
  Variant (12)..(14): Xaa in position 12 to 14 is any amino acid
  Variant (15)..(15): Xaa in position 15 is Asp, Glu, Asn or Ser
  Variant (16)..(16): Xaa in position 16 is Ile or Val
  Variant (17)..(19): Xaa in position 17 to 19 is any amino acid
  Variant (21)..(21): Xaa in position 21 is any amino acid
  Variant (26)..(26): Xaa in position 26 is Phe or Leu
  Variant (27)..(27): Xaa in position 27 is Ile, Leu or Val
  Variant (28)..(28): Xaa in position 28 is any amino acid
  Variant (30)..(30): Xaa in position 30 is any amino acid
  Variant (32)..(32): Xaa in position 32 is any amino acid
  Variant (33)..(33): Xaa in position 33 is Ala or Val
  Variant (34)..(34): Xaa in position 34 is any amino acid
  Variant (35)..(35): Xaa in position 35 is Ile or Val
  Variant (38)..(38): Xaa in position 38 is any amino acid
  Variant (39)..(39): Xaa in position 39 is Pro or Ser
NXXKXXXXXMXXXXXXXXXSXCEHHXXXIXGXXXXAYXX

SEQ ID NO: 2939 - protein, 30 aa, Artificial sequence
  protein pattern
  Variant (2)..(4): Xaa in position 2 to 4 is any amino acid
  Variant (5)..(5): Xaa in position 5 is Phe, Met or Val
  Variant (6)..(7): Xaa in position 6 to 7 is any amino acid
  Variant (8)..(8): Xaa in position 8 is Ile or Val
  Variant (9)..(9): Xaa in position 9 is Ile, Leu, Met or Val
  Variant (10)..(11): Xaa in position 10 to 11 is any amino acid
  Variant (12)..(12): Xaa in position 12 is Ile, Leu or Met
  Variant (13)..(13): Xaa in position 13 is any amino acid
  Variant (14)..(14): Xaa in position 14 is Leu or Met
  Variant (15)..(15): Xaa in position 15 is Asp or Asn
  Variant (17)..(17): Xaa in position 17 is any amino acid
  Variant (18)..(18): Xaa in position 18 is Asp or His
  Variant (22)..(22): Xaa in position 22 is any amino acid
  Variant (23)..(23): Xaa in position 23 is Asp, Glu, Gly or Asn
  Variant (26)..(26): Xaa in position 26 is any amino acid
  Variant (28)..(28): Xaa in position 28 is Ile, Leu, Met or Val
  Variant (29)..(29): Xaa in position 29 is Ala or Ser
IXXXXXXXXXXXXXXLXXDSLXXTPXRXXK

SEQ ID NO: 2940 - protein, 40 aa, Artificial sequence
  protein pattern
  Variant (2)..(2): Xaa in position 2 is any or no amino acid
  Variant (4)..(5): Xaa in position 4 to 5 is any amino acid
  Variant (6)..(6): Xaa in position 6 is any or no amino acid
  Variant (8)..(8): Xaa in position 8 is any amino acid
  Variant (10)..(10): Xaa in position 10 is any amino acid
  Variant (12)..(12): Xaa in position 12 is Met or Val
  Variant (13)..(14): Xaa in position 13 to 14 is any amino acid
  Variant (17)..(17): Xaa in position 17 is Ile or Val
  Variant (18)..(18): Xaa in position 18 is any amino acid
  Variant (19)..(19): Xaa in position 19 is Asp or Lys
  Variant (20)..(20): Xaa in position 20 is any amino acid
  Variant (21)..(21): Xaa in position 21 is Ala, Asp, Gly, Asn, Ser or Thr
  Variant (23)..(23): Xaa in position 23 is any amino acid
  Variant (25)..(25): Xaa in position 25 is any amino acid
  Variant (27)..(27): Xaa in position 27 is Ala, Ser or Thr
  Variant (28)..(30): Xaa in position 28 to 30 is any amino acid
  Variant (32)..(32): Xaa in position 32 is any amino acid
  Variant (34)..(39): Xaa in position 34 to 39 is any amino acid
  Variant (40)..(40): Xaa in position 40 is Glu, Asn or Arg
AXVXXXAXHXCXXXRGXXXXXSXTXTXXXXGXFXXXXXXX

SEQ ID NO: 2941 - protein, 12 aa, Artificial sequence
  protein pattern
  Variant (2)..(2): Xaa in position 2 is Ile, Leu or Val
  Variant (6)..(6): Xaa in position 6 is Leu or Met
  Variant (7)..(7): Xaa in position 7 is Asp or Asn
  Variant (8)..(11): Xaa in position 8 to 11 is any amino acid
EXFSGXXXXXXP

SEQ ID NO: 2942 - DNA, 1053 bp, Escherichia coli K12
  CDS (1)..(1053): transl_table=11
atgaggtttttattgggcgtgctgatgctgatgatctccggctcagcgctggcgaccatcgatgtgttgcagtttaaagatgaagcacaggaacaacagttccgtcagctcactgaagaactgcgctgcccgaaatgccagaacaacagcattgccgattccaactcgatgattgccaccgacctgcgtcagaaagtgtatgaactgatgcaggaaggtaaaagtaaaaaagagattgtcgattatatggtggcgcgttacggcaacttcgtcacttacgatccgccgttaacgccgctgaccgtgctgctgtgggtgctgccagtagtggctattggcattggcggttgggtcatatacgcccgctcgcggcgtcgggtacgcgtggtgccggaagcgtttcctgaacaaagcgtgccggaaggtaagcgtgccggatatgttgtttatctgccgggtattgtggtggcgttaattgtggctggcgtcagctactaccagactggcaattatcagcaggtgaaaatctggcagcaggccacggcacaggctccggcgttgctggacagggcgctggatccgaaagccgatccgctcaacgaagaagagatgtcgcgtcttgcgctggggatgcgtactcaactgcaaaaaaatccgggagatatagaaggctggattatgttgggccgcgttggcatggcgctgggtaacgccagtatcgccaccgatgcatacgccactgcgtatcgcctcgatccgaaaaacagtgatgctgcactgggatacgctgaagcgttgactcgttcatctgatcccaacgacaaccgcctcggcggtgaactgctacgtcagctggtgagaacggaccatagcaatatccgtgtgctaagcatgtatgcgtttaatgcctttgagcagcagcgatttggcgaagccgttgccgcgtgggagatgatgttgaaactcttacctgccaacgatactcgccgtgcggtgattgaacgtagtatcgcgcaggcgatgcaacatttgtcgccgcaggagagtaaataa

SEQ ID NO: 2943 - protein, 350 aa, Escherichia coli K12
MRFLLGVLMLMISGSALATIDVLQFKDEAQEQQFRQLTEELRCPKCQNNSIADSNSMIATDLRQKVYELMQEGKSKKEIVDYMVARYGNFVTYDPPLTPLTVLLWVLPVVAIGIGGWVIYARSRRRVRVVPEAFPEQSVPEGKRAGYVVYLPGIVVALIVAGVSYYQTGNYQQVKIWQQATAQAPALLDRALDPKADPLNEEEMSRLALGMRTQLQKNPGDIEGWIMLGRVGMALGNASIATDAYATAYRLDPKNSDAALGYAEALTRSSDPNDNRLGGELLRQLVRTDHSNIRVLSMYAFNAFEQQRFGEAVAAWEMMLKLLPANDTRRAVIERSIAQAMQHLSPQESK

SEQ ID NO: 2944 - DNA, 1044 bp, Salmonella enterica subsp. enterica serovar Typhi str. CT18
  CDS (1)..(1044): transl_table=11
atgagactgttaccgggcatggtgatgctgatgctggcgctggttatctccgggtcagcgcgggcgaccaccgacgtgatgccgtttaaagatgaagcgcaggagcagcagttccgccagctcacggagcagctgcgctgcccgaaatgccagaacaacagcattgcggactcgaacgcgatgatagccaccgacatgcgccgcagggtgtatgacctgatgcaggaggggaagagccgccaggaaatcatcgattacatggtggcgcgctacggcaacttcgtcacctacgacccgccgctgaccccgctgacggtgctgctgtgggtgctgccgctggccgccatcgtggcgggcgggtggataatcgtcgcccggacgcgccggcgggtgcgcctgcgccgggagccgctgccggcggacaccccggtttgcggcgcgcgcgccgggtggggcgtttacgtgccgggggccgtcattgcgctggcggtcggcgccggcagctacgccctgaccggcagctatccgcaggtgagggcctggcagcaggcaacggcgcagacgcccgggctgctggcgcgggcgctggacccgcaggcgcagccgctgaatgaggaggagatggcgcggctggcgctggggctgcgcacccgcctgcagaatgatgccggcaatgttgagggctggctcatgctggggcgcaccggtatggtactgggtaatgccggtaccgccaccggggcgtatgcgaacgcttaccgtctggacccggaaaaccgcgatgcggcgctgggctacgcggaggcgctgacgcgctcgtccgacccggaggataaccgccgcggcggggaactgctgcgtcagctggtgagccgcgaccacacggatatccgggtgttaagcctgtatgcgttcagcgcctttgagcagcagcgctttggcgaggcggtggcggcctgggagatgatgctgaagctgctgccggcgggtgacgcccggcgggcggtgatagagcgcagtatccggctggcgcaggagaaataa

SEQ ID NO: 2945 - protein, 347 aa, Salmonella enterica subsp. enterica serovar Typhi str. CT18
MRLLPGMVMLMLALVISGSARATTDVMPFKDEAQEQQFRQLTEQLRCPKCQNNSIADSNAMIATDMRRRVYDLMQEGKSRQEIIDYMVARYGNFVTYDPPLTPLTVLLWVLPLAAIVAGGWIIVARTRRRVRLRREPLPADTPVCGARAGWGVYVPGAVIALAVGAGSYALTGSYPQVRAWQQATAQTPGLLARALDPQAQPLNEEEMARLALGLRTRLQNDAGNVEGWLMLGRTGMVLGNAGTATGAYANAYRLDPENRDAALGYAEALTRSSDPEDNRRGGELLRQLVSRDHTDIRVLSLYAFSAFEQQRFGEAVAAWEMMLKLLPAGDARRAVIERSIRLAQEK

SEQ ID NO: 2946 - DNA, 1044 bp, Salmonella typhimurium LT2
  CDS (1)..(1044): transl_table=11
atgagactgttaccgggcatggtgatgctgatgctggtgctggttatcgccgggtcagcgcgggcgaccaccgacgtgatgccgtttaaagatgaagcgcaggagcagcagttccgccagctcacggagcagctgcgctgcccgaaatgccagaacaacagcattgcggactcgaacgcgatgatagccaccgacatgcgccgcagggtgtatgacctgatgcaggaggggaagagccgccaggaaatcatcgattacatggtggcgcgctacggcaacttcgtcacctacgacccgccgctgaccccgctgacggtgctgctgtgggtgctgccgctggccaccatcgtggcgggcgggtggataatcgtcgcccgcacgcgccggcgggtgcgtatcagacaggacgtcctggccgacgccattcctgcggcgggaccgcgcgccgggtggggtgcttacgtgccgggcgtggttatggcgctggtcgtggccgccatcagttactcacagaccggcagctatccgcaggtgagggcctggcagcaggcaacggcgcagacgccgggactgctggcgcgggcgctggacccgcaggcgcagccgctgaatgaggaggagatggcgcggctggcgctggggctgcgcacccgcctgcagaatgatgccggcaatgttgagggctggctcatgctggggcgcaccggtatggtactgggtaatgccggtaccgccaccggggcctatgcaaacgcttaccgtctggacccgaaaaaccgcgatgcggcgctgggctacgcggaggcgctgacgcgctcgtccgacccggaggataaccgccgcggcggggagctgctgcgtcagctggtgagccgcgaccacacggatatccgggtgttaagcctgtatgcgttcagcgcctttgagcagcagcgctttggcgaggcggtggcggcctgggagatgatgctgaagttactgccggcgggtgacgcccggcgggcggtgatagagcgcagtatccggctggcgcaggagaaataa

SEQ ID NO: 2947 - protein, 347 aa, Salmonella typhimurium LT2
MRLLPGMVMLMLVLVIAGSARATTDVMPFKDEAQEQQFRQLTEQLRCPKCQNNSIADSNAMIATDMRRRVYDLMQEGKSRQEIIDYMVARYGNFVTYDPPLTPLTVLLWVLPLATIVAGGWIIVARTRRRVRIRQDVLADAIPAAGPRAGWGAYVPGVVMALVVAAISYSQTGSYPQVRAWQQATAQTPGLLARALDPQAQPLNEEEMARLALGLRTRLQNDAGNVEGWLMLGRTGMVLGNAGTATGAYANAYRLDPKNRDAALGYAEALTRSSDPEDNRRGGELLRQLVSRDHTDIRVLSLYAFSAFEQQRFGEAVAAWEMMLKLLPAGDARRAVIERSIRLAQEK

SEQ ID NO: 2948 - DNA, 1044 bp, Salmonella typhimurium LT2
  CDS (1)..(1044): transl_table=11
atgagactgttaccgggcatggtgatgctgatgctggcgctggttatctccgggtcagcgcgggcaaccaccgacgtgatgccgtttaaagatgaagcgcaggagcagcagttccgccagctcacggagcagctgcgctgcccgaaatgccagaacaacagcattgcggactcgaacgcgatgatagccaccgacatgcgccgcagggtgtatgacctgatgcaggaggggaagagccgccaggaaatcatcgattatatggtggcgcgctacggcaacttcgtcacctacgacccgccgctgaccccgctgacggtgctgctgtgggtgctgccgctggccgccatcgtggcgggcgggtggataatcgtcgcccgcacgcgccggcgggtgcgcctgcgccgggagccgctgccggcggacaccccggtttgcggcgcgcgcgccgggtggggcgtttacgtgccgggggccgtcattgcgctggcggtcggcgccggcagctacgccctgaccggcagctatccgcaggtcagggcctggcagcaggcaacggcgcagacgcccgggctgctggcgcgggcgctggacccgcaggcgcagccgctgaatgaggaggagatggcgcggctggcgctggggctgcgcacccgcctgcagaatgatgccggcaatgttgagggctggctcatgctggggcgcaccggtatggtactgggtaatgccggtaccgccaccggggcctatgcaaacgcttaccgtctggacccgaaaaaccgcgatgcggcgctgggctacgcggaggcgctgacgcgctcgtccgacccggaggataaccgccgcggcggggagctgctgcgccggctggtgagccgcgaccacacggatatccgggtgttaagcctgtatgcgtttaacgcctttgagcagcagcgctttggcgaggcggtggcggcctgggagatgatgctgaagctgctgccggcgggtgacgcccggcgggcggtgatagagcgcagtatccggctggcgcaggagaaataa

SEQ ID NO: 2949 - protein, 347 aa, Salmonella typhimurium LT2
MRLLPGMVMLMLALVISGSARATTDVMPFKDEAQEQQFRQLTEQLRCPKCQNNSIADSNAMIATDMRRRVYDLMQEGKSRQEIIDYMVARYGNFVTYDPPLTPLTVLLWVLPLAAIVAGGWIIVARTRRRVRLRREPLPADTPVCGARAGWGVYVPGAVIALAVGAGSYALTGSYPQVRAWQQATAQTPGLLARALDPQAQPLNEEEMARLALGLRTRLQNDAGNVEGWLMLGRTGMVLGNAGTATGAYANAYRLDPKNRDAALGYAEALTRSSDPEDNRRGGELLRRLVSRDHTDIRVLSLYAFNAFEQQRFGEAVAAWEMMLKLLPAGDARRAVIERSIRLAQEK

SEQ ID NO: 2950 - DNA, 1035 bp, Ralstonia metallidurans CH34
  CDS (1)..(1035): transl_table=11
gtgcctagaacctggctctccacgctgacgctgctgatcgcgctccatgccggggcggcattcgcgctgacggatgcggaactcgacgcgcgcgtgctggcgctctcctcgcagcttcggtgcctggtctgccagaaccagacactggctgattcgaacgccgacctggccgtcgacctgcgccgccagatccgggcccagatggcgcaaggggccagcgacgacgcgatcaagacctatctggtgcagcgctacggcgacttcgtgctctacaagccgccgttcaagccgcagacgtggctgctgtggctcggccccttcctcctgctcatggcggtgctggcctggctctggcgcggcaggcgccgccagatggccgcaggcaatgccgtggaggagacggagcgggacatgcaatcgcccgcgcgccgccagtcgctgctgaccaatgcgatgctgtttaccgtgttgccaccggtggccgtcgcgctgtatctgcacctgggctcgccagtatcgctgctcgggtctgcggtggcgcacgatggacctcatggccccgatggcgaggtcaccttgacggcggcccgcgtcgaggacatggtcgaccagctcgccgcgcgcctgcgcaagaatccgaacgacgccgagggctgggtcatgctggggcgttcgtacaccgtgctcgaacgcaacgacgacgcggcggaagcattcgcccgcgcggtggcgctggagccgaaggtggcgtcgctgcgttccgactacgcggacgtgctggccagcgtcaacggcggatcgctggaaggcccggcgatggcacagatcgacgccgcgctgcggctcgaccccgacgacccgaaggggctggcgctggccgccagcgccgcggccgaacgcggcgacaaggccggcgcgatcgcctactgggagcacctgtaccggctgctgcccccggattcgcagaccgccggccgggtcgccgccaatctggcggccgcccggtcggtagcggaacccggacagcgcaaatag

SEQ ID NO: 2951 - protein, 344 aa, Ralstonia metallidurans CH34
MPRTWLSTLTLLIALHAGAAFALTDAELDARVLALSSQLRCLVCQNQTLADSNADLAVDLRRQIRAQMAQGASDDAIKTYLVQRYGDFVLYKPPFKPQTWLLWLGPFLLLMAVLAWLWRGRRRQMAAGNAVEETERDMQSPARRQSLLTNAMLFTVLPPVAVALYLHLGSPVSLLGSAVAHDGPHGPDGEVTLTAARVEDMVDQLAARLRKNPNDAEGWVMLGRSYTVLERNDDAAEAFARAVALEPKVASLRSDYADVLASVNGGSLEGPAMAQIDAALRLDPDDPKGLALAASAAAERGDKAGAIAYWEHLYRLLPPDSQTAGRVAANLAAARSVAEPGQRK

SEQ ID NO: 2952 - DNA, 1050 bp, Actinobacillus actinomycetemcomitans
  CDS (1)..(1050): transl_table=11
atgaaacgatttctcgcgttattttttttattgatcagcgtcggtgcttttgccgaaatggtggatacctttgaattccacaatccggcagatcgtgcgcgcgcggtggaattagcaaaatctttgcgctgcccgcaatgtcagaatcaaaatctggtggagtccaattctcctatcgcctatgatctgcgccttgaagtgtataacatggtcaaggaaggcaaaaccaatcagcaaattattgatgccatgacggtacgcttcggcaattttgtgaattacaaaccgccctttcagtggaacactgcattgctttggctgttgccggcggggttgctgttaatggcgtttgggttgatttggaattctgcccgcagttcatcaagcctgaaatctgaaaaacaactggcaaatccaccgcactttcatgccattcaagagaaaagtgcggtcaaatttgaacgtaaatctacgctcattgttttcacgttattgctgatcgtacccctagtttattacttctctctggatcgcttcgcccgtgccaaacaaggggaacgggcacaaatcgcgcagttgaatcatcaaattgaaacgccggaagaaaacaaaacggaagcgattatcggcaaactgcaggataaattacggcaaaatccgaatcatggagaaaactggataaagctgggcgatgcttatatgcaaaacaatgattttgacagcgcattaatttgttacaccaacgcggaaaaaatcgaagggcgcaaaccgaccattttagggttaatggcgatgtcgttatatcttcaggaaaatcagcaagttacgccacaggtgcaacagctggtagaggaggttttgacgcaggatcgcaaagaggtatcggttctgtcccttttggcggcggaagccttaaaaacgcgggattattccacctcacttgattattggcagcaaattctagattcgggcaatgccacggtggatcgtcgtgcgatcattcagaaaatgaaaatggtggattttatgcagaaggggaatatgcaatga

SEQ ID NO: 2953 - protein, 349 aa, Actinobacillus actinomycetemcomitans
MKRFLALFFLLISVGAFAEMVDTFEFHNPADRARAVELAKSLRCPQCQNQNLVESNSPIAYDLRLEVYNMVKEGKTNQQIIDAMTVRFGNFVNYKPPFQWNTALLWLLPAGLLLMAFGLIWNSARSSSSLKSEKQLANPPHFHAIQEKSAVKFERKSTLIVFTLLLIVPLVYYFSLDRFARAKQGERAQIAQLNHQIETPEENKTEAIIGKLQDKLRQNPNHGENWIKLGDAYMQNNDFDSALICYTNAEKIEGRKPTILGLMAMSLYLQENQQVTPQVQQLVEEVLTQDRKEVSVLSLLAAEALKTRDYSTSLDYWQQILDSGNATVDRRAIIQKMKMVDFMQKGNMQ

SEQ ID NO: 2954 - DNA, 1050 bp, Actinobacillus actinomycetemcomitans
  CDS (1)..(1050): transl_table=11
atgaaacgatttctcgcgttattttttttattgatcagcgtcggtgcttttgccgaaatggtggatacctttgaattccacaatccggcagatcgtgcgcgcgcgatggaattagcaaaatctttgcgctgcccgcaatgtcagaatcaaaatctggtggagtccaattctcctatcgcctatgatctgcgccttgaagtgtataacatggtcaatgaaggcaaaaccaatcagcaaattattgatgccatgacggcacgcttcggcaattttgtgaattacaaaccgccctttcagtggaacaccgcgttgctttggctgttgccggcagggctgctgttaatggcgtttgggttgatttggaattctgcccgcagttcaccaagcctgaaatctgaaaaacaactggcaaatccaccgcactttcatgccattcaagagaaaagtgcggtcaaatttgaacgtaaatctacgctcattgttttcacgttattgctgatcgtatccctagtttattacttctctctggatcgcttcgcccgtgccaaacaaggggaacgggcacaaatcgcgcagttgaatcatcaaattgaaacgccggaagaaaacaaaacggaagcgattatcggcaaactgcaggataaattacggcaaaatccgaatcatggagaaaactggataaagctgggcgatgcttatatgcagaacaatgattttgacagcgcattaatttgttacaccaacgcggaaaaaatcgaagggcgcaaaccgaccattttagggttaatggcgatgtcgttatatcttcaggcaaatcagcaggttacgccacaggtgcaacagttagtggaggatgttttgaagcaggatcgcaaagaggtatcggttctgtcccttttggcagcagaagccttaaaaacgcgggattattccaccgcacttgattattggcagcaaattttagattcgggcaatgccgcggtggatcgtcgtgcgattattcagaaaatgaaaatggtggattttatgcaaaaggggaatatgcaatga

SEQ ID NO: 2955 - protein, 349 aa, Actinobacillus actinomycetemcomitans
MKRFLALFFLLISVGAFAEMVDTFEFHNPADRARAMELAKSLRCPQCQNQNLVESNSPIAYDLRLEVYNMVNEGKTNQQIIDAMTARFGNFVNYKPPFQWNTALLWLLPAGLLLMAFGLIWNSARSSPSLKSEKQLANPPHFHAIQEKSAVKFERKSTLIVFTLLLIVSLVYYFSLDRFARAKQGERAQIAQLNHQIETPEENKTEAIIGKLQDKLRQNPNHGENWIKLGDAYMQNNDFDSALICYTNAEKIEGRKPTILGLMAMSLYLQANQQVTPQVQQLVEDVLKQDRKEVSVLSLLAAEALKTRDYSTALDYWQQILDSGNAAVDRRAIIQKMKMVDFMQKGNMQ

SEQ ID NO: 2956 - DNA, 1083 bp, Legionella pneumophila
  CDS (1)..(1083): transl_table=11
atgagagtattccacttctgttttaaggtgattttattgctgctattagtatccgttgcgtttgcaagtagtatgtatccattggactcagcaagaaaagaagcacaatttaaccatcttttaaaagatttgcgttgtttggtatgccaaaatcaggatttggcagattcaaatgctcaattagcgaaggatttacgttttcaggtttatgaattagtgaaagagggcaaaagcgatagtgaaataatggattatctaaccgcacgttatggggattttatactatttaaaccgcctgttaagagcgtgactcttttattgtggtttggcccattcctgtttttattgattggctttattattttttggcggacatgttttaagcgaaattctcatgaaaatgaatggtggttaattattttattggttgttttagccgtttttgcatgcactcttattatctatcctttgcggcgtaatcgtttggtaagtttgttgctcgcccccattatttttataatggtttttacagggtactatttttggggagattttgctcggtggcaagaatatctacatcgaaatgaggctcaggagctagcgcaatcgatgctaaaatcgattaaaagccctcaggaattaatcgacaagctgaaggccaagttggatgcgcagcctgaaagtgccaagggttggtatttgttaggcagattatacagcagtcaaaaggataaccaaaatgcttccctcgcttttgcaaaagcccaccagcttaaacctgaagacgagcaatttgcagtcaattatgcccacagtttatggcaattgagtaatcaacagttcaatcctgatattttagaaatttttcataccttattaaaaaataaccccaggcaaccggatgctttagccatgcttgcgatgcatgcttacttaagtcatgattatgaagctgcgattaattactggcaacggctactccagttggcgccagcgcagtccgaagaagcattggctattcgcaaggcaatagcaaaagctgagaaacaaattaatagagggggaaagaagagtgacagataa

SEQ ID NO: 2957 - protein, 360 aa, Legionella pneumophila
MRVFHFCFKVILLLLLVSVAFASSMYPLDSARKEAQFNHLLKDLRCLVCQNQDLADSNAQLAKDLRFQVYELVKEGKSDSEIMDYLTARYGDFILFKPPVKSVTLLLWFGPFLFLLIGFIIFWRTCFKRNSHENEWWLIILLVVLAVFACTLIIYPLRRNRLVSLLLAPIIFIMVFTGYYFWGDFARWQEYLHRNEAQELAQSMLKSIKSPQELIDKLKAKLDAQPESAKGWYLLGRLYSSQKDNQNASLAFAKAHQLKPEDEQFAVNYAHSLWQLSNQQFNPDILEIFHTLLKNNPRQPDALAMLAMHAYLSHDYEAAINYWQRLLQLAPAQSEEALAIRKAIAKAEKQINRGGKKSDR

SEQ ID NO: 2958 - DNA, 24 bp, Artificial sequence
  primer
atgaggtttttattgggcgtgctg

SEQ ID NO: 2959 - DNA, 23 bp, Artificial sequence
  primer
ttatttactctcctgcggcgaca

SEQ ID NO: 2960 - protein, 301 aa, Artificial sequence
  consensus sequence
  Variant (2)..(4): Xaa in position 2 to 4 is any amino acid
  Variant (8)..(9): Xaa in position 8 to 9 is any amino acid
  Variant (13)..(17): Xaa in position 13 to 17 is any amino acid
  Variant (20)..(22): Xaa in position 20 to 22 is any amino acid
  Variant (24)..(24): Xaa in position 24 is any amino acid
  Variant (26)..(26): Xaa in position 26 is any amino acid
  Variant (28)..(29): Xaa in position 28 to 29 is any amino acid
  Variant (32)..(35): Xaa in position 32 to 35 is any amino acid
  Variant (39)..(42): Xaa in position 39 to 42 is any amino acid
  Variant (44)..(44): Xaa in position 44 is any amino acid
  Variant (46)..(49): Xaa in position 46 to 49 is any amino acid
  Variant (51)..(51): Xaa in position 51 is any amino acid
  Variant (53)..(53): Xaa in position 53 is any amino acid
  Variant (56)..(56): Xaa in position 56 is any amino acid
  Variant (58)..(58): Xaa in position 58 is any amino acid
  Variant (61)..(64): Xaa in position 61 to 64 is any amino acid
  Variant (66)..(66): Xaa in position 66 is any amino acid
  Variant (70)..(71): Xaa in position 70 to 71 is any amino acid
  Variant (73)..(87): Xaa in position 73 to 87 is any amino acid
  Variant (89)..(117): Xaa in position 89 to 117 is any amino acid
  Variant (118)..(125): Xaa in position 118 to 125 is any or no amino acid
  Variant (127)..(138): Xaa in position 127 to 138 is any amino acid
  Variant (140)..(178): Xaa in position 140 to 178 is any amino acid
  Variant (180)..(182): Xaa in position 180 to 182 is any amino acid
  Variant (184)..(190): Xaa in position 184 to 190 is any amino acid
  Variant (192)..(192): Xaa in position 192 is any amino acid
  Variant (194)..(195): Xaa in position 194 to 195 is any amino acid
  Variant (198)..(208): Xaa in position 198 to 208 is any amino acid
  Variant (210)..(215): Xaa in position 210 to 215 is any amino acid
  Variant (217)..(230): Xaa in position 217 to 230 is any amino acid
  Variant (232)..(233): Xaa in position 232 to 233 is any amino acid
  Variant (235)..(256): Xaa in position 235 to 256 is any amino acid
  Variant (258)..(263): Xaa in position 258 to 263 is any amino acid
  Variant (265)..(267): Xaa in position 265 to 267 is any amino acid
  Variant (269)..(270): Xaa in position 269 to 270 is any amino acid
  Variant (272)..(279): Xaa in position 272 to 279 is any amino acid
  Variant (281)..(283): Xaa in position 281 to 283 is any amino acid
  Variant (285)..(287): Xaa in position 285 to 287 is any amino acid
  Variant (289)..(292): Xaa in position 289 to 292 is any amino acid
  Variant (294)..(300): Xaa in position 294 to 300 is any amino acid
LXXXLRCXXCQNXXXXXSNXXXAXDXRXXVYXXXXEGKXXXXIXDXXXXRXGXFVXYXPPXXXXTXLLWXXPXXXXXXXXXXXXXXXRXXXXXXXXXXXXXXXXXXXXXXXXXXXXXXXXXXXXXLXXXXXXXXXXXXYXXXXXXXXXXXXXXXXXXXXXXXXXXXXXXXXXXXXXXXLXXXLXXXXXXXEXWXXLGXXXXXXXXXXXAXXXXXXAXXXXXXXXXXXXXXAXXLXXXXXXXXXXXXXXXXXXXXXXDXXXXXXLXXXAXXAXXXXXXXXAXXXWXXXLXXXXAXXXXXXXI

SEQ ID NO: 2961 - protein, 60 aa, Artificial sequence
  protein pattern
  Variant (3)..(3): Xaa in position 3 is Leu or Pro
  Variant (4)..(4): Xaa in position 4 is any amino acid
  Variant (8)..(8): Xaa in position 8 is Asn or Gln
  Variant (9)..(9): Xaa in position 9 is Asp, Asn or Ser
  Variant (10)..(10): Xaa in position 10 is Ile or Leu
  Variant (11)..(11): Xaa in position 11 is Ala or Val
  Variant (12)..(12): Xaa in position 12 is Asp or Glu
  Variant (15)..(15): Xaa in position 15 is Ala or Ser
  Variant (16)..(16): Xaa in position 16 is any amino acid
  Variant (17)..(17): Xaa in position 17 is Ile or Leu
  Variant (19)..(19): Xaa in position 19 is any amino acid
  Variant (21)..(21): Xaa in position 21 is Leu or Met
  Variant (23)..(24): Xaa in position 23 to 24 is any amino acid
  Variant (27)..(27): Xaa in position 27 is Asp, Glu or Asn
  Variant (28)..(28): Xaa in position 28 is Leu or Met
  Variant (29)..(29): Xaa in position 29 is Met or Val
  Variant (30)..(30): Xaa in position 30 is any amino acid
  Variant (34)..(34): Xaa in position 34 is Ser or Thr
  Variant (35)..(36): Xaa in position 35 to 36 is any amino acid
  Variant (37)..(37): Xaa in position 37 is Glu or Gln
  Variant (39)..(39): Xaa in position 39 is Ile, Met or Val
  Variant (41)..(41): Xaa in position 41 is any amino acid
  Variant (42)..(42): Xaa in position 42 is Leu or Met
  Variant (43)..(43): Xaa in position 43 is Thr or Val
  Variant (44)..(44): Xaa in position 44 is Ala or Val
  Variant (46)..(46): Xaa in position 46 is Phe or Tyr
  Variant (48)..(48): Xaa in position 48 is Asp or Asn
  Variant (50)..(50): Xaa in position 50 is Ile or Val
  Variant (51)..(51): Xaa in position 51 is any amino acid
  Variant (52)..(52): Xaa in position 52 is Phe or Tyr
  Variant (53)..(53): Xaa in position 53 is Asp or Lys
  Variant (56)..(56): Xaa in position 56 is Phe, Leu or Val
  Variant (57)..(59): Xaa in position 57 to 59 is any amino acid
RCXXCQNXXXXXSNXXXAXDXRXXVYXXXXEGKXXXXIXDXXXXRXGXFXXXXPPXXXXT

SEQ ID NO: 2962 - protein, 57 aa, Artificial sequence
  protein pattern
  Variant (2)..(6): Xaa in position 2 to 6 is any amino acid
  Variant (7)..(8): Xaa in position 7 to 8 is any or no amino acid
  Variant (10)..(10): Xaa in position 10 is Gly or Asn
  Variant (12)..(12): Xaa in position 12 is Ile, Leu or Val
  Variant (13)..(13): Xaa in position 13 is any amino acid
  Variant (16)..(16): Xaa in position 16 is Asp or Arg
  Variant (17)..(17): Xaa in position 17 is Ala, Ser, Thr or Val
  Variant (18)..(21): Xaa in position 18 to 21 is any amino acid
  Variant (22)..(22): Xaa in position 22 is Glu, Gly or Asn
  Variant (23)..(23): Xaa in position 23 is Asp, Asn or Arg
  Variant (24)..(24): Xaa in position 24 is any amino acid
  Variant (25)..(25): Xaa in position 25 is Asp, Gly or Ser
  Variant (26)..(26): Xaa in position 26 is any amino acid
  Variant (28)..(29): Xaa in position 28 to 29 is any amino acid
  Variant (30)..(30): Xaa in position 30 is Ala or Cys
  Variant (31)..(31): Xaa in position 31 is Phe or Tyr
  Variant (32)..(32): Xaa in position 32 is Ala or Thr
  Variant (33)..(33): Xaa in position 33 is any amino acid
  Variant (35)..(36): Xaa in position 35 to 36 is any amino acid
  Variant (37)..(37): Xaa in position 37 is Ile or Leu
  Variant (38)..(38): Xaa in position 38 is Asp or Glu
  Variant (39)..(39): Xaa in position 39 is Gly or Pro
  Variant (40)..(40): Xaa in position 40 is Glu, Lys or Arg
  Variant (41)..(42): Xaa in position 41 to 42 is any amino acid
  Variant (43)..(43): Xaa in position 43 is Asp, Ser or Thr
  Variant (44)..(44): Xaa in position 44 is Ala, Ile or Leu
  Variant (45)..(48): Xaa in position 45 to 48 is any amino acid
  Variant (50)..(50): Xaa in position 50 is any amino acid
  Variant (51)..(51): Xaa in position 51 is Ala, Ser or Val
  Variant (53)..(55): Xaa in position 53 to 55 is any amino acid
  Variant (56)..(56): Xaa in position 56 is Ala, Glu, Asn or Ser
  Variant (57)..(57): Xaa in position 57 is Asp, Gly or Asn
LXXXXXXXEXWXXLGXXXXXXXXXXXAXXXXXXAXXXXXXXXXXXXXXAXXLXXXXX

SEQ ID NO: 2963 - protein, 57 aa, Artificial sequence
  protein pattern
  Variant (2)..(15): Xaa in position 2 to 15 is any amino acid
  Variant (16)..(17): Xaa in position 16 to 17 is any or no amino acid
  Variant (19)..(19): Xaa in position 19 is any amino acid
  Variant (20)..(21): Xaa in position 20 to 21 is any or no amino acid
  Variant (23)..(24): Xaa in position 23 to 24 is any amino acid
  Variant (26)..(27): Xaa in position 26 to 27 is any amino acid
  Variant (28)..(28): Xaa in position 28 is Gln, Ser or Thr
  Variant (29)..(29): Xaa in position 29 is any amino acid
  Variant (30)..(30): Xaa in position 30 is Asp or Arg
  Variant (31)..(31): Xaa in position 31 is Phe or Tyr
  Variant (32)..(32): Xaa in position 32 is Glu, Gly or Ser
  Variant (33)..(33): Xaa in position 33 is Ala, Glu or Thr
  Variant (34)..(34): Xaa in position 34 is Ala or Ser
  Variant (35)..(35): Xaa in position 35 is Ile, Leu or Val
  Variant (36)..(36): Xaa in position 36 is Ala, Asp or Asn
  Variant (37)..(37): Xaa in position 37 is any amino acid
  Variant (39)..(39): Xaa in position 39 is Glu or Gln
  Variant (40)..(40): Xaa in position 40 is any amino acid
  Variant (41)..(41): Xaa in position 41 is Ile, Leu or Met
  Variant (43)..(44): Xaa in position 43 to 44 is any amino acid
  Variant (45)..(45): Xaa in position 45 is Ala, Gly or Leu
  Variant (46)..(46): Xaa in position 46 is Asn or Pro
  Variant (48)..(48): Xaa in position 48 is Ala, Gly, Asn, Gln or Thr
  Variant (49)..(49): Xaa in position 49 is Asp, Ser or Val
  Variant (50)..(50): Xaa in position 50 is Ala, Asp, Glu or Thr
  Variant (51)..(51): Xaa in position 51 is Glu or Arg
  Variant (52)..(52): Xaa in position 52 is any amino acid
  Variant (53)..(53): Xaa in position 53 is Ala or Leu
  Variant (54)..(54): Xaa in position 54 is Ala, Ile or Val
  Variant (56)..(56): Xaa in position 56 is Glu, Gln or Arg
  Variant (57)..(57): Xaa in position 57 is Lys or Arg
LXXXXXXXXXXXXXXXXLXXXAXXAXXXXXXXXXXXXWXXXLXXXXAXXXXXXXIXX

SEQ ID NO: 2964 - protein, 17 aa, Artificial sequence
  protein pattern
  Variant (2)..(2): Xaa in position 2 is any amino acid
  Variant (3)..(3): Xaa in position 3 is any or no amino acid
  Variant (5)..(5): Xaa in position 5 is Ala, Gly, Pro or Ser
  Variant (6)..(6): Xaa in position 6 is Ala, Gly, Leu or Val
  Variant (7)..(7): Xaa in position 7 is Ala, Gly, Ile or Val
  Variant (8)..(8): Xaa in position 8 is any amino acid
  Variant (10)..(12): Xaa in position 10 to 12 is any amino acid
  Variant (13)..(13): Xaa in position 13 is Asp or Gly
  Variant (14)..(14): Xaa in position 14 is Asn, Arg or Ser
  Variant (15)..(16): Xaa in position 15 to 16 is any amino acid
  Variant (17)..(17): Xaa in position 17 is Gln, Arg or Ser
LXXVXXXXYXXXXXXXX

SEQ ID NO: 2965 - DNA, 1650 bp, Escherichia coli K12
  CDS (1)..(1650): transl_table=11
gtgaactggcgcagaatcgtctggctattggcgttggttactctgccaacacttgcggaggagacgccgttacaactggtgctgcgcggtgcgcagcacgatcaactgtatcagctgtcgtcatcaggcgtgaccaaagtctcagcattacctgactcgctcaccacgccgttagggagtttgtggaaactgtatgtttacgcctggctggaggatacccatcaaccggagcagccctaccagtgtcgcggaaactccccggaagaggtttattgttgtcaggctggggagagcataacgcgcgataccgcgctggtacgttcctgtgggctctattttgcgccgcagcggttgcatattggcgcagatgtgtgggggcaatactggcaacagcgtcaggcacctgcgtggttagcgtctctgactacgctgaagccagaaacctcggtaacggttaaatcgctgcttgattcattagcgacgttacccgcgcaaaacaaagctcaggaagtcttactggatgtggtgctggacgaggcgaaaatcggtgtcgcatccatgctcggtagtcgggtacgggtgaaaacctggagctggtttgccgatgataaacaggaaatccgtcagggtggttttgctggctggttaaccgatggtacaccgctgtgggttactggcagtggcaccagcaaaacggtactaacccgttatgcgacggtgcttaatcgggttttgccagtgccgacgcaggttgccagtgggcaatgtgtagaggtggagctgtttgcccgctatccgctgaagaaaatcacagcggaaaagagtacgacggcagtaaatcccggcgtacttaatgggcgctatcgtgtgacgtttactaatggtaaccacattacgtttgtcagccacggtgagacgaccttactgagcgaaaagggcaaactgaaattgcagtcgcatctcgatcgtgaagagtacgttgccagagttctggatcgcgaggcgaaaagtacgccccctgaggcagcgaaagccatgaccgtggcgattcgcacttttttacagcaaaacgccaatcgggaaggcgattgcctgaccatccccgacagcagcgccacgcagcgtgtttctgcttcgccagcgaccacgggggcgcgaacgatgaccgcctggacgcaggatctcatctatgcaggcgatccggttcattatcatggcagtcgcgctaccgaagggacactttcctggcggcaagccacggcccaggcggggcagggagagcgttacgatcagatactcgcgtttgcttatcccgacaacagtcttagccgctggggagcgccacgctcaacctgccagttattacccaaagcgaaagcctggctggcgaaaaaaatgccgcagtggcggcgtatattacaagctgagacggggtacaacgaaccagacgtgtttgcggtttgccgtttagtctcaggtttcccctataccgatcggcagcagaaacggctgtttattcgtaacttctttacgcttcaggatcggctggatttaacccatgagtatctgcacctggcctttgatggttatcccaccgggcttgatgagaactatatcgaaacgctgacccgacaattattaatggactaa

SEQ ID NO: 2966 - protein, 549 aa, Escherichia coli K12
MNWRRIVWLLALVTLPTLAEETPLQLVLRGAQHDQLYQLSSSGVTKVSALPDSLTTPLGSLWKLYVYAWLEDTHQPEQPYQCRGNSPEEVYCCQAGESITRDTALVRSCGLYFAPQRLHIGADVWGQYWQQRQAPAWLASLTTLKPETSVTVKSLLDSLATLPAQNKAQEVLLDVVLDEAKIGVASMLGSRVRVKTWSWFADDKQEIRQGGFAGWLTDGTPLWVTGSGTSKTVLTRYATVLNRVLPVPTQVASGQCVEVELFARYPLKKITAEKSTTAVNPGVLNGRYRVTFTNGNHITFVSHGETTLLSEKGKLKLQSHLDREEYVARVLDREAKSTPPEAAKAMTVAIRTFLQQNANREGDCLTIPDSSATQRVSASPATTGARTMTAWTQDLIYAGDPVHYHGSRATEGTLSWRQATAQAGQGERYDQILAFAYPDNSLSRWGAPRSTCQLLPKAKAWLAKKMPQWRRILQAETGYNEPDVFAVCRLVSGFPYTDRQQKRLFIRNFFTLQDRLDLTHEYLHLAFDGYPTGLDENYIETLTRQLLMD

SEQ ID NO: 2967 - DNA, 1650 bp, Pseudomonas aeruginosa PAO1
  CDS (1)..(1650): transl_table=11
gtgattgcgttgcgcgcctggctggtcctgctgtgcgccgtgccgttgctgcttcgcgcagcggaggcgccggtccagctggcctggcgcacgacccagggctacgaactggtgagcctggatcgccagcgggtactcgagcgccggccgttgccggccgatttgcaggctccgctgggcagcctgtggaaactgttcgtcttcgcctggctgagcgacaccggccaggccgagccgccctatacctgccaggggcgcagccgcgaggaggtctactgctgcgagaatggccagacgatcggtcgtgaccgcgccctggtgcgctcctgcgggctgtatttcgagccgcagcgcctcgccttgcggccggaggcctggcgcggctactggcaggcgcgccaggcaccggcctggttgctcgatctggaacggctgcaaccgcagacgcgggtgccggttaaggagcttctggagcagttgcagcaactgccggcccagggcgaggcgcggcgggtactgctcgatgtggcgttgcaggccggcgacggccatgccgtggccagccttggcggccgcctgcgggtgaagacctggagctggctcgacgaccatgacccgcaggcgcgccagggcggtttcgctggctggctggtcgatggaacgccgctctggctcggcggcccgggaaccagcaagatgatcctggaccgctacgccgaggtgctcgggcgcttcctgccgagtccgtggccggccgatccgggccgttgcgtggaagtgaacctgttcagccgctatccgctgcgctcggtcagcgatccctccggccacccggccgccgaaggcctgctgcatggtccgcagcaagtgctcttcgccaacggcaatcgactggacatcgccagcgccggcgacctcttcctgcaacgggtggatggcgtgccgcgcctggtcgcgcgggtttcgcgcgaagagtacgtggcgcgggtgctggagcgcgaagcctcggcgcagccgaaggaagccgctcgcgcgctggcggtgaccattcgcacctatctattgcaaaacgccgcgccgcgcggcgaatgcctggccatcgatgacagcagccagcgccagcgcgtagcgccgcgcccggccagcgcgccgacgcggcggatcgctgcctggagcgccgacctggtgctggccggggcgaccgtcaactatcactccgaccagcctggtccggcgcgcctgtcctggaagcacgcggtggagcaagccgggcagggactgggctacgacagcatcctcgcccaggctttcccgcgcagcagcctgagccgctgggacaacccggtggccgcctgccagccgttgccggctgccgaagactggctgcgcaagcagcgccggcagtggcgcgagcgcctcgaccgagagcccggctacgaggagattccgagtttttccgtgtgccgcctggcttccgggcggccctatgtcgatcgcgagcgcgaacgcatcttcgtccgcggcctgtattccctacaggaacgcctggacctcacccacgaatacctgcacctggccttccgcgcccatcccagcggccaggacgaaaactatatcgaaagcctggcccggcgcctgctactggaatga

SEQ ID NO: 2968 - protein, 549 aa, Pseudomonas aeruginosa PAO1
MIALRAWLVLLCAVPLLLRAAEAPVQLAWRTTQGYELVSLDRQRVLERRPLPADLQAPLGSLWKLFVFAWLSDTGQAEPPYTCQGRSREEVYCCENGQTIGRDRALVRSCGLYFEPQRLALRPEAWRGYWQARQAPAWLLDLERLQPQTRVPVKELLEQLQQLPAQGEARRVLLDVALQAGDGHAVASLGGRLRVKTWSWLDDHDPQARQGGFAGWLVDGTPLWLGGPGTSKMILDRYAEVLGRFLPSPWPADPGRCVEVNLFSRYPLRSVSDPSGHPAAEGLLHGPQQVLFANGNRLDIASAGDLFLQRVDGVPRLVARVSREEYVARVLEREASAQPKEAARALAVTIRTYLLQNAAPRGECLAIDDSSQRQRVAPRPASAPTRRIAAWSADLVLAGATVNYHSDQPGPARLSWKHAVEQAGQGLGYDSILAQAFPRSSLSRWDNPVAACQPLPAAEDWLRKQRRQWRERLDREPGYEEIPSFSVCRLASGRPYVDRERERIFVRGLYSLQERLDLTHEYLHLAFRAHPSGQDENYIESLARRLLLE

SEQ ID NO: 2969 - DNA, 1644 bp, Pseudomonas fluorescens Pf-5
  CDS (1)..(1644): transl_table=11
atggtgcggtgctgggcctggctatgtctgtgtttgcttcctgggtgggtgacggcccaggacgagcctctgcgcctggcctggaaaaccgccccggacagtgagctggtgagcctgagcaagacccaggttctgtctcgcgagccgttgcccaaggatctgcaagcgcccctgggcagtgtctggaaactctttgtctacgcctggctggtggacaccggcgcccaggagccggcctatgcctgccagggcaagtccaaggaagaggtctactgctgtgcggtgggcgccagcatcgcccgtgatcaggcgctggtacgttcctgcggtttgtatttcgagccccagcgcttgcaactgtccgccgctgactggcgccattactggcaggcccgcaacgcccccgactggttgcaggacctcaaccagctgcagccccagacccgggtcccggtagcggaactgctgcaggtgctggcgctgttgccggcccgggacacggcccggcgcgtgctgctggatgtggtgctcaatgccgccgacggcgctgtagtgggcgccttgggcgggcgcttgcgggtcaagacctggagctggctggcggatcaggacccgcaatcgcgccagggtggttttgccggctggctggtggatggcacaccgctgtgggtgggcgggcgtggcaccagccaacgggtgttgaaggactacgcccaggccctgaaccaggaactgccggacaacccgcctgtggataaaggccgctgtgtggaggtcagcctgttttcccgctacccgctcagaagcgtcagccagggcggccagccggctaaaccgggtgccttgcaaggggattaccgggtggagtttgccaacggcaaccagctggatatccacagcgccggcgagctgttcctgcagcaagaccctgcggcccagcgactggtggcgcgcctggaccgtgaggaatatgtcgctcgggtactgcagcgcgaagccaccagtgagccagtggaggccgccaaggcgctggccgtggccatccgtacctacctgttgcagaacgccgggcgcagcggcgaatgcctgagcatcgacgacagcagcaaccgccagcgggtcgcgccgcgcccggccactgcccaggcccgggccatagccgcctggaccagcgacctggtgctggccggcactcaagtcacctaccactcggacctgaaggcgccggacaaactgtcctggcaacaggccgtggagcaggcccggtccgggcaacgctacgacgccatcctgctgcacgcctatccccgggccagcctcagccgctgggacaaccccgtggcctcctgcgaacccttgccggcggcccaggagtggctgctgcagcagcgccggcgctggcgccaaccgctggagcaagagatcggctacaacgaaatcagccagttcgccgtgtgccgcctgagtttcggccggccctacgtcgaccgtgaacggcaacgcatctatgtgcggggcgtactctcgctgcaagaccgcctcgacctgactcacgaatacctgcacctggcctttgaagctcatcccaacggccaggatgaaacctatatcgaagggctcgcccgtcatcttttattggaatag

SEQ ID NO: 2970 - protein, 547 aa, Pseudomonas fluorescens Pf-5
MVRCWAWLCLCLLPGWVTAQDEPLRLAWKTAPDSELVSLSKTQVLSREPLPKDLQAPLGSVWKLFVYAWLVDTGAQEPAYACQGKSKEEVYCCAVGASIARDQALVRSCGLYFEPQRLQLSAADWRHYWQARNAPDWLQDLNQLQPQTRVPVAELLQVLALLPARDTARRVLLDVVLNAADGAVVGALGGRLRVKTWSWLADQDPQSRQGGFAGWLVDGTPLWVGGRGTSQRVLKDYAQALNQELPDNPPVDKGRCVEVSLFSRYPLRSVSQGGQPAKPGALQGDYRVEFANGNQLDIHSAGELFLQQDPAAQRLVARLDREEYVARVLQREATSEPVEAAKALAVAIRTYLLQNAGRSGECLSIDDSSNRQRVAPRPATAQARAIAAWTSDLVLAGTQVTYHSDLKAPDKLSWQQAVEQARSGQRYDAILLHAYPRASLSRWDNPVASCEPLPAAQEWLLQQRRRWRQPLEQEIGYNEISQFAVCRLSFGRPYVDRERQRIYVRGVLSLQDRLDLTHEYLHLAFEAHPNGQDETYIEGLARHLLLE

SEQ ID NO: 2971 - DNA, 1620 bp, Pseudomonas fluorescens PfO-1
  CDS (1)..(1620): transl_table=11
atgacccggccgctggtctggctgctgatgtgtgtgattcctgcgctggcgacggcgcaggatgagccgttgcgcgtggcctacaagggcgaactgctgtcgctgaatacctcgcaattgacggcgcgcgagccaatgccttcgtcgctggagacaccgctgggcagtctgtggaaggtgttcgtttatgcgtggctggtggataccggtgcgcgggagcctgcatatgaatgtcgcgggcagtcgaaggaagaagtctattgctgcaccgctggcggcaagatcgagcgtgatcaggcgctggtgaaatcctgcgggctgtatttcgagccggcgcggttgggcataaccgctggcgattggagaacctattggcaggcgcgacaggcgccgccgtggttgctggatctgccatcggtgcagccggctactcgggtttccgtggctgacttgctgaaggttttgtcttggttgccggctcaggatcagatgcgccgggtgctgctcgacgtggtgctgagcgcggcggacggcaatgtggttggtgaactcggcgggcgtttgcgggtgaaaacctggagctggctcggcgatcaggaccctcaatcacgccagggcggattcgccggctggacggcggacggctcgccgatctgggcgggtggccggggcaccagtcagatggttttgcggcgttacggttcggcgttggcgacggtgttgcccacgtcatggccggcggaagcagggcgttgtgtcgaagtcggactgttctcgcgatatccggtttcgcgggttttggccggtaatcgagcggtgacctccggcccgttgcagggtgattaccgcgtcgaattcgccaacggcaatgcgctggacatccacagcgacggcgagctgtttctgctcaacgacaagcttgtggcgcggctggatcgcgaagagtacgtcgcccgtgtgctggagcgtgaagccaagcccgaacccgccgaagccgccaaagccttggccgtggcaatccgcacgtatctgctgcagaacgccacacgtaacggcgaatgtttgagcatcgacgacagcagcacccgccaacgtgttgcaccgcgtcctgcttccgtcgaatcccgcaacatcgccgcatggacggcggatctggtgttggcgggcagcaccgtcacttatcactccgatcaacccggcccggacaaactggcctggcaacaagcggtcgagcaagctaacgccggtcagcgctacgacgcgattctgctgcacgcctatccgcgcgccagcctcagccgctgggacaacccggtggcgtcctgcgaagcgctgcctgccgcgcaggactggctgcaaaaacagcggcgcggctggcgtcccaggctggaaagcgaaaccggctacaacgaagtcagcacgttcgccgtctgcaaactcgccttcggtcgccccttcgtcgaccgcgaacgccagcgcatctatgtgcgcggcgtgttgtccttgcaggaccgcctcgacctgactcacgaatacctgcacctggcctttgaagcacaccccaacggccaggatgaaacctatatcgaagggctcgcccgtcaccttttgctggaatag

SEQ ID NO: 2972 - protein, 539 aa, Pseudomonas fluorescens PfO-1
MTRPLVWLLMCVIPALATAQDEPLRVAYKGELLSLNTSQLTAREPMPSSLETPLGSLWKVFVYAWLVDTGAREPAYECRGQSKEEVYCCTAGGKIERDQALVKSCGLYFEPARLGITAGDWRTYWQARQAPPWLLDLPSVQPATRVSVADLLKVLSWLPAQDQMRRVLLDVVLSAADGNVVGELGGRLRVKTWSWLGDQDPQSRQGGFAGWTADGSPIWAGGRGTSQMVLRRYGSALATVLPTSWPAEAGRCVEVGLFSRYPVSRVLAGNRAVTSGPLQGDYRVEFANGNALDIHSDGELFLLNDKLVARLDREEYVARVLEREAKPEPAEAAKALAVAIRTYLLQNATRNGECLSIDDSSTRQRVAPRPASVESRNIAAWTADLVLAGSTVTYHSDQPGPDKLAWQQAVEQANAGQRYDAILLHAYPRASLSRWDNPVASCEALPAAQDWLQKQRRGWRPRLESETGYNEVSTFAVCKLAFGRPFVDRERQRIYVRGVLSLQDRLDLTHEYLHLAFEAHPNGQDETYIEGLARHLLLE

SEQ ID NO: 2973 - DNA, 1641 bp, Pseudomonas aeruginosa UCBPP-PA14
  CDS (1)..(1641)
ttgcgcgcctggctggtcctgctgtgcgccgtgccgttgctgcttcgcgcagcggaggcgccggtccagctggcctggcgcacgacccagggctacgaactggtgagcctggatcgccagcgggtgctcgagcgccggccgttgccggccgatttgcaggctccgctgggcagcctgtggaaactgttcgtcttcgcctggctgagcgacaccggccaggccgagtcgccctatgcctgccaggggcgcagccgcgaggaggtctactgctgcgagaatggccagacgatcggtcgtgaccgcgccctggtgcgctcctgcgggctgtatttcgagccgcagcgcctcgccttgcggccggaggcctggcgcgactactggcaggcgcgccgggcaccggcctggttgctcgatctggaacggctgcaaccgcagacgcgggtgccggttaaggagcttctggaacagttgcagcaactgccggcccagggcgaggcgcggcgggtactgctcgacgtggcgttgcaggccggcgacggccatgccgtggccagccttggcggccgcctgcgggtgaagacctggagctggctcgacgaccatgacccgcaggcgcgccagggcggtttcgccggctggctggtcgatggaacgccgctctggctcggcggcccgggaaccagcaaggtgatcctggaccgctacgccgaggtgctcgggcgcttcctgccgagtccgtggccggccgatccgggccgttgcgtggaagtgaacctgttcagccgctatccgctgcgctcggtcagtgatcccgccggccgcccggccgccgaaggcctgctgcatggtccgcagcaagtgctgttcgccaacggcaatcgcctggacatcgccagcgccggcgacctcttcctgcaacgggtggatggcgtgccgcgcctggtcgcgcgggtttcgcgcgaagagtacgtggcgcgggtgctggagcgcgaagcctcggcgcagccgaaggaagccgctcgcgcgctggcggtgaccattcgcacctatctattgcaaaacgccgcgccgcgcggcgaatgcctggccatcgatgacagcagccagcgccagcgcgtggcgccgcgcccggccagcgcgccgacgcggcggatcgccgcctggagcgccgacctggtgctggccggggcgaccgtcaactatcactccgaccagcctggtccggcgcgcctgtcctggaagcacgcggtggagcaagccgggcagggactgggctacgacagcatcctcgcccaggctttcccgcgcagcagcctgagccgctgggacaacccggtggccgcctgccagccgttgccggccgccgaagactggctgcgcaagcagcgccggcagtggcgcgagcgcctcgaccgagagcccggctacgaggagattccgagtttttccgtgtgccgcctggcttccgggcggccctatgtcgatcgcgagcgcgaacgcatcttcgtccgcggcctgtattccctacaggaacgcctggacctcacccacgaatacctgcacctggccttccgcgcccatcccagcggccaggacgaaaactatgtcgaaagcctggcccggcgcctgctactggaatga

SEQ ID NO: 2974 - protein, 546 aa, Pseudomonas aeruginosa UCBPP-PA14
MRAWLVLLCAVPLLLRAAEAPVQLAWRTTQGYELVSLDRQRVLERRPLPADLQAPLGSLWKLFVFAWLSDTGQAESPYACQGRSREEVYCCENGQTIGRDRALVRSCGLYFEPQRLALRPEAWRDYWQARRAPAWLLDLERLQPQTRVPVKELLEQLQQLPAQGEARRVLLDVALQAGDGHAVASLGGRLRVKTWSWLDDHDPQARQGGFAGWLVDGTPLWLGGPGTSKVILDRYAEVLGRFLPSPWPADPGRCVEVNLFSRYPLRSVSDPAGRPAAEGLLHGPQQVLFANGNRLDIASAGDLFLQRVDGVPRLVARVSREEYVARVLEREASAQPKEAARALAVTIRTYLLQNAAPRGECLAIDDSSQRQRVAPRPASAPTRRIAAWSADLVLAGATVNYHSDQPGPARLSWKHAVEQAGQGLGYDSILAQAFPRSSLSRWDNPVAACQPLPAAEDWLRKQRRQWRERLDREPGYEEIPSFSVCRLASGRPYVDRERERIFVRGLYSLQERLDLTHEYLHLAFRAHPSGQDENYVESLARRLLLE

SEQ ID NO: 2975 - DNA, 23 bp, Artificial sequence
  primer
atgaactggcgcagaatcgtctg

SEQ ID NO: 2976 - DNA, 25 bp, Artificial sequence
  primer
ttagtccattaataattgtcgggtc

SEQ ID NO: 2977 - protein, 544 aa, Artificial sequence
  consensus sequence
  Variant (3)..(3): Xaa in position 3 is any amino acid
  Variant (4)..(4): Xaa in position 4 is any or no amino acid
  Variant (7)..(8): Xaa in position 7 to 8 is any amino acid
  Variant (10)..(11): Xaa in position 10 to 11 is any amino acid
  Variant (12)..(13): Xaa in position 12 to 13 is any or no amino acid
  Variant (15)..(17): Xaa in position 15 to 17 is any amino acid
  Variant (19)..(20): Xaa in position 19 to 20 is any amino acid
  Variant (23)..(25): Xaa in position 23 to 25 is any amino acid
  Variant (26)..(29): Xaa in position 26 to 29 is any or no amino acid
  Variant (32)..(32): Xaa in position 32 is any amino acid
  Variant (35)..(38): Xaa in position 35 to 38 is any amino acid
  Variant (40)..(41): Xaa in position 40 to 41 is any amino acid
  Variant (43)..(43): Xaa in position 43 is any amino acid
  Variant (47)..(48): Xaa in position 47 to 48 is any amino acid
  Variant (50)..(51): Xaa in position 50 to 51 is any amino acid
  Variant (62)..(62): Xaa in position 62 is any amino acid
  Variant (66)..(66): Xaa in position 66 is any amino acid
  Variant (70)..(71): Xaa in position 70 to 71 is any amino acid
  Variant (73)..(74): Xaa in position 73 to 74 is any amino acid
  Variant (76)..(76): Xaa in position 76 is any amino acid
  Variant (78)..(78): Xaa in position 78 is any amino acid
  Variant (80)..(80): Xaa in position 80 is any amino acid
  Variant (82)..(82): Xaa in position 82 is any amino acid
  Variant (89)..(90): Xaa in position 89 to 90 is any amino acid
  Variant (92)..(93): Xaa in position 92 to 93 is any amino acid
  Variant (95)..(95): Xaa in position 95 is any amino acid
  Variant (98)..(98): Xaa in position 98 is any amino acid
  Variant (114)..(119): Xaa in position 114 to 119 is any amino acid
  Variant (122)..(122): Xaa in position 122 is any amino acid
  Variant (128)..(128): Xaa in position 128 is any amino acid
  Variant (131)..(131): Xaa in position 131 is any amino acid
  Variant (134)..(134): Xaa in position 134 is any amino acid
  Variant (137)..(138): Xaa in position 137 to 138 is any amino acid
  Variant (142)..(142): Xaa in position 142 is any amino acid
  Variant (146)..(146): Xaa in position 146 is any amino acid
  Variant (148)..(149): Xaa in position 148 to 149 is any amino acid
  Variant (152)..(153): Xaa in position 152 to 153 is any amino acid
  Variant (155)..(156): Xaa in position 155 to 156 is any amino acid
  Variant (161)..(162): Xaa in position 161 to 162 is any amino acid
  Variant (171)..(171): Xaa in position 171 is any amino acid
  Variant (173)..(173): Xaa in position 173 is any amino acid
  Variant (175)..(175): Xaa in position 175 is any amino acid
  Variant (178)..(179): Xaa in position 178 to 179 is any amino acid
  Variant (181)..(182): Xaa in position 181 to 182 is any amino acid
  Variant (196)..(196): Xaa in position 196 is any amino acid
  Variant (198)..(198): Xaa in position 198 is any amino acid
  Variant (202)..(202): Xaa in position 202 is any amino acid
  Variant (212)..(212): Xaa in position 212 is any amino acid
  Variant (219)..(219): Xaa in position 219 is any amino acid
  Variant (222)..(222): Xaa in position 222 is any amino acid
  Variant (226)..(228): Xaa in position 226 to 228 is any amino acid
  Variant (230)..(230): Xaa in position 230 is any amino acid
  Variant (234)..(235): Xaa in position 234 to 235 is any amino acid
  Variant (237)..(239): Xaa in position 237 to 239 is any amino acid
  Variant (242)..(244): Xaa in position 242 to 244 is any amino acid
  Variant (246)..(248): Xaa in position 246 to 248 is any amino acid
  Variant (255)..(255): Xaa in position 255 is any amino acid
  Variant (263)..(264): Xaa in position 263 to 264 is any amino acid
  Variant (266)..(271): Xaa in position 266 to 271 is any amino acid
  Variant (272)..(272): Xaa in position 272 is any or no amino acid
  Variant (274)..(275): Xaa in position 274 to 275 is any amino acid
  Variant (276)..(276): Xaa in position 276 is any or no amino acid
  Variant (278)..(278): Xaa in position 278 is any amino acid
  Variant (280)..(280): Xaa in position 280 is any amino acid
  Variant (282)..(284): Xaa in position 282 to 284 is any amino acid
  Variant (286)..(286): Xaa in position 286 is any amino acid
  Variant (292)..(292): Xaa in position 292 is any amino acid
  Variant (296)..(296): Xaa in position 296 is any amino acid
  Variant (298)..(298): Xaa in position 298 is any amino acid
  Variant (300)..(300): Xaa in position 300 is any amino acid
  Variant (304)..(307): Xaa in position 304 to 307 is any amino acid
  Variant (308)..(311): Xaa in position 308 to 311 is any or no amino acid
  Variant (316)..(317): Xaa in position 316 to 317 is any amino acid
  Variant (327)..(327): Xaa in position 327 is any amino acid
  Variant (331)..(333): Xaa in position 331 to 333 is any amino acid
  Variant (335)..(335): Xaa in position 335 is any amino acid
  Variant (339)..(339): Xaa in position 339 is any amino acid
  Variant (344)..(344): Xaa in position 344 is any amino acid
  Variant (354)..(356): Xaa in position 354 to 356 is any amino acid
  Variant (361)..(361): Xaa in position 361 is any amino acid
  Variant (367)..(367): Xaa in position 367 is any amino acid
  Variant (377)..(380): Xaa in position 377 to 380 is any amino acid
  Variant (382)..(382): Xaa in position 382 is any amino acid
  Variant (387)..(388): Xaa in position 387 to 388 is any amino acid
  Variant (395)..(396): Xaa in position 395 to 396 is any amino acid
  Variant (398)..(398): Xaa in position 398 is any amino acid
  Variant (403)..(405): Xaa in position 403 to 405 is any amino acid
  Variant (407)..(408): Xaa in position 407 to 408 is any amino acid
  Variant (412)..(413): Xaa in position 412 to 413 is any amino acid
  Variant (419)..(420): Xaa in position 419 to 420 is any amino acid
  Variant (422)..(423): Xaa in position 422 to 423 is any amino acid
  Variant (426)..(426): Xaa in position 426 is any amino acid
  Variant (429)..(430): Xaa in position 429 to 430 is any amino acid
  Variant (432)..(432): Xaa in position 432 is any amino acid
  Variant (435)..(435): Xaa in position 435 is any amino acid
  Variant (446)..(446): Xaa in position 446 is any amino acid
  Variant (448)..(449): Xaa in position 448 to 449 is any amino acid
  Variant (454)..(455): Xaa in position 454 to 455 is any amino acid
  Variant (458)..(458): Xaa in position 458 is any amino acid
  Variant (463)..(463): Xaa in position 463 is any amino acid
  Variant (466)..(467): Xaa in position 466 to 467 is any amino acid
  Variant (469)..(470): Xaa in position 469 to 470 is any amino acid
  Variant (472)..(472): Xaa in position 472 is any amino acid
  Variant (475)..(475): Xaa in position 475 is any amino acid
  Variant (477)..(479): Xaa in position 477 to 479 is any amino acid
  Variant (481)..(481): Xaa in position 481 is any amino acid
  Variant (486)..(487): Xaa in position 486 to 487 is any amino acid
  Variant (497)..(497): Xaa in position 497 is any amino acid
  Variant (500)..(500): Xaa in position 500 is any amino acid
  Variant (504)..(505): Xaa in position 504 to 505 is any amino acid
  Variant (509)..(509): Xaa in position 509 is any amino acid
  Variant (523)..(523): Xaa in position 523 is any amino acid
  Variant (527)..(527): Xaa in position 527 is any amino acid
  Variant (532)..(532): Xaa in position 532 is any amino acid
  Variant (536)..(536): Xaa in position 536 is any amino acid
  Variant (540)..(540): Xaa in position 540 is any amino acid
WLXXLCXXPXXXXAXXXPXXLAXXXXXXXELXSLXXXXVXXRXPLPXXLXXPLGSLWKLFVXAWLXDTGXXEXXYXCXGXSXEEVYCCXXGXXIXRDXALVRSCGLYFEPQRLXXXXXXWRXYWQARXAPXWLXDLXXLQPXTRVXVXXLLXXLXXLPAQXXARRVLLDVXLXAXDGXXVXXLGGRLRVKTWSWLXDXDPQXRQGGFAGWLXDGTPLWXGGXGTSXXXLXRYAXXLXXXLPXXXPXXXGRCVEVXLFSRYPLXXVXXXXXXXAXXXGXLXGXXXVXFANGNXLDIXSXGXLFLXXXXXXXXLVARXXREEYVARVLXREAXXXPXEAAXALAVXIRTYLLQNAXXXGECLXIDDSSXRQRVAPRPAXXXXRXIAAWXXDLVLAGXXVXYHSDXXXPXXLSWXXAVEQAXXGXXYDXILXXAXPRXSLSRWDNPVAXCXXLPAAXXWLXKQRRXWRXXLXXEXGYXEXXXFXVCRLXXGRPYVDRERXRIXVRGXXSLQXRLDLTHEYLHLAFXAHPXGQDEXYIEXLARXLLLE

SEQ ID NO: 2978 - protein, 61 aa, Artificial sequence
  protein pattern
  Variant (8)..(8): Xaa in position 8 is Leu or Val
  Variant (9)..(9): Xaa in position 9 is Phe or Tyr
  Variant (11)..(11): Xaa in position 11 is Phe or Tyr
  Variant (15)..(15): Xaa in position 15 is any amino acid
  Variant (18)..(18): Xaa in position 18 is any amino acid
  Variant (19)..(19): Xaa in position 19 is Ala or Gln
  Variant (20)..(20): Xaa in position 20 is any amino acid
  Variant (22)..(22): Xaa in position 22 is any or no amino acid
  Variant (24)..(24): Xaa in position 24 is any or no amino acid
  Variant (26)..(26): Xaa in position 26 is Ala, Glu, Gln or Thr
  Variant (28)..(28): Xaa in position 28 is Gln or Arg
  Variant (30)..(30): Xaa in position 30 is Asn, Gln or Arg
  Variant (32)..(32): Xaa in position 32 is any amino acid
  Variant (39)..(39): Xaa in position 39 is Glu, Gln or Thr
  Variant (40)..(40): Xaa in position 40 is Ala or Asn
  Variant (42)..(42): Xaa in position 42 is Glu, Gly or Gln
  Variant (43)..(43): Xaa in position 43 is any amino acid
  Variant (45)..(45): Xaa in position 45 is Glu, Gly or Thr
  Variant (48)..(48): Xaa in position 48 is any amino acid
  Variant (52)..(52): Xaa in position 52 is Lys or Arg
  Variant (59)..(59): Xaa in position 59 is Ala or Glu
  Variant (61)..(61): Xaa in position 61 is Ala or Gln
PLGSLWKXXVXAWLXDTXXXEXPXYXCXGXSXEEVYCCXXGXXIXRDXALVXSCGLYFXPX

SEQ ID NO: 2979 - protein, 39 aa, Artificial sequence
  protein pattern
  Variant (2)..(2): Xaa in position 2 is any amino acid
  Variant (3)..(3): Xaa in position 3 is Asp or Arg
  Variant (6)..(6): Xaa in position 6 is Glu, Gln or Thr
  Variant (7)..(7): Xaa in position 7 is Ala or Val
  Variant (9)..(9): Xaa in position 9 is Gly or Asn
  Variant (10)..(10): Xaa in position 10 is Gln or Arg
  Variant (11)..(11): Xaa in position 11 is any amino acid
  Variant (14)..(14): Xaa in position 14 is any amino acid
  Variant (15)..(15): Xaa in position 15 is any or no amino acid
  Variant (17)..(20): Xaa in position 17 to 20 is any amino acid
  Variant (21)..(21): Xaa in position 21 is any or no amino acid
  Variant (23)..(23): Xaa in position 23 is Gln or Arg
  Variant (28)..(28): Xaa in position 28 is Glu, Asn or Ser
  Variant (31)..(31): Xaa in position 31 is Ala or Ser
  Variant (36)..(36): Xaa in position 36 is Lys or Arg
  Variant (37)..(37): Xaa in position 37 is any amino acid
  Variant (38)..(38): Xaa in position 38 is Ile or Val
  Variant (39)..(39): Xaa in position 39 is Ser or Thr
LXXYAXXLXXXLPXXPXXXXXGXCVEVXLFXRYPLXXXX

SEQ ID NO: 2980 - protein, 27 aa, Artificial sequence
  protein pattern
  Variant (2)..(3): Xaa in position 2 to 3 is any amino acid
  Variant (4)..(6): Xaa in position 4 to 6 is any or no amino acid
  Variant (8)..(8): Xaa in position 8 is any amino acid
  Variant (9)..(9): Xaa in position 9 is any or no amino acid
  Variant (11)..(11): Xaa in position 11 is Asp, Asn or Ser
  Variant (12)..(12): Xaa in position 12 is any amino acid
  Variant (13)..(13): Xaa in position 13 is Gln or Ser
  Variant (14)..(14): Xaa in position 14 is any amino acid
  Variant (15)..(15): Xaa in position 15 is Leu or Val
  Variant (16)..(18): Xaa in position 16 to 18 is any amino acid
  Variant (19)..(19): Xaa in position 19 is Glu, Arg or Ser
  Variant (20)..(20): Xaa in position 20 is Ala or Pro
  Variant (21)..(21): Xaa in position 21 is Leu or Met
  Variant (23)..(23): Xaa in position 23 is Ala, Asp or Ser
  Variant (24)..(24): Xaa in position 24 is Asp or Ser
  Variant (26)..(26): Xaa in position 26 is Glu, Gln or Thr
  Variant (27)..(27): Xaa in position 27 is Ala or Thr
GXXXXXLXXLXXXXXXXXXXXPXXLXX

SEQ ID NO: 2981 - DNA, 783 bp, Escherichia coli K12
  CDS (1)..(783): transl_table=11
atgaaaaaactggtgctatcgctctctctggttctggccttctccagcgcaactgcggcgtttgctgcgattccgcaaaacatccgcatcggtaccgacccgacctatgcgccatttgaatcaaaaaattcacaaggcgaactggttggcttcgatatcgatctggcaaaggaattatgcaaacgcatcaatacgcaatgtacgtttgtcgaaaatccgctggatgcgttaatcccgtccttaaaagcgaagaagattgacgccatcatgtcatcgctttccattacggaaaaacgtcagcaagaaatagccttcaccgacaaactgtacgctgccgattctcgtttggtggtggcgaaaaattctgacattcagccgacagtcgagtcgctgaaaggcaaacgggtaggcgtattgcagggcaccacccaggagacgttcggtaatgaacattgggcaccaaaaggcattgaaatcgtctcgtatcaggggcaggacaacatttattctgacctgactgccggacgtattgatgccgcgttccaggatgaggtcgctgccagcgaaggtttcctcaaacaacctgtcggtaaagattacaaattcggtggcccgtctgttaaagatgaaaaactgtttggcgtagggaccggcatgggcctgcgtaaagaagataacgaactgcgcgaagcactgaacaaagcctttgccgaaatgcgcgctgacggtacttacgagaaattagcgaaaaagtacttcgattttgatgtttatggtggctaa

SEQ ID NO: 2982 - protein, 260 aa, Escherichia coli K12
MKKLVLSLSLVLAFSSATAAFAAIPQNIRIGTDPTYAPFESKNSQGELVGFDIDLAKELCKRINTQCTFVENPLDALIPSLKAKKIDAIMSSLSITEKRQQEIAFTDKLYAADSRLVVAKNSDIQPTVESLKGKRVGVLQGTTQETFGNEHWAPKGIEIVSYQGQDNIYSDLTAGRIDAAFQDEVAASEGFLKQPVGKDYKFGGPSVKDEKLFGVGTGMGLRKEDNELREALNKAFAEMRADGTYEKLAKKYFDFDVYGG

SEQ ID NO: 2983 - DNA, 732 bp, Escherichia coli
  CDS (1)..(732)
atgaaaaagttagttcttgccgctttacttgcttcctttactttcggtgcttctgccgcagagaaaatcaattttggcgtttcagccacctatccaccctttgaatctataggtgctaataatgagattgtcggctttgatatcgatctggcaaaagccttgtgcaaacaaatgcaggcagaatgtacttttactaatcacgcgttcgacagcctgatcccgtccctgaaattcagaaaatatgacgccgtaatctccggtatggatatcaccccggagcgtagcaaacaggtatcgtttaccacgccctactatgaaaactcagccgtcgtgattgccaaaaaagatacctacaaaacgtttgccgatctgaaaggcaaacgtattgggatggaaaacggtactacgcaccagaaatatattcaggatcagcacccggaagtgaaaactgtctcttatgacagttatcagaatgcctttatcgatctgaaaaatggtcgtattgatggggtatttggtgacacagcggtggtaaacgaatggctgaaaaccaatccacaacttggtgttgctactgagaaagtgaccgatccgcaatattttggcaccggcctgggcatcgctgtacgtccggataacaaagccctgctggaaaaactgaataacgcgctggcagcaattaaagctgacggtacttatcaaaaaatcagtgaccagtggttcccacagtaa

SEQ ID NO: 2984 - protein, 243 aa, Escherichia coli
MKKLVLAALLASFTFGASAAEKINFGVSATYPPFESIGANNEIVGFDIDLAKALCKQMQAECTFTNHAFDSLIPSLKFRKYDAVISGMDITPERSKQVSFTTPYYENSAVVIAKKDTYKTFADLKGKRIGMENGTTHQKYIQDQHPEVKTVSYDSYQNAFIDLKNGRIDGVFGDTAVVNEWLKTNPQLGVATEKVTDPQYFGTGLGIAVRPDNKALLEKLNNALAAIKADGTYQKISDQWFPQ

SEQ ID NO: 2985 - DNA, 780 bp, Pseudomonas aeruginosa
  CDS (1)..(780)
atgaagaagctcgcacttctcggcgccctggcgctgtccgtgctctccctgcccactttcgccgccgacaagccggtgcgcatcggcatcgaggcggcctacccgccgttctcgctgaagaccccggacggccagttggcaggcttcgacgtggatatcggcaatgccctctgcgaagagatgaaggtgcagtgcaagtgggtcgagcaggagttcgacggcctgatcccggcactcaaggtgcgcaagatcgatgcgatcctctcgtcgatgaccatcaccgacgagcgcaagcgttcggtcgacttcaccaacaagtactacaacactccggcgcgcttcgtgatgaaggaaggcgccagcctcaacgatcccaaggccgacctgaagggcaagaaggccggcgtgctgcgtggcagtaccgccgaccgctacgcctccgccgaactgaccccggccggcgtcgaagtggtgcgctacaactcccagcaggaagccaacatggacctggtggccggtcgcctcgacgcggtggtcgccgattcggtgaacctcgaggacggcttcctcaagaccgatgccggcaagggctacgccttcgtcggtccgcaactgaccgatgccaagtacttcggcgaaggcgtcggcatcgccgtgcgcaagggcgatagcgagctggccggcaagttcaacgcggccatcgacgcgctgcgcgccaacggcaagtacaagcagatccaggacaagtacttcagcttcgacgtctacggttcgaactga

SEQ ID NO: 2986 - protein, 259 aa, Pseudomonas aeruginosa
MKKLALLGALALSVLSLPTFAADKPVRIGIEAAYPPFSLKTPDGQLAGFDVDIGNALCEEMKVQCKWVEQEFDGLIPALKVRKIDAILSSMTITDERKRSVDFTNKYYNTPARFVMKEGASLNDPKADLKGKKAGVLRGSTADRYASAELTPAGVEVVRYNSQQEANMDLVAGRLDAVVADSVNLEDGFLKTDAGKGYAFVGPQLTDAKYFGEGVGIAVRKGDSELAGKFNAAIDALRANGKYKQIQDKYFSFDVYGSN

SEQ ID NO: 2987 - DNA, 732 bp, Salmomella typhi
  CDS (1)..(732)
atgaaaaagttagttctggctgcattactcgcctctttcgccactggcagcatcgccgctgaaaaaatcaatttcggggtttccgccacctatcccccgtttgaatccctggatgcgagtaataaaattgtgggcttcgatatcgatctggcaaccgcattatgcaagcaaatgcaggcagaatgtacttttaccaatcatgctttcgatagtcttatcccggcgctgaaattcagaaaatatgatgccgtcatttccggaatggacattaccccggagcgcagtaagcaggtcgcctttagcaatccctattatgcgaactccgcgctggtgattgccaaaaaagacacctataaaacctttaccgatctaaaaggtaagcgtatcggtatggaaaatggcaccacgcatcaaaaatatctccaggataaacatccggaggtcaaaaccgtggcctacgacagctaccagaatgcgattatcgacctgaaaaatggccgtattgacggcgtctttggcgataccgcagtggtcaatgagtggctgaaaacgaatccgcaactgggtccggcaacagagaaagtgaccgatccgcaatacttcggtaccggacttggcatcgcggtgcgcccggacaataaggcgttgctggaaaaactgaataatgcgctggccgccattaaagcggacggcacttatcagaaaatcagcgatcagtggttcccgcagtaa

SEQ ID NO: 2988 - protein, 243 aa, Salmomella typhi
MKKLVLAALLASFATGSIAAEKINFGVSATYPPFESLDASNKIVGFDIDLATALCKQMQAECTFTNHAFDSLIPALKFRKYDAVISGMDITPERSKQVAFSNPYYANSALVIAKKDTYKTFTDLKGKRIGMENGTTHQKYLQDKHPEVKTVAYDSYQNAIIDLKNGRIDGVFGDTAVVNEWLKTNPQLGPATEKVTDPQYFGTGLGIAVRPDNKALLEKLNNALAAIKADGTYQKISDQWFPQ

SEQ ID NO: 2989 - DNA, 783 bp, Vibrio cholerae
  CDS (1)..(783)
atggatatgaaaaagtggttagttgcgacagcattaattgccacaacaatcagtggggtaacgcaagccaaagaatggaaaacggtgcgttttggtattgagggcgcttatcctccgtttagctggacagaagccgatggctctttgaaagggtttgacgtggatatggccaatgcgttgtgtgcggagatgcaagtggagtgcaaaatcgtgccacaggattgggatggcattattccttcactgttagcgcgtaagtacgatgccattattgcagcgatgtcgatcactgaagagcgtaaaaagaaagtggatttcactggtaagtacgctcagatcccgaacaagtttattgctaagaaaggcgcggatttagccttcactaaagaaggtttgaagggcgtgaaaattggtgtgcagcgtgcgaccactcacgataaatacatcactgacaattatggtgacacggtcgatatcgtgcgttatggctcgtttgatgaagcgtatttagaccttgccaatggccggatcgccgcagtattaggggatgcctccgcattagaagagggcatgctcaacaaacccggtggtgatgcttatgaatttgttggcccttcactgacagaccccaaatggtttggcgaaggtatgggcatagcggtgcgcaagcaagataaagagctaaccgaaaaactcgatgcggcgattacggcactgcgtgaaaaagggatttatcaacaaatacaagctaaatacttcaagtatgacgtttacggtgaataa

SEQ ID NO: 2990 - protein, 260 aa, Vibrio cholerae
MDMKKWLVATALIATTISGVTQAKEWKTVRFGIEGAYPPFSWTEADGSLKGFDVDMANALCAEMQVECKIVPQDWDGIIPSLLARKYDAIIAAMSITEERKKKVDFTGKYAQIPNKFIAKKGADLAFTKEGLKGVKIGVQRATTHDKYITDNYGDTVDIVRYGSFDEAYLDLANGRIAAVLGDASALEEGMLNKPGGDAYEFVGPSLTDPKWFGEGMGIAVRKQDKELTEKLDAAITALREKGIYQQIQAKYFKYDVYGE

SEQ ID NO: 2991 - DNA, 732 bp, Shigella flexneri
  CDS (1)..(732)
atgaaaaaagttctgattgccgcgttaattgcaggttttagtctttccgccacagctgccgaaaccattcgttttgctaccgaagccccctatcctccgtttgaatcgattgatgcaaacaaccagatcgttggttttgacgtcgacctggcgcaggcactgtgtaaagagattgatgcaacctgtactttctctaaccaggcgtttgacagcctgatcccaagcctgaaattccgtcgcgtagaagcagtgatggcgggcatggatatcactccggagcgtgaaaagcaggtactgtttactaccccgtactatgacaactctgccctgtttgtgggtcagcaaggcaaatacaccagtgttgatcagctgaaaggcaaaaaagtcggcgttcagaacgggacgacacaccagaagttcattatggataagcacccggaaatcaccaccgttccgtatgacagctaccagaacgcaaaactggatctgcaaaacgggcgtatcgacagcgtatttggtgacaccgcagtggtcactgagtggctgaaagataacccaaaactggcggcagtgggcgataaagtgaccgataaagattatttcggtactggcctcggcatcgcggtacgtcagggaaacactgaactgcagcagaaactcaacactgcgctggaaaaagtgaagaaagatggcacttacgaaaccatctacaacaaatggttccagaagtaa

SEQ ID NO: 2992 - protein, 243 aa, Shigella flexneri
MKKVLIAALIAGFSLSATAAETIRFATEAPYPPFESIDANNQIVGFDVDLAQALCKEIDATCTFSNQAFDSLIPSLKFRRVEAVMAGMDITPEREKQVLFTTPYYDNSALFVGQQGKYTSVDQLKGKKVGVQNGTTHQKFIMDKHPEITTVPYDSYQNAKLDLQNGRIDSVFGDTAVVTEWLKDNPKLAAVGDKVTDKDYFGTGLGIAVRQGNTELQQKLNTALEKVKKDGTYETIYNKWFQK

SEQ ID NO: 2993 - DNA, 786 bp, Pseudomonas aeruginosa PAO1
  CDS (1)..(786): transl_table=11
atgacaagaaccctcggcagcatcgccctctccctcctcctcgccgcaccggccggcgccgccgactggacaggcaaggtcctgcgcctgggcgtcgacccgacctacccgccgctcgaatacaagcagccggacggccgcctggcaggcttcggcatcgagatcggcgaagccctctgcgcggagctgcgagcccgctgcgaatgggtcgaaagcaactgggacggcatcatcccggcgctgctgtcgcgcaagatcgacgccatcgtctcgtcgatgaccatcacgccgaaacgcgcacagcacatcgccttcaccgaccgcgtctccaacgcgccgagccgcctggtggtacgccgtggctcggcgctcctgcccgacgccgagagcctgcgcggcaagcgcgtgggggtcggccagggctccaaccaggaggcctacgccaaggccgaatgggccgccaagggggtgcgggtcgtctcctaccagaaccaggaccaggtctacgccgacctcgtcatgggccgcctcgacgcctcgctgcaaggcgcggtgcaggccagctacggcttcctcgacaagccggtcggcaaggatttcgaactggccggagcggtgctggacgaccctcgctacttcggggtcggcgacggcatcggcctgcgcaaggaggacgtggcgctgcgcgaggacctgaacaaggcgctggcgacgatccgcgccaacggaacctacgcgcgaatcaacgcccgctacttcgacttcgacctctacggcacgccctga

SEQ ID NO: 2994 - protein, 261 aa, Pseudomonas aeruginosa PAO1
MTRTLGSIALSLLLAAPAGAADWTGKVLRLGVDPTYPPLEYKQPDGRLAGFGIEIGEALCAELRARCEWVESNWDGIIPALLSRKIDAIVSSMTITPKRAQHIAFTDRVSNAPSRLVVRRGSALLPDAESLRGKRVGVGQGSNQEAYAKAEWAAKGVRVVSYQNQDQVYADLVMGRLDASLQGAVQASYGFLDKPVGKDFELAGAVLDDPRYFGVGDGIGLRKEDVALREDLNKALATIRANGTYARINARYFDFDLYGTP

SEQ ID NO: 2995 - DNA, 792 bp, Pseudomonas aeruginosa PAO1
  CDS (1)..(792): transl_table=11
atgatcaagtcgctgaacaccaagaacctgctgggaggcctgctgctcggcgtgctcgccagcggatccgccgtcgccgccgatggcaacctgcggatcggcatcgaggccgcctacccgccgttttccttcaagaccgccgaaggcgaactggccggcttcgactacgacatcggcaacgcgctgtgcgcgcagatgcaggtgaagtgccagtggatcgagcaggagtacgatggcctgattccctcgctgaaagttcgcaagatagacgccgcgctgtcctccatcaccatcaccgaggaacgccggcgctcggtggacttcacccacaagtactacttcacgccgggccgcctggtgatgaaggaaggcgcccagctcgacgacagcttcagccagttggccggcaagcgcatcggcgtgcagcgcggcgctaccgccgaccgcttcgccagtgcggtgctggccaaggccggtgccgaagtggtgcgctacaccagccaggacgagatctacctggacctggtggccggccgcctcgacgccaccttcgccgactccatcccgctgcagaccggcttcctcgataccccgcgcggcaagggctacgccttcgccgggccggagttcaaggacccgaaatacttcggcgagggcgccgggatcgcggtgcgcaagggggacgccgagctggtcggcaagctcaacgcggcgatcgacgcgattcgtgccgacgggacctacaagcgcatcgagggcaagtacttcaagagcgacatctacggcgactga

SEQ ID NO: 2996 - protein, 263 aa, Pseudomonas aeruginosa PAO1
MIKSLNTKNLLGGLLLGVLASGSAVAADGNLRIGIEAAYPPFSFKTAEGELAGFDYDIGNALCAQMQVKCQWIEQEYDGLIPSLKVRKIDAALSSITITEERRRSVDFTHKYYFTPGRLVMKEGAQLDDSFSQLAGKRIGVQRGATADRFASAVLAKAGAEVVRYTSQDEIYLDLVAGRLDATFADSIPLQTGFLDTPRGKGYAFAGPEFKDPKYFGEGAGIAVRKGDAELVGKLNAAIDAIRADGTYKRIEGKYFKSDIYGD

SEQ ID NO: 2997 - DNA, 783 bp, Escherichia coli O157:H7 EDL933
  CDS (1)..(783): transl_table=11
atgaagaagtcgattctcgctctgtctttgttagtcggtatttccgcagcggcttccagctatgcggcattgccggagacggtacgtatcggaaccgataccacctatgcaccgttctcgtcgaaagatgccaaaggtgactttgtcggctttgatatcgatctcggtaacgagatgtgcaaacggatgcaggtgaaatgtacctgggttgccagtgactttgacgcgctgatcccctcactgaaagcgaaaaaaatcgacgccattatttcgtcgctttccattaccgataaacgtcagcaggagattgccttctccgacaagctgtacgccgcagattcccgtctgattgccgccaaaggttcgccgattcagccaacgctggactcactgaaaggtaaacatgttggtgtgctgcagggatcaacccaggaagcttacgctaacgagacctggcgtagcaaaggtgtggatgtggtggcctatgccaaccaggatttggtctattccgatctggctgcaggacgtctggatgctgcactgcaggatgaagttgctgccagcgaaggattcctcaagcaacctgctggtaaagatttcgcctttgctggctcatcagtaaaagacaaaaaatacttcggtgatggcaccggtgtagggctacgtaaagatgatgctgaactgacggctgccttcaataaggcgcttggcgagctgcgtcaggacggcacctacgacaagatggcgaaaaagtattttgactttaatgtctacggtgactga

SEQ ID NO: 2998 - protein, 260 aa, Escherichia coli O157:H7 EDL933
MKKSILALSLLVGISAAASSYAALPETVRIGTDTTYAPFSSKDAKGDFVGFDIDLGNEMCKRMQVKCTWVASDFDALIPSLKAKKIDAIISSLSITDKRQQEIAFSDKLYAADSRLIAAKGSPIQPTLDSLKGKHVGVLQGSTQEAYANETWRSKGVDVVAYANQDLVYSDLAAGRLDAALQDEVAASEGFLKQPAGKDFAFAGSSVKDKKYFGDGTGVGLRKDDAELTAAFNKALGELRQDGTYDKMAKKYFDFNVYGD

SEQ ID NO: 2999 - DNA, 783 bp, Sinorhizobium meliloti 1021
  CDS (1)..(783): transl_table=11
atgcgtatttccagacggcttgcagccaccgcatcggctgccgttttcgtgcttatggccggcgttgccatggcagagggcgagaaggtcgtgatcggtaccgaaggcgcctacccgcccttcaacaatctcgagtcggacggcacgctgaccggcttcgacatcgacatcgcgaaggcgctttgcgaagagatgaaggccgaatgtaccttcgtgacgcaggattgggacggcatcatccccgcgctgatcgccaagaagttcgatgctatcgtcgcgtcgatgtcgattaccgaagagcgtaagcagcaggtcgatttcaccaacaaatactacaacacgccaccggcaatcgtggtgccgaaggattcaccgataaccgaggcaaccgcggcggccctttccggcaaggcgctgggcgcgcagggctcgaccactcactccaactacgcggaagcgcatatgaaggagtcggaggtgaagctctatccgaccgcggatgaatacaagctcgacctcgcaaacggccgcatcgacgcagccatcgacgacgtcgtcgtgctctccgaatggctgaagaccgaagacggcgcctgctgcaagctgctcggcaccctgcccatcgatcccgtcatcaatggcgagggcgccggcatcgcaatccgtaagggcgacgatgcgctgcgcgaaaagctcaacaaggcgatagaggccatccgcgcgaacggcaagtacaagcaaatcaacgaaaagtacttccccttcgacgtctacggcagctaa

SEQ ID NO: 3000 - protein, 260 aa, Sinorhizobium meliloti 1021
MRISRRLAATASAAVFVLMAGVAMAEGEKVVIGTEGAYPPFNNLESDGTLTGFDIDIAKALCEEMKAECTFVTQDWDGIIPALIAKKFDAIVASMSITEERKQQVDFTNKYYNTPPAIVVPKDSPITEATAAALSGKALGAQGSTTHSNYAEAHMKESEVKLYPTADEYKLDLANGRIDAAIDDVVVLSEWLKTEDGACCKLLGTLPIDPVINGEGAGIAIRKGDDALREKLNKAIEAIRANGKYKQINEKYFPFDVYGS

SEQ ID NO: 3001 - DNA, 789 bp, Yersinia pestis CO92
  CDS (1)..(789): transl_table=11
atgtttatgaataaaaagctgcgagttcttcctttggtattcgcattcgctgcggctagtagtgcttttgccgccattccaaaagagatcaaaattggcacagatccgacttacgccccttttgaatcgaaaaactcgagtggtgaattagtgggttttgatatcgatatcgcgaaggagttatgcaaacgtatagataccaaatgtacttttgttgaaagtgactttgatgcgctaatcccgtcgctgaaagcgaaaaaagtcgatgccattatctcctctctctccattactgaaaaacgccaaaaagagattgccttcaccgataaactctttgccgccaattcccgtttaattgctgctaaaggtagcactattgagccgacactggtggcattaaaaggtaagcgcgtgggggtgttacaagggtcgactcaggaagcttttgccaatgctgagtggcagccaaaaggcattgatgttgttgcttatcaaaatcaggatctgatttatgcagatctggcctctggccgtattgatgcggctttccaggatgaagtggccgccagtgaaggtttcctaaaacaacctgtgggtaaagattatatctttgccggtccatcagtaaaaaatgatcaattcttcggtgtagggactggcatggggttgcgcaaagccgatgttgagctgaaagaggcgttaaataaagcgtttgctgaaatgcgtaatgacggcacctacgatcaatttgccaaaaaatacttcgattttgatgtttacggtgattaa

SEQ ID NO: 3002 - protein, 262 aa, Yersinia pestis CO92
MFMNKKLRVLPLVFAFAAASSAFAAIPKEIKIGTDPTYAPFESKNSSGELVGFDIDIAKELCKRIDTKCTFVESDFDALIPSLKAKKVDAIISSLSITEKRQKEIAFTDKLFAANSRLIAAKGSTIEPTLVALKGKRVGVLQGSTQEAFANAEWQPKGIDVVAYQNQDLIYADLASGRIDAAFQDEVAASEGFLKQPVGKDYIFAGPSVKNDQFFGVGTGMGLRKADVELKEALNKAFAEMRNDGTYDQFAKKYFDFDVYGD

SEQ ID NO: 3003 - DNA, 783 bp, Salmonella enterica subsp. enterica serovar Typhi str. CT18
  CDS (1)..(783): transl_table=11
atgaaaaaactggcgttatccctttctctggtgctggcattttccagcgctaccgcagcatttgccgctattccacaaaagattcgcatcggtaccgatcctacatacgcaccgtttgaatccaaaaatgcacaaggtgaattggtcggctttgatatcgatctggccaaagaactgtgcaaccgtatcaacacacagtgtacgttcgtggaaaacccgctggatgcgctgattccgtctttaaaagcgaagaaaattgatgccatcatgtcctcgctgtccatcactgaaaagcgccagcaggaaatcgcgtttaccgacaagctttacgccgctgattcccgtctggtggtggcgaagaactctgatattcagccgaccgtcgcgtcgctgaaaggcaagcgcgtcggcgtgctacaggggacgacgcaggagaccttcggcaatgagcactgggcgccgaaagggattgagatcgtctcttaccaggggcaggacaacatttattccgacctgacggctggccgtattgatgcggcgttccaggacgaggtcgcggccagcgaaggtttccttaaacagcccatcggaaaagactataaattcggcggcccggcggtgaaagatgagaagttattcggcgtaggaaccggtatggggctgcgcaaagaggataacgagctgcgcgaagcgctgaacaaagcctttgctgaaatgcgtgctgacggtacttacgaaaagttggcgaaaaagtactttgattttgatgtttatggcggttaa

SEQ ID NO: 3004 - protein, 260 aa, Salmonella enterica subsp. enterica serovar Typhi str. CT18
MKKLALSLSLVLAFSSATAAFAAIPQKIRIGTDPTYAPFESKNAQGELVGFDIDLAKELCNRINTQCTFVENPLDALIPSLKAKKIDAIMSSLSITEKRQQEIAFTDKLYAADSRLVVAKNSDIQPTVASLKGKRVGVLQGTTQETFGNEHWAPKGIEIVSYQGQDNIYSDLTAGRIDAAFQDEVAASEGFLKQPIGKDYKFGGPAVKDEKLFGVGTGMGLRKEDNELREALNKAFAEMRADGTYEKLAKKYFDFDVYGG

SEQ ID NO: 3005 - DNA, 783 bp, Salmonella enterica subsp. enterica serovar Typhi str. CT18
  CDS (1)..(783): transl_table=11
atgaagaagaccgttctcgctttgtctttgctgataggtctgggcgcgacggcggccagttacgccgcgctcccgcaaacggttcgtattggaacagataccacctacgcgcctttctcatcgaaagatgccaaaggcgactttattggctttgatatcgatctcggtaatgaaatgtgtaagcgtatgcaggtgaaatgtacctgggtcgccagcgactttgatgcgcttattccctcactaaaagcgaaaaaaatcgatgccattatttcatcgctctctattaccgataaacgccagcaagaaattgcgttttccgacaaactttacgcggcggattcacgcctgattgcggcaaaagggtctcccattcagccgacgctggaatcgctgaaaggcaagcatgtcggcgtgctgcaagggtccacgcaagaggcttacgccaatgataactggcgcactaaaggtgtggatgtggtggcttatgccaaccaggatcttatctattccgatttaaccgccggtcgtctggatgccgcattgcaggatgaagtcgccgccagcgaaggtttcctgaagcagccagcgggcaaagagtatgcgtttgccggtccttccgtgaaggataaaaaatattttggcgacgggacgggggttgggctgcgcaaagacgataccgagctaaaagccgcgtttgataaagcgctgaccgaactgcgccaggacggaacttacgacaaaatggccaaaaagtacttcgattttaatgtctacggcgattga

SEQ ID NO: 3006 - protein, 260 aa, Salmonella enterica subsp. enterica serovar Typhi str. CT18
MKKTVLALSLLIGLGATAASYAALPQTVRIGTDTTYAPFSSKDAKGDFIGFDIDLGNEMCKRMQVKCTWVASDFDALIPSLKAKKIDAIISSLSITDKRQQEIAFSDKLYAADSRLIAAKGSPIQPTLESLKGKHVGVLQGSTQEAYANDNWRTKGVDVVAYANQDLIYSDLTAGRLDAALQDEVAASEGFLKQPAGKEYAFAGPSVKDKKYFGDGTGVGLRKDDTELKAAFDKALTELRQDGTYDKMAKKYFDFNVYGD

SEQ ID NO: 3007 - DNA, 774 bp, Agrobacterium tumefaciens str. C58
  CDS (1)..(774): transl_table=11
atgcctatttccacccgtctgctcgcagccgtatcgattgccgccatctcgctgttgtcaggcgcagcccttgcgcaggacaagatcgtcatcggcaccgaaggcgcctacccgcccttcaacaatctcgaagccgacggcacgctgaccggcttcgacatcgacatcgccaaggcgctgtgcgaacaaatgaaggccgaatgcaccttcgtcaccaatgactgggacggcatcattcccgccctgcaggccaagaagttcgacgccatcatcgcgtccatgtcgatcacgccggaacgcctccagaaggtcgatttctccaagaaatattacaacaccccgccggcaatcgccgtgccgaaggattcgccgatcaagtccatcgacgatctcaagggcaagtcgctcggcgcgcagggttccaccacacactccaactatgccgaaaagcatttcccggatgccgacgtgaagatgtatccgaccgccgacgaatataagctcgacatcgccaatggccgcatcgacgccgtcatcgacgatatcgtcgtgctgtcggagtggctgaagaccgacgccggcaagtgctgcaagatcctgacgccgctcaaggtcgatcccgagatcaacggcaatggcgcaggcattgccgtgcgcaagggcgacacggcgctggccgacaagttcacggccgcaatcgccggtatccgcgccagcggcaagtatcaggagatcaacaaaaaatacttcgatttcgacgtttacggcgattaa

SEQ ID NO: 3008 - protein, 257 aa, Agrobacterium tumefaciens str. C58
MPISTRLLAAVSIAAISLLSGAALAQDKIVIGTEGAYPPFNNLEADGTLTGFDIDIAKALCEQMKAECTFVTNDWDGIIPALQAKKFDAIIASMSITPERLQKVDFSKKYYNTPPAIAVPKDSPIKSIDDLKGKSLGAQGSTTHSNYAEKHFPDADVKMYPTADEYKLDIANGRIDAVIDDIVVLSEWLKTDAGKCCKILTPLKVDPEINGNGAGIAVRKGDTALADKFTAAIAGIRASGKYQEINKKYFDFDVYGD

SEQ ID NO: 3009 - DNA, 1056 bp, Yersinia pestis KIM
  CDS (1)..(1056): transl_table=11
ttgcgtgcaggaaggtggcaaccaagcgaatcttcagggccttatagaaggcaagtgactgcgggtgaacgaaggcggtcagcacaggcaatttgcagcatgacgggtatatcgattttagtcgttatcgtgcaaagaaacagtagggtggaattgattttccctccagataattactggcacgattactgcaaattgatttatggacgctcaggcttggacagaaatctaacgcgctttgtggcatcaaaaatcaatttgagggttatgtttatgaataaaaagctgcgagttcttcctttggtattcgcattcgctgcggctagtagtgcttttgccgccattccaaaagagatcaaaattggcacagatccgacttacgccccttttgaatcgaaaaactcgagtggtgaattagtgggttttgatatcgatatcgcgaaggagttatgcaaacgtatagataccaaatgtacttttgttgaaagtgactttgatgcgctaatcccgtcgctgaaagcgaaaaaagtcgatgccattatctcctctctctccattactgaaaaacgccaaaaagagattgccttcaccgataaactctttgccgccaattcccgtttaattgctgctaaaggtagcactattgagccgacactggtggcattaaaaggtaagcgcgtgggggtgttacaagggtcgactcaggaagcttttgccaatgctgagtggcagccaaaaggcattgatgttgttgcttatcaaaatcaggatctgatttatgcagatctggcctctggccgtattgatgcggctttccaggatgaagtggccgccagtgaaggtttcctaaaacaacctgtgggtaaagattatatctttgccggtccatcagtaaaaaatgatcaattcttcggtgtagggactggcatggggttgcgcaaagccgatgttgagctgaaagaggcgttaaataaagcgtttgctgaaatgcgtaatgacggcacctacgatcaatttgccaaaaaatacttcgattttgatgtttacggtgattaa

SEQ ID NO: 3010 - protein, 351 aa, Yersinia pestis KIM
MRAGRWQPSESSGPYRRQVTAGERRRSAQAICSMTGISILVVIVQRNSRVELIFPPDNYWHDYCKLIYGRSGLDRNLTRFVASKINLRVMFMNKKLRVLPLVFAFAAASSAFAAIPKEIKIGTDPTYAPFESKNSSGELVGFDIDIAKELCKRIDTKCTFVESDFDALIPSLKAKKVDAIISSLSITEKRQKEIAFTDKLFAANSRLIAAKGSTIEPTLVALKGKRVGVLQGSTQEAFANAEWQPKGIDVVAYQNQDLIYADLASGRIDAAFQDEVAASEGFLKQPVGKDYIFAGPSVKNDQFFGVGTGMGLRKADVELKEALNKAFAEMRNDGTYDQFAKKYFDFDVYGD

SEQ ID NO: 3011 - DNA, 795 bp, Shigella flexneri 2a str. 301
  CDS (1)..(795): transl_table=11
atgaaaaaactggtgctatcgctctctctggttctggccttctccagcgcaactgcggcacttgctgcaattccgcaaaacatccgcatcggtaccgacccgacctatgcgccatttgaatcaaaaaattcacaaggcgaactggttggtttcgatatcgagctggcgaaggagttgtgcaagcgcatcaatacgcaatgtacgtttgtcgaaaacccgctggatgcgttaatcccgtccttaaaagcgaagaagattgacgccatcatgtcatcgctttccattacggaaaaacgtcagcaagaaattgccttcaccgacaaactgtacgctgccgattctcgtctggtggtggcgaaaaattctgacattcagccgacagtcgagtcgctgaaaggcaaacgggtaggcgtattgcagggcaccacccaggagacgttcggtaatgaacactgggcaccaaaaggcattgaaatcgtctcgtatcaggggcaggacaacatttattctgacctgactgccggacgtattgatgccgcgttccaggatgaggtcgctgccagcgaaggtttcctcaaacaacccgtcggtaaagattacaaattcggtggtccgtctgttaaagatgaaaaactgtttggcgtagggaccggcatgggcctgcgtaaagaagataacgaactgcgcgaggcactgaacaaagcctttgccgaaatgcgcgctgacggtacttacgagaaattagcgaaaaatacttcgattttgatgtttatggtggttaatcgccatcggtga

SEQ ID NO: 3012 - protein, 264 aa, Shigella flexneri 2a str. 301
MKKLVLSLSLVLAFSSATAALAAIPQNIRIGTDPTYAPFESKNSQGELVGFDIELAKELCKRINTQCTFVENPLDALIPSLKAKKIDAIMSSLSITEKRQQEIAFTDKLYAADSRLVVAKNSDIQPTVESLKGKRVGVLQGTTQETFGNEHWAPKGIEIVSYQGQDNIYSDLTAGRIDAAFQDEVAASEGFLKQPVGKDYKFGGPSVKDEKLFGVGTGMGLRKEDNELREALNKAFAEMRADGTYEKLAKNTSILMFMVVNRHR

SEQ ID NO: 3013 - DNA, 783 bp, Shigella flexneri 2a str. 301
  CDS (1)..(783): transl_table=11
atgaagaagtcgattctcgctctgtctttattagtcggtctctccgcagcggcttccagctatgcggcgctaccggagacggtacgtatcggaaccgataccacctatgcgctgttctcgtcgaaagatgctaaaggtgattttgttggctttgatatcgatctcggtaacgagatgtgcaaacggatgcaggtgaaatgtacctgggttgccagtgactttgacgcgctgatcccctcactgaaagcgaaaaaaatcgacgctattatttcgtcgctttccattaccgataaacgtcagcaggagattgccttctccgacaagctgtacgccgcagattctcgtttgattgctgccaaaggttcaccgattcagccaacgctggattcactgaaaggtaaacatgttggtgtgctgcagggatcaacccaggaagcttacgctaacgagacctggcgtagtaaaggcgtggatgtggtggcctatgccaaccaggatttggtctattccgatctggctgcaggacgtctggatgctgcgttacaagatgaagttgctgccagcgaaggattcctcaagcaacctgctggtaaagatttcgcttttgctggctcatcagtaaaagacaaaaaatacttcggtgatggcaccggtgtagggctacgtaaagattatgctgaactgacggctgccttcaataaggcgcttggcgagctgcgtcaggacggcacctacgacaagatggcgaaaaagtatttcgactttaatgtctacggtgactga

SEQ ID NO: 3014 - protein, 260 aa, Shigella flexneri 2a str. 301
MKKSILALSLLVGLSAAASSYAALPETVRIGTDTTYALFSSKDAKGDFVGFDIDLGNEMCKRMQVKCTWVASDFDALIPSLKAKKIDAIISSLSITDKRQQEIAFSDKLYAADSRLIAAKGSPIQPTLDSLKGKHVGVLQGSTQEAYANETWRSKGVDVVAYANQDLVYSDLAAGRLDAALQDEVAASEGFLKQPAGKDFAFAGSSVKDKKYFGDGTGVGLRKDYAELTAAFNKALGELRQDGTYDKMAKKYFDFNVYGD

SEQ ID NO: 3015 - DNA, 777 bp, Pseudomonas syringae pv. tomato str. DC3000
  CDS (1)..(777): transl_table=11
atgaaaaagctcatgcttattggcgcgctggcgttgtccgtgcttgcccagccgacattcgctgacgaaaaaccactgaaaatcggtatcgaagcggcgtatcctccgttcgcgtccaaggcaccggacggcagcatcgtcggtttcgactacgacatcggcaatgcactgtgtgaagaaatgaaagccaagtgcacgtgggtcgagcaagagttcgacggcctgatcccggcgctcaaagtacgcaagatcgacgcgatcctgtcgtcgatgtcgatcaccgacgaccgcaagaagtccgtggatttcaccggcaagtattataattccccggcgcgcctggtgatgaaggacggcgtgaccgtcagcgacagccttgccgagctcaagggcaagaagatcggcgtacagcgcggttcgatccacgagcgtttcgcccgtgaagtcctcgcccctaaaggcgttgaagtgaccccgtacggttcgcagaacgaaatctacctggacatcggtgcgggtcgtctggacggcaccatcgctgacgccacgctgctgcaggatggcttcctgaaaaccgactccggcaagggctttgcctttgtgggcccggcgttcactgacccggattacttcggcgacggcatcggcatcgccgtgcgcaagggtgacaaggccaacctcgatcgcctcaatgctgccattgccgcgatccgcgccaacggcaagtacaaggccattcaggacaagtatttcgacttcgatatctacggcaagtaa

SEQ ID NO: 3016 - protein, 258 aa, Pseudomonas syringae pv. tomato str. DC3000
MKKLMLIGALALSVLAQPTFADEKPLKIGIEAAYPPFASKAPDGSIVGFDYDIGNALCEEMKAKCTWVEQEFDGLIPALKVRKIDAILSSMSITDDRKKSVDFTGKYYNSPARLVMKDGVTVSDSLAELKGKKIGVQRGSIHERFAREVLAPKGVEVTPYGSQNEIYLDIGAGRLDGTIADATLLQDGFLKTDSGKGFAFVGPAFTDPDYFGDGIGIAVRKGDKANLDRLNAAIAAIRANGKYKAIQDKYFDFDIYGK

SEQ ID NO: 3017 - DNA, 783 bp, Pseudomonas syringae pv. tomato str. DC3000
  CDS (1)..(783): transl_table=11
atgaaaaaagcatggctgactctttccgcactggctctgtgcatcgccgccggtaatacgatggccaaggaatacaaggaactgcgcttcggcgtcgatccatcctatgcaccgtttgaatccaaagccgccgacggcagcctggtgggtttcgatatcgacttgggcaacgcgatctgcaaagagctgaaagtcacctgcaaatgggttgaaagcgatttcgacggcatgatccccggcctcaaggcgcgtaaattcgacggcgtgatctcctcgatgaccgtgaccccggctcgcgaaaaagtcatcgacttctccaacgagctgttctccggcccgacgtcgctggtgttcaagaaaggtgcaggctttaccgctgacccggccagcctgaaaggcaagaccgtgggctacgagcaaggcaccatccaggaagcctacgccaaggccgtgctggacaagtccggcgtgaccaccaaggcctacgccaaccaggatcaggtttacgccgacctgacctccggtcgtctggacgcctcgatccaggacatgctgcaagccgaactgggcttcctgaaatcgccagccggtgccgactacgaagtcagcaagcctatcgacagcgaactgctgccagcgaaaaccgccatcggtatcgcgcagggcaacaaagagctgaaagcgctgctggataaaggcatcaaggccatgcacgatgacggcacctacgctgaaatccagaaaaaacactttggcgacctgaacctgtacagcggcaaataa

SEQ ID NO: 3018 - protein, 260 aa, Pseudomonas syringae pv. tomato str. DC3000
MKKAWLTLSALALCIAAGNTMAKEYKELRFGVDPSYAPFESKAADGSLVGFDIDLGNAICKELKVTCKWVESDFDGMIPGLKARKFDGVISSMTVTPAREKVIDFSNELFSGPTSLVFKKGAGFTADPASLKGKTVGYEQGTIQEAYAKAVLDKSGVTTKAYANQDQVYADLTSGRLDASIQDMLQAELGFLKSPAGADYEVSKPIDSELLPAKTAIGIAQGNKELKALLDKGIKAMHDDGTYAEIQKKHFGDLNLYSGK

SEQ ID NO: 3019 - DNA, 783 bp, Shigella flexneri 2a str. 2457T
  CDS (1)..(783): transl_table=11
atgaaaaaactggtgctatcgctctctctggttctggccttctccagcgcaactgcggcacttgctgcaattccgcaaaacatccgcatcggtaccgacccgacctatgcgccatttgaatcaaaaaattcacaaggcgaactggttggtttcgatatcgagctggcgaaggagttgtgcaagcgcatcaatacgcaatgtacgtttgtcgaaaacccgctggatgcgttaatcccgtccttaaaagcgaagaagattgacgccatcatgtcatcgctttccattacggaaaaacgtcagcaagaaattgccttcaccgacaaactgtacgctgccgattctcgtctggtggtggcgaaaaattctgacattcagccgacagtcgagtcgctgaaaggcaaacgggtaggcgtattgcagggcaccacccaggagacgttcggtaatgaacactgggcaccaaaaggcattgaaatcgtctcgtatcaggggcaggacaacatttattctgacctgactgccggacgtattgatgccgcgttccaggatgaggtcgctgccagcgaaggtttcctcaaacaacccgtcggtaaagattacaaattcggtggtccgtctgttaaagatgaaaaactgtttggcgtagggaccggcatgggcctgcgtaaagaagataacgaactgcgcgaggcactgaacaaagcctttgccgaaatgcgcgctgacggtacttacgagaaattagcgaaaaagtacttcgattttgatgtttatggtggttaa

SEQ ID NO: 3020 - protein, 260 aa, Shigella flexneri 2a str. 2457T
MKKLVLSLSLVLAFSSATAALAAIPQNIRIGTDPTYAPFESKNSQGELVGFDIELAKELCKRINTQCTFVENPLDALIPSLKAKKIDAIMSSLSITEKRQQEIAFTDKLYAADSRLVVAKNSDIQPTVESLKGKRVGVLQGTTQETFGNEHWAPKGIEIVSYQGQDNIYSDLTAGRIDAAFQDEVAASEGFLKQPVGKDYKFGGPSVKDEKLFGVGTGMGLRKEDNELREALNKAFAEMRADGTYEKLAKKYFDFDVYGG

SEQ ID NO: 3021 - DNA, 780 bp, Chromobacterium violaceum ATCC 12472
  CDS (1)..(780): transl_table=11
atgaagaaagcacttgctgcgctggccgtaggcctgatggccgcatctctgggggcttacgccaaggactggaaggaaatccgcttcggcgtcgacgccagctacgcgccgttcgagtacaaggcgccgaacggccaggtggtgggcttcgacatcgatctgggcaacgaaatctgcaaacgcatgaaagccaagtgcgtgtgggtggaaaacgatttcgacggcatgatcccggcgctgaaggccaagaagttcgacggcgtgctgtcgtcgatgtcgatgaccgaggcccggatgaaggaaatcgccttctccgccaagctgttcaacactccgacccgcatggtcgccaaggccggttccggcctgatgccgaccccggcctcgctgaagggcaagcgcgtgggcgtggagcagggcaccatccaggaagcctacgccaagaagcactgggcgccggcaggcgtggaagtggtcccctaccagaaccagaccctggtgctggccgacctgaccgcgggccgcctggacgcgtccttgcaggacgcggtgcaggccgacatcggcttcctgaagaagcctgagggcaagggcttcgccttcgccggcaaggacctggtcgacccgcagaccctgggcgaaggcgccggcatcggcctgcgcaaggaagacaaggacctgaaggccggcatcgacaaggcgatcgccgacatgctgaaggacggcacctacaagaagattgagaagaaatacttcaccttcgacgtgtacggcggctga

SEQ ID NO: 3022 - protein, 259 aa, Chromobacterium violaceum ATCC 12472
MKKALAALAVGLMAASLGAYAKDWKEIRFGVDASYAPFEYKAPNGQVVGFDIDLGNEICKRMKAKCVWVENDFDGMIPALKAKKFDGVLSSMSMTEARMKEIAFSAKLFNTPTRMVAKAGSGLMPTPASLKGKRVGVEQGTIQEAYAKKHWAPAGVEVVPYQNQTLVLADLTAGRLDASLQDAVQADIGFLKKPEGKGFAFAGKDLVDPQTLGEGAGIGLRKEDKDLKAGIDKAIADMLKDGTYKKIEKKYFTFDVYGG

SEQ ID NO: 3023 - DNA, 780 bp, Erwinia carotovora subsp. atroseptica SCRI1043
  CDS (1)..(780): transl_table=11
atgaagaaactgatcaaagttttgccgttggcacttattctggctgcaggcagcgccatggcggaaattcctaaaaatattaaaatcggcaccgatcctacctatgctccctttgaatctaaaaatgccagcggtgaactggttgggtttgatatcgatctggcgaaagagctgtgcaagcgtattcaggctaattgtacgtttgtagaaagcgactttgatgcgttaattccttctcttaaagctaaaaaaattgatgccatcatctcttctctgtccattaccgaaaaacgtcagcaggaaatcgccttcactgagaagctgtatgctgccaatgcacgcctgattgcgaagaaaggcgcgagcatcgagccaacgctggcttctctgggtggtaagcgtgtcggcgtactgcaggcatcaacgcaggaggcttttgccaacgcgaactggcagccaaaaggtgttgaagttgtcgcttatcaaaatcaggatctgatttacgccgatctgagcgcaggtcgtatcgatgcggcatttcaggatgaagtagcaggaagtgaaggcttcctgaaactcgatatgggcaaagactatgcgtttgctggtccggcagtaaaagacgacaagttcttcggggttggtaccggtatgggtctgcgtaaagcggataccgaactgaaagcggcgctggataaagcttttgacgctatgcgtaaagacggtacttacgacactttcgcgaaaaaatacttcgattttgacgtctacggcggctaa

SEQ ID NO: 3024 - protein, 259 aa, Erwinia carotovora subsp. atroseptica SCRI1043
MKKLIKVLPLALILAAGSAMAEIPKNIKIGTDPTYAPFESKNASGELVGFDIDLAKELCKRIQANCTFVESDFDALIPSLKAKKIDAIISSLSITEKRQQEIAFTEKLYAANARLIAKKGASIEPTLASLGGKRVGVLQASTQEAFANANWQPKGVEVVAYQNQDLIYADLSAGRIDAAFQDEVAGSEGFLKLDMGKDYAFAGPAVKDDKFFGVGTGMGLRKADTELKAALDKAFDAMRKDGTYDTFAKKYFDFDVYGG

SEQ ID NO: 3025 - DNA, 783 bp, Yersinia pseudotuberculosis IP 32953
  CDS (1)..(783): transl_table=11
atgaataaaaagctgcgagttcttcctttggtattcgcattcgctgcggctagtagtgcttttgccgccattccaaaagagatcaaaattggcacagatccgacttacgccccttttgaatcgaaaaactcgagtggtgaattagtgggttttgatatcgatatcgcgaaggagttatgcaaacgtatagataccaaatgtacttttgttgaaagtgactttgatgcgctaatcccgtcgctgaaagcgaaaaaagtcgatgccattatctcctctctctccattactgaaaaacgccaaaaagagattgccttcaccgataaactctttgccgccaattcccgtttaattgctgctaaaggtagcactattgagccgacactggtggcattaaaaggtaagcgcgtgggggtgttacaagggtcgactcaggaagcttttgccaatgctgagtggcagccaaaaggcattgatgttgttgcttatcaaaatcaggatctgatttatgcagatctggcctctggccgtattgatgcggctttccaggatgaagtggccgccagtgaaggtttcctaaaacaacctgtgggtaaagattatatctttgccggtccatcagtaaaaaatgatcaattcttcggtgtagggactggcatggggttgcgcaaagccgatgttgagctgaaagaggcgttaaataaagcgtttgctgaaatgcgtaatgacggcacctacgatcaatttgccaaaaaatacttcgattttgatgtttacggtgattaa

SEQ ID NO: 3026 - protein, 260 aa, Yersinia pseudotuberculosis IP 32953
MNKKLRVLPLVFAFAAASSAFAAIPKEIKIGTDPTYAPFESKNSSGELVGFDIDIAKELCKRIDTKCTFVESDFDALIPSLKAKKVDAIISSLSITEKRQKEIAFTDKLFAANSRLIAAKGSTIEPTLVALKGKRVGVLQGSTQEAFANAEWQPKGIDVVAYQNQDLIYADLASGRIDAAFQDEVAASEGFLKQPVGKDYIFAGPSVKNDQFFGVGTGMGLRKADVELKEALNKAFAEMRNDGTYDQFAKKYFDFDVYGD

SEQ ID NO: 3027 - DNA, 795 bp, Burkholderia mallei ATCC 23344
  CDS (1)..(795): transl_table=11
atgaagttgaactggcggaagatggccgcgcacgcggtggtgacggccacggccctggcggcgggcagcgcgttcgccgccgacctgaaggaaatccgcttcggcgtcgaggcgtcgtatgcgccgttcgagtacaagacgccggacggcaagctggcgggcttcgacatcgacatcggcaacgcggtgtgcgcgaagctgaaggtcaagtgcgtgtgggtcgagaacgcgttcgacggcctgatcccggcgctgcaggcgcgcaagttcgacgcgatcaactccgacatgacgatcaccgagcaacgtcggaaggcaatcgatttcaccgacccgatctacacgatcccgaaccagctgatcgcgaagaagggcagcggcctgctgccgaccaccgcgtcgctgaagggcaagcgcatcggcgtgctgcagggcacgatccaggaagcgtacgcgaagaagcgctgggcgccggcgggcgtcgaagtcgtgccgtaccagacgcaggatctcgcctacgaagacctgaagtcgggccgtctcgacgcgaccttccaggattcggaggccggcgcgaagggcttcctgtcgaagccgcagggcgcgggtttcgcgttcgcgggcgaccacgtgagcgacgccgagatcctcggcacgggcgtgggcttcggcatgcgcaagaacgacgcgcagctgaagagcgcagtcaatcaggcgctcaaggaactgaaagccgacggcacgatcgacggcctcgcgaagaagtatttcagcgtgcccgtgacgctgaagtaa

SEQ ID NO: 3028 - protein, 264 aa, Burkholderia mallei ATCC 23344
MKLNWRKMAAHAVVTATALAAGSAFAADLKEIRFGVEASYAPFEYKTPDGKLAGFDIDIGNAVCAKLKVKCVWVENAFDGLIPALQARKFDAINSDMTITEQRRKAIDFTDPIYTIPNQLIAKKGSGLLPTTASLKGKRIGVLQGTIQEAYAKKRWAPAGVEVVPYQTQDLAYEDLKSGRLDATFQDSEAGAKGFLSKPQGAGFAFAGDHVSDAEILGTGVGFGMRKNDAQLKSAVNQALKELKADGTIDGLAKKYFSVPVTLK

SEQ ID NO: 3029 - DNA, 777 bp, Burkholderia mallei ATCC 23344
  CDS (1)..(777): transl_table=11
atgaagaagctcgccctgtgcgcggccctcgcccttgcggcgggcggcgccttcgcgaaggaatggaagaccgtgcggatcggcgtcgacgccagctatccgccgttcgaatcgaccgcgccgagcggcgagatcgtcggattcgacgtcgatctcgcgaaggaagtctgcaagcggatcaacgcgaagtgcacatggacgccgcaggatctcgacggcatcatccccgcgctgaaggcgaagaagttcgacgtgatcgtgtcgtcgctgaccgtcaccgacaagcgccgcgagcagatcgatttctccgacaagctgtacgacgcgcccgcgcgaatgatcgcgaaggcgggctcgccgctcgcgccgagcgtcgagtcgctcaagggcaagcgcgtcggcgtcgagcagggctcgacccaggaaaccttcgcgaaggcgcactgggagccgaagggcgtgacgatcgtgtcgtaccagaaccaggatcaggtgtatgccgatctcggctcggggcgcctcgatgcgacgctgcaagacgagttgcaggccgactacggcttcctgcgcacgccgcgcggcaagggcttcgcctgggcaggtccggccgtgaaggatccgcgcacgctcggcgacggcaccgcgatgggcctgcgcaaggaagacgcggacctgaaggacgcgatcaaccgcgcgctcgcttcgatgcacaaggacggcacgtacgacaggctctcgcgcaagtacttcccgtacagcgtgtattcggcgaagtaa

SEQ ID NO: 3030 - protein, 258 aa, Burkholderia mallei ATCC 23344
MKKLALCAALALAAGGAFAKEWKTVRIGVDASYPPFESTAPSGEIVGFDVDLAKEVCKRINAKCTWTPQDLDGIIPALKAKKFDVIVSSLTVTDKRREQIDFSDKLYDAPARMIAKAGSPLAPSVESLKGKRVGVEQGSTQETFAKAHWEPKGVTIVSYQNQDQVYADLGSGRLDATLQDELQADYGFLRTPRGKGFAWAGPAVKDPRTLGDGTAMGLRKEDADLKDAINRALASMHKDGTYDRLSRKYFPYSVYSAK

SEQ ID NO: 3031 - DNA, 783 bp, Burkholderia mallei ATCC 23344
  CDS (1)..(783): transl_table=11
gtgaaaaaaatcttggcggctttgaccgtggccctgctggcggtgtcggcaggcggcgtgcaggcgaaggattggtcgacgatccgctttggcgtcgacgcgagctacccgcctttcgaatcgaaaggtccggacggcaaggtggtcggcttcgacgtcgacctcggcaacgaaatctgcaagcgcgtgaaggcaaagtgcgtgtggatcgagaacgacttcgacggcatgatcccggcgctgaaggcgcgcaagttcgacggcgtgctgtcgtcgatgtcgatgacgccgcagcgtgaagagcagatcgcgttctcgtcgaagctgttcaacacgccgacgcgcctcgtcacgaagaagggcgcgaacctgatgccgacggccgaatcgctcaagggcaagacggtcggcgtcgagcagggcacgatccaggaaacctacgcgaaggtgcactgggcgccgatgggcgtgaaggtgcaaccgtaccagaaccaggatcaggtctacgccgacctgatcgcgggccgcctcgacgcggcgctgcaggacgcggtgcaggccgacatcggcttcctgaagacgccgcgcggcaaggactacgcgttcgccggcaccgacctcaacgatccgaagacgctcggcgaaggcgcgggcatcggcctgcgcaaggaagacaccgatctgaaggcgaagatcgacaaggcgatcgccgacatgcacaaggacggcacgtacgacaagatcgcgaagaagtacttcgacttcgacgtctacggcaagtaa

SEQ ID NO: 3032 - protein, 260 aa, Burkholderia mallei ATCC 23344
MKKILAALTVALLAVSAGGVQAKDWSTIRFGVDASYPPFESKGPDGKVVGFDVDLGNEICKRVKAKCVWIENDFDGMIPALKARKFDGVLSSMSMTPQREEQIAFSSKLFNTPTRLVTKKGANLMPTAESLKGKTVGVEQGTIQETYAKVHWAPMGVKVQPYQNQDQVYADLIAGRLDAALQDAVQADIGFLKTPRGKDYAFAGTDLNDPKTLGEGAGIGLRKEDTDLKAKIDKAIADMHKDGTYDKIAKKYFDFDVYGK

SEQ ID NO: 3033 - DNA, 777 bp, Pseudomonas syringae pv. syringae B728a
  CDS (1)..(777): transl_table=11
atgaaaaagctcatgcttattggcgcgatggcgttgtccgtgctcgcccagccgatctttgctgatgaaaaaccactgaaaatcggtatcgaagcggcttaccctccgttcgcgtccaaggccccggatggcagcatcgtcggctttgactacgacatcggcaatgcgctgtgtgaagaaatgaaggtcaagtgcacctgggtcgagcaggaattcgacgggcttatcccggcgctgaaagtgcgcaagatcgatgcgatcctgtcgtcgatgtccatcaccgacgaccgcaagaagtccgtagacttcaccggcaagtattacaattcaccggcgcgtctggtgatgaaggacggcactacggtcagcgacagcctggctgagctcaagggcaagaagatcggcgtacagcgtggcacgattcacgagcgtttcgcccgtgaagtgctggccccgcagggtgtcgaagtgacgccgtacggttcgcagaacgaaatctatctggacatcagtgcagggcgccttgacggtactatcgccgacgccacgctgttgcaggacggcttcctgaaaaccgatgctggcaaaggctatgcgttcgtaggcccgtcgttcttcgatccgaaatacttcggtgacggcatcggcattgccgtgcgcaagggcgacaaggccaaccttgaccgtctcaacgccgccatcgccgcgatccgcgccaacggcaagtacaaggccatccaggacaagtatttcgacttcgatatcttcggcaaataa

SEQ ID NO: 3034 - protein, 258 aa, Pseudomonas syringae pv. syringae B728a
MKKLMLIGAMALSVLAQPIFADEKPLKIGIEAAYPPFASKAPDGSIVGFDYDIGNALCEEMKVKCTWVEQEFDGLIPALKVRKIDAILSSMSITDDRKKSVDFTGKYYNSPARLVMKDGTTVSDSLAELKGKKIGVQRGTIHERFAREVLAPQGVEVTPYGSQNEIYLDISAGRLDGTIADATLLQDGFLKTDAGKGYAFVGPSFFDPKYFGDGIGIAVRKGDKANLDRLNAAIAAIRANGKYKAIQDKYFDFDIFGK

SEQ ID NO: 3035 - DNA, 783 bp, Pseudomonas syringae pv. syringae B728a
  CDS (1)..(783): transl_table=11
atgaaaaaagcatggctgactctttctgcactggctctgtgcatcgccgccggtaacaccatggccaaggaatacaaggaactgcgcttcggcgtcgatccatcttatgcaccgttcgaatccaaagcagccgacggcagcctggtcggcttcgatatcgatctgggcaacgcaatctgcaaagagctgaaagtcaaatgcaaatgggtcgaaagcgacttcgacggcatgatccccggcctcaaggcacgcaaattcgacggcgttatctcctcgatgaccgtgacccctgctcgcgaaaaagtcatctacttctccaacgagctgttctccggccccacctcgctggtgttcaagaaaggtgcaggctttactgccgacccggccagcctgaaaggcaagaccgtgggctatgagcaaggcaccatccaggaagcctacgccaaggcggtactggacaaggccggtatctccaccaaggcctatgccaaccaggatcaagtttactccgacctgacctcgggccgtctcgacgcctcgatccaggacatgctgcaggccgaactgggcttcctgaaatcgccagccggtgctgactacgaagtcagcaagcctatcgacagcgaactgctgccagccaaaaccgccatcggcattgcccagggcaacaaggaactcaaggcgttgctggacaaaggcatcgaggcgatgcacaaagacggcacctacgctgaaatccagaaaaaacactttggcgacctgaacctctacagcggtaaataa

SEQ ID NO: 3036 - protein, 260 aa, Pseudomonas syringae pv. syringae B728a
MKKAWLTLSALALCIAAGNTMAKEYKELRFGVDPSYAPFESKAADGSLVGFDIDLGNAICKELKVKCKWVESDFDGMIPGLKARKFDGVISSMTVTPAREKVIYFSNELFSGPTSLVFKKGAGFTADPASLKGKTVGYEQGTIQEAYAKAVLDKAGISTKAYANQDQVYSDLTSGRLDASIQDMLQAELGFLKSPAGADYEVSKPIDSELLPAKTAIGIAQGNKELKALLDKGIEAMHKDGTYAEIQKKHFGDLNLYSGK

SEQ ID NO: 3037 - DNA, 777 bp, Pseudomonas fluorescens Pf-5
  CDS (1)..(777): transl_table=11
atgaaaaaactccccctgatcagtggcctggccttgagcctgttggcgtgcagcagcctgttcgcggccgaaaagaccctgcgcctgggcatcgaggcggcgtacccgccatttgccttcaagaccgccgaaggcaagatcggtggtttcgactacgacatcggcaatgccctgtgcgcgcagatgcaggtcaagtgcgagtggatcgagggcgagttcgacggcctgattccttcgctgaaggtgaagaagatcgacgctgcgctgtcctccatgaccattaccgccgagcgccgcaaatccgtggatttcacccacaagtactacttcacgtcgtcgcgcctggtgatgaagaagggcgccgaggtggacgaccagtacgccagcctcaagggcaagaccgtgggcgtgcagcgctccaccaccaccgaccgctatgccacggaggtgttcgagcccaagggcatcaaggtggtgcgctacagcaacaacgaggagatctacatggacctggcggccgggcgcctggacgcgatctttgccgacagcattccgctggccgactttctgtcgatgccccggggggccgcctacgcctttgtcgggcctgagctcaaagatccgaagtacgtcggcgagggcgccgggattgccgtgcgcaagggcaacagtgaactggtgggcgagttgaacaaggccatcgaggatattcgggccaatggtgaatatcagaagatccaggccaagtacttcaagtcggatatctatggggattga

SEQ ID NO: 3038 - protein, 258 aa, Pseudomonas fluorescens Pf-5
MKKLPLISGLALSLLACSSLFAAEKTLRLGIEAAYPPFAFKTAEGKIGGFDYDIGNALCAQMQVKCEWIEGEFDGLIPSLKVKKIDAALSSMTITAERRKSVDFTHKYYFTSSRLVMKKGAEVDDQYASLKGKTVGVQRSTTTDRYATEVFEPKGIKVVRYSNNEEIYMDLAAGRLDAIFADSIPLADFLSMPRGAAYAFVGPELKDPKYVGEGAGIAVRKGNSELVGELNKAIEDIRANGEYQKIQAKYFKSDIYGD

SEQ ID NO: 3039 - DNA, 783 bp, Pseudomonas fluorescens Pf-5
  CDS (1)..(783): transl_table=11
atgaaaaaagcattgctgaccctttctgcattggctctctgcatggccgccggctccgcgctggccaaggaatacaaggaactgcgcttcggcgtcgacccttcctacgcccccttcgaatccaaggccgccgacggcagcctggtgggtttcgacatcgacctgggcaatgccatctgtgccgagctgaaggtcaagtgcaagtgggtcgaaagtgacttcgacggcatgattccaggcctcaaggccaataaattcgacggtgtgatctcgtccatgaccgtcaccccggctcgcgagaaagtcatcgacttctccaacgaactgttttccggccccaccgcattcgtgttcaagaaaggctcgggcctgagcgaagacaccgcctcgctcaagggcaagaccgtcggctacgagcagggcaccattcaggaagcctacgccaaggccgtgctggacaaggccggggtcaagacccaggcctatcagaaccaggaccaggtctatgccgacctgacttccgggcgcctcgatgcctcgatccaggacatgctgcaggccgaactgggcttcctcaagtcaccgcaaggcgctgactatgagatcagcaagccggtggacgacccgctgctgccggccaagaccgcagtgggtatctcgaaaggtaacaaagagctgaaagcgcttctggataaaggtatcaaagcgttacacgatgatggcacctacgccaccatccagaaaaaacacttcggtgacctgaacctctacagcggtaaataa

SEQ ID NO: 3040 - protein, 260 aa, Pseudomonas fluorescens Pf-5
MKKALLTLSALALCMAAGSALAKEYKELRFGVDPSYAPFESKAADGSLVGFDIDLGNAICAELKVKCKWVESDFDGMIPGLKANKFDGVISSMTVTPAREKVIDFSNELFSGPTAFVFKKGSGLSEDTASLKGKTVGYEQGTIQEAYAKAVLDKAGVKTQAYQNQDQVYADLTSGRLDASIQDMLQAELGFLKSPQGADYEISKPVDDPLLPAKTAVGISKGNKELKALLDKGIKALHDDGTYATIQKKHFGDLNLYSGK

SEQ ID NO: 3041 - DNA, 780 bp, Pseudomonas fluorescens Pf-5
  CDS (1)..(780): transl_table=11
atgaacaagtttgcgctgttcggtgccctggcactgtcgctgttttccttcaccgcttcggccgacgaggccaagccgatccgtatcggtatcgaagccggctacccgccgttctcgatgaagacccccgacggcaagctcaccggtttcgatgtcgacctgggcaacgccctgtgcgagcagatgcaggccaagtgcacctgggtcgagcaggagttcgacggcctgatcccggcgctgaaagtgaagaagatcgacgccatcctgtcgtccatgaccatcaccgacgaccgcaagaagaacgtcgatttcaccatcaagtactaccacaccccggcgcgcttcgtgatgaaggccggcaccagcatcaaggacccgctgaccgagctcaagggcaagaaggtcggtgtgctgcgggccagtacccatgaccgcttcgccaccgaagtgctggtgccggcgggtatcgacctggtgcgctatggctcccagcaggaagccaacctggacatggtctccggccgcgtcgacgcgctgctggcggattcggtgaacctcgacgatggcttcctgaaaaccgacgccggcaagggcttcgccttcgtgggccctgagtacaacgatccgaaatacttcggcggcggtgccggcattgccgtgcgcaagggggatcaggaactggccgggaaattcaacaaggccatcaccgagatccgtgccaacggcaagtacaagcaagtgcaggacaagtacttcgatttcgacgtctacggcgagtaa

SEQ ID NO: 3042 - protein, 259 aa, Pseudomonas fluorescens Pf-5
MNKFALFGALALSLFSFTASADEAKPIRIGIEAGYPPFSMKTPDGKLTGFDVDLGNALCEQMQAKCTWVEQEFDGLIPALKVKKIDAILSSMTITDDRKKNVDFTIKYYHTPARFVMKAGTSIKDPLTELKGKKVGVLRASTHDRFATEVLVPAGIDLVRYGSQQEANLDMVSGRVDALLADSVNLDDGFLKTDAGKGFAFVGPEYNDPKYFGGGAGIAVRKGDQELAGKFNKAITEIRANGKYKQVQDKYFDFDVYGE

SEQ ID NO: 3043 - DNA, 777 bp, Pseudomonas fluorescens Pf-5
  CDS (1)..(777): transl_table=11
atgaagaaactcgtgcttcttggcgccctggcactgtccgtgctgtccctgccgactttcgccgatgaaaagccgctgaaaattggtatcgaagcggcttaccctccgtttgcctccaaggcgccggacggcagcatcgtcggtttcgactacgacatcggcaacgccctgtgcgaagagatgaaggtcaagtgtgtctgggtcgagcaagagttcgacggcctgatcccggcactgaaggttcgcaagatcgacgccatcctctcgtccatgtcgatcactgacgatcgcaagaaatccgtggacttcaccaacaagtactacaacaccccggcgcgtctggtgatgaaggccggtacccagatcagcgacggcctggccgagctcaagggcaagaacatcggcgtgcagcgcggttcgatccacgagcgtttcgcccgtgaagtgctggctcccctgggtgcgcagatcaagccttacggctcgcagaacgaaatctacctggatgtggccgccggtcgcctcgacggtaccgtggcggacgctaccctgttgaatgacggcttcctgaagaccgacgctggcaagggcttcgccttcgtcggtccggccttcaccgacgtcaaatacttcggcgacggcgtagggatcgccgtgcgcaagggcgacaaggccgatctggacaagatcaacgccgccatcgctgccattcgtgagaacggcaagtacaagcaaatccaggacaagtacttcgacttcgacatctacggcaagtaa

SEQ ID NO: 3044 - protein, 258 aa, Pseudomonas fluorescens Pf-5
MKKLVLLGALALSVLSLPTFADEKPLKIGIEAAYPPFASKAPDGSIVGFDYDIGNALCEEMKVKCVWVEQEFDGLIPALKVRKIDAILSSMSITDDRKKSVDFTNKYYNTPARLVMKAGTQISDGLAELKGKNIGVQRGSIHERFAREVLAPLGAQIKPYGSQNEIYLDVAAGRLDGTVADATLLNDGFLKTDAGKGFAFVGPAFTDVKYFGDGVGIAVRKGDKADLDKINAAIAAIRENGKYKQIQDKYFDFDIYGK

SEQ ID NO: 3045 - DNA, 783 bp, Pseudomonas syringae pv. phaseolicola 1448A
  CDS (1)..(783): transl_table=11
atgaaaaaagcatggctgactctttctgcagtggctctgtgcctcgccgccggtaatacgatggccaaggaatacaaggaactgcgcttcggcgttgatccgtcctatgcgccgtttgaatccaaagccgccgacggcagcctggtcggcttcgatatcgatctgggcaacgcgatctgcaaagagctgaaggtcacctgcaaatgggttgaaagcgatttcgacggcatgattcccggcctcaaggcacgcaagttcgacggcgtgatttcctcgatgaccgtgacccctgctcgcgaaaaagtcatcgacttctccaacgaattgttttccggcccgacctcgctggtgttcaagaaaggtgcaggctttaccgccgacaaggccagcctgaaaggcaagaccgttggctatgagcaaggcactatccaggaagcctacgccaaggccgcactggacaaggccggtgtatccaccaaggcctacgccaaccaggatcaggtttacgccgacctgacttccggtcgtctggacgcctcgatccaggacatgctgcaagccgaactgggtttcctgaaatcgccagccggtgctgattacgaagtcagcaagcctatcgacagcgaattgctgccagccaaaaccgccatcggcatcgccaagggcaacaaggagctgaaagcgctgctggataaaggcatcaaagcaatgcacgacgacggcacctacgccgagatccagaaaaagcattttggcgacctgaacctgtacagcggcaaataa

SEQ ID NO: 3046 - protein, 260 aa, Pseudomonas syringae pv. phaseolicola 1448A
MKKAWLTLSAVALCLAAGNTMAKEYKELRFGVDPSYAPFESKAADGSLVGFDIDLGNAICKELKVTCKWVESDFDGMIPGLKARKFDGVISSMTVTPAREKVIDFSNELFSGPTSLVFKKGAGFTADKASLKGKTVGYEQGTIQEAYAKAALDKAGVSTKAYANQDQVYADLTSGRLDASIQDMLQAELGFLKSPAGADYEVSKPIDSELLPAKTAIGIAKGNKELKALLDKGIKAMHDDGTYAEIQKKHFGDLNLYSGK

SEQ ID NO: 3047 - DNA, 777 bp, Pseudomonas syringae pv. phaseolicola 1448A
  CDS (1)..(777): transl_table=11
atgaagaagctcatgcttattggcgcgatggcgttgtccgtgctcgcccagccgatctttgctgatgaaaaaccgctgaaaatcggcatcgaagcggcttaccctccgttcgcttccaaggctccggatggcagcatcgtcggttttgactacgacatcggcaatgcgctgtgtgaagaaatgaaggtcaagtgcacctgggtcgagcaggaattcgacggtcttatcccggcactgaaagtgcgcaagatcgacgcgatcctttcgtccatgtcgatcaccgacgaccgcaagaagtctgtggatttcaccggcaagtactacaattccccggcccgtctggtcatgaaagacggcaccgtgatcagcgacagcctggcggaactcaagggcaagaaaatcggcgtgcagcgcggttcgatccatgagcgtttcgcccgtgaagttcttgctcccaagggtgtggaagtgacgccgtacggttcgcagaacgaaatctacctggacatcggtgcgggtcgtctggacggcaccatcgccgacgccaccctgctgcaggacggtttcctgaagaccgacgcaggcaagggttacgcgttcacaggtccatcgtttaccgacccgaaatacttcggtgacggcatcggcatcgccgtgcgcaagggtgacaaggccaaccttgagcgcctgaatgccgccattgcagccatccgtgccaacggcaagtacaaagcgattcaggacaaatatttcgacttcgatatctacggcaagtaa

SEQ ID NO: 3048 - protein, 258 aa, Pseudomonas syringae pv. phaseolicola 1448A
MKKLMLIGAMALSVLAQPIFADEKPLKIGIEAAYPPFASKAPDGSIVGFDYDIGNALCEEMKVKCTWVEQEFDGLIPALKVRKIDAILSSMSITDDRKKSVDFTGKYYNSPARLVMKDGTVISDSLAELKGKKIGVQRGSIHERFAREVLAPKGVEVTPYGSQNEIYLDIGAGRLDGTIADATLLQDGFLKTDAGKGYAFTGPSFTDPKYFGDGIGIAVRKGDKANLERLNAAIAAIRANGKYKAIQDKYFDFDIYGK

SEQ ID NO: 3049 - DNA, 777 bp, Pseudomonas fluorescens PfO-1
  CDS (1)..(777): transl_table=11
atgaagaaattccccctcattaccggtctggcgctgagcctgttggcgtgcagcagcgcgttcgccgccgagaaaaccctgcgtatcggtatcgaagcggcgtatccgcccttcgcctcgaaaaccgacaagggtgaaatcgtcggttttgactacgacatcggcaatgccctgtgcgcgcaaatgcaggtcaagtgcgtgtgggtcgagggtgagttcgacggtctgattccttccctgaaagtgaagaaaatcgacatggcgctgtcgtccatgaccatcaatgaagaccgcaagaagtcggtggacttcacccacaagtactatttcacctcgtcgcggctggtgatgaaggagggcgcgagcgtcgatgaccagtacgccagcctcaagggcaaaaccgtcggcgtgcagcgtgcgaccaccaccgaccgttacgccaccgaggtgttcgagcccaagggcatcaacgtcaagcgttacggcaacaacgaagaaatctacatggacctggcggccgggcgtctcgatgcgatcttcgccgacaccatcccgttgaccgacttcctgtcgatgccgcgcggcaagggttacgcgtttgtcgggcctgagctgaaggatccgaagtacgtgggcgagggcgcggggattgcggtgcgcaagggcaacacagaactggtcagccagttgaacactgccatcgacggtattcgcgccagtggcgagtaccagaagatttccgagaagtacttcaagtccgatatctacggcgactga

SEQ ID NO: 3050 - protein, 258 aa, Pseudomonas fluorescens PfO-1
MKKFPLITGLALSLLACSSAFAAEKTLRIGIEAAYPPFASKTDKGEIVGFDYDIGNALCAQMQVKCVWVEGEFDGLIPSLKVKKIDMALSSMTINEDRKKSVDFTHKYYFTSSRLVMKEGASVDDQYASLKGKTVGVQRATTTDRYATEVFEPKGINVKRYGNNEEIYMDLAAGRLDAIFADTIPLTDFLSMPRGKGYAFVGPELKDPKYVGEGAGIAVRKGNTELVSQLNTAIDGIRASGEYQKISEKYFKSDIYGD

SEQ ID NO: 3051 - DNA, 783 bp, Pseudomonas fluorescens PfO-1
  CDS (1)..(783): transl_table=11
atgaaaaaagcattgctgaccctttctgcactggcgttgtgcatggccgccggctccgcgctggccaaggaatacaaagaactgcggtttggcgttgacccttcctacgcaccgttcgagtcgaaagcggcagacggcagcctggttggcttcgacatcgatctgggcaacgcgatctgcgccgagctgaaggtcaagtgcaaatgggtcgaaagtgacttcgacggtatgattccgggcctcaaggccaataaattcgacggtgtgatctcgtcgatgaccgttaccgaagcccgtgaaaaagtcatcgacttctccagcgagctgttctccggcccgacggcctacgtgtcgaaaaaaggttcgggcatcaccgacgacgtcgcttccctgaaaggcaaaaccgtcggctacgagcaaggcaccatccaggaagcctatgccaaagccgtgctggacaaggccggcgtgaaaacccaggcctatcaaaatcaggaccaggtgtattccgacctgacctcgggccgtctcgatgcgggcattcaggacatgttgcaggccgaactgggctttctgaagtcgccgcaaggcgctgattatgaagtcagcaagccggtcgacaaccacttgctgccagccaagaccgctgtcggtattaagaaaggtaacaccgagctgaaagcgcttttggataaaggtatcaaagcgttacacgatgacggcaaatacgccgagattcaaaagaaacactttggcgatctgaatctgtacagcggcaaataa

SEQ ID NO: 3052 - protein, 260 aa, Pseudomonas fluorescens PfO-1
MKKALLTLSALALCMAAGSALAKEYKELRFGVDPSYAPFESKAADGSLVGFDIDLGNAICAELKVKCKWVESDFDGMIPGLKANKFDGVISSMTVTEAREKVIDFSSELFSGPTAYVSKKGSGITDDVASLKGKTVGYEQGTIQEAYAKAVLDKAGVKTQAYQNQDQVYSDLTSGRLDAGIQDMLQAELGFLKSPQGADYEVSKPVDNHLLPAKTAVGIKKGNTELKALLDKGIKALHDDGKYAEIQKKHFGDLNLYSGK

SEQ ID NO: 3053 - DNA, 780 bp, Pseudomonas fluorescens PfO-1
  CDS (1)..(780): transl_table=11
atgaaaaagctggttatgttcggtgccctggcactgtcgatgttgtccctgaccgccgtggccgaagacgccaagccgatccgtatcggtatcgaagccggttacccgccattctcgatgaaaacccctgacggcaaactggccggtttcgacgtggacatcggcgatgcgctgtgtgagcagatgaaagtcaaatgcacctgggtcgagcaggaattcgacggcctgatcccggcgctgaaagtgaagaagatcgacgcgatcctgtcctcgatgaccatcactgacgaccgcaagaaaaacgtcgatttcaccatcaagtactaccacaccccggcgcgcttcgtgatgaaggcaggctctggcgtgaaagacccgctgaccgagctcaaaggcaagaaagtcggcgtgctgcgcgccagtacccacgaccgctacgcaaccgaagtactggtgccggccggcatcgagctggtgcgttacggctcacagcaggaggccaacctggacatggtgtccggtcgtatcgacgcaatgctggccgactcggtcaacctgagcgacggcttcctgaaaaccgacgccggcaaaggcttcgaattcgtcggcccgacctacgaagacgccaagtacttcggcggcggcgccggtatcgccgtgcgtaaaggcgataccgagctggcggagaaattcaacaccgccatcaacgaaatccgcgccaacggcaagtacaagcaagtgcaggacaagtacttcgactttgacgtgtacggccattaa

SEQ ID NO: 3054 - protein, 259 aa, Pseudomonas fluorescens PfO-1
MKKLVMFGALALSMLSLTAVAEDAKPIRIGIEAGYPPFSMKTPDGKLAGFDVDIGDALCEQMKVKCTWVEQEFDGLIPALKVKKIDAILSSMTITDDRKKNVDFTIKYYHTPARFVMKAGSGVKDPLTELKGKKVGVLRASTHDRYATEVLVPAGIELVRYGSQQEANLDMVSGRIDAMLADSVNLSDGFLKTDAGKGFEFVGPTYEDAKYFGGGAGIAVRKGDTELAEKFNTAINEIRANGKYKQVQDKYFDFDVYGH

SEQ ID NO: 3055 - DNA, 774 bp, Pseudomonas fluorescens PfO-1
  CDS (1)..(774): transl_table=11
atgaagaaacttgtgctgcttggcgccctggcactgtccgtgctgtccctgccgacattcgccgatgaaaagcctctgaaaatcggtatcgaagcggcttaccctccattcgcctccaaagcgccggacggcagcatcgtcggtttcgactacgacatcggcaacgcgctgtgcgaagagatgaaggtcaagtgccagtgggtcgagcaagagttcgacggtctgatcccggcactgaaagtgcgcaagatcgacgcgatcctgtcgtccatgtcgatcactgacgaccgcaagaagtccgtggacttcaccaacaagtactacaacaccccggcccgcctcgtgatgaaggaaggcactcaggtcagcgaaggtctggctgagctcaagggcaagaacatcggcgtgcaacgtggttcgatccacgagcgtttcgcccgcgaagtcctggccccgctgggtgccgagatcaagccttatggttcgcagaacgaaatctacctcgacgtggccgccggccgcctcgacggcaccgtggcggacgctacgctgttgaatgacggcttcctgaaaaccgacgccggcaaaggcttcgcgttcgtgggtccggcgttcaccgacgtcaaatacttcggcgacggcgtaggcatcgcggtacgcaagggcgacgccctgaaagacaagatcaacaccgccatcgcggccatccgcgagaacggcaagtacaaggcaatccaggacaagtacttcgacttcgacatttacggcaagtaa

SEQ ID NO: 3056 - protein, 257 aa, Pseudomonas fluorescens PfO-1
MKKLVLLGALALSVLSLPTFADEKPLKIGIEAAYPPFASKAPDGSIVGFDYDIGNALCEEMKVKCQWVEQEFDGLIPALKVRKIDAILSSMSITDDRKKSVDFTNKYYNTPARLVMKEGTQVSEGLAELKGKNIGVQRGSIHERFAREVLAPLGAEIKPYGSQNEIYLDVAAGRLDGTVADATLLNDGFLKTDAGKGFAFVGPAFTDVKYFGDGVGIAVRKGDALKDKINTAIAAIRENGKYKAIQDKYFDFDIYGK

SEQ ID NO: 3057 - DNA, 774 bp, Burkholderia sp. 383
  CDS (1)..(774): transl_table=11
atgaagaggatcatgatcggactggttgcacttgccatgtccgcaaccgggtttgccaaggaatggacgacgattcgcattggcgtcgacccgtcttatcctccgtttgaatacaagaaaccgtctggcgaattgacgggcttcggcgtggatctcggcaatgaagtgtgcaggcgcctcaacgcgaaatgcctctgggtcgaaaatgcatttgacggcatgattcccggcctgaaggcgcggaaattcgacgcgatcctgtcgtcgatgtcgatgacgcctgcgcgattgaagcaaatcgatttctcgaacaagacggcgcacgcaccgacgtttcttgtcgtgaaaaagggctcgggtatccagccgacgccggcatcgctcaacggtaaagccatcggcgtgctgcaaggctcgatgcaggagacgtatgcgaaggcgcattgggaaggtggcggcgcgcgcatcctgtcgtatcagaaccaggatcaggtgtatgccgacctgaccaacggccggctcgatgcggcgttgcaaaacggcgtccaagcatcgcgcggcttcttgaatacgccgcaaggcaaggactacgcgttcgcgggcggtgagctgagcgatccgaagattttcggaccgggtcagggcatcggcattcgcaaggacgacacggacctgaaggacaagatcaacacggcgctcgccgcgatccgtgccgacgggacgtatgacaagatcgccagtcgctatttcaatttcgacatctacggcaattga

SEQ ID NO: 3058 - protein, 257 aa, Burkholderia sp. 383
MKRIMIGLVALAMSATGFAKEWTTIRIGVDPSYPPFEYKKPSGELTGFGVDLGNEVCRRLNAKCLWVENAFDGMIPGLKARKFDAILSSMSMTPARLKQIDFSNKTAHAPTFLVVKKGSGIQPTPASLNGKAIGVLQGSMQETYAKAHWEGGGARILSYQNQDQVYADLTNGRLDAALQNGVQASRGFLNTPQGKDYAFAGGELSDPKIFGPGQGIGIRKDDTDLKDKINTALAAIRADGTYDKIASRYFNFDIYGN

SEQ ID NO: 3059 - DNA, 789 bp, Burkholderia sp. 383
  CDS (1)..(789): transl_table=11
atgaagcacacggccaccctgaaactcgcgttcgcactcgcgtgcgcaatcggctcgggcgcggcgctcgccgatgcgcagacgctgcgcttcggcctcgaggcgcaatacccgccgttcgaatcgaaagcgccgaacggcgacctgcagggcttcgacatcgacgtcggcaacgcggtctgcaagacggcgcagttgtcgtgcaaatgggtcgagacgtcgttcgacggcctgattcccgcgctgcagggccgcaagttcgacgcgatcaattcggcgatgaacgcgaccgagcagcggcgccaggcgatcgatttcacgacgatcatctatcgcgtgccgacccagctgatcgcgcgtacgggcagcggcctgctgccgacgccggaatcgctgaagggcaagcgtgtcggcgtgctgcaggcgtcgatccaggaaaccttcgcgaaggcgcactgggagccggccggcgtcgcggtcgtcgcgtaccaggaccagaaccaggcgtacgcggacctcgtgtcgggccgtctcgacgcgacgctcgtgctcgcaccgtccggccagcgcggcttcctgtcgcgcccggacggcaagggcttctcgttcgtcggccagcccgtgcgcgacgacaagatcctcggcagcggcatcgcattcgggctgcgcaaaggcgacagcgcgctgaaggcgaaactcgatgcggcgatcgacaagctgaaggcggacggcacggtgaagtcgctcggcctgaagtatttcggcgatatcgacatctcggcgaagtaa

SEQ ID NO: 3060 - protein, 262 aa, Burkholderia sp. 383
MKHTATLKLAFALACAIGSGAALADAQTLRFGLEAQYPPFESKAPNGDLQGFDIDVGNAVCKTAQLSCKWVETSFDGLIPALQGRKFDAINSAMNATEQRRQAIDFTTIIYRVPTQLIARTGSGLLPTPESLKGKRVGVLQASIQETFAKAHWEPAGVAVVAYQDQNQAYADLVSGRLDATLVLAPSGQRGFLSRPDGKGFSFVGQPVRDDKILGSGIAFGLRKGDSALKAKLDAAIDKLKADGTVKSLGLKYFGDIDISAK

SEQ ID NO: 3061 - DNA, 780 bp, Burkholderia sp. 383
  CDS (1)..(780): transl_table=11
atgaactggaagctctccctttgcgccgctgcggcgcttgcctgcgcggccgtcacggcccatgcggaacagaccacgttgcgcttcgggatcgaagccgcctatccgccgttcgagagcaagacgccggccggccagttgcagggtttcgacgtcgacatcggcaatgcggtgtgcgcgaagctgaacatgaaatgcgtgtgggtcgagaattcgttcgacggcctgatcccggcgctgcaggcgcgcaagttcgacgcgatcaactcggcgatgaacatcacgtcgaagcgccggcagagcatcgacttcacgccggcgatctacgtggtgccgatcgtgatgatcgccaagcacggctcgccgctgcggcccgatgtcgcgagcctgcgcggcaagcatgtcggcgtgctgcagggctcgtcgcaggaggatttcctgaaggcacactgggccactgcgggcgtggccgtcgtgtcgtaccaggatcaggaccagatctacgccgatctcgtcgcggggcgtctcgacgcggccgtgcaggaagcgcagaccgcgcaggacggtttcctcgacaagccggccggccgcgactaccagatcgtcggcgagccgctgaaggatccggcgacgctcggcgaaggcacgggcttcgggatgcgcaagaacgacaaggcgctgcaggcgaagatcgtcggcgcgctcgatgcgctgaagaaggacggcacactcagcgcgctgtcgcagaagtacttcaagcgcgacatcgtttcgaagtag

SEQ ID NO: 3062 - protein, 259 aa, Burkholderia sp. 383
MNWKLSLCAAAALACAAVTAHAEQTTLRFGIEAAYPPFESKTPAGQLQGFDVDIGNAVCAKLNMKCVWVENSFDGLIPALQARKFDAINSAMNITSKRRQSIDFTPAIYVVPIVMIAKHGSPLRPDVASLRGKHVGVLQGSSQEDFLKAHWATAGVAVVSYQDQDQIYADLVAGRLDAAVQEAQTAQDGFLDKPAGRDYQIVGEPLKDPATLGEGTGFGMRKNDKALQAKIVGALDALKKDGTLSALSQKYFKRDIVSK

SEQ ID NO: 3063 - DNA, 795 bp, Burkholderia sp. 383
  CDS (1)..(795): transl_table=11
atgaagttggattggcgtaaagtggccgcgcatgcggtggtggcggcatcggccgtggcggcaggcagcgcgatggcagcggatctgaaagagatccgtttcggcgtcgaagcctcgtacgcgccgttcgaatacaagacgcccgacggcaagctgaccggcttcgatatcgacatcggcaacgcggtgtgcgcgaagctgaagacgaagtgcgtgtgggtcgagaacgacttcgacggtctgatcccggcgctgcaggcacgcaagttcgacgcgatcaactcggacatgacgatcaccgaccagcgcaagcacgcggtcgcgttcaccgacgcgatctacacgatcccgaaccagctgatcgcgaagcagggcagcggcctgctgccgaccccgcaatcgctgaagggcaagcgcgtcggcgtgctgcagggcacgatccaggaagcgtacgcgaagaagaagtgggcgccggcaggcgtcgaagtcgtgccgtaccagacgcaggacctggcctacgccgacctgaagtcgggccgtctcgacgcgacgttccaggacgcggaagccggttcgaagggcttcctgacgaagccgcaaggccagggcttcgcgttcgcgggcggtaccgtgagcgacgccgagatcctcggctcgggcgtcggtttcggcctgcgcaagaacgacgcggcgctgaagaccgcgctcgatcaggcgctgaaggaactgaaggccgacggcacgatcgacaacctcgcgaagaagtacttcagcgtgcccgtgacgctcaagtaa

SEQ ID NO: 3064 - protein, 264 aa, Burkholderia sp. 383
MKLDWRKVAAHAVVAASAVAAGSAMAADLKEIRFGVEASYAPFEYKTPDGKLTGFDIDIGNAVCAKLKTKCVWVENDFDGLIPALQARKFDAINSDMTITDQRKHAVAFTDAIYTIPNQLIAKQGSGLLPTPQSLKGKRVGVLQGTIQEAYAKKKWAPAGVEVVPYQTQDLAYADLKSGRLDATFQDAEAGSKGFLTKPQGQGFAFAGGTVSDAEILGSGVGFGLRKNDAALKTALDQALKELKADGTIDNLAKKYFSVPVTLK

SEQ ID NO: 3065 - DNA, 783 bp, Burkholderia sp. 383
  CDS (1)..(783): transl_table=11
atgaagaaggccgccctgtgcgccgccctcgccctcatggcgggtagcgccttcgcgaaggagtggaagaccgtgcggatcggcgtcgatgccagctacccgccgttcgagtcgaccgcgccgagcggcgagatcgtcggtttcgacgtcgatctcaccaaggaaatctgcaagcgaatcaacgtgaattgcgtgtgggtggcgcaggatctcgacgggatcatcccggcgctgaaggcgaagaagtacgacgtcatcgtgtcgtcgctgaccgtcacggacaagcgccgcgaacagatcgacttctccgacaaggtatacgacgcgccggcgcggatgatcgcgaagaccggctcgccgctgctgccgacgatcgcatcgctgaagggcaagcgcgtgggcgtcgagcagggctcgacgcaggaaacctacgcgaaggcgtactgggagccgcagggcgtgacgatcattccttaccagaaccaggaccaggtctatgccgatctcggctcgggccgtctcgatgcgacgctgcaggacgagctgcaggccgactacggcttcctgcgcacgccgcgcggcaagggcttcgcgttcgccgggccggaagtgaaggatccgaagacgatcggcgacggtaccgcaatcggcctgcgcaaggaagatacggacctgaagctcaagatcaacaaggcgctggccgacatgcacaaggacggcacgtacgatcggctgtcgcacaagtatttcgcgttcagcgtctattcggctgcggcccgctga

SEQ ID NO: 3066 - protein, 260 aa, Burkholderia sp. 383
MKKAALCAALALMAGSAFAKEWKTVRIGVDASYPPFESTAPSGEIVGFDVDLTKEICKRINVNCVWVAQDLDGIIPALKAKKYDVIVSSLTVTDKRREQIDFSDKVYDAPARMIAKTGSPLLPTIASLKGKRVGVEQGSTQETYAKAYWEPQGVTIIPYQNQDQVYADLGSGRLDATLQDELQADYGFLRTPRGKGFAFAGPEVKDPKTIGDGTAIGLRKEDTDLKLKINKALADMHKDGTYDRLSHKYFAFSVYSAAAR

SEQ ID NO: 3067 - DNA, 804 bp, Burkholderia sp. 383
  CDS (1)..(804): transl_table=11
atgaaccgcactgcaaagctcctcgttaccgcgctggcgttcgcgccgctcgtgtcgttcgcgcaggacacgtcgacgatccgctggggcatcgaccccacgtatccgccgttcgaggcgaagcagcccgacggctcgctcgccggcttcgacatcgacctgcgcaatgcgatctgcgagcaactgcatgcgaagtgcgtgtgggtcgagcagggtttcgacgggatgattccggcgctgcgcgcgcgcaagttcgacgtgatcatgtccgcgatgacggccaccgacgagcggctcaagcagatcgacttctcgaacaagctgtatgcgtcgccgggcgcgctcgtcgcgccggccggctcgaagctgctgccgaccgcggagtcgctcgcgggcaagcgcatcgggatcgaccagggcacgacgcaggaggcgtacgcgaaggccgaatgggcgaccaagggcgtgacgatcgtctcgtaccagaaccaggaccaggtgtaccaggatctcgtcaacggccgcctcgacgcgaccttccaggacaagacgcaggccggctactcgttcctgaagaccccgcgaggcaagggctacgcgttcgcgggccccgacgtgaccgacgtgcggatcaccggctacggcgtcgcgatgggcgtgcgcaagggcgacgaagcgatgaagaagcggctgaacgacgcgatcgtcgcgatccgcgcgaacggcacgtaccagaagatcgccgccagatatttcgacttcgacatctacggcacgaagcagcagctgacttcggcaccgtga

SEQ ID NO: 3068 - protein, 267 aa, Burkholderia sp. 383
MNRTAKLLVTALAFAPLVSFAQDTSTIRWGIDPTYPPFEAKQPDGSLAGFDIDLRNAICEQLHAKCVWVEQGFDGMIPALRARKFDVIMSAMTATDERLKQIDFSNKLYASPGALVAPAGSKLLPTAESLAGKRIGIDQGTTQEAYAKAEWATKGVTIVSYQNQDQVYQDLVNGRLDATFQDKTQAGYSFLKTPRGKGYAFAGPDVTDVRITGYGVAMGVRKGDEAMKKRLNDAIVAIRANGTYQKIAARYFDFDIYGTKQQLTSAP

SEQ ID NO: 3069 - DNA, 783 bp, Burkholderia sp. 383
  CDS (1)..(783): transl_table=11
gtgaaaaagattcttgcggctgtgaccgtagccctgctcgccgtatcggcaggcaccgcgtatgcgaaggactggacgaccgtgcggttcggcgtcgacgcaagctacccgcctttcgaatcgaaaggcgctgacggcaaggtggtcgggttcgacgtcgacctcggcaacgaaatctgccgccgcatgaacgcgaagtgcgtgtggatcgaaaacgacttcgacgggatgattccggcactgaaggcccgcaagttcgacggcgtgctgtcgtcgatgtcgatgacgccggcgcgtcaggagcagatcgccttctcggcgaagctgttcaacacgccgacgcgcctcgtgacgaagaagggcgccggcctgatgccgacggccgaatcgctgaagggcaagtcggtcggcgtcgagcagggcacgatccaggaaacctatgcgaagacgtactgggcctcgaagggcgtgaacgtcgtgccttaccagaaccaggaccaggtctacgccgacctgatctccggccgtctggacggcgcgctgcaggatgcggtgcaggctgaaatcggcttcctgaagacgccgcgcggcgcgaacttcgatttcgccggcaaggatctcgacgatccgaagacgctcggcgaaggcgccggcatcggcctgcgcaaggaagacaccgacctgaaggcgaagatcgacggcgcgatcgccggcatgcgcaaggacggcacgtacgcgaagatcgcgaagaagtacttcgatttcgacgtctacggcaagtaa

SEQ ID NO: 3070 - protein, 260 aa, Burkholderia sp. 383
MKKILAAVTVALLAVSAGTAYAKDWTTVRFGVDASYPPFESKGADGKVVGFDVDLGNEICRRMNAKCVWIENDFDGMIPALKARKFDGVLSSMSMTPARQEQIAFSAKLFNTPTRLVTKKGAGLMPTAESLKGKSVGVEQGTIQETYAKTYWASKGVNVVPYQNQDQVYADLISGRLDGALQDAVQAEIGFLKTPRGANFDFAGKDLDDPKTLGEGAGIGLRKEDTDLKAKIDGAIAGMRKDGTYAKIAKKYFDFDVYGK

SEQ ID NO: 3071 - DNA, 774 bp, Burkholderia sp. 383
  CDS (1)..(774): transl_table=11
atgaaacgtaccttcctgccgttcgtttacctctgccttgcgttcacggccagcgccgcgcacgcgctcgatgcgcgccccgtgcgcctcggcatcgatccgacctatccgccgatggattcgaaggcgcccgacggcagcctgaagggcttcgacgtcgatctcggcaacgagatctgtcgccgcgcgcagttgcggtgccagtgggtcgagctcgaattctccgggatgattcccgctttgcaggcacgcaagatcgacgcgatcctgtcgtcgatggcgatcaccgagaagcgcgagaagcagatcctgttctcgtcgaaactgttccgcttcaagtcgcggctcgttgcgcggcccgggagcggcgtcgacagcacgaccgcgtcgctggccggcaagcacgtcggcgtgcagtcgggcacgcagttcgaatcgtgggcgctcgcgcactgggcgccggccggcgtcagcgtggtgccgtacaagagccaggacgacgtgttcgccgatctcgtcaacggccgcctcgacgcggcgctgctcggcaccgtggaagccgactacggcttcctgcgcatgccgaagggcaagggcttcgcgttcgtgggcgcaccgctcgacatgggcgatcgcggtgtcggcatcggcatgcggcagtcggatacggcgctcaaggcgtcgatcgacggcgcgatcgcgtcgatgctgaaggacggcacgtacgaccgcatcgcgaagaaatatttcgacttcaacccgtacggcgactga

SEQ ID NO: 3072 - protein, 257 aa, Burkholderia sp. 383
MKRTFLPFVYLCLAFTASAAHALDARPVRLGIDPTYPPMDSKAPDGSLKGFDVDLGNEICRRAQLRCQWVELEFSGMIPALQARKIDAILSSMAITEKREKQILFSSKLFRFKSRLVARPGSGVDSTTASLAGKHVGVQSGTQFESWALAHWAPAGVSVVPYKSQDDVFADLVNGRLDAALLGTVEADYGFLRMPKGKGFAFVGAPLDMGDRGVGIGMRQSDTALKASIDGAIASMLKDGTYDRIAKKYFDFNPYGD

SEQ ID NO: 3073 - DNA, 783 bp, Burkholderia sp. 383
  CDS (1)..(783): transl_table=11
atgaagagactgattgccgctgtttcgatcgccctgctcgcggtatccgcaggccccgccgtcgcgaaggactggaccacgatccgcttcggcaccgacgccagctacgcgccgttcgagtcgaaggcacccgacggcaagctcgtcggcttcgacatcgacctcggcaacgagatctgcgcgcgcctgaaggcgaagtgcgtgtggctcgagaacgatttcgacgggatgattccggcgctgaaggcgaagaagttcgacgcggtgctgtcgtcgatgtcgatcacgccgcagcgcgcgcagcagatcggcttcacgacgaagatctacaaccagccgacgcggctcgtcgtgaagaagggctcgccgctgctgccgacggccgaatcgctgaagggcaaatcgatcggcgtcgaacagggcacgacgcaggaaacgtacgcgaaggcgtactggggcaagcaaggcgcgaacgtcgtgtcgtaccagaaccaggatggcgtgtacgcggacctgacctcgggccgcctcgacgcagcgctgcaggatgaagtgcaggcggccatcgggttcctgaaatcgtcgcgcggcgcgaactacacgttcgtcggccccgagctcgtcgacgacaaggtgctcggcatcggcgccggcatcgggctgcgcaaggaggacaccgacctgaaggcgaagatcgacggcgccatcctcgacatggtcaaggacggtacctacaagcggctcgcgtcgaagtacttcgacttcgacatctacggcggctga

SEQ ID NO: 3074 - protein, 260 aa, Burkholderia sp. 383
MKRLIAAVSIALLAVSAGPAVAKDWTTIRFGTDASYAPFESKAPDGKLVGFDIDLGNEICARLKAKCVWLENDFDGMIPALKAKKFDAVLSSMSITPQRAQQIGFTTKIYNQPTRLVVKKGSPLLPTAESLKGKSIGVEQGTTQETYAKAYWGKQGANVVSYQNQDGVYADLTSGRLDAALQDEVQAAIGFLKSSRGANYTFVGPELVDDKVLGIGAGIGLRKEDTDLKAKIDGAILDMVKDGTYKRLASKYFDFDIYGG

SEQ ID NO: 3075 - DNA, 774 bp, Burkholderia sp. 383
  CDS (1)..(774): transl_table=11
atgaagaaactcgcgctcagtattgcccttgcctgcatcgcggtcggtgcccacgccaaggattggtcgacgatccggttcggcgtcgacgccagctatccgccgttcgaatcgaaggacgcaagcggcaaggtcgtcggcttcgacgtcgatctcggcaacgagatctgcgcgcgcctgaaggcgaaatgcgtgtggatcgagaacgacttcgacgggatgatccccgcgctgaaggcgaagaagttcgacggcgtgctgtcgtcgatgtcgatgacgccggcgcgtgccgagcagatcgcgttctccgacaagctgttcaacacgccgacgcgcctcgtcacgaagaagggcgcgaacctgcagccgaccgccgaatcgctgaagggcaagtcggtcggcgtcgagcagggcaccatccaggaaacctacgcgaaagcctactgggcgccgaagggcgtgcaggtcgtgccttaccagaaccaggacggcgtgtaccaggacctgatgtcgggccgcctcgacgcggcgctgcaggacgcggtgcaggccgacatcgggttcctgaagacgccgcgcggcgcgaacttcgaattcgccggcaaggacatcgacgatccgaagacgctcggcaacggcgccggcatcgggctgcgcaaggacgacgccgacctgaaggcgaagatcgaccacgcgattgccgacatcatcaaggacggcacgtacaagaagctcgagaagaagtacttcgcgttcgacgtctacggcggctga

SEQ ID NO: 3076 - protein, 257 aa, Burkholderia sp. 383
MKKLALSIALACIAVGAHAKDWSTIRFGVDASYPPFESKDASGKVVGFDVDLGNEICARLKAKCVWIENDFDGMIPALKAKKFDGVLSSMSMTPARAEQIAFSDKLFNTPTRLVTKKGANLQPTAESLKGKSVGVEQGTIQETYAKAYWAPKGVQVVPYQNQDGVYQDLMSGRLDAALQDAVQADIGFLKTPRGANFEFAGKDIDDPKTLGNGAGIGLRKDDADLKAKIDHAIADIIKDGTYKKLEKKYFAFDVYGG

SEQ ID NO: 3077 - DNA, 771 bp, Burkholderia sp. 383
  CDS (1)..(771): transl_table=11
atgaaaaagctcgtcctggccgttgcgctcgcgctgacggccggcgccgccgccgcgaaagacccggcggtcctgcgcctcggcgtcgaccccagctatgcgccattcgaatcgctcgcgcccgacggcaagctcgtcggcttcgacatcgatctcggcaatgcgatctgcgaacggatgaaggtgcgttgcgtgtgggtcgagaacgcgttcgacgggatgatcccggcgctgaaggcacgcaagttcgacggcgtgctgtcgtcgatgagcgtgaccgagaagcgcctcgcgcagatcgcgttcaccgacaagatcaacaacgtgccgccccggctcgtcgcacggcgcggctcgaacctgcagccgacgcccgaatcgctgcagggcaagagcgtcggcgtcgagcagggttcgacgcaggagacgtatgcgcgcacgtactgggagccgaagggtgtgatcgtccgcacgtaccagacgcaggatctcgtctaccaggacctgctgtcggggcggctcgacgcgtcgctgcaatcgtcggtgcaggccgacctcgggttcctgaaaaccgcgaagggggcgaacttcgaattcgcggggccgccgctgcatgacccgaagacgctcggcgtgggttcggcgatcggcgtgcgcaaggatgacgacgcgctgcgcacgcagatcaaccaggcgctggcgagcctgatccaggacgggacttaccagcggatctcgaagaagtatttctcgttcgatatctataactga

SEQ ID NO: 3078 - protein, 256 aa, Burkholderia sp. 383
MKKLVLAVALALTAGAAAAKDPAVLRLGVDPSYAPFESLAPDGKLVGFDIDLGNAICERMKVRCVWVENAFDGMIPALKARKFDGVLSSMSVTEKRLAQIAFTDKINNVPPRLVARRGSNLQPTPESLQGKSVGVEQGSTQETYARTYWEPKGVIVRTYQTQDLVYQDLLSGRLDASLQSSVQADLGFLKTAKGANFEFAGPPLHDPKTLGVGSAIGVRKDDDALRTQINQALASLIQDGTYQRISKKYFSFDIYN

SEQ ID NO: 3079 - DNA, 789 bp, Burkholderia sp. 383
  CDS (1)..(789): transl_table=11
atgaagcaatggaaacggatggcggcgctcgcgatggcgctggcggcgagcgcggcgcatgcgggcgactgggcgggcaaggagatccgcctcgcggtcgatccgacttacccgccgctcgaatacaagctgcccgacggcacgctgacgggcttcgggatcgacatcacgaacgcgttgtgcgcggagctgcgtgcgcgctgcgtgtgggtcgagtcgagtttcgacgggatgattccggggctgctcgcgcgcaagttcgacgtgattgcgtcgtcgatgacgatcacgccgaagcggcagcagcagatcgccttcacgaaccggatctcgaatgcgccggcgcgcctcatcgcgcgcaagggctcgccgctgctgccgacggccgatgcgctgaagggcaagcgcgtgggcgtcgagcagggttcagcgcaggccgactacgcggtcgcgaactggcagccggccggcgtccagatcgtgtcgtaccagaaccaggaccaggtctatgccgatctcgtgacgggccggctcgacgcggcgttccaggcatcgatcgcggccagcgacggtttcctgaagaagccgcagggcaaggatttcgcgttcgtcggcgcggcgatcgacgacgtgaagtacttcgggcagggcgacgggctcgggctgcgcaagcaggacaacgacctgcgcgacgccttcaaccgcgcgctcgcgacaatcctcgcgaacggcacgtaccagcggatcaacaagaagtacttcgacttcgacatctacggcgcgaagtaa

SEQ ID NO: 3080 - protein, 262 aa, Burkholderia sp. 383
MKQWKRMAALAMALAASAAHAGDWAGKEIRLAVDPTYPPLEYKLPDGTLTGFGIDITNALCAELRARCVWVESSFDGMIPGLLARKFDVIASSMTITPKRQQQIAFTNRISNAPARLIARKGSPLLPTADALKGKRVGVEQGSAQADYAVANWQPAGVQIVSYQNQDQVYADLVTGRLDAAFQASIAASDGFLKKPQGKDFAFVGAAIDDVKYFGQGDGLGLRKQDNDLRDAFNRALATILANGTYQRINKKYFDFDIYGAK

SEQ ID NO: 3081 - DNA, 789 bp, Burkholderia thailandensis E264
  CDS (1)..(789): transl_table=11
atgacagtgaaaaaaatcttggcggctttgaccgtggccctgctggcggtgtcggcaggcggcgtgcaggcgaaggactggtcgacgatccgcttcggcgtcgacgcgagctacccgcccttcgaatcgaaaggcccggacggcaaggtggtcggcttcgacgtcgatctcggcaacgagatctgcaagcgagtgaaagccaagtgtgtgtggatcgagaacgacttcgacggcatgatcccggcgctgaaggcgcgcaagttcgacggcgtgctgtcgtcgatgtcgatgacgccgcagcgcgaagagcagatcgcgttctcgtcgaagctgttcaacacgccgacgcgcctcgtcacgaagaagggcgcgaacctgatgcccacggccgaatcgctcaagggcaagacggtcggcgtcgagcagggcacgattcaggaaacctacgcgaaggtccactgggcgccgaagggcgtgaacatccagccgtaccagaaccaggaccaggtctacgccgacctgatcgcgggccgcctcgacgcggcgctgcaagacgcggtgcaggccgacatcggcttcctgaagacgccgcgcggcaaggatttcgcgttcgccggctcggacctcaacgatccgaagacgctcggcgaaggcgcgggcatcggcttgcgcaaggaagacaccgatctgaaggcgaagatcgacaaggcgatcgccgacatgcgcaaggacggcacgtacgacaagatcgcgaagaagtatttcgacttcgacgtttacggcaagtaa

SEQ ID NO: 3082 - protein, 262 aa, Burkholderia thailandensis E264
MTVKKILAALTVALLAVSAGGVQAKDWSTIRFGVDASYPPFESKGPDGKVVGFDVDLGNEICKRVKAKCVWIENDFDGMIPALKARKFDGVLSSMSMTPQREEQIAFSSKLFNTPTRLVTKKGANLMPTAESLKGKTVGVEQGTIQETYAKVHWAPKGVNIQPYQNQDQVYADLIAGRLDAALQDAVQADIGFLKTPRGKDFAFAGSDLNDPKTLGEGAGIGLRKEDTDLKAKIDKAIADMRKDGTYDKIAKKYFDFDVYGK

SEQ ID NO: 3083 - DNA, 1092 bp, Burkholderia thailandensis E264
  CDS (1)..(1092): transl_table=11
atgcaccggttcgttgcgccgatccatgcaatcgtccgcgcgattcgcgcgcgctgccgcgccggcgagcaaagcgaggccgacgcgcccgcccggcgcgcgtcgcgctcgcccgcatcgtttctgctgggccgcggccggcgttcgggtaaaataccgcgcttttggccgccgtcgacggcgctaggcccccaggccgagccgagccgagccgatatcgacgaacgcgaattttggccgcctagaatacgcccggcgcgcgcatgcccggacgcatccggccgcgcggccggggaagtcaggaagaggaacgacatgaagaagctcgccttgtgcgcagccctcgcccttgcggcgggcggcgccttcgcgaaggaatggaagaccgtgcggatcggcgtcgacgccagctatccgccgttcgaatcgaccgcgccgagcggcgagatcgtcggattcgacgtcgatctcgcgaacgaggtctgcaagcggatcaacgcgaagtgcacatggacgccgcaggatctcgacggcatcatccccgcgctgaaggcgaagaaattcgacgtgatcgtgtcgtcgctgaccgtcaccgacaagcgccgcgagcagatcgacttctccgacaagctgtacgacgcgcccgcgcggatgatcgcgaaggcgggctcgccgctcctgccgagcgtcgagtcgctgaaaggcaagcgcgtcggcgtcgagcagggctcgacccaggagactttcgcgaaggcgcactgggagccgaagggcgtgacgatcgtgtcgtaccagaaccaggatcaggtgtacgccgatctcggctcgggccgtctcgacgcgacgctgcaagacgagttccaggccgactacggcttcctgcgcacgccgcgcggcaagggtttcgcatgggcgggcccggccgtgaaggacccgaagacgctcggcgacggcaccgcgatgggcttgcgcaaggacgacgcggacctgaagaacgcgatcaaccgcgcgctcgcgtcgatgcacaaggacggcacgtacgacaggctgtcgcgcaagtacttcccgtacagcgtctattcggcgaagtaa

SEQ ID NO: 3084 - protein, 363 aa, Burkholderia thailandensis E264
MHRFVAPIHAIVRAIRARCRAGEQSEADAPARRASRSPASFLLGRGRRSGKIPRFWPPSTALGPQAEPSRADIDEREFWPPRIRPARACPDASGRAAGEVRKRNDMKKLALCAALALAAGGAFAKEWKTVRIGVDASYPPFESTAPSGEIVGFDVDLANEVCKRINAKCTWTPQDLDGIIPALKAKKFDVIVSSLTVTDKRREQIDFSDKLYDAPARMIAKAGSPLLPSVESLKGKRVGVEQGSTQETFAKAHWEPKGVTIVSYQNQDQVYADLGSGRLDATLQDEFQADYGFLRTPRGKGFAWAGPAVKDPKTLGDGTAMGLRKDDADLKNAINRALASMHKDGTYDRLSRKYFPYSVYSAK

SEQ ID NO: 3085 - DNA, 795 bp, Burkholderia thailandensis E264
  CDS (1)..(795): transl_table=11
atgaagttgaactggcggaagatggccgcgcatgcggtggtgacggccacggccctggcggcaggcagcgcgttcgccgccgatctgaaggaaatccgcttcggcgtcgaggcgtcgtatgcgccgttcgaatacaagacgccggacggcaagctggcgggcttcgacatcgacatcggcaacgcggtgtgcgcgaagctgaaggtcaagtgcgtgtgggtcgagaacgcgttcgacggcctgatcccggcgctgcaggcgcgcaagttcgacgcgatcaactccgacatgacgatcaccgagcagcgtcggaaggcgatcgatttcaccgatccgatctacacgatcccgaaccagttgatcgcgaagaagggcagcggcctgctgccgaccaccgcgtcgctgaagggcaagcgcgtcggcgtgctgcagggcacgatccaggaggcgtatgcgaagaagcgctgggcgccggcgggcgtcgaagtcgtgccgtaccagacgcaggatctcgcgtacgaggacctgaagtcgggccgcctcgacgcgacgttccaggattcggaggcgggcgcgaagggcttcctgtcgaagccgcagggcgcgggattcgcgttcgcgggcgatcacgtgagcgacgccgagattctcggcacgggcgtcggcttcggcctgcgcaagaacgacgcgcaactgaagagcgccgtcaatcaggcgctgaaggaactgaaggccgacggcacgatcgacggcctcgcgaagaagtacttcagcgtgcccgtgacgctgaagtaa

SEQ ID NO: 3086 - protein, 264 aa, Burkholderia thailandensis E264
MKLNWRKMAAHAVVTATALAAGSAFAADLKEIRFGVEASYAPFEYKTPDGKLAGFDIDIGNAVCAKLKVKCVWVENAFDGLIPALQARKFDAINSDMTITEQRRKAIDFTDPIYTIPNQLIAKKGSGLLPTTASLKGKRVGVLQGTIQEAYAKKRWAPAGVEVVPYQTQDLAYEDLKSGRLDATFQDSEAGAKGFLSKPQGAGFAFAGDHVSDAEILGTGVGFGLRKNDAQLKSAVNQALKELKADGTIDGLAKKYFSVPVTLK

SEQ ID NO: 3087 - DNA, 795 bp, Burkholderia thailandensis E264
  CDS (1)..(795): transl_table=11
atgaaacgactgcaattccggctcgcgctcgcctgcgcattgagcgtcgccgcgggggccggcgcggcgcgcgccgacgtttcgcaaacgctgcgcttcggtctcgaggcgcaatatccgccgttcgaatcgaaggcggcgaacggcgagctgcaaggcttcgatatcgacgtcggcaacgccgtctgcaaggaggcgaagctcgcgtgcaaatgggtcgagacgtcgttcgacggactgatcccggcgctgcagggccgcaagttcgacgcgatcaattcggcgatgaacgcgaccgaccagcgccgtcaggcgatcgacttcacgacggtgatctatcgcgtgccgacgcgactgatcgcgcgcgcggacagcggcctcgcgccgacgccggaatcgttgaagggcaagcgggtgggcgtgctgcagggctcgattcaggagacgtatgcgaatgcgcactgggcgggagcgggcgtgcaggtcgtcgcgtatcaggaccagaatcaggcttactcggatctcacggcgggccgcctcgacggcacgctcgtgctcgcgcccgcgggccagcgcggtttcctgtcgcggccggacgcgaagggcttcgcgttcgtcgggcaagcggtgcgcgacgacaagatcctcggaagcgggatcgcgttcgggctgcgcaagggcgacgaagcgctgaagctgcgcctgaacgccgcgatcgacaagctgaaggcggacggcaccgtgaaggcgctcggccgcaagtatttcggcgatatcgacatctcgacgaagtga

SEQ ID NO: 3088 - protein, 264 aa, Burkholderia thailandensis E264
MKRLQFRLALACALSVAAGAGAARADVSQTLRFGLEAQYPPFESKAANGELQGFDIDVGNAVCKEAKLACKWVETSFDGLIPALQGRKFDAINSAMNATDQRRQAIDFTTVIYRVPTRLIARADSGLAPTPESLKGKRVGVLQGSIQETYANAHWAGAGVQVVAYQDQNQAYSDLTAGRLDGTLVLAPAGQRGFLSRPDAKGFAFVGQAVRDDKILGSGIAFGLRKGDEALKLRLNAAIDKLKADGTVKALGRKYFGDIDISTK

SEQ ID NO: 3089 - DNA, 783 bp, Burkholderia xenovorans LB400
  CDS (1)..(783): transl_table=11
gtgaaaaaactgctagcggctttgacggttgctctgcttgctaccgtctcgattggcgcacacgctaaagattggtcgactatccgtttcggcgttgacgccagctatcccccgtttgagtcgaagggctcggacggcaagctcgttggcttcgatatcgaccttggcaatgaaatctgcgcgcgcctgaaagccaaatgcgtgtgggtcgaaaacgacttcgacggcatgatcccggcgctgaaggcgaagaagttcgacggcgtgctgtcgtcgatgtccatgacgccgcaacgcgctgaacagatcgctttctcgtcgaagctgttcaacaccccgacgcgcctcgtggcgaagaagggttcgggcatcctgccgacggccgaatcgctcaagggcaagacggttggcgtggaacagggcacgatccaggaaacctacgccaagacgtactgggagccgaagggcgcgaaggtcgtgccgtatcagaaccaggaccaggtctatgccgacttgctgtcgggccgtctggacgcggcgctgcaagacgcggtgcaagctgagatcggcttcctgaagacgccgcgcggcgccggcttcgacttcgtcggcaaggacctcgaagatccgaagatcctcggcaacggcgcaggcatcggcatgcgcaaggaagatacggatctgaagacgaaggtcgacaaggcaatcgccgagatcatcaaggacggtacgtacaagaagctcgagaagaagtacttcgacttcgacgtgtacggcagctaa

SEQ ID NO: 3090 - protein, 260 aa, Burkholderia xenovorans LB400
MKKLLAALTVALLATVSIGAHAKDWSTIRFGVDASYPPFESKGSDGKLVGFDIDLGNEICARLKAKCVWVENDFDGMIPALKAKKFDGVLSSMSMTPQRAEQIAFSSKLFNTPTRLVAKKGSGILPTAESLKGKTVGVEQGTIQETYAKTYWEPKGAKVVPYQNQDQVYADLLSGRLDAALQDAVQAEIGFLKTPRGAGFDFVGKDLEDPKILGNGAGIGMRKEDTDLKTKVDKAIAEIIKDGTYKKLEKKYFDFDVYGS

SEQ ID NO: 3091 - DNA, 768 bp, Burkholderia xenovorans LB400
  CDS (1)..(768): transl_table=11
atgaaaatctcgctgatgatcctgagcgccgcgctggctttcagcagcggcgcgtttgccgctgattccaccacgctgcgcctcggcatcgatccgacctatccgccgatggactccaaggcgcccgacggcagcttcaaaggcttcgacgtcgatctcggcaacgaaatctgcaagcgcattcacgcgcgctgccagtgggtggagctcgaattttcggggatgattccggcgttgcaggcgcgcaagatcgacgcgattctgtcttcaatggcgatcacggaaaagcgcgagcaacagattctgttttcgtcgaaactgttccagttcaaatcgcggctgatcgcgcggcaaggttccgcgctcgcgggcagcttgaacgcgctggccggcaaggcaatcggcgtgcagtcgggcacgcagttcgaagggtacgcgctgaagaactgggcgccgctcggcgtgcacgtggtggcgtacaagagtcaggaagaagtcttcgccgacctggagaacgggcgtctcgacggcgcgctgctcggttcggtggaagcagactacggattcttgcgcacgccggcgggcaagggctttgcgttcgtcggcgaaccgctctcgatgggcgatcgcggcgtaggcatcggcttgcgtaaggacgagaccgcagtgcaggcctccatcaacgaggcgatcgcctccatgcgcaaagacggcacgtacgcgcagatcgcgaagaagtacttcgacttcgatccgtacggaaactga

SEQ ID NO: 3092 - protein, 255 aa, Burkholderia xenovorans LB400
MKISLMILSAALAFSSGAFAADSTTLRLGIDPTYPPMDSKAPDGSFKGFDVDLGNEICKRIHARCQWVELEFSGMIPALQARKIDAILSSMAITEKREQQILFSSKLFQFKSRLIARQGSALAGSLNALAGKAIGVQSGTQFEGYALKNWAPLGVHVVAYKSQEEVFADLENGRLDGALLGSVEADYGFLRTPAGKGFAFVGEPLSMGDRGVGIGLRKDETAVQASINEAIASMRKDGTYAQIAKKYFDFDPYGN

SEQ ID NO: 3093 - DNA, 795 bp, Burkholderia xenovorans LB400
  CDS (1)..(795): transl_table=11
atgaagatgaattggcgaaacatggccgcgctcgcgctgttcgcggcggccacggctacggccggcaccgcatcggctgcggatatcaaggaagtgcatttcggcgtcgaggcgtcgtatgcgccgttcgaatcgaagtcgccgtcgggcgaactgcaaggtttcgacatcgacgtcggcaatgccgtgtgcgcgaagctgaaggccagatgcgtgtgggtcgagaactcgttcgacggtctgatcccggccttgcaggcgcgcaagttcaatgccatcaactcggatatgacgatcacggaccaacgccgccaggcgatcgatttcaccgatccgatctacacgatcccgaatcagatgatcgcgaagaagggcagcggtctgctgccgacgccggcttcgctcaagggcaagcatgtgggcgtgctgcagggcacgattcaggaaacctacgcgaaggcgcgctgggcgccggccggcgtcgatgtcgtgccgtatcagacgcaggatcagatttacgccgacctcgcttcgggccgtctcgatgcggcgttccaggacgcggaggccgcgtcgaaaggcttcctgaagaagccgcaaggcgccggtttcgactttgccggtccggctgtcaccgacgaaaagctgctgggcgcgggcgttggcttcggcgttcgcaagggcgacaaggcattgaaagacgcgctgaaccaggcgctcagggaactgaaggcggacggcacgatcgaccgctttgcggccagatacttcgacgtgaaagtggtattgaagtga

SEQ ID NO: 3094 - protein, 264 aa, Burkholderia xenovorans LB400
MKMNWRNMAALALFAAATATAGTASAADIKEVHFGVEASYAPFESKSPSGELQGFDIDVGNAVCAKLKARCVWVENSFDGLIPALQARKFNAINSDMTITDQRRQAIDFTDPIYTIPNQMIAKKGSGLLPTPASLKGKHVGVLQGTIQETYAKARWAPAGVDVVPYQTQDQIYADLASGRLDAAFQDAEAASKGFLKKPQGAGFDFAGPAVTDEKLLGAGVGFGVRKGDKALKDALNQALRELKADGTIDRFAARYFDVKVVLK

SEQ ID NO: 3095 - DNA, 786 bp, Pseudomonas aeruginosa UCBPP-PA14
  CDS (1)..(786)
atgacaagaaccctcggcagcatcgccctctccctcctcctcgccgcaccggccggcgccgccgactggaccggcaaggtcctgcgcctgggcgtcgacccgacctacccgccgctcgaatacaagcagccggacggccgcctggcaggcttcggcatcgagatcggcgaagccctctgcgcggagctgcgagcccgctgcgaatgggtcgaaagcaactgggacggcatcatcccggcgctgctgtcgcgcaagatcgacgccatcgtctcgtcgatgaccatcacgccaaaacgcgcacagcacatcgccttcaccgaccgcgtctccaacgcgccgagccgcctggtggtacgccgcggctcggcgctcctgcccgacgccgagagcctgcgcggcaagcgcgtgggggtcggccagggctccaaccaggaggcctacgccaaggccgaatgggccgccaagggggtgcgggtcgtctcctaccagaaccaggaccaggtctacgccgacctcgtcatgggccgcctcgacgcctcgctgcaaggtgcggtgcaggccagctacggcttcctcgacaagccggtcggcaaggatttcgaactggccggagcggtgctggacgaccctcgctacttcggggtcggcgacggcatcggcctgcgcaaggaagatgtggcgctgcgcgaggacctgaacaaggcgctggcgacgatccgcgccaacgggacctacgcgcgaatcaacgcccgttacttcgatttcgacctctacggcgcgccctga

SEQ ID NO: 3096 - protein, 261 aa, Pseudomonas aeruginosa UCBPP-PA14
MTRTLGSIALSLLLAAPAGAADWTGKVLRLGVDPTYPPLEYKQPDGRLAGFGIEIGEALCAELRARCEWVESNWDGIIPALLSRKIDAIVSSMTITPKRAQHIAFTDRVSNAPSRLVVRRGSALLPDAESLRGKRVGVGQGSNQEAYAKAEWAAKGVRVVSYQNQDQVYADLVMGRLDASLQGAVQASYGFLDKPVGKDFELAGAVLDDPRYFGVGDGIGLRKEDVALREDLNKALATIRANGTYARINARYFDFDLYGAP

SEQ ID NO: 3097 - DNA, 792 bp, Pseudomonas aeruginosa UCBPP-PA14
  CDS (1)..(792)
atgatcaagtcgctgaacaccaagaacctgctgggaggcctgctgctcggcgtgctcgccagcggatccgccgtcgccgccgatggcaacctgcggatcggcatcgaggccgcctacccgccgttttccttcaagaccgccgaaggcgaactggccggcttcgactacgacatcggcaacgcactgtgcgcgcagatgcaggtgaagtgccagtggatcgagcaggagtacgacggcctgattccctcgctgaaagttcgcaagatagacgccgcgctgtcctccatcaccatcaccgaggagcgccggcgctcggtggacttcacccacaagtactacttcacgccgggccgcctggtgatgaaggaaggcgcccagctcgacgacagcttcagccagttggccggcaagcgcatcggcgtgcagcgcggcgctaccgccgaccgcttcgccagtgcggtgctggccaaggccggtgccgaagtggtgcgctacaccagccaggacgagatctacctggacctggtggccggccgcctcgacgccaccttcgccgactccatcccgttgcagaccggcttcctcgataccccgcgcggcaagggctacgccttcgtcgggccggagttcaaggacccgaaatacttcggcgagggcgctgggatcgcggtgcgcaagggggacgccgagctggtcggcaagctcaacgcggcgatcgacgcgattcgtgccgacgggacctacaagcgcatcgagggcaagtacttcaagagcgacatctacggcgactga

SEQ ID NO: 3098 - protein, 263 aa, Pseudomonas aeruginosa UCBPP-PA14
MIKSLNTKNLLGGLLLGVLASGSAVAADGNLRIGIEAAYPPFSFKTAEGELAGFDYDIGNALCAQMQVKCQWIEQEYDGLIPSLKVRKIDAALSSITITEERRRSVDFTHKYYFTPGRLVMKEGAQLDDSFSQLAGKRIGVQRGATADRFASAVLAKAGAEVVRYTSQDEIYLDLVAGRLDATFADSIPLQTGFLDTPRGKGYAFVGPEFKDPKYFGEGAGIAVRKGDAELVGKLNAAIDAIRADGTYKRIEGKYFKSDIYGD

SEQ ID NO: 3099 - DNA, 792 bp, Rubrivivax gelatinosus PM1
  CDS (1)..(792)
atgacccgtttcgcctccttcctggccctgaccgccgtcctgctcttcgcggccgagcgtggcctggccgccgacgggaagaagctgcgcatcgcggtcgagggcgcctacccgccgttcagcgaggtcacaccctccgggcagttgaagggcttcgacatcgacatcgcgaacgcgctgtgcgcccagatgaagaccgaatgcacgctggtgcagcaggacttcgacggcatgatcccggcgctgcaggcgcgcaagttcgacgccatcgtcgcgtcgatgtccatcacgccggagcggcagaaggtcgtggccttcaccgagcgctactaccagaccccggcgcggctggtcgccaagagcgggagcaagctggagctcacgcccgagggcctgaagggcaggaagatcggcgtgcagcgctcgaccatccacgaccgcttcgccaccgccaccttcaagggcgccgagatcgtgcgctataccaagcaggacgaggttttcctcgatctcgccgccggacgcatcgacgcgacgctgcaggactcggtggccgccgacgtcggcttcctcaagacaccgcagggcaagggctacggctacatcggcccgttctacgacgacgagaagttcttcggcgtcggcgccggcatcgcgctgcgcaagggtgacaccgagctgcagtcgaagctcaacgcggcgatcaaggggatccgcgccgacggcacctacaagaagatccaggacaagtacttcgacttcgacgtctacggcgaagcgccgaagaagtga

SEQ ID NO: 3100 - protein, 263 aa, Rubrivivax gelatinosus PM1
MTRFASFLALTAVLLFAAERGLAADGKKLRIAVEGAYPPFSEVTPSGQLKGFDIDIANALCAQMKTECTLVQQDFDGMIPALQARKFDAIVASMSITPERQKVVAFTERYYQTPARLVAKSGSKLELTPEGLKGRKIGVQRSTIHDRFATATFKGAEIVRYTKQDEVFLDLAAGRIDATLQDSVAADVGFLKTPQGKGYGYIGPFYDDEKFFGVGAGIALRKGDTELQSKLNAAIKGIRADGTYKKIQDKYFDFDVYGEAPKK

SEQ ID NO: 3101 - DNA, 879 bp, Burkholderia vietnamiensis G4
  CDS (1)..(879): transl_table=11
atgcgaaacggaccgtccgacgcgaagccgcgccggggcgaacgcttacggcgcggcacaaccgcgcacccatcgaacaaaacgaggagtcaccgagtgaaaaagattcttgcggctgtgaccgtggccctgctggccgtatcggccggcactgcatacgcgaaggactggtcgaccgtacgcttcggcgtcgacgcaagctacccgcctttcgaatcgaaaggcgccgacggcaaggtggtcggcttcgacgtcgacctcggcaacgagatctgccgccgcatcgccgcgaaatgcgtgtggatcgagaacgacttcgacgggatgatcccggcgctgaaggcccgcaagttcgacggcgtgctgtcgtcgatgtcgatgaccccggcccgcgaggaacagatcgccttctcggcgaagctgttcaacacgccgacgcgcctcgtcacgaagaagggcgcgggcctgctgccgacggccgaatcgctgaagggcaagacgatcggcgtcgagcaaggcacgatccaggaaacctacgcgaagacgtactgggcgccgaagggcgtcaccgtcgtcccgtatcagaaccaggaccaggtctacgccgacctgatctcgggccgcctgaacggcgcgctgcaggacgccgtgcaagccgagatcggcttcctgaagacgccgcgcggcgccggcttcgatttcgcaggcaaggacctcgacgatccgaagacgctcggcaacggcgcgggcatcggcctgcgcaaggaagacaccgacctgaagacgaagatcgacggcgcgatcgccgcgatgcgcaaggacggcacgtacgacaagattgcgaagaagtacttcgatttcgacgtgtacggcaagtaa

SEQ ID NO: 3102 - protein, 292 aa, Burkholderia vietnamiensis G4
MRNGPSDAKPRRGERLRRGTTAHPSNKTRSHRVKKILAAVTVALLAVSAGTAYAKDWSTVRFGVDASYPPFESKGADGKVVGFDVDLGNEICRRIAAKCVWIENDFDGMIPALKARKFDGVLSSMSMTPAREEQIAFSAKLFNTPTRLVTKKGAGLLPTAESLKGKTIGVEQGTIQETYAKTYWAPKGVTVVPYQNQDQVYADLISGRLNGALQDAVQAEIGFLKTPRGAGFDFAGKDLDDPKTLGNGAGIGLRKEDTDLKTKIDGAIAAMRKDGTYDKIAKKYFDFDVYGK

SEQ ID NO: 3103 - DNA, 789 bp, Burkholderia vietnamiensis G4
  CDS (1)..(789): transl_table=11
atgaagaacaagacccgcatcacgatcctgctttccgccgccacgatggccttcgcgacgctggcgtcggcgaaggagtggacgacgatccgcatcggcgtggacccgacctatccgccgttcgaatcgaccgcgaccgacggcagcgtgcagggcttcgacgtcgacctcggcaatgcgctgtgcgcgaagctgaacgcgaaatgcgtgtgggtgtcgagcagcttcgacggactgattccgggcctgcaggcgcgcaagttcgacgtgatcctgtcgtcgatggccgcgaccgaacagcgccgccagcagatcgacttcaccgaccgcctgtaccgcaaccagacgcgcctgatcgcccgcacgggcgccgggctgctgcccgacgcggcgaagctcgccggcaagcgcatcgcggtcgaacaggggacgatccaggagacctatgcgcgcgagaaatgggcgccggcgaaggtcgaggtcgtgccgtacccgagctacgaccaggcgtatgcggacctcgtgacggggcgcatcgacggcgtgctgatggatgcggtgcagggccagctcggcttcctggcgacgccgcgcggcaagggcttctcgttcgcgggcggcgtcgtgttcgatccgcggatcatgggcaacggcgacgcgatcggcgtgcgcaaggccgataccgacctgcgcgacgcgctgaatcgcgcgatcgcgcagattcgcagcgacggcacgtatcgcaagatcgagtcgaagtacttcgacttcgacatgtacgggaattga

SEQ ID NO: 3104 - protein, 262 aa, Burkholderia vietnamiensis G4
MKNKTRITILLSAATMAFATLASAKEWTTIRIGVDPTYPPFESTATDGSVQGFDVDLGNALCAKLNAKCVWVSSSFDGLIPGLQARKFDVILSSMAATEQRRQQIDFTDRLYRNQTRLIARTGAGLLPDAAKLAGKRIAVEQGTIQETYAREKWAPAKVEVVPYPSYDQAYADLVTGRIDGVLMDAVQGQLGFLATPRGKGFSFAGGVVFDPRIMGNGDAIGVRKADTDLRDALNRAIAQIRSDGTYRKIESKYFDFDMYGN

SEQ ID NO: 3105 - DNA, 882 bp, Burkholderia vietnamiensis G4
  CDS (1)..(882): transl_table=11
atgtcagcgcgccgaaacacgaattttggccgtctagaatacgccgcggcgcccggcacgaccggccgcgagcgtcacccggaagtgagcgacaaaaggatggaaatgaagaaggccgccctgtgcgccgccctcgccctcgtggcgggaagcgccttcgcgaaagagtggaagaccgtgcggatcggtgtcgatgccagctacccgccgttcgagtcgaccgcgccgagcggcgagatcgtcggtttcgacgtcgacctcacgaaggaaatctgcaagcggatcaacgtgaagtgcgtgtgggtcgcgcaggatctcgacgggatcattccggcgctgaaggcgaagaagtacgacgtgatcgtgtcgtcgctgaccgtcaccgacaagcgccgcgagcagatcgacttctcggacaaggtctacgacgcgcccgcgcgaatgatcgcgaaggccggctcgccgctgcagccgacggtcgcatcgctgaagggcaagcgcgtcggcgtcgaacagggttcgacgcaggaaagctacgcgaaggcgtactgggaaccgcaaggcgtgacggtcattccttaccagaaccaggaccaggtctataccgacctcggctcgggccgcctcgacgcgacgctgcaggacgagctgcaggccgactacggtttcctgcgcacgccgcgcggcaagggcttcgcgttcgccgggccggaagtgaaggatccgaagacgatcggcgacggcaccgcgatcggcctgcgcaagcaggacaccgacctgaagctgaagatcaacaacgcgctggccgacatgcacaaggacggcaccttcgaccggctgtcgcacaagtatttttcgttcagcgtctattcggctcgctga

SEQ ID NO: 3106 - protein, 293 aa, Burkholderia vietnamiensis G4
MSARRNTNFGRLEYAAAPGTTGRERHPEVSDKRMEMKKAALCAALALVAGSAFAKEWKTVRIGVDASYPPFESTAPSGEIVGFDVDLTKEICKRINVKCVWVAQDLDGIIPALKAKKYDVIVSSLTVTDKRREQIDFSDKVYDAPARMIAKAGSPLQPTVASLKGKRVGVEQGSTQESYAKAYWEPQGVTVIPYQNQDQVYTDLGSGRLDATLQDELQADYGFLRTPRGKGFAFAGPEVKDPKTIGDGTAIGLRKQDTDLKLKINNALADMHKDGTFDRLSHKYFSFSVYSAR

SEQ ID NO: 3107 - DNA, 768 bp, Burkholderia vietnamiensis G4
  CDS (1)..(768): transl_table=11
atgaagaagcttgccatttcagttgcgcttgctctggccgccaccagtgtctatgccaaagactggaaagaaatccgctttggtaccgaacccactagtcccccgtttgaatccaaagctatcgacggtaagttggtcggcttcgatatcgacttgggtaatgccatttgcgccaagctcaaagccaaatgtgtgtgggttgagaacgatttcgacggcatgattccagcactgaaagccaagaagtttgacggcatactggcgtcgatgaccgtgaccgaaaagcgtatgcaggaaatcgcattctccgacaagatctacaacaccccgacccgactggtgactaagaagggttcaggtttgctgccgatcgccacttccctgaagggtaagcgggtcggtgttgagcagggcactattcaggaaacctacgctaaggctcactgggagtcggctggtgtaaacgtgacctcgtaccagaaccaagatctggtgtatcaggatatgcaatctggccgtctggatgcctttctgcaagacgcgatcgctgcggacttgggcttcctgaaaaccccgaaaggccatgacttcgcctttgccggcccgaacctggatgatccgagtaccttgggtaccggtgctgccatcggcctacgcaaggaagatgttgacctgcgacaagccatcaatatggcgttggctgccatcatgacagacggtacctacaagaagcttgagcagaagtatttctccttcaacatctactaa

SEQ ID NO: 3108 - protein, 255 aa, Burkholderia vietnamiensis G4
MKKLAISVALALAATSVYAKDWKEIRFGTEPTSPPFESKAIDGKLVGFDIDLGNAICAKLKAKCVWVENDFDGMIPALKAKKFDGILASMTVTEKRMQEIAFSDKIYNTPTRLVTKKGSGLLPIATSLKGKRVGVEQGTIQETYAKAHWESAGVNVTSYQNQDLVYQDMQSGRLDAFLQDAIAADLGFLKTPKGHDFAFAGPNLDDPSTLGTGAAIGLRKEDVDLRQAINMALAAIMTDGTYKKLEQKYFSFNIY

SEQ ID NO: 3109 - DNA, 783 bp, Burkholderia vietnamiensis G4
  CDS (1)..(783): transl_table=11
atgaagagactgattgccgccgtttcgatcgccctgctcgcggtatcggccggccccgccgccgcgaaggactggaccacgctgcggttcggtaccgatgccagctacgcgccgttcgaatcgaaggcgccggacggcaagctcgtcggcttcgacatcgacctcggcaacgagatctgcgcgcggctgaaggcgaagtgcgtgtggctcgagaacgatttcgacgggatgatccccgcgctgaaggcgaagaagttcgatgcggtgctgtcgtcgatgtcgatcacgccgcagcgcgcggaacagatcggcttcacgacgaagatctacaaccagccgacccgtctcgtcgtgaagaagggctcgccgttgctgccgaccgccgaatcgctgaagggcaagtcgatcggcgtcgaacagggcaccacgcaggaggcgtatgcgaaggcgtactgggcgaagcagggtgcgaacgtcgtgtcgtaccagaaccaggacggcgtctatgcggacctgaccgccggccgcctcgatgccgcgctgcaggacgaggtgcaggcagcgatcggcttcctgaagtcgccgcgcggcgcgggttatcagttcgtcgggccggagctggtcgacgagaaggtgctcggcatcggcgccggcatcgggctgcgcaaggaagacaccgacctgaaggcgaagatcgaccgcgcgatcctcgacatggtcaaggacggcacctacaaacggctggcgtcgaagtacctcgacttcgatatctacggcgggtga

SEQ ID NO: 3110 - protein, 260 aa, Burkholderia vietnamiensis G4
MKRLIAAVSIALLAVSAGPAAAKDWTTLRFGTDASYAPFESKAPDGKLVGFDIDLGNEICARLKAKCVWLENDFDGMIPALKAKKFDAVLSSMSITPQRAEQIGFTTKIYNQPTRLVVKKGSPLLPTAESLKGKSIGVEQGTTQEAYAKAYWAKQGANVVSYQNQDGVYADLTAGRLDAALQDEVQAAIGFLKSPRGAGYQFVGPELVDEKVLGIGAGIGLRKEDTDLKAKIDRAILDMVKDGTYKRLASKYLDFDIYGG

SEQ ID NO: 3111 - DNA, 795 bp, Burkholderia vietnamiensis G4
  CDS (1)..(795): transl_table=11
atgaagttggtttggcgtaagttggccgcgcacgcggtcgtggcagcatcggtcgtggcggcaggcagcgcgatggccgcggatctgaaggagatccggttcggcgtcgaggcctcgtatgcgccgttcgaatacaagacgcccgacggcaagctgaccggcttcgacatcgacatcggcaacgcggtgtgcgcgaagctgaaaaccaagtgcgtgtgggtcgagaacgacttcgacgggctgattccggcgctgcaggcgcgcaagttcgacgcgatcaactcggacatgacgatcaccgagcagcgcaagcacgcggtcgcgttcaccgatccgatctacacgatccccaaccagctgatcgcgaagcagggcagcggcctgctgccgacgccgcaagcgctgaagggcaagcgcgtcggcgtgctgcagggcacgatccaggaagcctacgcgaagaagaagtgggcgccggccggcgtcgaagtcgtgccgtaccagacccaggacctcgcatacgccgacctgaagtcgggccgtctcgacgcgacgttccaggattcggaagcgggcgcgaagggcttcctgtcgaagccgcaaggccagggcttcgcattcgcgggcggcaccgtcagcgatgccgagattctcggctcgggcgtcggcttcggcctgcgcaagaacgacgcggcgctgaagaccgcgctcgatcaggcgctcaaggagctgaaggccgacggcacgatcgacacgctcgcgaagaaatacttcagcgtgccggtgacgctcaagtaa

SEQ ID NO: 3112 - protein, 264 aa, Burkholderia vietnamiensis G4
MKLVWRKLAAHAVVAASVVAAGSAMAADLKEIRFGVEASYAPFEYKTPDGKLTGFDIDIGNAVCAKLKTKCVWVENDFDGLIPALQARKFDAINSDMTITEQRKHAVAFTDPIYTIPNQLIAKQGSGLLPTPQALKGKRVGVLQGTIQEAYAKKKWAPAGVEVVPYQTQDLAYADLKSGRLDATFQDSEAGAKGFLSKPQGQGFAFAGGTVSDAEILGSGVGFGLRKNDAALKTALDQALKELKADGTIDTLAKKYFSVPVTLK

SEQ ID NO: 3113 - DNA, 783 bp, Escherichia coli
  CDS (1)..(783): transl_table=11
atgaagaagtcgattctcgctctgtctttgttagtcggtctctccacagcggcttccagctatgcggcgctaccggagacggtacgtatcggaaccgataccacctacgcaccgttctcatcgaaagatgctaaaggtgattttgttggctttgatatcgatctcggtaacgagatgtgcaaacggatgcaggtgaaatgtacctgggttgccagtgactttgacgcgctgatcccctcactgaaagcgaaaaaaatcgacgctattatttcgtcgctttccattaccgataaacgtcagcaggagattgccttctccgacaagctgtacgccgcagattctcgtttgattgcggccaaaggttcaccgattcagccaacgctggattcactgaaaggtaaacatgttggtgtgctgcagggatcaacccaggaagcttacgctaacgagacctggcgtagtaaaggcgtggatgtggtggcctatgccaaccaggatttggtctattccgatctggctgcaggacgtctggatgctgcgttacaagatgaagttgctgccagcgaaggattcctcaagcaacctgctggtaaagatttcgcctttgctggctcatcagtaaaagacaaaaaatacttcggtgatggcaccggtgtagggctacgtaaagatgatgctgaactgacggctgccttcaataaggcgcttggcgagctgcgtcaggacggcacctacgacaagatggcgaaaaagtatttcgactttaatgtctacggtgactga

SEQ ID NO: 3114 - protein, 260 aa, Escherichia coli
MKKSILALSLLVGLSTAASSYAALPETVRIGTDTTYAPFSSKDAKGDFVGFDIDLGNEMCKRMQVKCTWVASDFDALIPSLKAKKIDAIISSLSITDKRQQEIAFSDKLYAADSRLIAAKGSPIQPTLDSLKGKHVGVLQGSTQEAYANETWRSKGVDVVAYANQDLVYSDLAAGRLDAALQDEVAASEGFLKQPAGKDFAFAGSSVKDKKYFGDGTGVGLRKDDAELTAAFNKALGELRQDGTYDKMAKKYFDFNVYGD

SEQ ID NO: 3115 - DNA, 783 bp, Salmonella typhimurium
  CDS (1)..(783): transl_table=11
atgaagaagaccgttctcgctttgtctttgctgataggtctgggcgcgacggcggccagttacgccgcgctcccgcaaacggttcgtattggaacagataccacctacgcgcctttctcatcaaaagatgccaaaggcgagtttattggctttgatatcgatctcggtaatgaaatgtgtaagcgtatgcaggtgaaatgtacctgggtcgccagcgactttgatgcgcttattccctcactaaaagcgaaaaaaattgatgccattatttcatcgctctctatcaccgataaacgccagcaagaaattgcgttttccgacaaactttacgcggcggattcacgcctgattgcggcaaaagggtctcccattcagccgacgctggaatcgctgaaaggcaagcatgtcggcgtgctgcaagggtccacgcaagaggcttacgccaatgataactggcgcactaaaggtgtggatgtggtggcttatgccaaccaggatcttatctattccgatttaaccgccggtcgtctggatgccgcattacaggatgaagtcgccgccagcgaaggtttcctgaagcagccagcgggcaaagagtatgcgtttgccggtccttccgtgaaggataaaaaatattttggcgacgggacgggggttgggctgcgtaaagatgataccgagctaaaagccgcgtttgataaagcgctgaccgaactgcgccaggacggaacttacgacaaaatggccaaaaagtacttcgattttaatgtttacggcgattga

SEQ ID NO: 3116 - protein, 260 aa, Salmonella typhimurium
MKKTVLALSLLIGLGATAASYAALPQTVRIGTDTTYAPFSSKDAKGEFIGFDIDLGNEMCKRMQVKCTWVASDFDALIPSLKAKKIDAIISSLSITDKRQQEIAFSDKLYAADSRLIAAKGSPIQPTLESLKGKHVGVLQGSTQEAYANDNWRTKGVDVVAYANQDLIYSDLTAGRLDAALQDEVAASEGFLKQPAGKEYAFAGPSVKDKKYFGDGTGVGLRKDDTELKAAFDKALTELRQDGTYDKMAKKYFDFNVYGD

SEQ ID NO: 3117 - DNA, 783 bp, Escherichia coli O157
  CDS (1)..(783): transl_table=11
atgaaaaaactggtgctatcgctctctctggttctggccttctccagcgcaactgcggcatttgctgcgattccgcaaaacatccgcatcggtaccgacccgacctatgcgccatttgaatcaaaaaattcacaaggcgaactggttggcttcgatatcgatctggcaaaggaattatgcaaacgcatcaatacgcaatgtacgtttgtcgaaaatccgctggatgcgttaatcccgtccttaaaagcgaagaagattgacgccatcatgtcatcgctttccattacggaaaaacgtcagcaagaaatagccttcaccgacaaactgtacgctgccgattctcgtctggtggtggcgaaaaattctgacattcagccgacagtcgagtcgctgaaaggcaaacgggtaggcgtattgcagggcactacccaggagacgttcggtaatgaacattgggcaccaaaaggcattgaaatcgtctcgtatcaggggcaggacaacatttattctgacctgactgccggacgtattgatgccgcgttccaggatgaggtcgctgccagcgaaggtttcctcaaacaacctgtcggtaaagattacaaattcggtggcccgtctgttaaagatgaaaaactgtttggcgtagggaccggcatgggcctgcgtaaagaagataacgaactgcgcgaggcactgaacaaagcctttgccgaaatgcgcgctgacggtacttacgagaaattagcgaaaaagtacttcgattttgatgtttatggtggttaa

SEQ ID NO: 3118 - protein, 260 aa, Escherichia coli O157; identical to SEQ ID NO: 2982

SEQ ID NO: 3119 - DNA, 783 bp, Salmonella typhimurium
  CDS (1)..(783): transl_table=11
atgaaaaaactggcgttatccctttctctggtgctggcattttccagcgctaccgcagcatttgccgctattccacaaaagattcgcatcggtaccgatcctacatacgcaccgtttgaatccaaaaatgcacaaggtgaattggtcggctttgatatcgatctggccaaagagctgtgcaaacgtatcaacacacagtgtacgttcgtggaaaacccgctggatgcgctgattccgtctttaaaagcgaagaaaattgatgccatcatgtcctcgctgtccatcactgaaaagcgccagcaggaaatcgcgtttaccgacaagctttacgccgctgattcccgtctggtggtggcgaagaactctgatattcagccgaccgtcgcgtcgctgaaaggcaagcgcgtcggcgtgctacaggggacgacgcaggagaccttcggcaatgagcactgggcgccgaaagggattgagatcgtctcttaccaggggcaggacaacatttattccgacctgacggctggccgtattgatgcggcgttccaggacgaggtcgcggccagcgaaggtttccttaaacagcccgtcggaaaagactataaattcggcggcccggcggtgaaagatgagaagttattcggcgtaggaaccggtatggggctgcgcaaagaggataacgagctgcgcgaagcgctgaacaaagcctttgctgaaatgcgtgctgacggtacttacgaaaagctggcgaaaaagtactttgattttgatgtttatggcggttaa

SEQ ID NO: 3120 - protein, 260 aa, Salmonella typhimurium
MKKLALSLSLVLAFSSATAAFAAIPQKIRIGTDPTYAPFESKNAQGELVGFDIDLAKELCKRINTQCTFVENPLDALIPSLKAKKIDAIMSSLSITEKRQQEIAFTDKLYAADSRLVVAKNSDIQPTVASLKGKRVGVLQGTTQETFGNEHWAPKGIEIVSYQGQDNIYSDLTAGRIDAAFQDEVAASEGFLKQPVGKDYKFGGPAVKDEKLFGVGTGMGLRKEDNELREALNKAFAEMRADGTYEKLAKKYFDFDVYGG

SEQ ID NO: 3121 - DNA, 24 bp, Artificial sequence
  primer
atgaaaaaactggtgctatcgctc

SEQ ID NO: 3122 - DNA, 25 bp, Artificial sequence
  primer
ttagccaccataaacatcaaaatcg

SEQ ID NO: 3123 - protein, 241 aa, Artificial sequence
  consensus sequence
  Variant (2)..(4): Xaa in position 2 to 4 is any amino acid
  Variant (5)..(7): Xaa in position 5 to 7 is any or no amino acid
  Variant (9)..(9): Xaa in position 9 is any amino acid
  Variant (11)..(14): Xaa in position 11 to 14 is any amino acid
  Variant (16)..(16): Xaa in position 16 is any amino acid
  Variant (19)..(20): Xaa in position 19 to 20 is any amino acid
  Variant (22)..(24): Xaa in position 22 to 24 is any amino acid
  Variant (26)..(28): Xaa in position 26 to 28 is any amino acid
  Variant (32)..(32): Xaa in position 32 is any amino acid
  Variant (34)..(38): Xaa in position 34 to 38 is any amino acid
  Variant (40)..(45): Xaa in position 40 to 45 is any amino acid
  Variant (47)..(53): Xaa in position 47 to 53 is any amino acid
  Variant (55)..(56): Xaa in position 55 to 56 is any amino acid
  Variant (59)..(59): Xaa in position 59 is any amino acid
  Variant (61)..(63): Xaa in position 61 to 63 is any amino acid
  Variant (65)..(65): Xaa in position 65 is any amino acid
  Variant (67)..(69): Xaa in position 67 to 69 is any amino acid
  Variant (72)..(74): Xaa in position 72 to 74 is any amino acid
  Variant (76)..(77): Xaa in position 76 to 77 is any amino acid
  Variant (79)..(83): Xaa in position 79 to 83 is any amino acid
  Variant (85)..(99): Xaa in position 85 to 99 is any amino acid
  Variant (101)..(107): Xaa in position 101 to 107 is any amino acid
  Variant (108)..(110): Xaa in position 108 to 110 is any or no amino acid
  Variant (115)..(116): Xaa in position 115 to 116 is any amino acid
  Variant (119)..(120): Xaa in position 119 to 120 is any amino acid
  Variant (122)..(127): Xaa in position 122 to 127 is any amino acid
  Variant (129)..(133): Xaa in position 129 to 133 is any amino acid
  Variant (134)..(135): Xaa in position 134 to 135 is any or no amino acid
  Variant (137)..(141): Xaa in position 137 to 141 is any amino acid
  Variant (143)..(144): Xaa in position 143 to 144 is any amino acid
  Variant (146)..(148): Xaa in position 146 to 148 is any amino acid
  Variant (150)..(150): Xaa in position 150 is any amino acid
  Variant (153)..(154): Xaa in position 153 to 154 is any amino acid
  Variant (157)..(157): Xaa in position 157 is any amino acid
  Variant (160)..(162): Xaa in position 160 to 162 is any amino acid
  Variant (164)..(169): Xaa in position 164 to 169 is any amino acid
  Variant (173)..(176): Xaa in position 173 to 176 is any amino acid
  Variant (178)..(181): Xaa in position 178 to 181 is any amino acid
  Variant (182)..(183): Xaa in position 182 to 183 is any or no amino acid
  Variant (185)..(186): Xaa in position 185 to 186 is any amino acid
  Variant (187)..(188): Xaa in position 187 to 188 is any or no amino acid
  Variant (190)..(193): Xaa in position 190 to 193 is any amino acid
  Variant (195)..(195): Xaa in position 195 is any amino acid
  Variant (196)..(196): Xaa in position 196 is any or no amino acid
  Variant (198)..(202): Xaa in position 198 to 202 is any amino acid
  Variant (205)..(205): Xaa in position 205 is any amino acid
  Variant (207)..(207): Xaa in position 207 is any amino acid
  Variant (208)..(208): Xaa in position 208 is any or no amino acid
  Variant (210)..(215): Xaa in position 210 to 215 is any amino acid
  Variant (217)..(223): Xaa in position 217 to 223 is any amino acid
  Variant (227)..(238): Xaa in position 227 to 238 is any amino acid
  Variant (239)..(240): Xaa in position 239 to 240 is any or no amino acid
AXXXXXXRXGXXXXYXPFXXKXXXGXXXGFDXDXXXXXCXXXXXXCXXXXXXXDXXIPXLXXXKXDXXXSSXXXTXXRXXXXXFXXXXXXXXXXXXXXXGXXXXXXXXXXLKGKXXGVXXGXXXXXXAXXXXXXXGXXXXXYXXQXXXYXDLXXGRXDAXXXDXXXXXXGFLXXXXGXXXXXXGXXXXDXXXXGXXGXXXXXRKXDXXLXXXXXXAXXXXXXXGTYXXXXXXXXXXXXXXY

SEQ ID NO: 3124 - protein, 60 aa, Artificial sequence
  protein pattern
  Variant (2)..(2): Xaa in position 2 is any or no amino acid
  Variant (4)..(4): Xaa in position 4 is any or no amino acid
  Variant (6)..(6): Xaa in position 6 is Ala, Glu, Asn or Ser
  Variant (7)..(8): Xaa in position 7 to 8 is any amino acid
  Variant (9)..(9): Xaa in position 9 is Ala, Asp, Glu, Gly, Asn, Gln or Thr
  Variant (10)..(10): Xaa in position 10 is Ala, Asp, Pro, Ser or Thr
  Variant (11)..(11): Xaa in position 11 is any amino acid
  Variant (13)..(13): Xaa in position 13 is any amino acid
  Variant (14)..(14): Xaa in position 14 is Phe, Ile, Leu or Val
  Variant (15)..(15): Xaa in position 15 is any amino acid
  Variant (19)..(19): Xaa in position 19 is any amino acid
  Variant (21)..(21): Xaa in position 21 is Ile, Leu, Met or Val
  Variant (22)..(23): Xaa in position 22 to 23 is any amino acid
  Variant (24)..(24): Xaa in position 24 is Ala or Glu
  Variant (25)..(25): Xaa in position 25 is Ile, Leu, Met or Val
  Variant (27)..(32): Xaa in position 27 to 32 is any amino acid
  Variant (34)..(37): Xaa in position 34 to 37 is any amino acid
  Variant (38)..(38): Xaa in position 38 is Gly, Asn, Gln, Ser or Thr
  Variant (39)..(40): Xaa in position 39 to 40 is any amino acid
  Variant (42)..(42): Xaa in position 42 is Ala or Gly
  Variant (43)..(43): Xaa in position 43 is Ile, Leu or Met
  Variant (46)..(46): Xaa in position 46 is Ala, Gly or Ser
  Variant (48)..(48): Xaa in position 48 is any amino acid
  Variant (49)..(49): Xaa in position 49 is Ala, Gly or Val
  Variant (50)..(50): Xaa in position 50 is any amino acid
  Variant (52)..(52): Xaa in position 52 is any amino acid
  Variant (54)..(54): Xaa in position 54 is any amino acid
  Variant (55)..(55): Xaa in position 55 is Ala, Ile or Val
  Variant (56)..(56): Xaa in position 56 is any amino acid
  Variant (57)..(57): Xaa in position 57 is Ala or Ser
  Variant (58)..(58): Xaa in position 58 is Ala, Asp or Ser
  Variant (59)..(59): Xaa in position 59 is Ile, Leu or Met
  Variant (60)..(60): Xaa in position 60 is Ala, Asn, Ser or Thr
YXPXFXXXXXXGXXXGFDXDXXXXXCXXXXXXCXXXXXXXDXXIPXLXXXKXDXXXXXXX

SEQ ID NO: 3125 - protein, 28 aa, Artificial sequence
  protein pattern
  Variant (2)..(2): Xaa in position 2 is Asp, Asn or Gln
  Variant (3)..(3): Xaa in position 3 is any amino acid
  Variant (4)..(4): Xaa in position 4 is Ala, Ile or Val
  Variant (5)..(6): Xaa in position 5 to 6 is any amino acid
  Variant (8)..(8): Xaa in position 8 is Ile, Leu, Met or Val
  Variant (9)..(10): Xaa in position 9 to 10 is any amino acid
  Variant (13)..(13): Xaa in position 13 is Ile or Leu
  Variant (15)..(15): Xaa in position 15 is Ala or Gly
  Variant (16)..(16): Xaa in position 16 is any amino acid
  Variant (17)..(17): Xaa in position 17 is Phe, Ile, Leu or Val
  Variant (18)..(22): Xaa in position 18 to 22 is any amino acid
  Variant (23)..(23): Xaa in position 23 is Ala, Gly or Leu
  Variant (24)..(24): Xaa in position 24 is Ala, Asp, Glu, Asn, Gln or Ser
  Variant (25)..(25): Xaa in position 25 is any amino acid
QXXXXXDXXXGRXDXXXXXXXXXXXGFL

SEQ ID NO: 3126 - protein, 26 aa, Artificial sequence
  protein pattern
  Variant (2)..(2): Xaa in position 2 is any or no amino acid
  Variant (4)..(4): Xaa in position 4 is any amino acid
  Variant (5)..(5): Xaa in position 5 is Ala, Ile or Val
  Variant (8)..(8): Xaa in position 8 is any amino acid
  Variant (9)..(9): Xaa in position 9 is Gln, Arg or Ser
  Variant (10)..(10): Xaa in position 10 is Ala, Gly or Ser
  Variant (11)..(11): Xaa in position 11 is Ala, Ser or Thr
  Variant (12)..(13): Xaa in position 12 to 13 is any amino acid
  Variant (14)..(14): Xaa in position 14 is Ala, Asp or Glu
  Variant (15)..(15): Xaa in position 15 is any amino acid
  Variant (16)..(16): Xaa in position 16 is Phe, Trp or Tyr
  Variant (17)..(17): Xaa in position 17 is Ala, Gly or Leu
  Variant (18)..(24): Xaa in position 18 to 24 is any amino acid
  Variant (26)..(26): Xaa in position 26 is Ala, Ile or Val
GXKXXGVXXXXXXXXXXXXXXXXXGX

SEQ ID NO: 3127 - protein, 26 aa, Artificial sequence
  protein pattern
  Variant (2)..(4): Xaa in position 2 to 4 is any amino acid
  Variant (5)..(5): Xaa in position 5 is Phe, Ile, Leu or Val
  Variant (6)..(6): Xaa in position 6 is Asp, Asn, Thr or Val
  Variant (7)..(7): Xaa in position 7 is any amino acid
  Variant (8)..(8): Xaa in position 8 is Ala or Gly
  Variant (9)..(9): Xaa in position 9 is Phe, Ile or Leu
  Variant (10)..(11): Xaa in position 10 to 11 is any amino acid
  Variant (12)..(12): Xaa in position 12 is Ile, Leu, Met or Val
  Variant (13)..(15): Xaa in position 13 to 15 is any amino acid
  Variant (17)..(20): Xaa in position 17 to 20 is any amino acid
  Variant (21)..(21): Xaa in position 21 is Phe, Ile, Leu, Met or Val
  Variant (22)..(23): Xaa in position 22 to 23 is any amino acid
  Variant (25)..(25): Xaa in position 25 is His, Trp or Tyr
LXXXXXXXXXXXXXXGXXXXXXXKXF

SEQ ID NO: 3128 - protein, 21 aa, Artificial sequence
  protein pattern
  Variant (2)..(2): Xaa in position 2 is Asp, Glu or Pro
  Variant (3)..(3): Xaa in position 3 is any amino acid
  Variant (5)..(6): Xaa in position 5 to 6 is any amino acid
  Variant (7)..(7): Xaa in position 7 is Ala, Glu, Asn, Gln or Ser
  Variant (8)..(8): Xaa in position 8 is Ile or Val
  Variant (9)..(9): Xaa in position 9 is any amino acid
  Variant (11)..(11): Xaa in position 11 is Ser or Thr
  Variant (12)..(18): Xaa in position 12 to 18 is any amino acid
  Variant (19)..(19): Xaa in position 19 is Ala, Gly, Asn, Pro, Ser or Thr
  Variant (20)..(20): Xaa in position 20 is any amino acid
  Variant (21)..(21): Xaa in position 21 is Phe, Leu, Met or Val
TXXRXXXXXFXXXXXXXXXXX

SEQ ID NO: 3129 - protein, 14 aa, Artificial sequence
  protein pattern
  Variant (2)..(5): Xaa in position 2 to 5 is any or no amino acid
  Variant (7)..(7): Xaa in position 7 is any amino acid
  Variant (9)..(9): Xaa in position 9 is any amino acid
  Variant (10)..(10): Xaa in position 10 is Ala or Gly
  Variant (11)..(11): Xaa in position 11 is Phe, Ile, Met or Val
  Variant (12)..(12): Xaa in position 12 is Ala or Gly
  Variant (13)..(13): Xaa in position 13 is Leu or Val
DXXXXGXGXXXXXR

SEQ ID NO: 3130 - DNA, 1701 bp, Escherichia coli K12
  CDS (1)..(1701): transl_table=11
gtgattgttaaacgacccgtctcggccagtctggcccgggcctttttttacattgtgctgctgtcgattctttccacgggtatcgctctgctaactctggcgagcagtttgcgcgacgctgaggctatcaatattgccggatcgctgcgtatgcagagttaccgcctgggctacgacttgcaaagtggcagtccacaactcaatgcacatcgccagttatttcagcaggcactgcattcaccggtattaaccaacctcaacgtctggtatgtgccagaagcagtaaaaactcgctatgcgcatctgaatgccaactggctggagatgaataatcggctcagcaagggcgatttgccgtggtatcaggccaatattaataattatgttaatcagatagacctgttcgtactggctttacagcactacgctgaacgcaaaatgctgctggtggtggcgatttccctggctggcggcatcggtattttcacgctggtcttttttactttgcgccgcatacgccatcaggtggttgccccgctgaatcagctggttaccgccagtcagcgtattgaacacgggcagttcgactcgccgccgctggataccaacctgccgaatgagcttggtctgcttgcaaaaacctttaaccagatgtcgagcgagctgcataaattgtaccgttcgctggaagcgtcagtagaagaaaagacccgcgatctccacgaggccaagcgtcgtctggaggtgttgtatcagtgttcgcaggcgctgaacactagccagattgatgtgcattgtttccgccatattttgcagattgttcgcgacaatgaagcggctgaatatctggagttaaatgtcggtgaaaactggcggattagcgaagggcaaccaaacccggaattgccgatgcagattttaccggtgacaatgcaagagacggtttacggcgaactgcactggcaaaatagtcacgtttcatcatcagaaccgctgcttaacagcgtttcgtcgatgctgggacgcggtttgtactttaatcaggcgcagaagcattttcagcaattattgttgatggaagaacgtgcgaccatcgcccgcgaattgcacgactcgctggctcaggtactttcttacttacgtatccagttgacgttactgaagcgttcgataccggaagataacgccaccgcacaaagtatcatggccgatttttcccaggcgttgaatgatgcttatcggcagttacgcgagctgttgactactttccgcctgacgctgcagcaggcggatctcccctccgcattgagggaaatgctggatacgttacaaaatcaaaccagcgccaaactgaccctcgactgccgtctgccaaccctggcactggatgcgcaaatgcaggtgcatttgttgcaaattattcgcgaagcggtgctgaatgcgatgaagcacgccaacgccagcgaaatcgccgtcagttgcgtcaccgcgccggacggcaatcacacggtttatatccgtgataacgggattggtatcggtgaaccgaaagaacccgaaggtcattatggtctgaatatcatgcgcgaacgcgcggaacggctaggtgggacgctgactttttcacaaccttccggcggcggcacgttagtgagtattagctttcgctctgcggagggtgaggaaagtcagttaatgtaa

SEQ ID NO: 3131 - protein, 566 aa, Escherichia coli K12
MIVKRPVSASLARAFFYIVLLSILSTGIALLTLASSLRDAEAINIAGSLRMQSYRLGYDLQSGSPQLNAHRQLFQQALHSPVLTNLNVWYVPEAVKTRYAHLNANWLEMNNRLSKGDLPWYQANINNYVNQIDLFVLALQHYAERKMLLVVAISLAGGIGIFTLVFFTLRRIRHQVVAPLNQLVTASQRIEHGQFDSPPLDTNLPNELGLLAKTFNQMSSELHKLYRSLEASVEEKTRDLHEAKRRLEVLYQCSQALNTSQIDVHCFRHILQIVRDNEAAEYLELNVGENWRISEGQPNPELPMQILPVTMQETVYGELHWQNSHVSSSEPLLNSVSSMLGRGLYFNQAQKHFQQLLLMEERATIARELHDSLAQVLSYLRIQLTLLKRSIPEDNATAQSIMADFSQALNDAYRQLRELLTTFRLTLQQADLPSALREMLDTLQNQTSAKLTLDCRLPTLALDAQMQVHLLQIIREAVLNAMKHANASEIAVSCVTAPDGNHTVYIRDNGIGIGEPKEPEGHYGLNIMRERAERLGGTLTFSQPSGGGTLVSISFRSAEGEESQLM

SEQ ID NO: 3132 - DNA, 1752 bp, Vibrio cholerae O1 biovar eltor str. N16961
  CDS (1)..(1752): transl_table=11
ttggttatcaatcagagagagactgcattgttcactccagtacgacattcattaacccgtactatggcgaaagccatgttattgattttgtttctctcggcattgacgactggggtcgccattgtcactttggcgtcttctttgaatgatgcagaagcggtaaacgtctccggctctatgcgcatgcagagttatcgtttggcgtatgacatccaaacccaatcccatgactacaaggcgcatatttttctgtttgaaaactcactgtactcaccctccatgctcgctttgctcgactggacggtacccagtgacattcaacaagattactaccagctgattgagcgctggcatgagctcaaaaaagtgcttaatagtgaccaaaaagcgcaatatcttgaccaagttgcgccttttgtcagcttagtggatggctttgtactcaagttacagcgcttttctgagcgtaaattgattgcgttagctgcagtaggcagttttggtttaggcgggatttttgcggtatccctctttgtggtgtattacatccgggagcaggtcgtgcggccgctcaatgccatggttgatgccagcgaaaagatcaaaaatcgaaattttgatgtcatgctggaggagaccagcagcactgaaatggggatcctcagccgaacgtttaacagcatggcgggcgatcttggcaaactttatcgcgggctagagcacgcagtgaatgagaaaaccaacaagctgcaaatggccaatcaatcgctgcaggtcttgtatcactcttcgcaagagttgacggcttcacggatcacggcgagtaacttccaaaccattttgcgccattgggtcgcgttggaagggatttgtgctcttcgattagaaattgaagaggaagctggcaagccattgattttgcaagaaggaaagccaagcggtgccgtgatgttgcaaacaccactcaccttagatggtcatcatcttggctttttgtattgggaagcgggttcgcctgagccagatcgggctttgattgataactttgcgctgatattgtcgcgcgcgatttactacaatcaagcgcagcgccaagcagagcaactgctgttaatggaagagcgagccaccatagcgcgagaactgcatgattcgcttgctcaatcgctctcttatttaaagatccagttaaccttgctgaaacgttccgtcacgccgttaaagtcggatggcgatttaagtaagacggaaaacatcattcgcgagatagacaaaggtctgtcggatgcttatacccagttgcgtgaactactcaccaccttccgcctgaccttaaccgaaggcagttttggtcaatctctactgggtatgctgactcaactttcggggcaaaccgatgcgaaaattgaactcaataacgcgctttcctcaattgcgctggatgctcatcagcaagtgcatttggtgcagttgattcgtgaagcaacgattaacgcgataaagcacgccaaggccactaaaattaaggtcaactgccaagagcagcagggacgagtccaagtcacgattgaagatgatggggttggcttcgatctgcaagatcacaagatcaatcactatggtatgagcataatgcaagaacgcgccgcccgtttacgtggtgaattaaaggttgaatccgctccgggtaaaggctgcaaagtggtgctgacttaccaacaaagcgaggagaaaaataagaatgagttgtag

SEQ ID NO: 3133 - protein, 583 aa, Vibrio cholerae O1 biovar eltor str. N16961
MVINQRETALFTPVRHSLTRTMAKAMLLILFLSALTTGVAIVTLASSLNDAEAVNVSGSMRMQSYRLAYDIQTQSHDYKAHIFLFENSLYSPSMLALLDWTVPSDIQQDYYQLIERWHELKKVLNSDQKAQYLDQVAPFVSLVDGFVLKLQRFSERKLIALAAVGSFGLGGIFAVSLFVVYYIREQVVRPLNAMVDASEKIKNRNFDVMLEETSSTEMGILSRTFNSMAGDLGKLYRGLEHAVNEKTNKLQMANQSLQVLYHSSQELTASRITASNFQTILRHWVALEGICALRLEIEEEAGKPLILQEGKPSGAVMLQTPLTLDGHHLGFLYWEAGSPEPDRALIDNFALILSRAIYYNQAQRQAEQLLLMEERATIARELHDSLAQSLSYLKIQLTLLKRSVTPLKSDGDLSKTENIIREIDKGLSDAYTQLRELLTTFRLTLTEGSFGQSLLGMLTQLSGQTDAKIELNNALSSIALDAHQQVHLVQLIREATINAIKHAKATKIKVNCQEQQGRVQVTIEDDGVGFDLQDHKINHYGMSIMQERAARLRGELKVESAPGKGCKVVLTYQQSEEKNKNEL

SEQ ID NO: 3134 - DNA, 1707 bp, Pasteurella multocida subsp. multocida str. Pm70
  CDS (1)..(1707): transl_table=11
gtgaaaatcaagcactctgtttctactaaaatcgcaaattacctctttatcatcatgatttttgcgggcgtcattacgagtctcagcttgatgatcatggctagcaataaatctgatgccgaatccattaacgtgtccggttcattacgtatgcaaagctatcgtttattacatgagctggaacatcatcccgaactggtcgaaaccggtttacgccaatatcgcatcagcttacattcccccgccctactggaaattgatcaatggtttgttcctgacgaagtcaaacagtcttaccaccagctgatcaagcgctgggaacgcatggagcgctatgcgaaacaacgtgaaatcaacgcctataaaaacgaaattgcagattatgtggcacaagtcgatcaatttgtctttaccctacaacgctttgcggagaagaagtggattatcgcggtcttgatcatgtcattatccatgctgtcgattattgcgatggtggcttatgtggtgtggtatgcgcgtaaagaagtcgttatgccccttaaacaactcacgcaagccagtattcaagtgcaaatgcgccaatttagccatgtcaaagtcgatacacaaaaagaagatgaattgggtaacttagcccgggcgtttagccaaatgtcgagtgaactagaaaagctgtattcctcattagaagagagtgtgaatgaaaaaacccaaaagttacgtcaaacaaaccgctctttaactatgctgtatgaaagttcgcaacagcttactaccacgaatgtggatgaaagtatcttacagcacgtgttaaaaaatatctttattagcgagcatttacgttatatggcattagtggtcgaaggggctgagcactggaatatccgttttgggcaaaaacaagccaatcaagattgccaagaagtgacattacaaattgaagacgaaaaactggcagtgctgtattggcaagctggatttccctgtcctgacccacggaccatgcgcaatattgcacaaattttaagccgtactctgtatttccataaaactcaacgtcaacaacaacaattgctgttaatggaggaacgcgccatcattgcacgggaattgcacgattctttagcgcaagtgttagcatttttgcaaattcagctaacgttgctcaaacataacatcaatcaaaaaagtgaagaagcggctcaacaaagtatcaatatcattgccagttttgaacaagccttgcgtgatggctatgtgcaactgcgcgaattgttagccactttccgtttgactgtacaagaagccaatttgaaattagcgctcgagcaagtggttgactctttacgaaatcaaaccgacattcaaatgtgcgtgcaatgttcactgcccgcacaaagttttaacgcgaaacaattagtccacattttacagattgtgcgtgagtcggtcttaaatgcgattaagcattcaaaaggcaacaggatcgaggtcatcgctcacatcaatgaagacggtgaatatgagtttattgtgcgcgacgatgggattggtatccccagtttagaagaaccagaagggcattatggtttaaatatcatgcacgaacgtgctacacaacttaatgcacatttacgcattgcaaaccgcccgtctgggggaactgaaatcaaactgacattacatcaaaataggaatctgacatga

SEQ ID NO: 3135 - protein, 568 aa, Pasteurella multocida subsp. multocida str. Pm70
MKIKHSVSTKIANYLFIIMIFAGVITSLSLMIMASNKSDAESINVSGSLRMQSYRLLHELEHHPELVETGLRQYRISLHSPALLEIDQWFVPDEVKQSYHQLIKRWERMERYAKQREINAYKNEIADYVAQVDQFVFTLQRFAEKKWIIAVLIMSLSMLSIIAMVAYVVWYARKEVVMPLKQLTQASIQVQMRQFSHVKVDTQKEDELGNLARAFSQMSSELEKLYSSLEESVNEKTQKLRQTNRSLTMLYESSQQLTTTNVDESILQHVLKNIFISEHLRYMALVVEGAEHWNIRFGQKQANQDCQEVTLQIEDEKLAVLYWQAGFPCPDPRTMRNIAQILSRTLYFHKTQRQQQQLLLMEERAIIARELHDSLAQVLAFLQIQLTLLKHNINQKSEEAAQQSINIIASFEQALRDGYVQLRELLATFRLTVQEANLKLALEQVVDSLRNQTDIQMCVQCSLPAQSFNAKQLVHILQIVRESVLNAIKHSKGNRIEVIAHINEDGEYEFIVRDDGIGIPSLEEPEGHYGLNIMHERATQLNAHLRIANRPSGGTEIKLTLHQNRNLT

SEQ ID NO: 3136 - DNA, 1869 bp, Pseudomonas aeruginosa PAO1
  CDS (1)..(1869): transl_table=11
atgaacaaggcgaccgcgccggacgctgaccagcgggacagattctttggaggtagtgacagggccggaaagccgatcctgcgccgctccctggtagtccgcttcggctgctacctcaccctgctggtatcgctggcgctgatcgggatgttcagcgccctgctcttcgccgactacacgcaccaggacgccgcggtgatcaaccacgccggctcgttgcgcatgctcacctaccgggtcgccctggagcccagcctggaaggccgccaggcgctgctcgggaccctcggcgaacgcctcgacagcggcgacatccgccgcctgctgcaacgccaggacgccgacgacccgatccgccagttgcaccaggagctgcgcgagggcctcgcgcgcctggacccgcgcgcgctgcccggacgcgccgtgctggacgcctacgtcggcgacatcgaccgtttcgtcggcatcctccaggccaaggccgagcgccgctcgcaactgctcagcacggtgcagggcctgtgcctgttcctcagcctgctggtggtgttcgtcaccctctacgacctcagctatcacgtcatcggcccgctgcgcgaactcaccagcaccgcccgccgcctgggccgcggcgagctggacgcgcgggtcacctacagcggcgaggacgaactggcgcaactgggcgagcgcttcaaccagatggccggcgagctgaagagcatctacggcgacctggaagagcgcgtggaggacaagacccgcgccctctcgcagagccaccagcgcctcgaactgctctacgccagcgcccgccggctgggcgagaacccctacgacagccgcaccctgcaaccgctgctgaaccagttggagaaagtgctcgacgccggccgcgtgaccctctgcctgaacaaggacggggtcgagcgcgcctacagttcgctgaccaccaccgagcgcccggcggacttctgcctgcagggcgactgcggtagctgccgcgagcaggccagcgcctgcgaccaaccctcgtccctggcccagccattgctgatgcagcccctgtccatcgccggccaccgtttcggcgaactgttcatcgaaagccgcagcggccgcctggagaactggcagcagcaactgatcgagaccttctgcgacaacatcgcccgcaccttcgccctgtccctgcaacaggaacaggaaagccgcctggccctgttcgccgagcgcggcaccatcgcccgcgaactgcacgattcgctggcacagtcgctgtcctacctgaagatccaggtcagccgcctgggcaccctgctcaagcgcgaggcgccggcggagaagatcgaggacaccctcgacgaactgcgcgaaggcctcaacggcgcctaccggcaactgcgcgaactgctcaccaccttccgcctcagcctcgacgagccgagcctggaagccgcgctggggaacgccgtggccgagttcggcgagcgcggcgaggtgacgatcgaactggacaaccgcctgcaacacgtgccgctgagccccaacgaggaaatccacgtcctgcagatcgtccgcgaggcgctctccaacgtggttcgccattcgcaggcgcaacgggcctgggtgcgcctgagcagccaggccgacggccaggtgagcatcgccgtcgaggacgatggcgtcggctttgatccgcagcagaaccgcagcggccattatgggcttaccatcatgcaggagcgcggccagaccctcggcagccagttgcgcttcgaagcgcgcgcgccccacggcacgcgagtgctcttcagcttcgtgccgaccgccctgcaaccctccgccgccaaggagccgaccccatga

SEQ ID NO: 3137 - protein, 622 aa, Pseudomonas aeruginosa PAO1
MNKATAPDADQRDRFFGGSDRAGKPILRRSLVVRFGCYLTLLVSLALIGMFSALLFADYTHQDAAVINHAGSLRMLTYRVALEPSLEGRQALLGTLGERLDSGDIRRLLQRQDADDPIRQLHQELREGLARLDPRALPGRAVLDAYVGDIDRFVGILQAKAERRSQLLSTVQGLCLFLSLLVVFVTLYDLSYHVIGPLRELTSTARRLGRGELDARVTYSGEDELAQLGERFNQMAGELKSIYGDLEERVEDKTRALSQSHQRLELLYASARRLGENPYDSRTLQPLLNQLEKVLDAGRVTLCLNKDGVERAYSSLTTTERPADFCLQGDCGSCREQASACDQPSSLAQPLLMQPLSIAGHRFGELFIESRSGRLENWQQQLIETFCDNIARTFALSLQQEQESRLALFAERGTIARELHDSLAQSLSYLKIQVSRLGTLLKREAPAEKIEDTLDELREGLNGAYRQLRELLTTFRLSLDEPSLEAALGNAVAEFGERGEVTIELDNRLQHVPLSPNEEIHVLQIVREALSNVVRHSQAQRAWVRLSSQADGQVSIAVEDDGVGFDPQQNRSGHYGLTIMQERGQTLGSQLRFEARAPHGTRVLFSFVPTALQPSAAKEPTP

SEQ ID NO: 3138 - DNA, 1782 bp, Yersinia pestis CO92
  CDS (1)..(1782): transl_table=11
atgaaacgttatctgaccccattggttaatcagattgctttgttgatgatactgctgggcatgctagggctggcgggtatggttatttcatcatggatggcacaaagcattcagggcaatgcccacgccatcaaccaagcaggctcattgcgtatgcagagctacaggttactttcaatgatccctttggatagcaatgagttatcttatctggtggcattggagcaagacaaaaccagtcacgacctgcaacaagcgctactgcgggaagggttaatgggtcaatatcagcaaattgaacgttactggcaagacacgctgaagcctcagttacaacaggccaaacaccctgatgaggtggcggccagtgtggcggattttgttcaccaacttgatgctttggtattagccattgaccataaaactgaacaacggctgttacaggttaccctgatcccgctggtattcagccttctgacactcagcctattgttggcaatgatctattatttgcgccgccggttactgcgcccttggctgaagttaatctcaatggcgaatgccattggccgaggtgattttagccaacgctatacgctggactatcagcgtgacgaaatggggatgctgggtacggcattgaatcgaatgtcgcaagaattgtcattgatctacggcgatcttgagcagcgagtcgtaaataaaaccgctgatttacaacagaaaaatcaggttttggcgttcctttatcacagtagccgccaactgcatactcatcagccattaagtgagcgtttagcccctgtcattgaacagctacaagcgttaaccacgctagaaaatgtacaaatttgtttgtatgaaaaccatctgtatcgtgaccatgtcaatcacaatgcggatgcagaatatctgatgcctaaaaaccgcccggcgtcattaacgatcagcggccctgttcgccccatcagccaccctgagttatggcaatcactgagttggagtttaagcgataaactcggtcaatatggtttattactggcaaaacaacccctcgataaccccctcaattctgaccagcagcaactggtcgatatgttagttgagcaactgaccagcacactggcgttagagagccaagccaaacatcagcaacagttattgttaatggaggagcgttccgccattgcgcgggaactgcatgactcaatcgctcaatccctttcctgcctgaagatacagatcagctgtttgcaaatgcaaactccggacttaccggaaaacagcaacctattgataaaacaaatgcgtgatgaactcaatatcgcctaccgtcaattacgtgagttactgaccacattccgtctgaaactaaatgaagccactctggaggccgcgttacaggctctggtgaatgagttcagcgaaagagctggtctatcgattaccttcaaatatcaattacctccagatcaggtaccaaaccatcaagccattcatatggtaaatattgtccgtgaggcgctgaataatatctataagcacgcccgtgccagcgaagccacggttaacgtccacttagaacaaggcgatgtggtgatgtccataaccgataatggttgtgggatagggcaagccagtgaacaacccaatcattatggtctgatgatcatgcaagatcgcgccaacagtttacatgggcactgtagtatcaatcagaaagagggaggcggtactgaggttcgagtgcaatttacccccgagaataatgaccttgactga

SEQ ID NO: 3139 - protein, 593 aa, Yersinia pestis CO92
MKRYLTPLVNQIALLMILLGMLGLAGMVISSWMAQSIQGNAHAINQAGSLRMQSYRLLSMIPLDSNELSYLVALEQDKTSHDLQQALLREGLMGQYQQIERYWQDTLKPQLQQAKHPDEVAASVADFVHQLDALVLAIDHKTEQRLLQVTLIPLVFSLLTLSLLLAMIYYLRRRLLRPWLKLISMANAIGRGDFSQRYTLDYQRDEMGMLGTALNRMSQELSLIYGDLEQRVVNKTADLQQKNQVLAFLYHSSRQLHTHQPLSERLAPVIEQLQALTTLENVQICLYENHLYRDHVNHNADAEYLMPKNRPASLTISGPVRPISHPELWQSLSWSLSDKLGQYGLLLAKQPLDNPLNSDQQQLVDMLVEQLTSTLALESQAKHQQQLLLMEERSAIARELHDSIAQSLSCLKIQISCLQMQTPDLPENSNLLIKQMRDELNIAYRQLRELLTTFRLKLNEATLEAALQALVNEFSERAGLSITFKYQLPPDQVPNHQAIHMVNIVREALNNIYKHARASEATVNVHLEQGDVVMSITDNGCGIGQASEQPNHYGLMIMQDRANSLHGHCSINQKEGGGTEVRVQFTPENNDLD

SEQ ID NO: 3140 - DNA, 1797 bp, Salmonella enterica subsp. enterica serovar Typhi str. CT18
  CDS (1)..(1797): transl_table=11
atgtttaaacggtgtttctctcctcttacgctggttaaccaactggcgctgattgtcatgctctctaccgctatcggcgtggcggggatggcggtttccggctggctggttcagggcgtgcagggtagcgctcatgcgattaataaagcgggctcattgcgtatgcaaagctatcgactactggccgctgtcccgctggatgctaaagatcaaaagctgctggatgagatggagcaaacggcattcagccctgaactgacccgcgccgctgagcgagacgggcagcagaagcagcttaaagcgttgcaggattactggcataacgaactctcgccagggctacagcacgcgcaaaacgcgcacgcggtcgcagaagatatcacgcgctttgtggcgggcctggatcgcctggtgacgtcgttcgaccatacgactgaattgcgtatcgaacgagtggtattagttcaccgggtaatggcgatctttatggcgctattgctggtatttacgattatctggctacgtgttcgccttttgcagccctggaaacagttgttatcaatggcgcgcgccgtcagtcagcgcgactttacccaacgtgccaatatcagtggacgcaatgagatggccgcgttgggttctgcgctcaataatatgtctgaagaactggccgaaagttatgcagtactggaacagcgagtacaggaaaaaacagccggtctggaacataaaaaccagattctctcgtttttgtggcaagccaaccgccgactgcattcacaggctccgctatgtgaacgtctttcaccggtactgaatggcctgcaaaatttaacccagttgcatgatattgagctgcgagtctatgacctggaagatgaagataatcaccaggaatttacctgtcagtcggacatcagttgcgatgataaaggctgccacctttgcccacgtagcgccctgccgatgattaacggcggcaccaccttaaaatggcggctcaccgactctcacacccaatacggtattttgctggcgacgctgccctatggacgccatctcagccacgatcagcaacagttggtggacacgctggttgaacagcttaccgcgactctggcgctcgacaggcatcaggagcgccagcagcggttgattgtcatggaagagcgtgccaccattgcccgcgaactgcatgattctattgcccagtcgctctcttgtatgaagatgcaggtgagctgcctgcaaatgcagggcgacgcgttaccggaaagcagccgtgagttactcagccaaattcgcaatgagctgaactgctcctgggcgcaactgcgcgaactgttaaccactttccgcttacagttgacggaacccgggctacgtccggcgctggaggcaagctgccaggagttcagcgcccggtttggctttacggtaaaactggattatcagcttcccccccgcctggtgccatcacaccaggcgatacacctgttgcaaattgccagggaagcccccagcaacgcccttaaacactctcatgccgacgatgtggtggtgacagtgacgcaatgtggcaaacaggtcaaactaaaagtgcaggacaatggctgcggcgtcccggaaaacgccgaacgcagtaatcactacggcatgatcatcatgcgcgatcgggcgcaaagtttgcgcggcgattgccaggtacgccgacgcgagactggcggaacagaggtcactgttacttttattccagaaacaaacttcacagaaacccagggagatacccatgaataa

SEQ ID NO: 3141 - protein, 598 aa, Salmonella enterica subsp. enterica serovar Typhi str. CT18
MFKRCFSPLTLVNQLALIVMLSTAIGVAGMAVSGWLVQGVQGSAHAINKAGSLRMQSYRLLAAVPLDAKDQKLLDEMEQTAFSPELTRAAERDGQQKQLKALQDYWHNELSPGLQHAQNAHAVAEDITRFVAGLDRLVTSFDHTTELRIERVVLVHRVMAIFMALLLVFTIIWLRVRLLQPWKQLLSMARAVSQRDFTQRANISGRNEMAALGSALNNMSEELAESYAVLEQRVQEKTAGLEHKNQILSFLWQANRRLHSQAPLCERLSPVLNGLQNLTQLHDIELRVYDLEDEDNHQEFTCQSDISCDDKGCHLCPRSALPMINGGTTLKWRLTDSHTQYGILLATLPYGRHLSHDQQQLVDTLVEQLTATLALDRHQERQQRLIVMEERATIARELHDSIAQSLSCMKMQVSCLQMQGDALPESSRELLSQIRNELNCSWAQLRELLTTFRLQLTEPGLRPALEASCQEFSARFGFTVKLDYQLPPRLVPSHQAIHLLQIAREAPSNALKHSHADDVVVTVTQCGKQVKLKVQDNGCGVPENAERSNHYGMIIMRDRAQSLRGDCQVRRRETGGTEVTVTFIPETNFTETQGDTHE

SEQ ID NO: 3142 - DNA, 1701 bp, Salmonella enterica subsp. enterica serovar Typhi str. CT18
  CDS (1)..(1701): transl_table=11
gtgacggttaaacgcccggtctcggccagtctggctaaggcttttttctatattgtgctgttgtctattctgtccaccggcagcgcattactgacgctgaccagcagtttacgggatgccgaagcgatcaatatcgccggttcgctacgaatgcagagctatcggctgggttacgatctgcaaagccgtagcccgcagattaatgcgcatcgtcaacttttccagcacgcgctcaactcgccggtactgcaaaatctcaacgcctggtatgtgccgcaggcggtgaaaactcgctacgcgcgcctgcacgccaactggctggagatgaatagccgcctacaggatggcgacattgtctggtatcagtccaatatcaacaattacgtcgatcaaattgatctcttcgttctggcgttacagcattacgccgagcgtaaagtcatgctggtcgtcgccatatcgctggcgggcggtatcggcatatttacgctggtcttttttaccctacggcgtattcgccagcaggtcgttcgcccgctgaatcaactggtcaccgccagtcagcgaattgaacatggtcagttcgccccgctgccgctggataccagcttacccaatgagctgggattgttggcgaaaacgtttagtcagatgtcgagcgagctgcataaactttatcgttcgctggaagcctcggtggaagaaaaaacgcacgatctgcacgaagcgcaccgccgcctggaggtgttataccagtgctcccaggcgctgaataccagccaaatcgatgtccactgttttcgccatattttgcaaattgtccgtgaacatgacgccgcctggtatctggagttaaccgtgggcgataactggcggattagcgaaggcacgcaaagccccgacctgccgatgcaaatgctgccagtgacgatgcaggacacggtctatggcgaactccactggcaaagccccaacgttaatgcctctacgccgttgctgaacagcgtctccacgatgctggggcgtggtttgtactttaatcaggcgcaaaaacacttccagcaacttttgttaatggaagagcgcgcgacgattgcccgtgagttacacgattcgctggcgcaggtactttcttatttacgtattcaattaacgcttttgaagcgcgccattccagaagataacgccggcgcgcaaagcatcatggcggatttttccagagcgctgaacgacgcctaccgtcagcttcgcgagctactcaccacgttccgtctgacgttacagcaggccgatttaccctccgcattgcatgagatgctggaagatttacagagtcagactccggctaaactcaagttggattgccgtttacccacgctggcgctggatgcgcaaatgcaggtgcatttattgcaaattgtgcgtgaagctgtcctgaacgccattaaacacgccaacgcgagcgaaatcgccgtgagctgcgtcaccgcgcctgacggcgatcataccgtttatattcgcgataatggcattggtatcggcgaaccgcatgagcctgccggacactatggtctgaatataatgcgtgagcgcgcggaacggcttggcggcacgctgaatttttcgcaaccctccggcggcggcacgctggtcagtatcagttttcgctcctccaacaaggaagagagtcagttaacgtaa

SEQ ID NO: 3143 - protein, 566 aa, Salmonella enterica subsp. enterica serovar Typhi str. CT18
MTVKRPVSASLAKAFFYIVLLSILSTGSALLTLTSSLRDAEAINIAGSLRMQSYRLGYDLQSRSPQINAHRQLFQHALNSPVLQNLNAWYVPQAVKTRYARLHANWLEMNSRLQDGDIVWYQSNINNYVDQIDLFVLALQHYAERKVMLVVAISLAGGIGIFTLVFFTLRRIRQQVVRPLNQLVTASQRIEHGQFAPLPLDTSLPNELGLLAKTFSQMSSELHKLYRSLEASVEEKTHDLHEAHRRLEVLYQCSQALNTSQIDVHCFRHILQIVREHDAAWYLELTVGDNWRISEGTQSPDLPMQMLPVTMQDTVYGELHWQSPNVNASTPLLNSVSTMLGRGLYFNQAQKHFQQLLLMEERATIARELHDSLAQVLSYLRIQLTLLKRAIPEDNAGAQSIMADFSRALNDAYRQLRELLTTFRLTLQQADLPSALHEMLEDLQSQTPAKLKLDCRLPTLALDAQMQVHLLQIVREAVLNAIKHANASEIAVSCVTAPDGDHTVYIRDNGIGIGEPHEPAGHYGLNIMRERAERLGGTLNFSQPSGGGTLVSISFRSSNKEESQLT

SEQ ID NO: 3144 - DNA, 1797 bp, Salmonella typhimurium LT2
  CDS (1)..(1797): transl_table=11
atgtttaaacggtgtttctctcctcttacgctggttaaccaactggcgctgattgtcatgctctctaccgctatcggcgtggcggggatggcggtttccggctggctggttcagggtgtgcagggtagcgctcatgcgattaataaagcgggctcattgcgtatgcaaagctatcgactactggcagctgtcccgctggatgctaaagatcaaaagctgctggatgagatggagcaaacggcattcagccctgaactgacccgcgccgctgagcgagacgggcagcagaagcagcttaaagcgttgcaggattactggcataacgaactctcgccagggctacagcacgcgcaaaacgcgcacgcggtcgcagaagatgtcacgcgctttgtggcgggcctggatcgcctggtgacgtcgttcgaccatacgactgaattgcgtatcgaacgcgtggtattagttcaccgggtaatggcgatctttatggcgctattgctggtatttacgattatctggctacgtgttcgccttttgcagccctggaaacagttgttatcaatggcgcgcgccgtcagtcagcgcgactttacccaacgtgccaatatcagtggacgcaatgagatggccgcgttgggttctgcgctcaataatatgtctgaagaactggccgaaagttatgcggtactggaacagcgcgtacaggaaaaaacagccggtctggaacataaaaaccagattctctcgtttttgtggcaagccaaccgccgactgcattcacaggctccgctatgtgagcgtctttcaccggtactgaatggcctgcaaaatttaacccagttgcatgatattgagctgcgggtctatgacctggaagatgaagataatcaccaggaatttacctgtcagtcggacatcagttgcgatgataaaggctgccacctttgcccacgtagcgccctgccgatgattaacggcggcaccaccttaaaatggcggctcaccgactctcacacccaatacggtattttgctggcgacgctgccctatggacgccatctcagccacgatcaacaacagttggtggacacgctggttgaacagcttaccgcgactctggcgctcgacaggcatcaggagcgccagcagcagttgattgtcatggaagagcgtgccaccattgcccgcgaactgcatgattctattgcccagtcgctctcttgtatgaagatgcaggtgagctgcctgcaaatgcagggcgacgtgttaccggaaagcagccgtgagttactcagccaaattcgcaatgagctaaactgctcctgggcgcaactgcgcgaactgttaaccactttccggttacagttgacggaacccgggctacgtccggcgctggaggcaagctgccaggagttcagcgcccggtttggctttacggtaaaactggattatcagcttcccccccgcctggtgccttcacaccaggcgatacacctgttgcaaattgccagggaagccctcagcaacgcccttaaacactctcatgccgacgatgtggtggtgacagtgacgcaatgtggcaaacaggtcaaactaaaagtgcaggataatggctgcggcgtcccggaaaacgccgaacgcagtaatcactacggcatgatcatcatgcgcgatcgggcgcaaagtttgcgcggcgattgccaggtacgccgacgcgagactggcggaacagaggtcactgttacttttattccagaaacaaacttcacagaaacccagggagatacccatgaataa

SEQ ID NO: 3145 - protein, 598 aa, Salmonella typhimurium LT2
MFKRCFSPLTLVNQLALIVMLSTAIGVAGMAVSGWLVQGVQGSAHAINKAGSLRMQSYRLLAAVPLDAKDQKLLDEMEQTAFSPELTRAAERDGQQKQLKALQDYWHNELSPGLQHAQNAHAVAEDVTRFVAGLDRLVTSFDHTTELRIERVVLVHRVMAIFMALLLVFTIIWLRVRLLQPWKQLLSMARAVSQRDFTQRANISGRNEMAALGSALNNMSEELAESYAVLEQRVQEKTAGLEHKNQILSFLWQANRRLHSQAPLCERLSPVLNGLQNLTQLHDIELRVYDLEDEDNHQEFTCQSDISCDDKGCHLCPRSALPMINGGTTLKWRLTDSHTQYGILLATLPYGRHLSHDQQQLVDTLVEQLTATLALDRHQERQQQLIVMEERATIARELHDSIAQSLSCMKMQVSCLQMQGDVLPESSRELLSQIRNELNCSWAQLRELLTTFRLQLTEPGLRPALEASCQEFSARFGFTVKLDYQLPPRLVPSHQAIHLLQIAREALSNALKHSHADDVVVTVTQCGKQVKLKVQDNGCGVPENAERSNHYGMIIMRDRAQSLRGDCQVRRRETGGTEVTVTFIPETNFTETQGDTHE

SEQ ID NO: 3146 - DNA, 1701 bp, Salmonella typhimurium LT2
  CDS (1)..(1701): transl_table=11
gtgacggttaaacgcccggtctcggccagtctggctaaggcttttttctatattgtgctgttgtctattctgtccaccggcagcgcattactgacgctgaccagcagtttacgggatgccgaagcgatcaatatcgccggttcgctacgaatgcagagctatcggctgggttacgatctgcaaagccgtagcccgcagattaatgcgcatcgtcaacttttccagcacgcgctcaactcgccggtactgcaaaatctcaacgcctggtatgtgccgcaggcggtaaaaactcgctacgagcgcctgcacgccaactggctggagatgaatagccgcctacaggacggcgacattgcctggtatcagaccaatatcaacaattacgtcaatcaaattgatctcttcgttctggcgttacagcattacgccgagcgtaaagtcatgctggtcgtcgccatatcgctggcgggcggtatcggcatatttacgctggtcttttttaccctacgacgtattcgccagcaggtcgttcgcccgctgaatcaactggtcaccgccagtcagcgaattgaacatggtcagttcgccccgctgccgctggataccagcttacccaatgagctgggattgttggcgaaaacgtttagccagatgtcgagcgagctgcataaactttatcgttcgctggaagcctcggtggaagaaaaaacgcacgatctgcacgaagcgcaccgccgcctggaggtgttataccagtgctctcaggcgctgaataccagccaaatcgacgtccactgttttcgccatattttgcaaattgtccgtgaacatgacgccgcttggtatctggagttaaccgtgggcgataactggcggattagcgaaggcacgcaaagccccgacctgccgatgcaaatgctgccagtgacgatgcaggacacggtctatggcgaactccactggcaaagccccaacgttaatgcctctacgccgctgctgaacagcgtctccacgatgctggggcgtggtttgtactttaatcaggcgcaaaaacacttccagcaacttttgttaatggaagagcgcgcgacgattgcccgtgagctacacgattcgctggcgcaggtactttcttatttacgtattcagttaacgcttttgaagcgcgctattcctgaggataacgccggcgcgcaaagcatcatggcggatttttccagagcgctgaacgacgcctaccgtcagcttcgcgagctactcaccacgttccgtctgacgttacagcaggccgatttaccctccgcattgcatgagatgctggaagatttacagagtcagaccccggccaaactcacgttggattgccgtttacccacgctggcgctggatgcgcaaatgcaggtgcatttgttgcaaattgtgcgtgaagcggtcctgaacgccattaaacacgccaacgcgagcgaaatcgccgtgagctgcgtcaccgcgcctgacggcgatcataccgtttatattcgcgataatggcattggtatcggcgaaccgcatgagcctgccggacactatggtctgaatataatgcgtgagcgcgcggagcgccttggcggcacgctgaatttttcgcaaccctccggcggcggcacactggtcagtatcagttttcgctcctccaacaaggaagagagtcagttaacgtaa

SEQ ID NO: 3147 - protein, 566 aa, Salmonella typhimurium LT2
MTVKRPVSASLAKAFFYIVLLSILSTGSALLTLTSSLRDAEAINIAGSLRMQSYRLGYDLQSRSPQINAHRQLFQHALNSPVLQNLNAWYVPQAVKTRYERLHANWLEMNSRLQDGDIAWYQTNINNYVNQIDLFVLALQHYAERKVMLVVAISLAGGIGIFTLVFFTLRRIRQQVVRPLNQLVTASQRIEHGQFAPLPLDTSLPNELGLLAKTFSQMSSELHKLYRSLEASVEEKTHDLHEAHRRLEVLYQCSQALNTSQIDVHCFRHILQIVREHDAAWYLELTVGDNWRISEGTQSPDLPMQMLPVTMQDTVYGELHWQSPNVNASTPLLNSVSTMLGRGLYFNQAQKHFQQLLLMEERATIARELHDSLAQVLSYLRIQLTLLKRAIPEDNAGAQSIMADFSRALNDAYRQLRELLTTFRLTLQQADLPSALHEMLEDLQSQTPAKLTLDCRLPTLALDAQMQVHLLQIVREAVLNAIKHANASEIAVSCVTAPDGDHTVYIRDNGIGIGEPHEPAGHYGLNIMRERAERLGGTLNFSQPSGGGTLVSISFRSSNKEESQLT

SEQ ID NO: 3148 - DNA, 1806 bp, Yersinia pestis KIM
  CDS (1)..(1806): transl_table=11
ttggtcaaaggaatctcccacgcgatgaaacgttatctgaccccattggttaatcagattgctttgttgatgatactgctgggcatgctagggctggcgggtatggttatttcatcatggatggcacaaagcattcagggcaatgcccacgccatcaaccaagcaggctcattgcgtatgcagagctacaggttactttcaatgatccctttggatagcaatgagttatcttatctggtggcattggagcaagacaaaaccagtcacgacctgcaacaagcgctactgcgggaagggttaatgggtcaatatcagcaaattgaacgttactggcaagacacgctgaagcctcagttacaacaggccaaacaccctgatgaggtggcggccagtgtggcggattttgttcaccaacttgatgctttggtattagccattgaccataaaactgaacaacggctgttacaggttaccctgatcccgctggtattcagccttctgacactcagcctattgttggcaatgatctattatttgcgccgccggttactgcgcccttggctgaagttaatctcaatggcgaatgccattggccgaggtgattttagccaacgctatacgctggactatcagcgtgacgaaatggggatgctgggtacggcattgaatcgaatgtcgcaagaattgtcattgatctacggcgatcttgagcagcgagtcgtaaataaaaccgctgatttacaacagaaaaatcaggttttggcgttcctttatcacagtagccgccaactgcatactcatcagccattaagtgagcgtttagcccctgtcattgaacagctacaagcgttaaccacgctagaaaatgtacaaatttgtttgtatgaaaaccatctgtatcgtgaccatgtcaatcacaatgcggatgcagaatatctgatgcctaaaaaccgcccggcgtcattaacgatcagcggccctgttcgccccatcagccaccctgagttatggcaatcactgagttggagtttaagcgataaactcggtcaatatggtttattactggcaaaacaacccctcgataaccccctcaattctgaccagcagcaactggtcgatatgttagttgagcaactgaccagcacactggcgttagagagccaagccaaacatcagcaacagttattgttaatggaggagcgttccgccattgcgcgggaactgcatgactcaatcgctcaatccctttcctgcctgaagatacagatcagctgtttgcaaatgcaaactccggacttaccggaaaacagcaacctattgataaaacaaatgcgtgatgaactcaatatcgcctaccgtcaattacgtgagttactgaccacattccgtctgaaactaaatgaagccactctggaggccgcgttacaggctctggtgaatgagttcagcgaaagagctggtctatcgattaccttcaaatatcaattacctccagatcaggtaccaaaccatcaagccattcatatggtaaatattgtccgtgaggcgctgaataatatctataagcacgcccgtgccagcgaagccacggttaacgtccacttagaacaaggcgatgtggtgatgtccataaccgataatggttgtgggatagggcaagccagtgaacaacccaatcattatggtctgatgatcatgcaagatcgcgccaacagtttacatgggcactgtagtatcaatcagaaagagggaggcggtactgaggttcgagtgcaatttacccccgagaataatgaccttgactga

SEQ ID NO: 3149 - protein, 601 aa, Yersinia pestis KIM
MVKGISHAMKRYLTPLVNQIALLMILLGMLGLAGMVISSWMAQSIQGNAHAINQAGSLRMQSYRLLSMIPLDSNELSYLVALEQDKTSHDLQQALLREGLMGQYQQIERYWQDTLKPQLQQAKHPDEVAASVADFVHQLDALVLAIDHKTEQRLLQVTLIPLVFSLLTLSLLLAMIYYLRRRLLRPWLKLISMANAIGRGDFSQRYTLDYQRDEMGMLGTALNRMSQELSLIYGDLEQRVVNKTADLQQKNQVLAFLYHSSRQLHTHQPLSERLAPVIEQLQALTTLENVQICLYENHLYRDHVNHNADAEYLMPKNRPASLTISGPVRPISHPELWQSLSWSLSDKLGQYGLLLAKQPLDNPLNSDQQQLVDMLVEQLTSTLALESQAKHQQQLLLMEERSAIARELHDSIAQSLSCLKIQISCLQMQTPDLPENSNLLIKQMRDELNIAYRQLRELLTTFRLKLNEATLEAALQALVNEFSERAGLSITFKYQLPPDQVPNHQAIHMVNIVREALNNIYKHARASEATVNVHLEQGDVVMSITDNGCGIGQASEQPNHYGLMIMQDRANSLHGHCSINQKEGGGTEVRVQFTPENNDLD

SEQ ID NO: 3150 - DNA, 1758 bp, Shewanella oneidensis MR-1
  CDS (1)..(1758): transl_table=11
atgttagtactgattttgctttctagcagcctagcgattttcgcaatcatcaatttgtcatacagcttaggcgatgcgaaagccatcaacgcttcgggttcactgcggatgcaaagctatcggctgatgttttacgccaattctggtagtgaagccgcccaagaaaaaatcaccgagtttgaaaacacgctgcattctgaagcactacacccctccaagagttggttaagccctaaaaaaatagccgcacaatatcagcttgttatcgataaatggctggtgatgaagtactacatagagcaagagaactcccgcgactacgccgcctcgctcaaggactttgtcgataccattgatttattggtattggaaatggagcatcatgccgcctttaagttgcgactcctcgccgcgagccaaatttttgggcttgggcttatgctctccattgcctttttagcggtacgctttaccaaacgtaaagtggttgtgcccttgcaacaattaatggagtctgccaatacgatttctaagggcaactttgagatcgaaatgcccgaaaccgaatacatagaactcaccgcactgaccgatgcactgcaaaaaacggcgcgcgaactggccactctgtatggcaacttagaatcccaagtggctgaaaaaaccttggcactaacccgagccaataatgagttagcatttttatacgacaccttgttaacactcaatgccaagaagttggactataaagcactcaaagcagcgttaaatcagctaaaagattatgagtctatcgactatttaagactgattatccagtatccagagcaggaactcgaaatgattgaggccaatggtggctggccagaaagcgctgacaacagcacgcgttttccgctgcaatttgaacaggctaatttaggttatttagaacttatctctgcgcaggatattaatactccactgtttaaaaactttgccatcatgctaactcgttccatcgtgatccataacgccactgagcaaagacaacagttagccctaatggaagagcgtggcgtcatcgcaagggaattacatgactcgctagggcaagtactttccttcctaaaaattcaaattagcctgctgcgtaagaacttagatcatagttgccgcagccctgcggtagaggtgcaactcaccgaaatcaatgaaggagtcagcaccgcctatgtacagctaagggagttgttatccacctttagattaaccatcaaggaacccaatctgaagaatgcgatggaagcaatgcttgagcaacttagggcaaatactgatatcaagatccatctcgattataaactctctcctcaatggcttgaggcaaaacagcatatccatattttgcagatcacccgtgaagcaaccctcaatgccatcaaacatgccaatgcaagtcatatcaatatccgctgttacaaggatgacaggggcatggtcaatatcagtgtgagtgataatggcgtcggcattggccatattaaagagcgggatcaacacttcggtatcggcatcatgcatgagcgtgccagcaaattagacggtgaggttgtatttagtagcaatgatacgcacactaatagcactgccacgactgaacaacgtcatcaagaaaatccagactcgccccttgagtcccacaacacatcaaatttgtcacagggaaccatagtcactttaatcttcccttcccaacaggagcctacacatgggtaa

SEQ ID NO: 3151 - protein, 585 aa, Shewanella oneidensis MR-1
MLVLILLSSSLAIFAIINLSYSLGDAKAINASGSLRMQSYRLMFYANSGSEAAQEKITEFENTLHSEALHPSKSWLSPKKIAAQYQLVIDKWLVMKYYIEQENSRDYAASLKDFVDTIDLLVLEMEHHAAFKLRLLAASQIFGLGLMLSIAFLAVRFTKRKVVVPLQQLMESANTISKGNFEIEMPETEYIELTALTDALQKTARELATLYGNLESQVAEKTLALTRANNELAFLYDTLLTLNAKKLDYKALKAALNQLKDYESIDYLRLIIQYPEQELEMIEANGGWPESADNSTRFPLQFEQANLGYLELISAQDINTPLFKNFAIMLTRSIVIHNATEQRQQLALMEERGVIARELHDSLGQVLSFLKIQISLLRKNLDHSCRSPAVEVQLTEINEGVSTAYVQLRELLSTFRLTIKEPNLKNAMEAMLEQLRANTDIKIHLDYKLSPQWLEAKQHIHILQITREATLNAIKHANASHINIRCYKDDRGMVNISVSDNGVGIGHIKERDQHFGIGIMHERASKLDGEVVFSSNDTHTNSTATTEQRHQENPDSPLESHNTSNLSQGTIVTLIFPSQQEPTHG

SEQ ID NO: 3152 - DNA, 1797 bp, Escherichia coli CFT073
  CDS (1)..(1797): transl_table=11
atgcttaaacgttgtctctctccgctcaccctggttaatcaggttgcgcttattgtgttgctttctactgctattggactggcagggatggcggtttctggctggctggtgcaaggcgttcagggcagcgcccatgcgatcaacaaagcgggatcgctgcgcatgcaaagttaccgtctgttggcagcagtgccattaagcgagaaagacaagcccttaattaaagagatggaacaaacagcatttagcgccgagttgactcgagcagcagaacgagacgggcaactggcgcaattacagggtttacaagattactggcgtaatgaactgatccctgcactgatacgtgcacaaaaccgcgaaacggtgtcagcggatgtcagccagtttgttgccgggcttgatcagctggtatctggttttgatcgcaccacggaaatgcgcattgagacagtggtgctggtccatcgggtaatggcggtatttatggcacttttactggtattcactattatctggttgcgggcgagattgctacaaccgtggcggcaactgctggcaatggcgagtgccgtcagccatcgcgattttacccaacgcgcaaacatcagcgggcgcaacgaaatggcgatgcttggaactgcgttgaacaatatgtctgcagaactggccgaaagttatgccgtacttgagcagcgggttcaggagaaaaccgccgggctggagcataaaaatcagatcctctcttttttatggcaggctaaccgccgtttgcattcccgcgccccgctgtgtgaacgcctgtcacctgtactcaacggattacagaatttaaccctgctacgtgatatcgaactgcgggtgtatgacactgatgatgaagagaatcatcaggagtttacctgccagccagatatgacttgtgatgataaaggctgccagctctgcccgcgcggcgtattacccgttggcgatcgcggcacaaccctgaagtggcggctggctgacactcatacgcagtacggtattttgctggcgaccctgccgcaggggcgtcatcttagccatgatcaacaacaactggtggataccctggttgaacaactcaccgccacgctggcgctggatcgccatcaggaacgtcagcaacagttgatcgtgatggaagagcgtgccaccattgcgcgcgaactgcatgattctattgcccaatctctctcttgcatgaagatgcaggtgagttgcttacagatgcagggcgatgcgctgccagaaagcagccgcgaactgttaagtcagatccgtaacgaactgaatgcatcctgggtgcagttgcgtgaattgctcaccacattccgtttgcagctcaccgagcctggattacgtccggcgctggaggcgagttgcgaagagtacagcgccaaatttggcttcccggtgaagctggattatcaattgccgcctcgtctggtgccttcgcatcaggcaatccacttgttgcaaattgcccgtgaggcattaagtaacgccctcaaacattcgcaagcgagtgaggtcgtggtgacggtggcgcaaaacgataatcaggtcaaactgaccgtccaggataacggctgcggcgtgcctgaaaatgccatccgcagcaatcactacggcatgataataatgcgcgaccgtgcgcaaagtttacgaggcgattgccgcgtccgccgtcgtgaatcaggtggcaccgaagtggtggtcacctttattcccgaaaaaactttcacagacgtccaaggagatacccatgagtaa

SEQ ID NO: 3153 - protein, 598 aa, Escherichia coli CFT073
MLKRCLSPLTLVNQVALIVLLSTAIGLAGMAVSGWLVQGVQGSAHAINKAGSLRMQSYRLLAAVPLSEKDKPLIKEMEQTAFSAELTRAAERDGQLAQLQGLQDYWRNELIPALIRAQNRETVSADVSQFVAGLDQLVSGFDRTTEMRIETVVLVHRVMAVFMALLLVFTIIWLRARLLQPWRQLLAMASAVSHRDFTQRANISGRNEMAMLGTALNNMSAELAESYAVLEQRVQEKTAGLEHKNQILSFLWQANRRLHSRAPLCERLSPVLNGLQNLTLLRDIELRVYDTDDEENHQEFTCQPDMTCDDKGCQLCPRGVLPVGDRGTTLKWRLADTHTQYGILLATLPQGRHLSHDQQQLVDTLVEQLTATLALDRHQERQQQLIVMEERATIARELHDSIAQSLSCMKMQVSCLQMQGDALPESSRELLSQIRNELNASWVQLRELLTTFRLQLTEPGLRPALEASCEEYSAKFGFPVKLDYQLPPRLVPSHQAIHLLQIAREALSNALKHSQASEVVVTVAQNDNQVKLTVQDNGCGVPENAIRSNHYGMIIMRDRAQSLRGDCRVRRRESGGTEVVVTFIPEKTFTDVQGDTHE

SEQ ID NO: 3154 - DNA, 1668 bp, Vibrio vulnificus CMCP6
  CDS (1)..(1668): transl_table=11
atgggcttgatcttgctgttatctattgcaacgaccagttttgcaattatcaacctagcttctagcttgaatgatgccgaggcagtcaacgtggcaggctcgatgcgcatgcaaagctaccgtttagcccatgatattcaaatcaatgcgcaggattattcctctcacatctatttgtttgagcgttcgatatactcgccttccatgaaagcactgcaaaattggacagtgcctgatgacattacccacgactactatcgtttgatcatgcgttggcacgaattaaaagaagtgctgcaaagtaaagatagagaacgctacttggttttggtcgctggctttgtttcacaaattgacgcttttgtttttaagctgcaacatttttccgagcaaaagctgatcaagctcgcttgggtcggtggtttaggcttgggtgggattttattggtgagcatttttgttgttcactttgtgcgtcgtgaagtggttacgccactcaaggcgatggtcaccgccagtgagcaaattcaatcgcgctcgtttgatgtttccctcaatgtcaccagtgataatgaaatgggtatcctcaccagaaccttcaacaatatggcggctgacctgggtaaactctaccgaggtttggaacaagcggtgaatgagaagacgcacaagctgcaacacgccaatcagtctcttcaggtgctgtatcattcctctcaagagctgacggcgtcacgcatcagccaagagaacttccaagcgattttgagacacattgtgagtatcgaaggcattgtgtccgccaaattagagattgaagagatcggcgagcgtaacttggtgctcactgaaggccctaaatgcgtcgggcgttgtaatcaaaaagcgttaacgctcgatgggcaacacctagggtatttgcattggtgcagcggtttgccgtgcccagatcaagcgttgatcgacaacttcgtgcaaattctatcgcgtgcggtctactacaatcaggcgcaaagacaagcggaacaactacttttgatggaagaacgagcgacgattgcgcgtgagttacatgattcgttggcacaatctctttcttacctcaagattcaggtatcattgctcaaacgcagtgtcgcgaagttgaacgatgagcctcaactagcgcgcaccaatcaagtgattgcagaattagatactggactgtcgtcggcatatacccaattacgcgaactgctgacgactttccgactcacgattaaagaaggcacctttggtcaagcgctacaagaaatggtggtgcaactaggggatcaaacggaagcggagattcatttaaccaatgatctttcgtcggtggaactggacgctcaccaacaagtgcatttgttgcaactgattcgtgaagccaccatcaacgccattaaacactctaaagctgccaacattcggatcgaatgttgtgaagaaggggagtgggtcacggtatccgtgagtgatgatggggtagggtttgatcagtgtaaccagaaattgaatcactacggaatgtccatcatgcaagagcgagcagcgcgtttgaacggatcgttatcggtcaccgcatcgccacagaatggttgtgctgtagtgttaaaatatcaacgtattaaggaaacacgaatttga

SEQ ID NO: 3155 - protein, 555 aa, Vibrio vulnificus CMCP6
MGLILLLSIATTSFAIINLASSLNDAEAVNVAGSMRMQSYRLAHDIQINAQDYSSHIYLFERSIYSPSMKALQNWTVPDDITHDYYRLIMRWHELKEVLQSKDRERYLVLVAGFVSQIDAFVFKLQHFSEQKLIKLAWVGGLGLGGILLVSIFVVHFVRREVVTPLKAMVTASEQIQSRSFDVSLNVTSDNEMGILTRTFNNMAADLGKLYRGLEQAVNEKTHKLQHANQSLQVLYHSSQELTASRISQENFQAILRHIVSIEGIVSAKLEIEEIGERNLVLTEGPKCVGRCNQKALTLDGQHLGYLHWCSGLPCPDQALIDNFVQILSRAVYYNQAQRQAEQLLLMEERATIARELHDSLAQSLSYLKIQVSLLKRSVAKLNDEPQLARTNQVIAELDTGLSSAYTQLRELLTTFRLTIKEGTFGQALQEMVVQLGDQTEAEIHLTNDLSSVELDAHQQVHLLQLIREATINAIKHSKAANIRIECCEEGEWVTVSVSDDGVGFDQCNQKLNHYGMSIMQERAARLNGSLSVTASPQNGCAVVLKYQRIKETRI

SEQ ID NO: 3156 - DNA, 1737 bp, Vibrio parahaemolyticus RIMD 2210633
  CDS (1)..(1737): transl_table=11
ttgtttaaaaatgtgaaaaagtcagtaacgcgcacgattgcgtccgcgatgcttctgattttgttgttatcagtagcaacgactggctttgctatttttacccttgcgtcaagcctaaatgacgcagaagccgtcaacgtggcggggtcgatgcgcatgcaaagttatcgtttagcacacgacattcagattcgatctgttgattattcttcacatattgacgcatttgagcactctatttactcgtcttcgatgaaagcacttcagcattggtctgtgccggaagacatcactcacgattactatcgcttaatcatgcgatggcacgagttaaaatcggtgttgagaggggaggacccaagccaatatcaactcttggtcgcgggctttgttcagcagatcgacgactttgtgtttaagctgcaaaacttttctgagcagaagctcatcaacttagcttggattggcgggttagggctgggcggcattctttgcgccagtatgtttgttgtccactttatccgtttggaagtcgtgaggccgctgcgtgcactagtatttgcaagtgaacgaattaaaaatcgctcttttgatatcaatttagcggtgtcaagtgacaacgaaatgggcatactcacgcgcacctttaatcggatggcgacagacctcggtaagctctatcgtggattggaacaggcggtagacgagaaaactcgcaagttgcaacatgcgaatcagtctttagaagtgctttatgattcctcaaaagagctcacggcatcgcgcattaatcaggataatttccaggcgattttgaagcacattgcgagcttagaaggcattaaagcggtgaagcttgaaatcgaacagttgggagagcctaattggatccttacggaaggggaagagtgctgccatgattgtgatgatgaatgtcatgcagaacctttaacgttagatggcgaacatctcggttctctatattggaaagcaggcttaccgtgcccgaacgagacgctaattgacaactttgtacaaattctctcgcgagcggtgtattacaatcgcgcacagcgtcaagcagagcaaattttgttgatggaagagcgcgcgaccattgctcgcgaacttcacgactctttggctcaagcgttatcctatttgaaaattcaggtcgctttattaaagagaagcgtgaaaaatcttcctgacgaaaaggccattgctcaggccaatcaagtgattgcagagctggatacgggcttgtcggctgcttatacccagttacgtgagctgttaacgacattccgcctgacgatcaaagaaggcagttttggccaagcgctgcaagagatggtcgaaacgcttaatgagcaaacaacggcagaaattacgttgaaaaatagactttcatcaacggaattagatgcgcatcaacaagtccatttactacagttgatcagagaggcggcactgaatgcgattaagcatgcgcaagctgaccatatacatattcaatgtcttgattgtgatgggaaagtcacagtaaccgtctccgatgacggagtaggctttgaacatcaggacgaaaaaattaatcattacggtatgacgatcatgcaagagcgagcagcgagactgcacgccgatctacagattgaagcatcaataaacaaagggtgcaccgtaaaactcgaattccaacacagtaaggaagtaaactttgacagtgtgtaa

SEQ ID NO: 3157 - protein, 578 aa, Vibrio parahaemolyticus RIMD 2210633
MFKNVKKSVTRTIASAMLLILLLSVATTGFAIFTLASSLNDAEAVNVAGSMRMQSYRLAHDIQIRSVDYSSHIDAFEHSIYSSSMKALQHWSVPEDITHDYYRLIMRWHELKSVLRGEDPSQYQLLVAGFVQQIDDFVFKLQNFSEQKLINLAWIGGLGLGGILCASMFVVHFIRLEVVRPLRALVFASERIKNRSFDINLAVSSDNEMGILTRTFNRMATDLGKLYRGLEQAVDEKTRKLQHANQSLEVLYDSSKELTASRINQDNFQAILKHIASLEGIKAVKLEIEQLGEPNWILTEGEECCHDCDDECHAEPLTLDGEHLGSLYWKAGLPCPNETLIDNFVQILSRAVYYNRAQRQAEQILLMEERATIARELHDSLAQALSYLKIQVALLKRSVKNLPDEKAIAQANQVIAELDTGLSAAYTQLRELLTTFRLTIKEGSFGQALQEMVETLNEQTTAEITLKNRLSSTELDAHQQVHLLQLIREAALNAIKHAQADHIHIQCLDCDGKVTVTVSDDGVGFEHQDEKINHYGMTIMQERAARLHADLQIEASINKGCTVKLEFQHSKEVNFDSV

SEQ ID NO: 3158 - DNA, 1797 bp, Salmonella enterica subsp. enterica serovar Typhi Ty2
  CDS (1)..(1797): transl_table=11
atgtttaaacggtgtttctctcctcttacgctggttaaccaactggcgctgattgtcatgctctctaccgctatcggcgtggcggggatggcggtttccggctggctggttcagggcgtgcagggtagcgctcatgcgattaataaagcgggctcattgcgtatgcaaagctatcgactactggccgctgtcccgctggatgctaaagatcaaaagctgctggatgagatggagcaaacggcattcagccctgaactgacccgcgccgctgagcgagacgggcagcagaagcagcttaaagcgttgcaggattactggcataacgaactctcgccaaggctacagcacgcgcaaaacgcgcacgcggtcgcagaagatatcacgcgctttgtggcgggcctggatcgcctggtgacgtcgttcgaccatacgactgaattgcgtatcgaacgagtggtattagttcaccgggtaatggcgatctttatggcgctattgctggtatttacgattatctggctacgtgttcgccttttgcagccctggaaacagttgttatcaatggcgcgcgccgtcagtcagcgcgactttacccaacgtgccaatatcagtggacgcaatgagatggccgcgttgggttctgcgctcaataatatgtctgaagaactggccgaaagttatgcagtactggaacagcgagtacaggaaaaaacagccggtctggaacataaaaaccagattctctcgtttttgtggcaagccaaccgccgactgcattcacaggctccgctatgtgaacgtctttcaccggtactgaatggcctgcaaaatttaacccagttgcatgatattgagctgcgagtctatgacctggaagatgaagataatcaccaggaatttacctgtcagtcggacatcagttgcgatgataaaggctgccacctttgcccacgtagcgccctgccgatgattaacggcggcaccaccttaaaatggcggctcaccgactctcacacccaatacggtattttgctggcgacgctgccctatggacgccatctcagccacgatcagcaacagttggtggacacgctggttgaacagcttaccgcgactctggcgctcgacaggcatcaggagcgccagcagcggttgattgtcatggaagagcgtgccaccattgcccgcgaactgcatgattctattgcccagtcgctctcttgtatgaagatgcaggtgagctgcctgcaaatgcagggcgacgcgttaccggaaagcagccgtgagttactcagccaaattcgcaatgagctgaactgctcctgggcgcaactgcgcgaactgttaaccactttccgcttacagttgacggaacccgggctacgtccggcgctggaggcaagctgccaggagttcagcgcccggtttggctttacggtaaaactggattatcagcttcccccccgcctggtgccatcacaccaggcgatacacctgttgcaaattgccagggaagcccccagcaacgcccttaaacactctcatgccgacgatgtggtggtgacagtgacgcaatgtggcaaacaggtcaaactaaaagtgcaggacaatggctgcggcgtcccggaaaacgccgaacgcagtaatcactacggcatgatcatcatgcgcgatcgggcgcaaagtttgcgcggcgattgccaggtacgccgacgcgagactggcggaacagaggtcactgttacttttattccagaaacaaacttcacagaaacccagggagatacccatgaataa

SEQ ID NO: 3159 - protein, 598 aa, Salmonella enterica subsp. enterica serovar Typhi Ty2
MFKRCFSPLTLVNQLALIVMLSTAIGVAGMAVSGWLVQGVQGSAHAINKAGSLRMQSYRLLAAVPLDAKDQKLLDEMEQTAFSPELTRAAERDGQQKQLKALQDYWHNELSPRLQHAQNAHAVAEDITRFVAGLDRLVTSFDHTTELRIERVVLVHRVMAIFMALLLVFTIIWLRVRLLQPWKQLLSMARAVSQRDFTQRANISGRNEMAALGSALNNMSEELAESYAVLEQRVQEKTAGLEHKNQILSFLWQANRRLHSQAPLCERLSPVLNGLQNLTQLHDIELRVYDLEDEDNHQEFTCQSDISCDDKGCHLCPRSALPMINGGTTLKWRLTDSHTQYGILLATLPYGRHLSHDQQQLVDTLVEQLTATLALDRHQERQQRLIVMEERATIARELHDSIAQSLSCMKMQVSCLQMQGDALPESSRELLSQIRNELNCSWAQLRELLTTFRLQLTEPGLRPALEASCQEFSARFGFTVKLDYQLPPRLVPSHQAIHLLQIAREAPSNALKHSHADDVVVTVTQCGKQVKLKVQDNGCGVPENAERSNHYGMIIMRDRAQSLRGDCQVRRRETGGTEVTVTFIPETNFTETQGDTHE

SEQ ID NO: 3160 - DNA, 1716 bp, Vibrio vulnificus YJ016
  CDS (1)..(1716): transl_table=11
ttgctaaaaacggtgaaaaagtcagtaacaagcacgattgcgaaggcaatgggcttgatcttgctgttatctattgcaacgaccagttttgcaattatcaacctagcttctagcttgaatgatgccgaggcagtcaacgtggcaggctcgatgcgcatgcaaagctaccgtttagcccatgatattcaaatcaatgcgcaggattattcctctcacatctatttgtttgagcgttcgatatactcgccttccatgaaagcactgcaaaattggacagtgcctgatgacattacccacgactactatcgtttgatcatgcgttggcacgaattaaaagaagtgctgcaaagtaaagatagagaacgctacttggttttggtcgctggctttgtttcacaaattgacgcttttgtttttaagctgcaacatttttccgagcaaaagctgatcaagctcgcttgggtcggtggtttaggcttgggtgggattttattggtgagcatttttgttgttcactttgtgcgtcgtgaagtggttacgccactcaaggcgatggtcaccgccagtgagcaaattcaatcgcgctcgtttgatgtttccctcaatgtcaccagtgataatgaaatgggtattctcaccagaaccttcaacaatatggcagctgacctgggtaaactctaccgaggtttggaacaagcggtgaatgagaagacgcacaagctgcaacacgccaatcagtctcttcaggtgctgtaccattcctctcaagagctgacggcatcacgcatcagccaagagaacttccaagcgattttgagacacattgtgagtatcgaaggcattgtgtccgccaaattagagattgaagagatcggcgagcgtaacttggtgctcactgaaggccctaaatgcgtcgggcgttgtaatcaaaaagcgttaacgctcgatgggcaacacctagggtatttgcattggtgcagcggtttgccgtgcccagatcaagcgttgatcgacaacttcgtgcaaatcctatcgcgtgcggtctactacaatcaggcgcaaagacaagcggaacaactacttttgatggaagaacgagcgacgattgcgcgcgagttacatgattcgttggcacaatctctttcttacctcaagattcaggtatcattgctcaaacgcagtgtcgcgaagttgaacgatgagcctcagctagcgcgcaccaatcaagtgattgcagaattagatactgggttgtcgtcggcatatacccaattacgcgaactgctgacaactttccgactcacgattaaagaaggcacctttggtcaagcgctacaagaaatggtggtgcaactgggggatcaaacggaagcggagattcatttaaccaatgatctttcgtcggtggaactggacgctcaccaacaagtgcatttgttgcaactgattcgtgaagccaccatcaacgccattaaacactctaaagctgccaacattcggatcgaatgttgtgaagaaggggagtgggtcacggtatccgtgagtgatgatggggtagggtttgatcagtgtaaccagaaattgaatcactacggaatgtccatcatgcaagagcgagcagcgcgtttgaacggatcgttatcggtcaccgcatcgccacagaatggttgtgctgtagtgttaaaatatcaacgtattaaggaaacacgaatttga

SEQ ID NO: 3161 - protein, 571 aa, Vibrio vulnificus YJ016
MLKTVKKSVTSTIAKAMGLILLLSIATTSFAIINLASSLNDAEAVNVAGSMRMQSYRLAHDIQINAQDYSSHIYLFERSIYSPSMKALQNWTVPDDITHDYYRLIMRWHELKEVLQSKDRERYLVLVAGFVSQIDAFVFKLQHFSEQKLIKLAWVGGLGLGGILLVSIFVVHFVRREVVTPLKAMVTASEQIQSRSFDVSLNVTSDNEMGILTRTFNNMAADLGKLYRGLEQAVNEKTHKLQHANQSLQVLYHSSQELTASRISQENFQAILRHIVSIEGIVSAKLEIEEIGERNLVLTEGPKCVGRCNQKALTLDGQHLGYLHWCSGLPCPDQALIDNFVQILSRAVYYNQAQRQAEQLLLMEERATIARELHDSLAQSLSYLKIQVSLLKRSVAKLNDEPQLARTNQVIAELDTGLSSAYTQLRELLTTFRLTIKEGTFGQALQEMVVQLGDQTEAEIHLTNDLSSVELDAHQQVHLLQLIREATINAIKHSKAANIRIECCEEGEWVTVSVSDDGVGFDQCNQKLNHYGMSIMQERAARLNGSLSVTASPQNGCAVVLKYQRIKETRI

SEQ ID NO: 3162 - DNA, 1722 bp, Erwinia carotovora subsp. atroseptica SCRI1043
  CDS (1)..(1722): transl_table=11
gtgatggtcaaacgtcctgtttccaccagtctggctcgcgcatttttttatatcgcgttgctctcattcctgacgacgggcattgcgttgctgacgttagccagtggtttgcgcgatgcggaggcgatcaacgttgctggctccatgcgtatgcaaagctatcgcatggggtatgacctacagggcgatcgtgcagcgttagaagcgcatcgccacctctatgcgcaaacgctggattccccagtttttcatctgttggatcgctggtatgtgccgcgcgatgtacgcgatcgttattccgcactgttgcagagctggaaaacgatggatgagcgcctaagcgcgggggatcgggtgtggtatcaggacaatattgttcgctatgtcacgcagatcgatctctttgtgctggcgttgcagcattattccgagcgcaagatgatgatagtggttgtgacatcaataattggttcgatcactatctatatactgatcttctttacgctacgccgcattcgtcgtcaggtcgtcgtaccgttgaataagctgatggcggcctgtgcgtccattgagaaggggcgttttactcattcgcggctggatgtcaatctgcctaacgaattgggattactggcgcaaaccttcagcagcatgactgacgaattgcaaaagctctatcgctctctggaagacaaggtacggcagaaaacgctgcgtttgcaggaagtgaaccgcatgctgaaggtgttgtataactgttctcaggcgatgaatgtcagcacgatcgacaggcattgttttcagcagattctgcaaattgttcatcgctatgaaacggtcgtctgtctggaaatgcgggtaggggagaactggctgttatgtgaaggccagccggacgagcagacagcgtggcagacgctgcccatccgtttgcaagaggtcgagtttggacagttgcggtggcaggcatcaacgcagcagccgtcggcgcagttgatggaaagcgtcgccaatatgctggggcgcggcctctattttaatcaggcgcagaagcactaccagcagttgttactgatggaagaacgagcgactatcgcgcgtgaactgcatgactcactggctcaggtgctttcttatctgaatatccagatgacgttattaaagcgcgcggtagcggaagagaatgcgcaggctcggcagatcatcaccgattttgaacaggcgttaagcgatgcttaccgccaactgcgggaattgttaggaacgttccggctgacgctgcaacaggctgatttgcctgcggcgatgcaggaaatgattgaaccgctaagagtgcagactccggcgacgattgatatcgattgccgtattcctacgcaggcgctagatgcatcacagcaggttcacctgctgcaaattattcgtgaagcggtgctaaacgccattaaacacgcgcaggcgacgacgattaccgtcaactgttgtacgcagcccgatggtagtcattgtgttgatattcgagatgacggctgcggcattatcaatcaggaagaacccgcaggacattacggtttaaatattatgcaggaacgtgccgaacggttaggaggacgattagctattggtctccaccctgaaggagggacgcaggttagcgttcgtttttcgacgccgacgacagcgcgtgaacgcgacaacacgaataatctctaccctgaataa

SEQ ID NO: 3163 - protein, 573 aa, Erwinia carotovora subsp. atroseptica SCRI1043
MMVKRPVSTSLARAFFYIALLSFLTTGIALLTLASGLRDAEAINVAGSMRMQSYRMGYDLQGDRAALEAHRHLYAQTLDSPVFHLLDRWYVPRDVRDRYSALLQSWKTMDERLSAGDRVWYQDNIVRYVTQIDLFVLALQHYSERKMMIVVVTSIIGSITIYILIFFTLRRIRRQVVVPLNKLMAACASIEKGRFTHSRLDVNLPNELGLLAQTFSSMTDELQKLYRSLEDKVRQKTLRLQEVNRMLKVLYNCSQAMNVSTIDRHCFQQILQIVHRYETVVCLEMRVGENWLLCEGQPDEQTAWQTLPIRLQEVEFGQLRWQASTQQPSAQLMESVANMLGRGLYFNQAQKHYQQLLLMEERATIARELHDSLAQVLSYLNIQMTLLKRAVAEENAQARQIITDFEQALSDAYRQLRELLGTFRLTLQQADLPAAMQEMIEPLRVQTPATIDIDCRIPTQALDASQQVHLLQIIREAVLNAIKHAQATTITVNCCTQPDGSHCVDIRDDGCGIINQEEPAGHYGLNIMQERAERLGGRLAIGLHPEGGTQVSVRFSTPTTARERDNTNNLYPE

SEQ ID NO: 3164 - DNA, 1809 bp, Erwinia carotovora subsp. atroseptica SCRI1043
  CDS (1)..(1809): transl_table=11
atgttgaaacgtttcctgctgccgctgtcgctcgtcaatcaggttgcactattgatgctgctactcggtttgctgggtattgcaggcatgtcggtttccagttggatgtctcaaagcattcaagggaacgcgcacgccattaataaagcgggctcactgcgtatgcaaagctaccgtctgttatcgatggtaccgctctctgccgagaatgaaatttacctgcaagagctggaagaagacgaaataagcagtgacttgcagcaggccgtacgccgagaagggctcagtgagcaattcactgcgctgcgtgttttctggctcgataatctgcagccgcatctgcgacaggcaacgcattccgccgatgcctcggcggatgtcgctcgcttcgtgaaacagctggacgatctggtttccgccatcgatcataaaaccgagcagcggttgatgatggtcacgctggtgcagcgtatcttcattggcatcatgttcatcctgctgatcgctacatttttttatctgcgtcgccgtctgctgacaccgtggcgacgtttggtttcgatggcgcaggctatcgggcaaggtgatttcacccagcgtgtcgctatcaccggacacgacgaaatgagcaaactgggacaggcgctgaacagcatgtcggatgaactttccgccatgtatcacagcctggaacaacgcgtcgccgagaaaacggccgatctgcaacagaaaaacgatctactctctttcctttatcgcgccagtcgacgcctgcataccggcgcaccactgtgcagccgactgatgccaatcctgaacgaactgccgtcgttaacgccgctccgcaatattcaactgcggctgtatgaagataacaatcaggaacaatttcatcagtttagcgattgcagccagtcacagccggagcactgcccggataacagctgtcagagttgcggtatgcaggtaaaacgtgacgacctgcagggtgaacctcactgctgggatctgcacgacaaacatgggcaatatggcgttgtgttggccacactgccgggcaataccgcgctgagccgcgatcagaatcagttgctgaatacgttacttgaacagttgaccagcacgctggcgctggagcgtcaatccaaccaccaacagcagttaatgctgatggaagaacgcgcaacgattgcccgcgagctgcacgactctatcgcgcagtccctctcctgtctgaaaattcaggtgagctgcctacaaatgcagggcggcgatttacctcctgcctcgcaacaactgctgatggaaatgcgggaagaattgaacaccgcgtatcgccaactgcgtgaactgctgacgaccttccggctgaagctttctgaatccggcttactcgcggcgctgcgagcatcgatcgatgaattcggcaagcggctggggtatcccatcgaattacattaccgtttgccaccgcagtcggtatccgctcaccaaggcattcacgttctgcaaattgtacgtgaagcgctgagcaacatttataagcacgcgcaggccacgcaggtcgatatcacgctgcaactacgtcagggttacatcgaactcagcgtgaccgataacggcatcggtattcctgatgatgccagccgcgccaaccactatggacttattatcatgcgtgaccgtgcacggggtttgcacggcgaatgcattgttcgacgccggccgtcgggaggcactgaagtgaatgtcagcttcctctccgaataccgtcaccggctgccattaacaggagaaactcatgattaa

SEQ ID NO: 3165 - protein, 602 aa, Erwinia carotovora subsp. atroseptica SCRI1043
MLKRFLLPLSLVNQVALLMLLLGLLGIAGMSVSSWMSQSIQGNAHAINKAGSLRMQSYRLLSMVPLSAENEIYLQELEEDEISSDLQQAVRREGLSEQFTALRVFWLDNLQPHLRQATHSADASADVARFVKQLDDLVSAIDHKTEQRLMMVTLVQRIFIGIMFILLIATFFYLRRRLLTPWRRLVSMAQAIGQGDFTQRVAITGHDEMSKLGQALNSMSDELSAMYHSLEQRVAEKTADLQQKNDLLSFLYRASRRLHTGAPLCSRLMPILNELPSLTPLRNIQLRLYEDNNQEQFHQFSDCSQSQPEHCPDNSCQSCGMQVKRDDLQGEPHCWDLHDKHGQYGVVLATLPGNTALSRDQNQLLNTLLEQLTSTLALERQSNHQQQLMLMEERATIARELHDSIAQSLSCLKIQVSCLQMQGGDLPPASQQLLMEMREELNTAYRQLRELLTTFRLKLSESGLLAALRASIDEFGKRLGYPIELHYRLPPQSVSAHQGIHVLQIVREALSNIYKHAQATQVDITLQLRQGYIELSVTDNGIGIPDDASRANHYGLIIMRDRARGLHGECIVRRRPSGGTEVNVSFLSEYRHRLPLTGETHD

SEQ ID NO: 3166 - DNA, 1782 bp, Yersinia pseudotuberculosis IP 32953
  CDS (1)..(1782): transl_table=11
atgaaacgttatctgaccccattggttaatcagattgctttgttgatgatactgctgggcatgctagggctggcgggtatggttatttcatcatggatggcacaaagcattcagggcaatgcccacgccatcaaccaagcaggctcattgcgtatgcagagctacaggttactttcaatgatccctttggatagcaatgagttatcttatctggtggcattggagcaagacaaaaccagtcacgacctgcaacaagcgctactgcgggaagggttaatgggtcaatatcagcaaattgaacgttactggcaagacacgctgaagcctcagttacaacaggccaaacaccctgatgaggtggcggccagtgtggcggattttgttcaccaacttgatgctttggtattagccattgaccataaaactgaacaacggctgttacaggttaccctgatcccgctggtattcagccttctgacactcagcctattgttggcaatgatctattatttgcgccgccggttactgcgcccttggctgaagttaatctcaatggcgaatgccattggccgaggtgattttagccaacgctatacgctggactatcagcgtgacgaaatggggatgctgggtacggcattgaatcgaatgtcgcaagaattgtcattgatctacggcgatcttgagcagcgagtcgtaaataaaaccgctgatttacaacagaaaaatcaggttttggcgttcctttatcacagtagccgccaactgcatactcatcagccattaagtgagcgtttagcccctgtcattgaacagctacaagcgttaaccacgctagaaaatgtacaaatttgtttgtatgaaaaccatctgtatcgtgaccatgtcaatcacaatgcggatgcagaatatctgatgcctaaaaaccgcccggcgtcattaacgatcagcggccctgttcgccccatcagccaccctgagttatggcaatcactgagttggagtttaagcgataaactcggtcaatatggtttattactggcaaaacaacccctcgataaccccctcaattctgaccagcagcaactggtcgatatgttagttgagcaactgaccagcacactggcgttagagagccaagccagacatcagcaacagttattgttaatggaggagcgttccgctattgcgcgggaactgcatgactcaatcgctcaatccctttcctgcctgaagatacagatcagctgtttgcaaatgcaaactccggacttaccggaaaacagcaacctattgataaaacaaatgcgtgatgaactcaatatcgcctaccgtcaattacgtgagttactgaccacattccgtctgaaactaaatgaagccactctggaggccgcgttacaggctctggtgaatgagttcagcgaaagagctggtctatcgattaccttcaaatatcaattacctccagatcaggtaccaaaccatcaagccattcatatggtaaatattgtccgtgaggcgctgaataatatctataagcacgcccgtgccagcgaagccacggttaacgtccacttagaacaaggcgatgtggtgatgtccataaccgataatggttgtgggatagggcaagccagtgaacaacccaatcattatggtctgatgatcatgcaagatcgcgccaacagtttacatgggcactgtagtatcaatcagaaagagggaggcggtactgaggttcgagtgcaatttacccccgagaataatgaccttgactga

SEQ ID NO: 3167 - protein, 593 aa, Yersinia pseudotuberculosis IP 32953
MKRYLTPLVNQIALLMILLGMLGLAGMVISSWMAQSIQGNAHAINQAGSLRMQSYRLLSMIPLDSNELSYLVALEQDKTSHDLQQALLREGLMGQYQQIERYWQDTLKPQLQQAKHPDEVAASVADFVHQLDALVLAIDHKTEQRLLQVTLIPLVFSLLTLSLLLAMIYYLRRRLLRPWLKLISMANAIGRGDFSQRYTLDYQRDEMGMLGTALNRMSQELSLIYGDLEQRVVNKTADLQQKNQVLAFLYHSSRQLHTHQPLSERLAPVIEQLQALTTLENVQICLYENHLYRDHVNHNADAEYLMPKNRPASLTISGPVRPISHPELWQSLSWSLSDKLGQYGLLLAKQPLDNPLNSDQQQLVDMLVEQLTSTLALESQARHQQQLLLMEERSAIARELHDSIAQSLSCLKIQISCLQMQTPDLPENSNLLIKQMRDELNIAYRQLRELLTTFRLKLNEATLEAALQALVNEFSERAGLSITFKYQLPPDQVPNHQAIHMVNIVREALNNIYKHARASEATVNVHLEQGDVVMSITDNGCGIGQASEQPNHYGLMIMQDRANSLHGHCSINQKEGGGTEVRVQFTPENNDLD

SEQ ID NO: 3168 - DNA, 1758 bp, Mannheimia succiniciproducens MBEL55E
  CDS (1)..(1758): transl_table=11
atgaaaagctcaagcaagaaaggtttactcatgaaaagtttactgagttttaaacgactgacaaaacattcggtaaccacatttatcgcccattatctctcgttgatcattatcttagcgggcattattacgaccttttctttcgctattatgggaagcaacaaatctgatgcggagctaattaatgttgccggctccttgcgtatgcaaagttaccgtttaatctatacgatggaatatgagccggaaaaagtggatatcggtcttcgccaatatcgaataagtttgcattccaatccactcgtgaccattcaccatcatcttttaactcccggcgatgtaaaacagagttattcggatttagtgcgccgttggcaggaaatggaaaatcttgcccgtactaaccaacaggaacaatatcgtaatcaaattaccagttatgtgaatcagctggatcaattcgtttacagcctgcagcgttttgccgaaaagaaagtgattattgccgtgttggtaattattctttctatgctgctgattgtggggatcgcttcttatttaatctggcatacccatcaggaaattgtcaaaccgctgaatcaacttatgcgtgccagcacacagattgaaatgcgccagtttcagcatattcttttagataccaagcgtgacgacgagctaggacgtctggcgaaatcctttacccacatgtctaacgagttacacaaactctatgccaacttagaagaaaaggttacggaaaaaacgcaaaaaatcaatcaggtcaatcgatcgctagccatgctttattattgttcgcaggaattaagtgccagcgaccttaaccgtaacaaactgctgcatgttttaaaacacgtaatggcgacggaacatttgcgcgcttttgagttggatctgattgaattgcgccaatggaatattactttaggcgaaccttcagtggcgctaagttggcaggaacaaaccattggttcggaagataacaagctaggcagtcttcgttggcaggcaggcttgccttgtccggatacgagaaccatggaaaacatcgcacaacttttaggcagaaccctttatttcaaccaaacacaacgccagcaacaacaattattactgatggaagaacgttccattattgcccgggaactgcatgattcgctggcgcaggtattggcttttttacaaattcagctgaccctgttaaaacacaacttaaataaagacgacgataaagcaaaacggcaaagcttactgattattaaagacttcgaacaggcgttaagcgacggttacattcagttacgcgaattattagccacttttcgcttgacggtacaagaagctaatttaaaattagctcttgagcaggttgttgactctttacgtaatcaaaccgatattcaaatgaccgtcgattgttcattaccgtcgcagacctttaatcctcagcaactcattcatgcattgcaaattgttcgcgaatcaaccctcaatgcaattaaacactcaaaagccgatttgattgaagtgatcgcccatacaaatgaagaaggggagcaggaattaatagtgcgtgataacggcgtgggtatcgccagtctgaacgaaccggacggccattacggtttgaatatcatgcaagaacgcagccagcaattaaatgccaaattaaccattagtaaccgggcgaccggtggtactgaagtcaaaattacactaccaaatactttagcctaa

SEQ ID NO: 3169 - protein, 585 aa, Mannheimia succiniciproducens MBEL55E
MKSSSKKGLLMKSLLSFKRLTKHSVTTFIAHYLSLIIILAGIITTFSFAIMGSNKSDAELINVAGSLRMQSYRLIYTMEYEPEKVDIGLRQYRISLHSNPLVTIHHHLLTPGDVKQSYSDLVRRWQEMENLARTNQQEQYRNQITSYVNQLDQFVYSLQRFAEKKVIIAVLVIILSMLLIVGIASYLIWHTHQEIVKPLNQLMRASTQIEMRQFQHILLDTKRDDELGRLAKSFTHMSNELHKLYANLEEKVTEKTQKINQVNRSLAMLYYCSQELSASDLNRNKLLHVLKHVMATEHLRAFELDLIELRQWNITLGEPSVALSWQEQTIGSEDNKLGSLRWQAGLPCPDTRTMENIAQLLGRTLYFNQTQRQQQQLLLMEERSIIARELHDSLAQVLAFLQIQLTLLKHNLNKDDDKAKRQSLLIIKDFEQALSDGYIQLRELLATFRLTVQEANLKLALEQVVDSLRNQTDIQMTVDCSLPSQTFNPQQLIHALQIVRESTLNAIKHSKADLIEVIAHTNEEGEQELIVRDNGVGIASLNEPDGHYGLNIMQERSQQLNAKLTISNRATGGTEVKITLPNTLA

SEQ ID NO: 3170 - DNA, 1947 bp, Azoarcus sp. EbN1
  CDS (1)..(1947): transl_table=11
gtgaacagtgccggcaatgcggatgtccttgtcggcgtcagggtcatggggcgtgtacgcgcctcgctcgcaggtcgcgcgacgcagctgctgctggtgctggcgttcgtcgccgtggcgttcatcagcctggtcggaatcggcgcctcggtggccatcgtcgaaactgtccaggacagcggcagcgcggtcaacgcggcgggtggcctgcgccgtctcgctcatcgcgcagccagcgtcgcgctcgcagcagccctcgatggccgcaccggacatgccgacgtcgcagcggcgatcggcgcgttcgaggccgagctgggccatgcgacgctggagaaggtgctcgagcgcgaaccggacagcgtcgtcgcctcgatctaccgcggcatccatagagactggtatgtgaacctcaagccgcgcctgctcggagcgccggagcgcgcgagcgaaagccccgatgtgttgttctacgagaacctgctcgccgatgtcgacgccttcacggcgcagatcgatgcgctggtggcggtgctcgagcgggaaaccgagaccggcctcgagcagctccgcatcacgctggcggttgcgctgggaatggtgatgatcgtcatgatcgcggcgctttgcgtcatccgccggcgcgtgttcaggccgctgaccgagctgcacgcctgtgccgcacgcatcgccggcggagatttccgggcccacagccgctacaccgggcgcgacgaactcggccgcgtgggttcggcgttcaacgcgatggccgacgagctgtcgaccgtctatcgcgatctcgagcagcgggtcgaacagaagaccgcggatctgacgcgcagcaaccgcgcgctggagctgctgtatcacgtcatcgcgcggctctatcacgccccggcctcccccgagacgtatgtcgagacactcaaggatctcgagcaggtgctcgggctcaaaggcagtttcgtctgcgtgcagcccaagcacgggggcgtcgcgacagtcctgtcgacgacgatgggcgactgtccgtcccgctcaggcagcgaggaggagtgcacccattgccccgggcgggcgatgccgtggagctatcgccgcgaagatggcttcgatgtgttcctggtgccgctgcgcgatgccgatcacctctacggcatgatgcgactcgcgctgctaccgggcgagcggctgcgcgcgtggcagcacacgctggtcgaagcagtatcccgccacatggggatcgcgctgggcatttcgcaccagagcgagcgcgagcggctcctcgcgctgcaggaggagcgttcgatcatcgcgcgcgaactgcacgactcgctggcgcagtcgctgtcgtacatgaagatccaggcgagcctgctgtcgtcggcgctgcagcggcccgagcgtcgcgacgacgcgtccgacatcctggccgacatgaaaggcggcatcaacgccgcgtaccggcagctgcgcgagctgctgtcgacgttccgcctgcagatggaaggggattttgcccgtctgctcggcagcaccgtcgaggagtacgccggccgcagcggcatgccgatcgacctggagatccgcctcggcgggcgtcatctgaacccgaaccaggaaatccacgtgctgcacatcatccgcgaggcgttgtcgaacgcgacacgccatgcccgtgcgagctcgatccgcgtcgggctgttcggccatccggacggcgtccgggtgatcatcgaggacgacggcaaaggcatccgagcggccgctgccaccgaaccccaccattacggcctggcgatcatgggcgagcgggcgcgcggactcggcggagtgctcgagatcgtgccccgtcccgacggcggcacgcgcgtagccgtgcgcttcgatccggtcgcccggcacgaggcttcgtcacccgcacccactcccgaggcgcaatga

SEQ ID NO: 3171 - protein, 648 aa, Azoarcus sp. EbN1
MNSAGNADVLVGVRVMGRVRASLAGRATQLLLVLAFVAVAFISLVGIGASVAIVETVQDSGSAVNAAGGLRRLAHRAASVALAAALDGRTGHADVAAAIGAFEAELGHATLEKVLEREPDSVVASIYRGIHRDWYVNLKPRLLGAPERASESPDVLFYENLLADVDAFTAQIDALVAVLERETETGLEQLRITLAVALGMVMIVMIAALCVIRRRVFRPLTELHACAARIAGGDFRAHSRYTGRDELGRVGSAFNAMADELSTVYRDLEQRVEQKTADLTRSNRALELLYHVIARLYHAPASPETYVETLKDLEQVLGLKGSFVCVQPKHGGVATVLSTTMGDCPSRSGSEEECTHCPGRAMPWSYRREDGFDVFLVPLRDADHLYGMMRLALLPGERLRAWQHTLVEAVSRHMGIALGISHQSERERLLALQEERSIIARELHDSLAQSLSYMKIQASLLSSALQRPERRDDASDILADMKGGINAAYRQLRELLSTFRLQMEGDFARLLGSTVEEYAGRSGMPIDLEIRLGGRHLNPNQEIHVLHIIREALSNATRHARASSIRVGLFGHPDGVRVIIEDDGKGIRAAAATEPHHYGLAIMGERARGLGGVLEIVPRPDGGTRVAVRFDPVARHEASSPAPTPEAQ

SEQ ID NO: 3172 - DNA, 1956 bp, Azoarcus sp. EbN1
  CDS (1)..(1956): transl_table=11
atgctgcgtctgcgcaacagtctggccaccaaaatcaccggcattctgctggtgtttttccttgtcgccctcaccgcgatcggcctgacgttgttcatctcctggcagctcgaaggagcggctgccgcgatcaacgatgccggcagtttgcggatgcgcgcctaccgcatcgaccacctgttggcacgtggcccggctgcgacgtcgaatgatccgatggcgtttaccgcttccctgaagtcggaattcgacgacttcgaacgtgtgttcggcgaacttcgtcgcggtgacccgcgccggccactgttcatcccgcgcgacaatggcattcccgcggatctcgacgagatggccgagttctggtccctgcgcatccgtcccgtgctcgccgacctgatcgccacatccgaccccgagcgccgtcgccccggcctggccgaattcgatcgcaccgtcaaaagcttcgtctccgggatcaacgaagtcgtgctcaagatggagcgcagctacgcccgcaacaccgatattctgcgcgcctcgcaagtgtccctgatcgcgctggcgatcatcggcacactggtcctgatccgtttcttcttcgtcctcgtgatccagccggtgtgcgaactgcaggacggcatgaagcggatggaacaggaggatttcaatgcgcgcgtcccggtgctcgcgagcgacgaattcggcgaattgtcggaaggcttcaaccgcatggcggtccacctgcaaggcctgtacgccacgctcgaggagcgggtcgcggcaaagacgcgcagtctcgagggaaaaaaccgcgaactcgaaatcctctacgatatcggcgctttcctgcgtgagcccagtgacgtggacagcctttgcagaggttttctgcagcgcgtccaggcgaccttcggtgccggggccagctccgcgcgattgctcgacagcggatccgagaatctctgcctgaccgtgcacaacggactcgaccgggagttcatcgatcgcgaggcggtgctccaatgcggcgaatgcctgtgcggcgaggcggtgcggcgcgggacatcgctggtgtcggaattgagcgctcccgatccggctctgacgctgtcggtatgccggcgagcaggcttccaggtcatcacggccacggcgattaccgcgaacaaacagacgctcggcatctacaacctgtatttcgtcggcgctcggcccctttccgactccgaccgcctgttgctcgaaacgctcggccagcagctgggcatcgcgatcgagaaccagcggctgcaggcgagcgggcgcgaacacgccgtatcggaggaacgcaacctgctcgcacgcgaactgcacgattcgatcgcgcagggtctcgccttcatgaacctgcaggtgcagatgctcgagagcgcgctcgaccgcaatgaggcgggcgaagcgcgcgacacgctggcgatgctgcgtcagggcgtgcaggagagctatgacgacgtgcgcgaactgctggtgcatttccgcacgcgcgtcgaaaaacaggacttggccctggcgatcaccgcgaccctgcgtcgcctggccgaacaaaccggcatcgccaccgacctcgacgtgctgggcgatgcagccccgctcgacgcggaagccgagacgcaggttctctatgtcgtccaggaggcgctgtcgaacgtgcgcaaacacgcgaatgcgcggtctgtgaaagtggtgatccgccgcggcatcgacggactttcggtggtcgttcgcgacgacggcgtcggtttcgatgaagccgaccgcagtaccgcagcgcaggaggcccacatcggactcgagatcatgagagagcggacgctgcgcatcggcggacgattctcgatacgttccgcacgtggcaagggtaccgaaatccgtgtcgaactttcccgcgtcaagaaggaaaacctcatcgatgcctga

SEQ ID NO: 3173 - protein, 651 aa, Azoarcus sp. EbN1
MLRLRNSLATKITGILLVFFLVALTAIGLTLFISWQLEGAAAAINDAGSLRMRAYRIDHLLARGPAATSNDPMAFTASLKSEFDDFERVFGELRRGDPRRPLFIPRDNGIPADLDEMAEFWSLRIRPVLADLIATSDPERRRPGLAEFDRTVKSFVSGINEVVLKMERSYARNTDILRASQVSLIALAIIGTLVLIRFFFVLVIQPVCELQDGMKRMEQEDFNARVPVLASDEFGELSEGFNRMAVHLQGLYATLEERVAAKTRSLEGKNRELEILYDIGAFLREPSDVDSLCRGFLQRVQATFGAGASSARLLDSGSENLCLTVHNGLDREFIDREAVLQCGECLCGEAVRRGTSLVSELSAPDPALTLSVCRRAGFQVITATAITANKQTLGIYNLYFVGARPLSDSDRLLLETLGQQLGIAIENQRLQASGREHAVSEERNLLARELHDSIAQGLAFMNLQVQMLESALDRNEAGEARDTLAMLRQGVQESYDDVRELLVHFRTRVEKQDLALAITATLRRLAEQTGIATDLDVLGDAAPLDAEAETQVLYVVQEALSNVRKHANARSVKVVIRRGIDGLSVVVRDDGVGFDEADRSTAAQEAHIGLEIMRERTLRIGGRFSIRSARGKGTEIRVELSRVKKENLIDA

SEQ ID NO: 3174 - DNA, 1704 bp, Haemophilus influenzae 86-028NP
  CDS (1)..(1704): transl_table=11
gtgtatactaaaggttccgtttccacccgtattgcgaaatatttatttatcattcttatcgttgctggtgtgattagttctctaagtttggcaattatgagcagtaataaatatgatgccgaagccattaatatttcaggttctttgcgtatgcaaagttatcgcttactttatgaaatgcaagaacaaccagaaagcgtggaaacgaacttacgccgttatcatataagccttcattcatctgctttactagaagttcaaaatcaatttttcacaccgaatgtattaaaacattcctatcaaaacattttgcaacgttggacgaacatggaaaaatatgcacgccaacaggatgtaaaaaactatagtaagcagcttactaactatgttgcagatgttgattattttgtgtttgaattacaacgttttagtgagcagaaatggattttaggcgtttcagtattaggttttgcgatgttgttaattttgctgatggtgtcttatgtgatttggtacacaaaccgagaagttgtgaaacctttgcatttaatgacaaaagccagtatgcaagtgcaaatgcgtcaattcaatcatattccacttgacacaaggaaacaaaatgaacttggcacactggctcgcgtatttacacaaatgtccacagaactgggacagctttattcgcgtttagaagaagcggtaaacgaaaaaacgcaaaagttgcgtcaaactaaccgcactttaagcactctttatcaaagtgctcaacttctgaatacaaacacaattaacgataaaattttaaatcaagttttgcattacatttttattagcgaccatttgaacttcgttaaagtggaagtgatgggggctgaacattgggatattacattgggtaagcaagatgctaataatgaactacaaatcgaaaccctttctgtggataacgaagaattaggtgtactgtcttggcaagcaggattaccttgtccagatccccgaattatgcaaaatttagcgcaaatgcttgctcgtgcgctttatttccataaaaatttacgtcagaaagaacagattttattaatggaagaacgctcaattattgcgcgagagttgcacgattctttggctcaagtcttatcatttttacaaattcaacttactttgctcaaacataacctgaagaaagaagacgaacaatcaaaagaaaagagtttggcaattattgccaattttgaacaagccctttctggtggttatgcacagttacgtgagcttttagccactttccgtttaactatacaagaagcgaatttacagcttgcactaaaacaagtgattgattcattacgctcacaaacaacaatgcaaatgaatgtgaattgtcaattaccatcgcaaagtttgaaccctcaacagctggttcacgttctgcaaattgtacgtgaagccaccaccaatgcgatcaaacattctcaaggcacggtaattgaaattagcgcaagaattaatgcggaaggcgagtatgaaattttagttgaagatgatggggttggcattccaaaccttgaggagcctgaagggcattacggcttgaatattatggcggaacgttgccgtcagcttaatgcacaattgcatattcatcgccgagaacaaggcggcacacaagtcaaaattaccttgccacatacattatattag

SEQ ID NO: 3175 - protein, 567 aa, Haemophilus influenzae 86-028NP
MYTKGSVSTRIAKYLFIILIVAGVISSLSLAIMSSNKYDAEAINISGSLRMQSYRLLYEMQEQPESVETNLRRYHISLHSSALLEVQNQFFTPNVLKHSYQNILQRWTNMEKYARQQDVKNYSKQLTNYVADVDYFVFELQRFSEQKWILGVSVLGFAMLLILLMVSYVIWYTNREVVKPLHLMTKASMQVQMRQFNHIPLDTRKQNELGTLARVFTQMSTELGQLYSRLEEAVNEKTQKLRQTNRTLSTLYQSAQLLNTNTINDKILNQVLHYIFISDHLNFVKVEVMGAEHWDITLGKQDANNELQIETLSVDNEELGVLSWQAGLPCPDPRIMQNLAQMLARALYFHKNLRQKEQILLMEERSIIARELHDSLAQVLSFLQIQLTLLKHNLKKEDEQSKEKSLAIIANFEQALSGGYAQLRELLATFRLTIQEANLQLALKQVIDSLRSQTTMQMNVNCQLPSQSLNPQQLVHVLQIVREATTNAIKHSQGTVIEISARINAEGEYEILVEDDGVGIPNLEEPEGHYGLNIMAERCRQLNAQLHIHRREQGGTQVKITLPHTLY

SEQ ID NO: 3176 - DNA, 2124 bp, Psychrobacter arcticus 273-4
  CDS (1)..(2124): transl_table=11
atgcttcccaatcattattccccgtcatgctttctcataggtaaaagcttattaattatgaatagtcgtctattacgccattccctaccccttcatgcttggggcgctatctttactatttctatcttatgttttatatctacattaggtggcggcatgctagcttgggtgtcagaaacagatgctcaagccattaacaccgcaggctcgatacgtatggccacttaccgtattagctttcagttggcgactaatttttctgaaaacaatccttttgatttgaacattggtcttaagaaaaatgacttagaaggtaaaaaagaaggtacagagaatgttaagggtgagaatagaattggagagcaagataaattaagtcctatccggaaagaaaagactgaagaaatcagcactcttattgaggatatggaaagtaggcttgcggaattacatgactatcaattggccaatgcgaatgacaatgaaggaatcaacaaccaacttaagcaaatagagtcgcagtggtttcgcgagttgaaacctgctttgttatcacaagatgcccaaaaattttatatcgtctcgtttaaatacattgaagacgtggatagcttcgtcaacgagctacagtatagaaatgagcagcgtcagacgtggcagcaaatcctgcaaattgtatcgttggtgctgacggttatcattatgctagtgggtatgcagagactgcgtcaaaatgtactgatacccgtacaacagcttattaaagccaactataaatttaaacagggcaagcgcaatactaaagtgtctatatcgggctatacagaatttaatgcactcggagattcttttaatgatatggcgagcaccattgagacccatcagcgttcacttgaaagtgaagtacagataaaaacccaacatctagtgaaagccaaccaggtgctgtcgctgttttatgacttttctaaatccctaaccaccagtcaagtgagcttgtacaggctagataccttgattacagattttggcaagatcctgccgcacttagagttcactttatgcatacagaataaattcataaataataaaaacgccatcatcttacatggtgaaaaaatgaaagagctgtgtaagaagttaaactgtgataactgtttaaccaaagaaggcgtatataccaaatcctatcctatcgcccaccaaaaagtcgaattcggcgagttaaaagtgcggccaaagtcggtcctacttatcaatagtacactttttccaaataataatgacggcaatacgccgtcctcacagcgtattcagattgcaaaagaaggcagaacctttttcgagtctgaaataggttctgagctagaccttgaaaacaatgagctgattgtagcgctcaccaatctcatcagcaccgctctgtcactacgtaagcaaagacaacaggaacatcagctcattttatttgaagagcggtccactatcgccagagagttgcatgattctttggctcagtcattgtcttatctgaagattcaaatcagtgtgttagagaggcatcttaaaaatgggtctgacgaacaaaatgaagcttccgtccggcagcatattgatcaaataaaagcaggtcttagctccgcctatcaacagttaagagacttattaattaccttccgtctcaccatcgataacgataattttgatgaagcattacacgaagccgccaatgaatttgcgcttaagggtaagtttgagattacggtgagtaatcgagtgatgaccctgaacttgagtgccactgaacaaattgatttgatccaaattgctagagaggcgttgtcgaatattagcaggcatgcccaagctgaaaacgtagagattgatttgggttatgacgatgaggacaaatatattgttatgaccatcgtagataacggtgttggtatatcaggaaccgtagatcaaactcaacatcatggtctaatgattatgaaagagcgcgctcataacttaggcggggagttgattgtatctaataacgaatcacaaggcacgacaataaccgctaagtttgctcccaatttcttcgatgagaatatatccaaagaagcttatctctaa

SEQ ID NO: 3177 - protein, 707 aa, Psychrobacter arcticus 273-4
MLPNHYSPSCFLIGKSLLIMNSRLLRHSLPLHAWGAIFTISILCFISTLGGGMLAWVSETDAQAINTAGSIRMATYRISFQLATNFSENNPFDLNIGLKKNDLEGKKEGTENVKGENRIGEQDKLSPIRKEKTEEISTLIEDMESRLAELHDYQLANANDNEGINNQLKQIESQWFRELKPALLSQDAQKFYIVSFKYIEDVDSFVNELQYRNEQRQTWQQILQIVSLVLTVIIMLVGMQRLRQNVLIPVQQLIKANYKFKQGKRNTKVSISGYTEFNALGDSFNDMASTIETHQRSLESEVQIKTQHLVKANQVLSLFYDFSKSLTTSQVSLYRLDTLITDFGKILPHLEFTLCIQNKFINNKNAIILHGEKMKELCKKLNCDNCLTKEGVYTKSYPIAHQKVEFGELKVRPKSVLLINSTLFPNNNDGNTPSSQRIQIAKEGRTFFESEIGSELDLENNELIVALTNLISTALSLRKQRQQEHQLILFEERSTIARELHDSLAQSLSYLKIQISVLERHLKNGSDEQNEASVRQHIDQIKAGLSSAYQQLRDLLITFRLTIDNDNFDEALHEAANEFALKGKFEITVSNRVMTLNLSATEQIDLIQIAREALSNISRHAQAENVEIDLGYDDEDKYIVMTIVDNGVGISGTVDQTQHHGLMIMKERAHNLGGELIVSNNESQGTTITAKFAPNFFDENISKEAYL

SEQ ID NO: 3178 - DNA, 1935 bp, Thiobacillus denitrificans ATCC 25259
  CDS (1)..(1935): transl_table=11
ttggggccctgtagacaaggcgcaagggagaaagcggtgatccgttcggggcggaccaaactcgagaactcgctgctcatgcggctgggcggcatgtttgtcgcgatcaccgtgctcgcggtcaccagcatgtcgacctcgtggatggtggccgagacgatccagggcagcggcgaggcgatcaaccttgccggcagcctgcgcatgcagagttggcgcatggctgcgatctatcagcggctgcagagcgacggcgcaactgaagacgcggaggatctgggggaggcgatcgcccgcttcgaggccgacctcaaggcggcaccgattctcgccgtgctgccgagcgacgagaccacgccgctctggcacgtctaccggcaggtcgaaaacgactggcgcaccgtcgtcaagcccggcttgcaggtcacgccggccgccgggcggcccgcgcgcggcagcgtgctcgacgacattccggcgttcgtcgcccacatcaacgacctggtcaaacagatcgaggacgcggccgaggccaagatcctggtcatgcgcgtgatcctcggagcagccgtgatcgcgacgatgctcgtcgtggcgcttgccatctatctggtcaacaacattctcgtctacccgctgcgcggcctgctcgggctggccgaccagatcggccagggcaatctcgcggtgcgcaacgatctgaccggcgaggacgagatcgggcggctcggccaggctttcaaccacatggccgaagacctctcgatgctttaccagaacctcgaggcgcgggtcgaggagaagaccgcggaactgacgattgccaaccgttcgctcgaactgctttatcactcgatcgcgcggctctacaacggcccgatcgccccccgtacctacgagatcctgctcaaggacctggagaacgtgctcggcctcgggcacggcctcgcgtgtctggtggaaggcgacggcgcgacgcgcgggcgcgtgatcgcgagcaccttgccgccgctgcccgagggggccgacccctgcagcgtcatgagctgcgccgagtgtctcgcgcgcccggcgctcgcggtccacccgctcggcgacggccggcgcgtgctgtcgctgccgctgaacgacaccgagcagctgtatggcgtgttgcaactcgaaatgccgccgggcaaggaactggtccagtggcaaagccagttgctcgaagcgctgtcgcgccacatcggcattgcgatcggcaccgcgaggcgcaccgagcagagccgtcgactgtcgctgctcgacgagcgcgccgcgctcgcgcgcgacctgcacgattcgctcgcgcagtcgctcgcctacatgaaaatccaggtcagccggctcaagccgctggtcgaagggtcgggcgccggcagcgaggccggcgacgtgctggccgagttgcgcgaaggtctcaacagcgcgtaccgccagctacgcgaactgctgacgaccttccgcctgcgaatcgagggtgaaggcctcggcgccgcgctgcagaccacggtgaccgaattctccaaccgcggcggcattccgatcacgctcgtcgtccatctggccgggtgcaagctcacgccgaacgaggaaatccatgcgctgcaaatcgtgcgcgaggcgctgtccaacgtgctcaatcacgcccaggcgcgccaggccgaggtcagtgtgagctgcaacagcgacggatcggtgtcggccaccgtgaccgacgacggcatcggcatccacgggactgcacgcgcccaccattacgggatgacgatcatggaagagcgtgcgaaaaacctcggcggccggctcagcgtcgagaaccttgctgcacggggcacgcgcgtggccctccacttcgtgccgagcacgcggcgcgaggacaacggtacgattcaccccattcaaccgagctga

SEQ ID NO: 3179 - protein, 644 aa, Thiobacillus denitrificans ATCC 25259
MGPCRQGAREKAVIRSGRTKLENSLLMRLGGMFVAITVLAVTSMSTSWMVAETIQGSGEAINLAGSLRMQSWRMAAIYQRLQSDGATEDAEDLGEAIARFEADLKAAPILAVLPSDETTPLWHVYRQVENDWRTVVKPGLQVTPAAGRPARGSVLDDIPAFVAHINDLVKQIEDAAEAKILVMRVILGAAVIATMLVVALAIYLVNNILVYPLRGLLGLADQIGQGNLAVRNDLTGEDEIGRLGQAFNHMAEDLSMLYQNLEARVEEKTAELTIANRSLELLYHSIARLYNGPIAPRTYEILLKDLENVLGLGHGLACLVEGDGATRGRVIASTLPPLPEGADPCSVMSCAECLARPALAVHPLGDGRRVLSLPLNDTEQLYGVLQLEMPPGKELVQWQSQLLEALSRHIGIAIGTARRTEQSRRLSLLDERAALARDLHDSLAQSLAYMKIQVSRLKPLVEGSGAGSEAGDVLAELREGLNSAYRQLRELLTTFRLRIEGEGLGAALQTTVTEFSNRGGIPITLVVHLAGCKLTPNEEIHALQIVREALSNVLNHAQARQAEVSVSCNSDGSVSATVTDDGIGIHGTARAHHYGMTIMEERAKNLGGRLSVENLAARGTRVALHFVPSTRREDNGTIHPIQPS

SEQ ID NO: 3180 - DNA, 1716 bp, Actinobacillus pleuropneumoniae serovar 1 str. 4074
  CDS (1)..(1716)
atgaataaaccggttaattattctaaatattccatcgctcgtcgtatcggattctattttctggtgatgattgcttttgcctctttaatcagcggcatttcactcagtattatgtggagtaataaatcggatgcggggctgattaatgtctccggttcgttgcgaatgcagagttaccgttttctttatgaaatggaacatcatccgcaatctattccggctcgtctagccgaatatcgccaaagtttaaattcgccggagattcaaaactctttagaacataagtgtttattgccgaaagaggttacggaggcttatgccaagttgcaaaaaaactggctggaaatggagtcttttatcgttaagcgggatagaaacgcctatgaagccaacatagaaggctatgcgaatcaagtgaataattttgtttggcagttacaggaatttgtcgaactgaaattaaaagtggcaatcggcgtaattgccgtgtcgatgttactgattattgcgttagcctatttcggcgtatggtacacccgtaaacgtattattactccgcttaatcaattggtcacggcaagccgacaagtgaaaaacgaagattttgatcatatccgattggcggtggacgatcctaacgaactcggtcttctttcgtccgcttttacgcagatggcaagcgagctggctaaactttacgcttctttggaagaaaaagtggaagataaaacgcgacgtttaatggcggttaatcgctcgttattggtacttttccaatgttctcaattactaaccgccaaaccggtcaatcaaagcgtactatttaaagtattacaaacgattttggataacgaacaattacgcggtatcgaaattcaggtctatggtgcggattattggaacgtaactattgataatgcgccggaacaagattggcagtttaatgaaattgcaattgaaaatgaaaaactggctttattacgttggaaaccgtcattactttgtccggatgaacgcctaattcaaaacgtatcggaaatgatcggacgtagtctttatgtattgcaggtacaaaagcagcaacaacaattgctgttaatggaagaacgttcgattattgcacgagagctgcacgattcgctggcacaatctttaacttttttcaaaattcaagtcagtttattaaaacgtaacggcgaagttaaacaggattgggataaacaaaaagcaattttaaatgattttgaaaaagccttaaatgaagcttatagccaattgcgtgagttactttcaacctttcgcttaaccattgaagaagcgaatctgacccatgcgttagaacgagtattggattcgttacgcattcgaacatcggctcaaattcgtctgaattgtaaattgccttcgcaaatttttagtgcgcagcaacaagttcatgcgttacagattgtgcgtgaggcggtgattaatgcgattaaacatgctaatgcaacggaaatctatgtggtggcggaaaccaatgccgatggtgaacattgcttaattattcgtgacaacggcaaggggattgcaagcgatattgagccggaagggcattacgggctgacaatcatgaaagaacgcgcggcggaattaaaaggcgaattcagtattaaaaaccgtccggaaggcggtgttgaagtagtggtcgtattaccgaatatgattaccgcataa

SEQ ID NO: 3181 - protein, 571 aa, Actinobacillus pleuropneumoniae serovar 1 str. 4074
MNKPVNYSKYSIARRIGFYFLVMIAFASLISGISLSIMWSNKSDAGLINVSGSLRMQSYRFLYEMEHHPQSIPARLAEYRQSLNSPEIQNSLEHKCLLPKEVTEAYAKLQKNWLEMESFIVKRDRNAYEANIEGYANQVNNFVWQLQEFVELKLKVAIGVIAVSMLLIIALAYFGVWYTRKRIITPLNQLVTASRQVKNEDFDHIRLAVDDPNELGLLSSAFTQMASELAKLYASLEEKVEDKTRRLMAVNRSLLVLFQCSQLLTAKPVNQSVLFKVLQTILDNEQLRGIEIQVYGADYWNVTIDNAPEQDWQFNEIAIENEKLALLRWKPSLLCPDERLIQNVSEMIGRSLYVLQVQKQQQQLLLMEERSIIARELHDSLAQSLTFFKIQVSLLKRNGEVKQDWDKQKAILNDFEKALNEAYSQLRELLSTFRLTIEEANLTHALERVLDSLRIRTSAQIRLNCKLPSQIFSAQQQVHALQIVREAVINAIKHANATEIYVVAETNADGEHCLIIRDNGKGIASDIEPEGHYGLTIMKERAAELKGEFSIKNRPEGGVEVVVVLPNMITA

SEQ ID NO: 3182 - DNA, 1869 bp, Pseudomonas aeruginosa UCBPP-PA14
  CDS (1)..(1869)
atgaacaaggcgaccgcgccggacgctgaccagcgggacagattctttggaggtagtgacagggccggaaagccgatcctgcgccgctccctggtagtccgcttcggctgctacctcaccctgctggtatcgctggcgctgatcgggatgttcagcgccctgctcttcgccgactacacgcaccaggacgccgcggtgatcaaccacgccggctcgttgcgcatgctcacctaccgggtcgccctggagcccagcctggaaggccgccaggcgctgctcgggaccctcggcgaacgcctcgacagcggcgacatccgccgcctgctgcaacgccaggacgccgacgacccgatccgccagctgcaccaggagctgcgcgagggcctggcgcgcctggacccgcgcgcgctgcccggacgcgccgtgctggacgcctacgtcggcgacatcgaccgtttcgtcggcatcctccaggccaaggccgagcgccgctcgcaactgctcagcacggtgcagggcctgtgcctgttcctcagcctgctggtggtgttcgtcaccctctacgacctcagctaccacgtcatcggcccgctgcgcgaactcaccagcaccgcccgccgcctgggccgcggcgagctggacgcgcgggtcacctacagcggcgaggacgaactggcgcaactgggcgagcgcttcaaccagatggccggcgagctgaagagcatctacggcgacctggaagagcgcgtggaggacaagacccgcgccctctcgcagagccaccagcgcctcgaactgctctacgccagtgcccgccggctgggcgagaacccctacgacagccgcaccctgcaaccgctgctgaaccagttggagaaagtgctagacgccggccgcgtgaccctctgcctgaacaaggacggggtcgagcgcgcctacagttcgctgaccaccaccgagcgcccggcggacttctgcctgcagggcgactgcggtagctgccgcgagcaggccagcgcctgcgaccaaccctcgtccctggcccagccattgctgatgcagcccctgtccatcgccggccaccgtttcggcgaactgttcatcgaaagccgcagcggccgcctggagaactggcagcagcaactgatcgagaccttctgcgacaacatcgcccgcaccttcgccctgtccctgcaacaggaacaggaaagccgcctggccctgttcgccgagcgcggcaccatcgcccgtgaactgcacgactcgctggcacagtcgctgtcctacctgaagatccaggtcagccgcctgggcaccctgctcaagcgcgaggcgccggcggagaagatcgaggacaccctcgacgaactgcgcgaaggcctcaacggcgcctaccggcaactgcgcgaactgctcaccaccttccgcctcagcctcgacgagccgagcctggaagccgcgctggggaacgccgtggccgagttcggcgagcgcggcgaggtggcgatcgaactggacaaccgcctgcaacacgtgccgctgagccccaacgaggaaatccacgtcctgcagatcgtccgcgaggcgctctccaacgtggttcgccattcgcaggcgcaacgggcctgggtgcgcctgagcagccaggccgacggccaggtgagcatcgccgtagaggacgatggcgtcggctttgatccgcagcagaaccgcagcggccactatgggcttaccatcatgcaggagcgcggccagaccctcggcagccagttgcgcttcgaagcgcgcgcgccccacggcacgcgagtgctcttcagcttcgtgccgaccgccctgcaaccctccgccgccaaggagccgaccccatga

SEQ ID NO: 3183 - protein, 622 aa, Pseudomonas aeruginosa UCBPP-PA14
MNKATAPDADQRDRFFGGSDRAGKPILRRSLVVRFGCYLTLLVSLALIGMFSALLFADYTHQDAAVINHAGSLRMLTYRVALEPSLEGRQALLGTLGERLDSGDIRRLLQRQDADDPIRQLHQELREGLARLDPRALPGRAVLDAYVGDIDRFVGILQAKAERRSQLLSTVQGLCLFLSLLVVFVTLYDLSYHVIGPLRELTSTARRLGRGELDARVTYSGEDELAQLGERFNQMAGELKSIYGDLEERVEDKTRALSQSHQRLELLYASARRLGENPYDSRTLQPLLNQLEKVLDAGRVTLCLNKDGVERAYSSLTTTERPADFCLQGDCGSCREQASACDQPSSLAQPLLMQPLSIAGHRFGELFIESRSGRLENWQQQLIETFCDNIARTFALSLQQEQESRLALFAERGTIARELHDSLAQSLSYLKIQVSRLGTLLKREAPAEKIEDTLDELREGLNGAYRQLRELLTTFRLSLDEPSLEAALGNAVAEFGERGEVAIELDNRLQHVPLSPNEEIHVLQIVREALSNVVRHSQAQRAWVRLSSQADGQVSIAVEDDGVGFDPQQNRSGHYGLTIMQERGQTLGSQLRFEARAPHGTRVLFSFVPTALQPSAAKEPTP

SEQ ID NO: 3184 - DNA, 1620 bp, Haemophilus somnus 2336
  CDS (1)..(1620)
atgagtttagctattatgcaaagtaataaatctgatgcagagttaatcaatgtttccggctcattacgtatgcaaagttaccgacttttttatgaaatggaatatgaaccggacaatgtagagagggcattgcgtcaatatcgtttaagtttgcattcagagccattactcaaaattagtcggcattttcttgtacctaatgatgtaaggcaatcctatcgtaatttaatcaagcgttgggagatcatggaaaagcatgcaaaagaaaacaacaaggatgcttaccgtgcagaaatcgccagctatgtcgatcaagtagatcaatttgtaaatactttacagtattttgcggagctgaaacttaaaatcgccgtactcagtattttagtagcaatgattgtgattttagctatggtatcctatgtcatttattttacacgcaaaagagttgttaccccattggaaaaattagcgttggcaagttctcaagttcaaattggacaatttaaccatattccgttagacaccaaaagtgatgatgaaattggtcgattagctttagtttttacccaaatggcagccgagttaaaaaaactttatgccacgttggaggaaaaagtgaatgagaaaacacaaaagttaagtcaagctaaccgctctttaaccatgctttatcattgttctcaacttgttactacaaaagccattgaacctaaactatttcaacaaatgctaaaacaagtgatgattaatgaacatttgcggtatttagaattaattgttcatggtgcagagcattggcatatttctttaggaacaaaacaagaccccgttgatttacaaagtatggatttagaaatcgaaaataatcaacttgggattatgcgttggcaagccggcttaccttgtccggatttacgcacaatgcacaatgtctcgcaaatgctcagtcgcacgctgtatttttaccaaatgcaacgacaacaacagcatttattactcatggaagagcggtcaattattgcaagagaattacatgattctttggctcaagtattgtcttatttgaaaattcaactcactttattaaaacataccctacaacaagaaactcaagatgccaaagccaaaagccaagaaattattcaagattttgagcaagcagttaccgccggttatctacagttgcgtgaacttctcgccacattccgcttaaccatacaagaggcaaatttacaggttgctttagaacaagtgatagattcattacgcaatcaaacctcaatgcgaatgcgagtggattgttctttgccttcacaaacatttaacgcccaacaactagttcatgcgttacaaattgtgcgagaggcgacattaaatgcgattaaacattcacaaggcacagaaattgaagtgctggcttatactaatgatgacggtgaatatgaattggctgtgcgtgataatggcattggtattccaagtttaaaggaaccaaccgggcattatggattaaatattatgttagaacgcagtaaccaattaaatgcacgtttgtctattcaaaatcattcgacaggcggtaccgaagtgaaattaactttaccgaatacattttaa

SEQ ID NO: 3185 - protein, 539 aa, Haemophilus somnus 2336
MSLAIMQSNKSDAELINVSGSLRMQSYRLFYEMEYEPDNVERALRQYRLSLHSEPLLKISRHFLVPNDVRQSYRNLIKRWEIMEKHAKENNKDAYRAEIASYVDQVDQFVNTLQYFAELKLKIAVLSILVAMIVILAMVSYVIYFTRKRVVTPLEKLALASSQVQIGQFNHIPLDTKSDDEIGRLALVFTQMAAELKKLYATLEEKVNEKTQKLSQANRSLTMLYHCSQLVTTKAIEPKLFQQMLKQVMINEHLRYLELIVHGAEHWHISLGTKQDPVDLQSMDLEIENNQLGIMRWQAGLPCPDLRTMHNVSQMLSRTLYFYQMQRQQQHLLLMEERSIIARELHDSLAQVLSYLKIQLTLLKHTLQQETQDAKAKSQEIIQDFEQAVTAGYLQLRELLATFRLTIQEANLQVALEQVIDSLRNQTSMRMRVDCSLPSQTFNAQQLVHALQIVREATLNAIKHSQGTEIEVLAYTNDDGEYELAVRDNGIGIPSLKEPTGHYGLNIMLERSNQLNARLSIQNHSTGGTEVKLTLPNTF

SEQ ID NO: 3186 - DNA, 1755 bp, Vibrio sp. Ex25
  CDS (1)..(1755)
atgggcgaggaactcagattgtttaaaaatgtgaaaaagtcagtgacgcgcacgattgcgtccgcgatgcttcttattttgctgctttcagttgctacgactggttttgcaatttttacgttagcgtcaagcttgaatgatgcagaagccgtcaatgttgctggctcgatgcgaatgcaaagctaccgtctggcgaatgatattcaggttaaatctgttgactattcttcacatattgacgcatttgaacattcgatatactcaccttccatgaaagcactccagcattggtcagtgccagaagacattactcatgattactaccgtcttattatgagatggcatgagctcaagtcggtgttgagaggagacaacccggcggagtaccaactcctagtggctggttttgtaaagcagatcgatgagtttgtatttaagctgcaaagcttttcggagcaaaagctgattaacttagcttggattggcgggttagggttaggcggtatcctttgtgtcagtatgtttgttgtccattttgtgcgcctcgaagttgtacggcctttgcgtgctttagtttttgctagcgagcaaattaagaatcgctcatttaatatatcgcttgatgtatccagcgataatgaaatggggatcctgactcgaacctttaatcggatggcgacggaccttggtaagttataccgagggctagaacaagcggttgatgaaaaaacgcgtaaattacagcatgcgaatcagtctttagaagtattgtatgactcgtcgaaagagttaacggcttcgcgtattaatcaggataacttccaagccatattacaacatattgcaagtcttgaaggcattaaagcggtcaaacttgaaatagagcaattgggagaaccgagttggatattgatggaaggggaagagtgctgccacgactgtgatgaagattgccacagtaaggctctaacgttggacggtgagcacttaggctatttgtattggaaggccgggttaccttgtccgaatgaggcactgattgacaactttgtgcagattttatcgcgtgccgtgtattacaatcgagcccaacgccaagcagaacaaatcctactgatggaagagcgagccaccattgctcgggaactgcatgattcattagctcaagcactctcttatttaaaaattcaggtcgctttattaaagagaagcgtaaagaatttgcctgatgaaaaagcgatagctcaggcgaatcaagtcattgccgagttggatacgggcttatctgctgcttatacccaactacgcgaattactgacgacgtttcgtcttacgattaaagagggcagttttggccaagcattgcaagatatggtcgaaacgctcaacgaacaaaccgtcgctgacattacgttaaaaaatagactttcttcaactgaactggatgcacaccagcaggttcatttactacagttgataagagaagcggcaattaatgccatcaagcatgcgcaagcagataatattcacattcaatgtcttgataatgatggaaaagtcacagtaaccgttaccgatgatggaataggctttgaacatcaagacgaaaaattaaatcattacggtatgagtatcatgcaagagcgagccgctaggctgcatgccgatcttcacattgaagcatcgatcaacaaaggctgtaccgtaaaactagaattccaacatagtaaggaagtaaacagtgacagtgtgtaa

SEQ ID NO: 3187 - protein, 584 aa, Vibrio sp. Ex25
MGEELRLFKNVKKSVTRTIASAMLLILLLSVATTGFAIFTLASSLNDAEAVNVAGSMRMQSYRLANDIQVKSVDYSSHIDAFEHSIYSPSMKALQHWSVPEDITHDYYRLIMRWHELKSVLRGDNPAEYQLLVAGFVKQIDEFVFKLQSFSEQKLINLAWIGGLGLGGILCVSMFVVHFVRLEVVRPLRALVFASEQIKNRSFNISLDVSSDNEMGILTRTFNRMATDLGKLYRGLEQAVDEKTRKLQHANQSLEVLYDSSKELTASRINQDNFQAILQHIASLEGIKAVKLEIEQLGEPSWILMEGEECCHDCDEDCHSKALTLDGEHLGYLYWKAGLPCPNEALIDNFVQILSRAVYYNRAQRQAEQILLMEERATIARELHDSLAQALSYLKIQVALLKRSVKNLPDEKAIAQANQVIAELDTGLSAAYTQLRELLTTFRLTIKEGSFGQALQDMVETLNEQTVADITLKNRLSSTELDAHQQVHLLQLIREAAINAIKHAQADNIHIQCLDNDGKVTVTVTDDGIGFEHQDEKLNHYGMSIMQERAARLHADLHIEASINKGCTVKLEFQHSKEVNSDSV

SEQ ID NO: 3188 - DNA, 1722 bp, Shewanella sp. MR-7
  CDS (1)..(1722): transl_table=11
atgaaacgaggcagccttacctccaaaatactgggtttaatgttagtactgattttactttctagcagcctagccatcttcgcaatcatcaatttgtcttacagcttaggcgatgcaaaagccatcaatgcctcgggttcactgcggatgcaaagctatcgcctgatgttttatgccaattcaggcagtgaagccgcccaagagaaaattgccgagtttgaaaacactctgcattccgaggcgctgcaaccatcaaacagctggttcagcccgaaaaaaatcgccgaacagtatcagctcgttatcgataaatggctggtcatgaagtactacattgagcaggaaaactcccgcgactacgccgcctcgctcaaggactttgtcgatactatcgatttattagtgctcgaaatggagcaccatgccgccttcaagttgcgcctccttgccgcgagccagatttttgggcttgggctgatgctcgttatcgcttttctcgcggtacgctttaccaagcgcaaagtcgtagtgccgttgcagcagttaatggaatcggccaataccatttccaagggcaacttcgagatagaaatgcccgagactgaatatatcgagctcaccgccctaacccatgcgctgcaaaaaaccgcccgcgagctggcaaccctgtatagcaacttagaatcccaagtcgccgaaaagaccctagcactcactagggcaaacaatgagctagcatttttatacgataacctattgacacttaatgccaaaaagctggactacaaggcgctcaaggcggcgttgaatcaattgaaggactatgagtctatcgaccatttaagactgatcattcagtacccagagcaagagctagaagtggttgaagccgatggtggctggccggaaacgactcccctttgcacccgctttccactgcaatttgagcaggctgacttaggttacttagaactgatttcggcgcaggataccaatacgccgctgtttaaaaactttgccatcatgctcacccgctccatcgttatccataacgccaccgagcagcgtcaacaactggccttgatggaagaacgtggggttatcgccagagagttacacgactccctcggccaagttctgtctttcctcaaaattcaaattagtttgctacgcaaaaacttggatcatagctgtcgcagccccgcagtggagaatcaactgacagagataaacgaaggggtgagtacagcctatgtacagctcagggagttattatccaccttcagattaaccattaaggaaccgaatctgaagaacgcgatggaagccatgctagagcagctcagggccaataccgatatcaagatccacctcgattacaaactttcaccccaatggctcgaggccaagcagcatatccacatcctgcagatcacccgtgaggccacactcaatgccatcaagcatgctaatgccagtcgggtcatcattcgctgttataaagatgataatggcatggtcaatatcagcgtcagtgataacggcatagggattggttatcttaaagaacgagatcaacactttggcatagggataatgcacgaacgcgcaagtaaattaggcggaactgttgtatttagtagcaatgatacgcacactaatagcaagggaattgccggaacaactagaccaagaaaactcggagatgtccttaacacctaa

SEQ ID NO: 3189 - protein, 573 aa, Shewanella sp. MR-7
MKRGSLTSKILGLMLVLILLSSSLAIFAIINLSYSLGDAKAINASGSLRMQSYRLMFYANSGSEAAQEKIAEFENTLHSEALQPSNSWFSPKKIAEQYQLVIDKWLVMKYYIEQENSRDYAASLKDFVDTIDLLVLEMEHHAAFKLRLLAASQIFGLGLMLVIAFLAVRFTKRKVVVPLQQLMESANTISKGNFEIEMPETEYIELTALTHALQKTARELATLYSNLESQVAEKTLALTRANNELAFLYDNLLTLNAKKLDYKALKAALNQLKDYESIDHLRLIIQYPEQELEVVEADGGWPETTPLCTRFPLQFEQADLGYLELISAQDTNTPLFKNFAIMLTRSIVIHNATEQRQQLALMEERGVIARELHDSLGQVLSFLKIQISLLRKNLDHSCRSPAVENQLTEINEGVSTAYVQLRELLSTFRLTIKEPNLKNAMEAMLEQLRANTDIKIHLDYKLSPQWLEAKQHIHILQITREATLNAIKHANASRVIIRCYKDDNGMVNISVSDNGIGIGYLKERDQHFGIGIMHERASKLGGTVVFSSNDTHTNSKGIAGTTRPRKLGDVLNT

SEQ ID NO: 3190 - DNA, 1935 bp, Alkalilimnicola ehrlichei MLHE-1
  CDS (1)..(1935): transl_table=11
atggctatcagccgtctctacaatcgcctgctccaccccaccctggccgggtcgctcttcgcgttgctggtgggagtggccaccatcggcttcctgggcatgctgcatggggcgttcgtcgccaaaacggcgcagcatgatgcggcggcgatcaacgtggccgggtccctgcgcatgcagtcctaccgcattgccactaccctgctggacgaccagggcccgcaggcgggtgccaagacgttggatgcggaggttgctgccttcgagcggcggctgcacagcccggagctgctgcgacccataccggcaaacccggacgacccggttcgagaggcctgggaggaggtccaccggcagtggaccactgagttaaagccgctgctcgtcgatgggagcagcgccggttcgccggtccgctatctggaccaagtggaccgattcgtgggcacggtggacaacctggtcacggcggctcagtcggccgctgaggcgcgcattcacaactcccagtcggtgcgggtgctggccatggcgttgctcagtggcctggtgctgtacgggctctaccggcttcacatgcgcctggtgctccccgtgcagcagttgaactacgtggccggtcgcctgatgaagggggatttcgaggcccgcgcccgctacctgccgaacgatgagctgggcatgtacgcccggaccttcaacaggatggcggacaccctcaccgatatgcagcgcagtctcgcccaccgggtgagcgagaagaccgcagagcttcggcggcgcaacagtgccttggagctggtctacaatgccagtcgtgatctcagtgccggcgcactggagtccagtaacctcaaggcgatgctcgacaccctggagcgggtgacggggctggggccgctgagcatctgcctggcccagcccggtgcggacaagtccttcgagaccctctccacctccgctgagagtcgcccggcccgctgcagcgctccggactgcaagggttgtatgaatgtcgtaccccgtcacgggggcggcgtggtttgcccgggtatgctggctctgcccctggaggaccggaatgtccgctacggtctgctgcaggtggagtacacccccggcgaccagcccagggggtggcagctgcacctggcggagacggtggccagccatatcgccgccgcctgtgcccgcgagcgcgaattggatgccgagcaccgcattgtgttgatggaggagcgggcggtgattgccagggaactgcacgactcgctggcccaggcactgtcctacatgaagatccaggtggcacggctgcaggggttgatgcgcaaggagcacgaacccgcccagctcgaggccatcctctctgagttgcgtgatgggctcaattccgcctatgagcagttgcgcgagctcctgaccacgttccgcctggggatggactcccccgggctggagtctgcgctgcgcaaggccgtcaaggagttctccgagcggggtgatatccccatccgtctggactaccgtctgagccactggcccttgaacgcgaacgaggagatccatctcctgcaaatcgcgcgtgaggcgctggcgaacgtggttcggcacagtcaggccacccgggcggacgtggtggtggccccggggtcgaaccacgacgtggtgctggaagtcctcgacaacggcgtcgggctggcggctgtttccgaggaaccggggcaccactatggcaccgccatcatgcaggaacgggcggagggccttggagggatgctgcgactcggtaaccgggccgggggggggatgcgggtgatgctgaccttccggccggagtccatggcgcgcgctgtcgcgttcagcgccagccagaacaacaatcaaggggttcaggatgaggacattcggggagcctatgcagactaccgctga

SEQ ID NO: 3191 - protein, 644 aa, Alkalilimnicola ehrlichei MLHE-1
MAISRLYNRLLHPTLAGSLFALLVGVATIGFLGMLHGAFVAKTAQHDAAAINVAGSLRMQSYRIATTLLDDQGPQAGAKTLDAEVAAFERRLHSPELLRPIPANPDDPVREAWEEVHRQWTTELKPLLVDGSSAGSPVRYLDQVDRFVGTVDNLVTAAQSAAEARIHNSQSVRVLAMALLSGLVLYGLYRLHMRLVLPVQQLNYVAGRLMKGDFEARARYLPNDELGMYARTFNRMADTLTDMQRSLAHRVSEKTAELRRRNSALELVYNASRDLSAGALESSNLKAMLDTLERVTGLGPLSICLAQPGADKSFETLSTSAESRPARCSAPDCKGCMNVVPRHGGGVVCPGMLALPLEDRNVRYGLLQVEYTPGDQPRGWQLHLAETVASHIAAACARERELDAEHRIVLMEERAVIARELHDSLAQALSYMKIQVARLQGLMRKEHEPAQLEAILSELRDGLNSAYEQLRELLTTFRLGMDSPGLESALRKAVKEFSERGDIPIRLDYRLSHWPLNANEEIHLLQIAREALANVVRHSQATRADVVVAPGSNHDVVLEVLDNGVGLAAVSEEPGHHYGTAIMQERAEGLGGMLRLGNRAGGGMRVMLTFRPESMARAVAFSASQNNNQGVQDEDIRGAYADYR

SEQ ID NO: 3192 - DNA, 1692 bp, Photobacterium sp. SKA34
  CDS (1)..(1692): transl_table=11
gtgaataggaaaaaaaagacacattctttaacaacaacgatcgcgcgctctttagtgttaattttaatcatttcgatagtaacgactgcactagcattaacgacattggtttcgagtcaaaatgatgttgaagctattaatattgcgggttctttacgcatgcaaagctaccgattagcttttgatgttgaaacaaaatctccacttttatcagcacatattgagcaatttgaacactcactttattctgcgccaatgaaagggctctcttattggttaatctcttctgagatccaacagcactataatcacatcgttcttcgctgggaggatctgcatccgatacttgaaagggataacaacaccgtatttatccaacatgttgcaccattcgtccatcgtattaatacttttgttgctgaactgcaaaaatcatctgaactaaaactccaacgactcgctattattggcgtcataggggttagtttaattttccttatcgtcttctacactattcgctatacacgccaacaaattgttgcacctttaaatgatcttgttgatgcttgtaagcaagtaaagcgtaaaaattttcgattagacttattaaacaatagcaataatgaactgggtattcttgcccatacctttagtaaaatgtcatcagatcttgaacagctttatcaaggattagaacgcagtgtgaatgaaaaaacccaccgtttacgtcatgcaaacgaatcactccaagttctttataattgctcacaacaactttctgttagtcatttaacccgagtacaatttacaaacatgcttgaaaccatgattgcgattgatggcttaattggcgcaaaactgatcattgaagaaccaaatggcagcacatcaaacattaaagtaggtcaacaagcgggtcaacattggcaatataacgaattgtatatcgatggtgaattaatgggacaactttggtggcagtacagtttaccttgtcctgataaggcgttaattaataatatatctcagatccttgctcgcgctatttattacaaccgagcccaaaaacaagcagaatatttattgctaatggaagagcgcgcaaccattgcccgtgagctacatgattcattggcacaatcgctctcctatttaaaaattcaattagccttattgaaaagagaactcaatcaaaacgctcaaaatgagaatactcaccaagcagtctatgatattgaagcagggttaagtaatgcttatacccaacttcgcgaattactcagtacatttcggttggcgattaaagatgccaattttggtgaagccttaaatcaaatgttagaaccattagaagagcaaactgacgcacttttaatcatagataatcaaatatcatccatggcattagatgcccataaccaagttcatttgttacaaattattcgagaagcagtgttaaatgcgattaaacatgctgacgctgatgaaattaccgtaaactgtcaacaaaccgaacaacatattcaggtcacaatcatcgatgacggtaaaggattcgacattaaagacagtaaacgtgatcattacggtttaaatattatgcaagagcgcgcatcacggctacagggtaaattaaaaatacaatcgggaatagatcaaggtagcgctatctgcctacgattcccattatag

SEQ ID NO: 3193 - protein, 563 aa, Photobacterium sp. SKA34
MNRKKKTHSLTTTIARSLVLILIISIVTTALALTTLVSSQNDVEAINIAGSLRMQSYRLAFDVETKSPLLSAHIEQFEHSLYSAPMKGLSYWLISSEIQQHYNHIVLRWEDLHPILERDNNTVFIQHVAPFVHRINTFVAELQKSSELKLQRLAIIGVIGVSLIFLIVFYTIRYTRQQIVAPLNDLVDACKQVKRKNFRLDLLNNSNNELGILAHTFSKMSSDLEQLYQGLERSVNEKTHRLRHANESLQVLYNCSQQLSVSHLTRVQFTNMLETMIAIDGLIGAKLIIEEPNGSTSNIKVGQQAGQHWQYNELYIDGELMGQLWWQYSLPCPDKALINNISQILARAIYYNRAQKQAEYLLLMEERATIARELHDSLAQSLSYLKIQLALLKRELNQNAQNENTHQAVYDIEAGLSNAYTQLRELLSTFRLAIKDANFGEALNQMLEPLEEQTDALLIIDNQISSMALDAHNQVHLLQIIREAVLNAIKHADADEITVNCQQTEQHIQVTIIDDGKGFDIKDSKRDHYGLNIMQERASRLQGKLKIQSGIDQGSAICLRFPL

SEQ ID NO: 3194 - DNA, 1884 bp, Pseudomonas sp
  CDS (1)..(1884): transl_table=11
atgaggcatcgtccgaccgtcgagccgaacatgccttcaaccgaaagcgagccgctctccacccgtcactcgatcgtattcaatacgctggtggccttcgtggtgatcatcggtgtctcgctgctcagcatgcttgccaacctctacctggccgacgccctggaaggcgatgccgaggcgatcaatcaggccggcagtctgcgcatgcaggcctaccgcctggctttcactgccgagcacggctcgcaggcgctgctctacgagcgcatcgaaaccctgcagcaaacgttgcgctccgcctcgttgcgctcggccttgcaccgccacggcagcacccgtctgccggctttgcacgctgcggtttcgcagcattgggagcaagacatgcgcccattgctcgatgcgcaaccggcgcggctagaggactaccgtcgagaggcgccggccttcgtcagtgagctggacaccttcgtccgtacgctgcaggaggcatcggaaggcaagctcagcgtcatccgcgccctgcaggccagcaccctgttcgtcatcgtgctgatcgccttcgtgctcgtctacggcctgcacaacaacctggccacgccactgcgcagcctgaccaagatggcgcgcgatatcggcaagggcgacttcagcggccaggtgcagattcccggcgataccgagctcagcctgctggcccgcacgctcaaccagatgagccatgaactggccagcctctacgcgcaaatggagcagaaggtggatgacaagaccgccgccctgacccgcagcaacgccacgctgcagctgttgttcgacagcgcccggttgctctacagcaaaccggacgaccccacgcagatgatgggcgcgcaactcaacaaggtgcagcatgtcctcgacaccggcccgatatcgctgtgcctgaaccgttccgccgaagcgggcagccatacggcgatgacttcgcacgatttgcagccgcctgaatactgccagctaccccagtgcgatgcctgcccggtgaaccagagcggccgactgccgagcggcgaagaactgctgacattcgagttgcgctccgggccggatgatctgggctcgctgcgggtggcctatcgcgcaggcgagccattgcagccctggcaaacgctaccgctgacgaccctggccgacctgttcgccgcatcgctgagcctggctcaatcgggccagaaacaggcacgcctggcactgatggaggagcgggcggtgattgcccgtgaactgcacgattcgctggcccaggcgctggccgcgcagaagctgcaactggcacggctgaagcgtctgatgcagaagcaaagcgaccaggcacaactggacgacagcgtgcagcagatcgatcagggcctgaacgcggcttaccgccagttacgggaactgctcaccacctttcgcatcaaggtcaacgaaccagggctcaaaccggcgctgtatgcaacgatcgaagaattcagcgccaattcgggactgcaggtcgagagtgactatcagctcgatcactgcccgctcactcccaatgaagaagtgcactgcctgcagatcgtccgcgaggcgcttagcaacgtggtcaagcatgccgaggcggagcactgctggctgagcctgacccaggacagcatcggcaccatccacgtcaggatcgaggacgatggcattggcatcaaccccgaggagcagcgtgccggccattacggcctgatcatcctgcgcgagcgcgccaacagcctgaacggcaccatcaatatcggtcggcgacccgccggaggcacgctggtgtacctgaggtttccgcccgcctaccgccacatttccccggagccaggaacatgtcacgcatga

SEQ ID NO: 3195 - protein, 627 aa, Pseudomonas sp
MRHRPTVEPNMPSTESEPLSTRHSIVFNTLVAFVVIIGVSLLSMLANLYLADALEGDAEAINQAGSLRMQAYRLAFTAEHGSQALLYERIETLQQTLRSASLRSALHRHGSTRLPALHAAVSQHWEQDMRPLLDAQPARLEDYRREAPAFVSELDTFVRTLQEASEGKLSVIRALQASTLFVIVLIAFVLVYGLHNNLATPLRSLTKMARDIGKGDFSGQVQIPGDTELSLLARTLNQMSHELASLYAQMEQKVDDKTAALTRSNATLQLLFDSARLLYSKPDDPTQMMGAQLNKVQHVLDTGPISLCLNRSAEAGSHTAMTSHDLQPPEYCQLPQCDACPVNQSGRLPSGEELLTFELRSGPDDLGSLRVAYRAGEPLQPWQTLPLTTLADLFAASLSLAQSGQKQARLALMEERAVIARELHDSLAQALAAQKLQLARLKRLMQKQSDQAQLDDSVQQIDQGLNAAYRQLRELLTTFRIKVNEPGLKPALYATIEEFSANSGLQVESDYQLDHCPLTPNEEVHCLQIVREALSNVVKHAEAEHCWLSLTQDSIGTIHVRIEDDGIGINPEEQRAGHYGLIILRERANSLNGTINIGRRPAGGTLVYLRFPPAYRHISPEPGTCHA

SEQ ID NO: 3196 - DNA, 1935 bp, Paracoccus halodenitrificans
  CDS (1)..(1935): transl_table=11
atgaaactgcttcaacactccctggtggcgcgcatcgtcgcctcgctgctcgccatcagcgccatggccctggtcagcatcgccgtcaccatgacggtggccaatgacagccgcggcgatgccgcggccatcaacatggccggctcgctgcgcatgaacacccatcagatcctgaccgccctgctgcgctacgacctgcacccggacgccgcccacgacgatggagtggcggcactggtggagcgcttcgagacgcgcctggccagtcccgagctgaccgacgccctgcccgatgccgccgaccatgcgctgcgccggcagcatcgcgagctgctctcgcgctggacacacgacatcctccccgcgatcaaccgagcacgggcggccgacgaccggcaggggcccgacccggcaccggccttcgaggccctggtcggcgatatcgacgccctggtcaccctgctcgagaggaacagcgaatccaagatccagctgctgattatcctgcagttcctgttcctggcgctgaccgtggtggtggtggccatcgccctctacgatattcgtcataacctggtgacgccgctgcgccacctgctggtactggcccgcgaggcggcccgccgcaacttcggttaccgcacgcacttccggggcaacgacgagctcgcccttctcggacgcaccttcgacaacatggccgaggagcttgccaccagctatgccgagctggaggcccacgcctcgctcaagcaggcggagctcgagagaagcaaccgggccatgcaggtcatgcacgatggcagccgcgccctctacggcggcggcaacgatctctgtgccagcgccgcccccatgctgcgccaactggaacagctgctcgacgtgggcccgatccggctatcgctgaacgatccccacgacgaccgccagattcccatcctcgcgacccactcgccgcaccgcccggaatactgccgcgaccacgagtgccacgcctgcctgatcgatccccagccgctcaagctggagcaggcccagcagggcgaatgcctgttgctgccggtgagcgtcggcgagctgatgctcggcaccctggaggtgtggcactccaggagccagccgctctccgatagcgtacgccgcctgctcaacgccctggccgaccagctggccaccgcggtctatctgcagcggcgcatcgaggagcaacagcaggtaacgctgatgaacgagcgcaccatcatcgcccgggagctgcatgactccctggcccaatcgctctcctacctcaagatgcaggtcgccaggctcgagcgcatgcagcagaaggaggccccgcgggagcgccaggcggcggtgttcgacgagctgcgcaccgggctcgacagcgcctatcgccagcttcgcgaactcctcaccaccttccgcctcaagttggaggggccgggcctggccagcgccctgcaccagacggcccgggagttcggcaagcgcctgggatacccggtcatcctcgaggtcgatgtgccgccccacctgctcaatcccaacgaggaaattcacgtgctgcaggtggtacgcgaggccctggccaatgtgctcaagcatgccaacgcccactgggccgccattaccatcaacttccaggaggcccggctgcatgtcgtcatcgaggatgacggcatcggcctggatgacgacagctcgccgcccatgcattacgggctggtgatcatgcgcgaccgtgccgacaccctgggcggcgagatgacgctccataaccgacccggcggcggcacccgactcgcgctggtcttcacgccccagaccgcccgcctgattcatcaacaggtggcgccgcgccaggacgctaccggcgcctcagccgctgagacagccgactctttccacgacgacaggaccccaggatga

SEQ ID NO: 3197 - protein, 644 aa, Paracoccus halodenitrificans
MKLLQHSLVARIVASLLAISAMALVSIAVTMTVANDSRGDAAAINMAGSLRMNTHQILTALLRYDLHPDAAHDDGVAALVERFETRLASPELTDALPDAADHALRRQHRELLSRWTHDILPAINRARAADDRQGPDPAPAFEALVGDIDALVTLLERNSESKIQLLIILQFLFLALTVVVVAIALYDIRHNLVTPLRHLLVLAREAARRNFGYRTHFRGNDELALLGRTFDNMAEELATSYAELEAHASLKQAELERSNRAMQVMHDGSRALYGGGNDLCASAAPMLRQLEQLLDVGPIRLSLNDPHDDRQIPILATHSPHRPEYCRDHECHACLIDPQPLKLEQAQQGECLLLPVSVGELMLGTLEVWHSRSQPLSDSVRRLLNALADQLATAVYLQRRIEEQQQVTLMNERTIIARELHDSLAQSLSYLKMQVARLERMQQKEAPRERQAAVFDELRTGLDSAYRQLRELLTTFRLKLEGPGLASALHQTAREFGKRLGYPVILEVDVPPHLLNPNEEIHVLQVVREALANVLKHANAHWAAITINFQEARLHVVIEDDGIGLDDDSSPPMHYGLVIMRDRADTLGGEMTLHNRPGGGTRLALVFTPQTARLIHQQVAPRQDATGASAAETADSFHDDRTPG

SEQ ID NO: 3198 - DNA, 1800 bp, Pseudomonas fluorescens
  CDS (1)..(1800): transl_table=11
atgatgcgttggctgcgcagttccctgcccgctcgcgccgggctggcggtgatcctgatcgccatcctggccctggccagttcattgagcgccggcttgatcgcctggttcagccagggcgacgctgccgccatcaacaccgccggttccgtgcgcatggaaacctaccacctgagctggaaactggcggctggggccaacgacgacatcccggcgatcatcgccagcctgcaacaacgcctcgacagcccggccctgcgcgccgtgctggaagacgggccggaaacctccttgcacaagagctatcgcgacctcatgcagcgctggaaccagaccttgcgtccggccatcgaacgtggcgattcagcattcttccaaagcagcgccagctctttcgtggagcagctggaccagttcgtcaccctgctgcaacgccagagcgaacacaaacaaggctggcagcaggcgatccagggcatcgcactgttcagcaccatgatcatcctgctgatcggcctgtatgagttgcagtacggcgtggtcacccccttgcaggaactggtggacgccacccagcgctttcgtcgtggcgaattccaggtgcgggtcaaccatcagtccgaggatgaactgggccagttggcgaccagtttcaacaccatggccgagaccatcgagcagtcccaccgcaccctggaagcccaggtgcaacaaaagaccctgaacctgcaacaggccaacgccgccctcgagttgctctaccagagcagtcgcagcctggcgacgcgccaggccaatgccgaaggcctggatgaattgatccgacgcttccagcagcgcctgcccggcctgcgcctgacgttgtgcctgcaagggcaattgcaggccccggccaagcacctgctggccttgcacggcgccgccagccgccaggtttgcgccagcagcgattgcgccagttgccacaaacacaacgccgcgcgcccacaggccttcagcatcagcaaccagggcaccgaactgggtgagctcaaggcgcatttcgtcgatggccacgcggcgcaaccctgggaaaccgcgttgatccaggccctggccaacctgatcggcacctcgctgtccctcaagcgccagcgcgaacaggaccatcgcctgctgctgctcgacgagcgcacgatcatcgcccgggagctgcacgactccctggcccaggccttgtcgtacatgaaactgcaagtcagccgcatgcagaccctgatgcgtcgcggcgaaccggtgcagaccctggagactgtcaccggcgagctgcgcgaggggctgaacaacgcttatcgacaattacgtgagctgctcaccaccttccgcctgcagatccgtgatgacggcctggtccaggaactcaaggacaccgccgaggaattctccaaccgcggggatttccaggtgcacctgttcatcgacaccctggccttcgagctgtcggccagcgaacaaatccacatcctgcagatcacccgcgaggccctgtccaactgcctgcgccatgcccatgccgaaaacgcctggctcgaactgcgccaggaaggcgagaccgtgcggttgtcgatcgaagacgatggccgtggtttcagcggcgaggtcgaccagtgcgagcaccatggcctgaacatcatgaacgaacgggcccgcagcctgcacggccaactgcagattcattcacgtccaccccacggcacccgtatccaggcgcatttccaaccggaattcctgggccaccccaccgaaggcctagcgacatga

SEQ ID NO: 3199 - protein, 599 aa, Pseudomonas fluorescens
MMRWLRSSLPARAGLAVILIAILALASSLSAGLIAWFSQGDAAAINTAGSVRMETYHLSWKLAAGANDDIPAIIASLQQRLDSPALRAVLEDGPETSLHKSYRDLMQRWNQTLRPAIERGDSAFFQSSASSFVEQLDQFVTLLQRQSEHKQGWQQAIQGIALFSTMIILLIGLYELQYGVVTPLQELVDATQRFRRGEFQVRVNHQSEDELGQLATSFNTMAETIEQSHRTLEAQVQQKTLNLQQANAALELLYQSSRSLATRQANAEGLDELIRRFQQRLPGLRLTLCLQGQLQAPAKHLLALHGAASRQVCASSDCASCHKHNAARPQAFSISNQGTELGELKAHFVDGHAAQPWETALIQALANLIGTSLSLKRQREQDHRLLLLDERTIIARELHDSLAQALSYMKLQVSRMQTLMRRGEPVQTLETVTGELREGLNNAYRQLRELLTTFRLQIRDDGLVQELKDTAEEFSNRGDFQVHLFIDTLAFELSASEQIHILQITREALSNCLRHAHAENAWLELRQEGETVRLSIEDDGRGFSGEVDQCEHHGLNIMNERARSLHGQLQIHSRPPHGTRIQAHFQPEFLGHPTEGLAT

SEQ ID NO: 3200 - DNA, 1947 bp, Pseudomonas stutzeri
  CDS (1)..(1947): transl_table=11
atgaggcaccgcccgaccgacgattcgaccatgcccctttccgaaagcgagcagctctcaacccgccattcgatcgtgttcaacacgttggtggccttcgtggtcgatcatcggttttcgctggtcagcatgctagccagcctgtacctggcggacgccctggaaggcgatgccgaggccatcaatcaggccggaagcctgcgtatgcaggcctaccgactggccttcaccgccgaacacggtccgcacgaactatttgaagagcgcatagaaatgctggaacgcaccctgcgttcgtcttccctgcgctcggcgctacatcggcatggctcgaccgagttgcccgcgctacatgccggcgtgttgcagcactgggtggaacgcatgcggccactgctcgacgcgcaacccgcgcaggtcgacgactaccgtcgagaggcaccggagttcgtcagtgagctggacgccttcgtgcgcaccctgcaggaggcatccgagggcaagcttggcgtcatccgcgcgctgcaggccggcacgctattcgtcatcgtgctgatcgccttcgtgctgatctatgggttgcacaacaacctggcgtcgccgctgcgtagcctgaccaagatggcccgcgacattggcaagggggacttcagcggccaggtgcagatccccggcgacacagagctcagtctgctggcacgcacgttgaaccagatgagccaggaactggctggtctttacgcggaaatggagcaaaaggtcgatgacaagacggccgcactgactcgcagcaacgccaccctgcaactgctattcaacagtgcacggatgctctacagccagccggacgatccctcgcagatgatgggctcgctactggccaaggtgcagcagatccttggcaccgggccgatctcgctgtgtctgaatcgctcggcggaggccggcagccacaccgcaatgacctcgcgcgatctgcaaccgccggagtactgcaagctgccgcagtgcgacgtttgcccggtcaaccagaccggtcggctgcccagcggcgaggagctgatgaccttcgagtgcgctccggccaggacgatctgggctctacgcgtcgcccatccggcaggcgagccgctggaatcctggcagacgctgctactgacgaccctggccgacctcttcgccccttcgctgagcctggcacagctgggccagaagcaggcgcgcctggcgctgatggaggagcgtgcggtgattgctcgcgaactgcatgattccctcgcccaggcgctgtccgcacagaagctgcaactggcgcgcctcaagcgcctgatgcagaaggaaagcagccaggcgcagctggacgacagcgtgcagcagatcgatcagggcctgaacgcggcctaccgacagctgcgcgaactgctgaccaccttccgcatcaaggtcaacgaaccaggactcaaaccggccctgcaggcgacgatagaggaattcagtgccaactctggcctgcagatcgagaacgactaccacctggatcattgccccgtgacgccaaacgaggaagtgcactgcctgcagatcatccgtgaagccctcagcaacgtggtcaagcatgcggaagcgaaccactgctggttgagcctgacgcaggacagcatcggcaccatccacgtaaggatcgacgatgacggcatcggcatccggcctgaagaacagcgcgccggccactacggcctgatcatcctgcaagaacgcgccagcagcctgaacggcaatatcagcattggcctgcgccccgctggcggcactcaggtgcacctgagatttccccccgcctatcgacacattcccctgaaacaggagcctgtcacgcatgaacgaagggacaaccacacgaatcctgctggtcgacgaccatcccatgatgcgtcggggtctgcgtga

SEQ ID NO: 3201 - protein, 648 aa, Pseudomonas stutzeri
MRHRPTDDSTMPLSESEQLSTRHSIVFNTLVAFVVDHRFSLVSMLASLYLADALEGDAEAINQAGSLRMQAYRLAFTAEHGPHELFEERIEMLERTLRSSSLRSALHRHGSTELPALHAGVLQHWVERMRPLLDAQPAQVDDYRREAPEFVSELDAFVRTLQEASEGKLGVIRALQAGTLFVIVLIAFVLIYGLHNNLASPLRSLTKMARDIGKGDFSGQVQIPGDTELSLLARTLNQMSQELAGLYAEMEQKVDDKTAALTRSNATLQLLFNSARMLYSQPDDPSQMMGSLLAKVQQILGTGPISLCLNRSAEAGSHTAMTSRDLQPPEYCKLPQCDVCPVNQTGRLPSGEELMTFECAPARTIWALRVAHPAGEPLESWQTLLLTTLADLFAPSLSLAQLGQKQARLALMEERAVIARELHDSLAQALSAQKLQLARLKRLMQKESSQAQLDDSVQQIDQGLNAAYRQLRELLTTFRIKVNEPGLKPALQATIEEFSANSGLQIENDYHLDHCPVTPNEEVHCLQIIREALSNVVKHAEANHCWLSLTQDSIGTIHVRIDDDGIGIRPEEQRAGHYGLIILQERASSLNGNISIGLRPAGGTQVHLRFPPAYRHIPLKQEPVTHERRDNHTNPAGRRPSHDASGSA

SEQ ID NO: 3202 - DNA, 1704 bp, Haemophilus influenzae
  CDS (1)..(1704): transl_table=11
gtgtatactaaaggttccgtttccactcgtattgcgaaatatttatttatcattcttatcgttgctggtgtgattagttctctcagtttggcaattatgagcagtaataaatatgatgccgaagccattaatatttcaggttctttgcgtatgcaaagttatcgcttactttatgaaatgcaagaacaaccagaaagcgtggaaacgaacttacgccgttatcatataagccttcattcatctgctttactagaagttcaaaatcaatttttcacaccgaatgtattaaaacattcctatcaaaacattttgcaacgttggacgaacatggaaaaatatgcgcgccaacaggatgtaaaaaactatagtaagcagcttactgactatgtggcagatgttgattattttgtgtttgaattacaacgttttagcgagcagaaatggattttaggcgtttcagtattaggttttgcgatgttgttaattttgctgatggtgtcttatgtgatttggtatacaaaccgagaagttgtgaaacctttgcatttaatgacaaaagccagtatgcaagtgcaaatgcgtcaattcaatcatattccacttgacacaaggaaacaaaatgaacttggcacactggctcgcgtatttacacaaatgtccacagaactgggacagctttattcgcgtttagaagaagcggtaaacgaaaaaacgcaaaagttgcgtcaaactaaccgcactttaagcactctttatcaaagtgctcaacttctgaatacaaacacaattaacgataaaattttaaatcaagttttaaattacatttttattagcgaccatttgaacttcgttaaagtggaagtgatgggggctgaacattgggatattacattgggtaagcaagatgctaataatgaactacaaatcgaaaccctttctgtggataacgaagaattaggtgtactctcttggcaagcaggattaccttgtccagatccccgaattatgcaaaatttagcgcaaatgcttgctcgtgcgctttatttccataaaaatttacgtcagaaagaacagcttttattaatggaagaacgctcaattattgcgcgagagttgcacgattctttggctcaagtcttatcatttttacaaattcaacttactttgctcaaacataatctgaagaaagaagacgaacaatcaaaagaaaagagtttggcaattattgccaattttgaacaagccctttctggtggttatgcacagttacgtgagcttttagccactttccgtttaaccatacaagaagcgaatttacagcttgcactaaaacaagtgattgattcattacgctcgcaaacaacaatgcaaatgaatgtgaattgtcaattaccatcgcaaagtttgaaccctcaacagctggttcacgttctgcaaattgtacgtgaagccaccaccaatgcgatcaagcattctcaaggcacggtaattgaaattagcgcaagaattaatgcggaaggcgagtatgaaattttagttgaagatgatggggttggcattccaaaccttgaagaacctgaagggcattacggcttgaatattatggcggaacgttgtcgtcagcttaatgcacaattgcatattcatcgccgtgaacaaggcggcacacaagtcaaaattaccttgccacatacattatattag

SEQ ID NO: 3203 - protein, 567 aa, Haemophilus influenzae
MYTKGSVSTRIAKYLFIILIVAGVISSLSLAIMSSNKYDAEAINISGSLRMQSYRLLYEMQEQPESVETNLRRYHISLHSSALLEVQNQFFTPNVLKHSYQNILQRWTNMEKYARQQDVKNYSKQLTDYVADVDYFVFELQRFSEQKWILGVSVLGFAMLLILLMVSYVIWYTNREVVKPLHLMTKASMQVQMRQFNHIPLDTRKQNELGTLARVFTQMSTELGQLYSRLEEAVNEKTQKLRQTNRTLSTLYQSAQLLNTNTINDKILNQVLNYIFISDHLNFVKVEVMGAEHWDITLGKQDANNELQIETLSVDNEELGVLSWQAGLPCPDPRIMQNLAQMLARALYFHKNLRQKEQLLLMEERSIIARELHDSLAQVLSFLQIQLTLLKHNLKKEDEQSKEKSLAIIANFEQALSGGYAQLRELLATFRLTIQEANLQLALKQVIDSLRSQTTMQMNVNCQLPSQSLNPQQLVHVLQIVREATTNAIKHSQGTVIEISARINAEGEYEILVEDDGVGIPNLEEPEGHYGLNIMAERCRQLNAQLHIHRREQGGTQVKITLPHTLY

SEQ ID NO: 3204 - DNA, 1797 bp, Escherichia coli O157
  CDS (1)..(1797): transl_table=11
atgcttaaacgttgtctctctccgctcaccctggttaatcaggttgcgcttattgtgttgctttctactgctattggactggcagggatggcggtttctggctggctggtgcaaggcgttcagggcagcgcccatgcgatcaacaaagcgggatcgctgcgcatgcaaagttaccgtctgttggcagcagtgccattaagcgagaaagacaagcccttaattaaagagatggaacaaacggcatttagcgccgagttgactcgagcagcagaacgagacggacaactggcgcaattacagggtttacaagattactggcgtaatgaactcatccctgcactgatgcgtgcacaaaaccgcgaaacggtgtcagcggatgtcagccagtttgttgccgggcttgatcagctggtatctggttttgaccgcaccacggaaatgcgcattgagacagtggtactggtccatcgggtaatggcggtatttatggcacttttactggtgttcactattatctggttgcgggcgcgactgctacaaccgtggcggcaactgctggcaatggcgagtgccgtcagccatcgcgattttacccaacgcgcaaacatcagcgggcgcaacgaaatggcgatgcttggaactgcgttgaacaatatgtctgcagaactggccgaaagttatgccgtacttgagcagcgggttcaggagaaaaccgccgggctggagcataaaaatcagatcctctcttttttatggcaggctaaccgccgtttgcattcccgcgccccgctgtgtgaacgcctgtcacctgtactcaacggcttacagaatttaaccctgctacgtgatatcgaactgcgggtgtatgacactgatgatgaagagaatcatcaggagtttacctgccagccagatatgacttgtgatgataaaggctgccagctctgcccgcgcggcgtattacccgttggtgatcgcggcacgaccctgaagtggcggctggctgactctcatacgcagtacggtattttgctggcgaccctaccgcaggggcgtcatcttagccatgatcaacaacaactggtggataccctggttgaacaactcaccgccacgctggcgctggatcggcatcaggaacgtcagcaacagttgatcgtgatggaagagcgtgccaccattgcgcgcgaactgcatgattctattgcccaatctctctcttgcatgaagatgcaggtgagttgtttacagatgcagggcgatgcgctgccagaaagcagccgcgaactgttaagtcagatccgtaacgaactgaatgcatcctgggcgcagttgcgtgaattgctcaccacattccgcttgcagctcaccgagcctggattacgtccggcgctggaggcgagttgcgaagagtacagcgccaaatttggcttcccggtgaagctggattatcaattgccgcctcgtctggtgccttcgcatcaggcaatccacttgttgcaaattgcccgtgaggcattaagtaacgccctcaaacattcgcaagcgagtgaggtcgtggtgacggtggcgcaaaacgataatcaggtcaaactgaccgtccaggataacggctgcggcgtgcctgaaaatgccatccgcagcaatcactacggcatgataataatgcgcgaccgtgcgcaaagtttacgaggcgattgccgcgtccgccgtcgtgaatcaggtggcaccgaagtggtggtcacctttattcccgaaaaaactttcacagacgtccaaggagatacccatgagtaa

SEQ ID NO: 3205 - protein, 598 aa, Escherichia coli O157
MLKRCLSPLTLVNQVALIVLLSTAIGLAGMAVSGWLVQGVQGSAHAINKAGSLRMQSYRLLAAVPLSEKDKPLIKEMEQTAFSAELTRAAERDGQLAQLQGLQDYWRNELIPALMRAQNRETVSADVSQFVAGLDQLVSGFDRTTEMRIETVVLVHRVMAVFMALLLVFTIIWLRARLLQPWRQLLAMASAVSHRDFTQRANISGRNEMAMLGTALNNMSAELAESYAVLEQRVQEKTAGLEHKNQILSFLWQANRRLHSRAPLCERLSPVLNGLQNLTLLRDIELRVYDTDDEENHQEFTCQPDMTCDDKGCQLCPRGVLPVGDRGTTLKWRLADSHTQYGILLATLPQGRHLSHDQQQLVDTLVEQLTATLALDRHQERQQQLIVMEERATIARELHDSIAQSLSCMKMQVSCLQMQGDALPESSRELLSQIRNELNASWAQLRELLTTFRLQLTEPGLRPALEASCEEYSAKFGFPVKLDYQLPPRLVPSHQAIHLLQIAREALSNALKHSQASEVVVTVAQNDNQVKLTVQDNGCGVPENAIRSNHYGMIIMRDRAQSLRGDCRVRRRESGGTEVVVTFIPEKTFTDVQGDTHE

SEQ ID NO: 3206 - DNA, 24 bp, Artificial sequence
  primer
atgattgttaaacgacccgtctcg

SEQ ID NO: 3207 - DNA, 25 bp, Artificial sequence
  primer
ttacattaactgactttcctcaccc

SEQ ID NO: 3208 - protein, 657 aa, Artificial sequence
  consensus sequence
  Variant (2)..(2): Xaa in position 2 is any amino acid
  Variant (6)..(7): Xaa in position 6 to 7 is any amino acid
  Variant (10)..(10): Xaa in position 10 is any amino acid
  Variant (14)..(14): Xaa in position 14 is any amino acid
  Variant (17)..(38): Xaa in position 17 to 38 is any amino acid
  Variant (39)..(87): Xaa in position 39 to 87 is any or no amino acid
  Variant (89)..(110): Xaa in position 89 to 110 is any amino acid
  Variant (111)..(116): Xaa in position 111 to 116 is any or no amino acid
  Variant (118)..(135): Xaa in position 118 to 135 is any amino acid
  Variant (136)..(151): Xaa in position 136 to 151 is any or no amino acid
  Variant (153)..(155): Xaa in position 153 to 155 is any amino acid
  Variant (157)..(158): Xaa in position 157 to 158 is any amino acid
  Variant (160)..(166): Xaa in position 160 to 166 is any amino acid
  Variant (168)..(201): Xaa in position 168 to 201 is any amino acid
  Variant (203)..(205): Xaa in position 203 to 205 is any amino acid
  Variant (207)..(217): Xaa in position 207 to 217 is any amino acid
  Variant (219)..(228): Xaa in position 219 to 228 is any amino acid
  Variant (229)..(229): Xaa in position 229 is any or no amino acid
  Variant (231)..(233): Xaa in position 231 to 233 is any amino acid
  Variant (235)..(240): Xaa in position 235 to 240 is any amino acid
  Variant (242)..(244): Xaa in position 242 to 244 is any amino acid
  Variant (246)..(248): Xaa in position 246 to 248 is any amino acid
  Variant (250)..(251): Xaa in position 250 to 251 is any amino acid
  Variant (254)..(255): Xaa in position 254 to 255 is any amino acid
  Variant (257)..(258): Xaa in position 257 to 258 is any amino acid
  Variant (261)..(262): Xaa in position 261 to 262 is any amino acid
  Variant (264)..(266): Xaa in position 264 to 266 is any amino acid
  Variant (268)..(269): Xaa in position 268 to 269 is any amino acid
  Variant (271)..(272): Xaa in position 271 to 272 is any amino acid
  Variant (274)..(279): Xaa in position 274 to 279 is any amino acid
  Variant (281)..(293): Xaa in position 281 to 293 is any amino acid
  Variant (294)..(294): Xaa in position 294 is any or no amino acid
  Variant (296)..(340): Xaa in position 296 to 340 is any amino acid
  Variant (341)..(391): Xaa in position 341 to 391 is any or no amino acid
  Variant (393)..(393): Xaa in position 393 is any amino acid
  Variant (395)..(405): Xaa in position 395 to 405 is any amino acid
  Variant (406)..(430): Xaa in position 406 to 430 is any or no amino acid
  Variant (432)..(454): Xaa in position 432 to 454 is any amino acid
  Variant (456)..(456): Xaa in position 456 is any amino acid
  Variant (462)..(463): Xaa in position 462 to 463 is any amino acid
  Variant (472)..(472): Xaa in position 472 is any amino acid
  Variant (475)..(475): Xaa in position 475 is any amino acid
  Variant (478)..(481): Xaa in position 478 to 481 is any amino acid
  Variant (483)..(485): Xaa in position 483 to 485 is any amino acid
  Variant (487)..(507): Xaa in position 487 to 507 is any amino acid
  Variant (508)..(512): Xaa in position 508 to 512 is any or no amino acid
  Variant (514)..(516): Xaa in position 514 to 516 is any amino acid
  Variant (518)..(518): Xaa in position 518 is any amino acid
  Variant (525)..(525): Xaa in position 525 is any amino acid
  Variant (530)..(537): Xaa in position 530 to 537 is any amino acid
  Variant (538)..(538): Xaa in position 538 is any or no amino acid
  Variant (541)..(560): Xaa in position 541 to 560 is any amino acid
  Variant (562)..(572): Xaa in position 562 to 572 is any amino acid
  Variant (574)..(574): Xaa in position 574 is any amino acid
  Variant (578)..(578): Xaa in position 578 is any amino acid
  Variant (582)..(583): Xaa in position 582 to 583 is any amino acid
  Variant (585)..(586): Xaa in position 585 to 586 is any amino acid
  Variant (589)..(590): Xaa in position 589 to 590 is any amino acid
  Variant (592)..(610): Xaa in position 592 to 610 is any amino acid
  Variant (611)..(612): Xaa in position 611 to 612 is any or no amino acid
  Variant (614)..(614): Xaa in position 614 is any amino acid
  Variant (616)..(616): Xaa in position 616 is any amino acid
  Variant (618)..(625): Xaa in position 618 to 625 is any amino acid
  Variant (626)..(630): Xaa in position 626 to 630 is any or no amino acid
  Variant (634)..(635): Xaa in position 634 to 635 is any amino acid
  Variant (638)..(639): Xaa in position 638 to 639 is any amino acid
  Variant (642)..(643): Xaa in position 642 to 643 is any amino acid
  Variant (645)..(656): Xaa in position 645 to 656 is any amino acid
AXAINXXGSXRMQXYRXXXXXXXXXXXXXXXXXXXXXXXXXXXXXXXXXXXXXXXXXXXXXXXXXXXXXXXXXXXXXXXXXXXXXXXSXXXXXXXXXXXXXXXXXXXXXXXXXXXXWXXXXXXXXXXXXXXXXXXXXXXXXXXXXXXXXXXVXXXDXXVXXXXXXXEXXXXXXXXXXXXXXXXXXXXXXXXXXXXXXXXXXPXXXLXXXXXXXXXXXFXXXXXXXXXXXEXXXLXXXXXXMXXXLXXXYXXLEXXVXXKTXXLXXXNXXLXXLXXXXXXLXXXXXXXXXXXXXXLXXXXXXXXXXXXXXXXXXXXXXXXXXXXXXXXXXXXXXXXXXXXXXXXXXXXXXXXXXXXXXXXXXXXXXXXXXXXXXXXXXXXXXXXXXXXXXXXGXLXXXXXXXXXXXXXXXXXXXXXXXXXXXXXXXXXXXXLXXXXXXXXXXXXXXXXXXXXXXXLXLMEERXXIARELHDSXAQXLSXXXXQXXXLXXXXXXXXXXXXXXXXXXXXXXXXXXLXXXYXQLRELLXTFRLXXXXXXXXXALXXXXXXXXXXXXXXXXXXXXLXXXXXXXXXXXHXLQIXREAXXNXXKHXXAXXXXXXXXXXXXXXXXXXXXXDXGXGXXXXXXXXXXXXXHYGXXIMXXRAXXLXXXXXXXXXXXXG

SEQ ID NO: 3209 - protein, 32 aa, Artificial sequence
  protein pattern
  Variant (2)..(3): Xaa in position 2 to 3 is any or no amino acid
  Variant (5)..(5): Xaa in position 5 is Glu or Asn
  Variant (8)..(8): Xaa in position 8 is Ala, Gly, Ser or Thr
  Variant (9)..(9): Xaa in position 9 is any amino acid
  Variant (18)..(18): Xaa in position 18 is Ile or Leu
  Variant (19)..(19): Xaa in position 19 is Ala or Gly
  Variant (21)..(21): Xaa in position 21 is Ala, Ser or Val
  Variant (23)..(23): Xaa in position 23 is Ala, Ser or Thr
  Variant (24)..(26): Xaa in position 24 to 26 is any amino acid
  Variant (27)..(27): Xaa in position 27 is Ile, Leu or Met
  Variant (29)..(29): Xaa in position 29 is Ile, Leu, Met or Val
  Variant (30)..(30): Xaa in position 30 is Ala, Ser or Thr
  Variant (31)..(31): Xaa in position 31 is any amino acid
LXXMXERXXIARELHDSXXQXLXXXXXQXXXL

SEQ ID NO: 3210 - protein, 51 aa, Artificial sequence
  protein pattern
  Variant (2)..(2): Xaa in position 2 is Phe, Ile, Leu or Met
  Variant (3)..(3): Xaa in position 3 is Ala, Gly, Ser or Thr
  Variant (4)..(4): Xaa in position 4 is any amino acid
  Variant (5)..(5): Xaa in position 5 is Leu or Val
  Variant (6)..(6): Xaa in position 6 is Ala, Gly, Ser or Thr
  Variant (7)..(8): Xaa in position 7 to 8 is any amino acid
  Variant (9)..(9): Xaa in position 9 is Phe or Leu
  Variant (10)..(10): Xaa in position 10 is Asn, Gln, Ser or Thr
  Variant (11)..(12): Xaa in position 11 to 12 is any amino acid
  Variant (13)..(13): Xaa in position 13 is Ala, Ser or Thr
  Variant (14)..(14): Xaa in position 14 is any amino acid
  Variant (15)..(15): Xaa in position 15 is Asp, Glu or His
  Variant (17)..(19): Xaa in position 17 to 19 is any amino acid
  Variant (21)..(22): Xaa in position 21 to 22 is any amino acid
  Variant (25)..(26): Xaa in position 25 to 26 is any amino acid
  Variant (28)..(28): Xaa in position 28 is any amino acid
  Variant (29)..(29): Xaa in position 29 is Ala, Asp, Glu, Asn or Gln
  Variant (32)..(33): Xaa in position 32 to 33 is any amino acid
  Variant (35)..(38): Xaa in position 35 to 38 is any amino acid
  Variant (39)..(39): Xaa in position 39 is Asp, Glu, Asn, Gln or Arg
  Variant (40)..(40): Xaa in position 40 is any amino acid
  Variant (42)..(43): Xaa in position 42 to 43 is any amino acid
  Variant (45)..(45): Xaa in position 45 is Phe, Trp or Tyr
  Variant (46)..(50): Xaa in position 46 to 50 is any amino acid
  Variant (51)..(51): Xaa in position 51 is Leu, Met or Val
EXXXXXXXXXXXXXXLXXXYXXLEXXVXXKTXXLXXXXXXLXXLXXXXXXX

SEQ ID NO: 3211 - protein, 28 aa, Artificial sequence
  protein pattern
  Variant (2)..(6): Xaa in position 2 to 6 is any or no amino acid
  Variant (13)..(13): Xaa in position 13 is Ala, Gly, Ser or Thr
  Variant (18)..(18): Xaa in position 18 is any amino acid
  Variant (19)..(19): Xaa in position 19 is Ile, Leu, Met or Val
  Variant (20)..(20): Xaa in position 20 is any amino acid
  Variant (21)..(21): Xaa in position 21 is Asp, Glu, Gly, Gln or Ser
  Variant (22)..(22): Xaa in position 22 is any amino acid
  Variant (23)..(23): Xaa in position 23 is Asp, Gly, Asn, Ser or Thr
  Variant (24)..(24): Xaa in position 24 is Phe or Leu
  Variant (25)..(26): Xaa in position 25 to 26 is any amino acid
  Variant (27)..(27): Xaa in position 27 is Ala, Glu or Ser
  Variant (28)..(28): Xaa in position 28 is Leu or Met
LXXXXXQLRELLXTFRLXXXXXXXXXXX

SEQ ID NO: 3212 - protein, 32 aa, Artificial sequence
  protein pattern
  Variant (4)..(6): Xaa in position 4 to 6 is any or no amino acid
  Variant (8)..(9): Xaa in position 8 to 9 is any amino acid
  Variant (11)..(11): Xaa in position 11 is Ala, Cys, Asp, Gly or Ser
  Variant (12)..(13): Xaa in position 12 to 13 is any amino acid
  Variant (15)..(15): Xaa in position 15 is any amino acid
  Variant (16)..(16): Xaa in position 16 is Ala, Gly or Ser
  Variant (17)..(19): Xaa in position 17 to 19 is any amino acid
  Variant (20)..(20): Xaa in position 20 is Phe, Ile, Leu or Val
  Variant (21)..(26): Xaa in position 21 to 26 is any amino acid
  Variant (28)..(29): Xaa in position 28 to 29 is any amino acid
  Variant (30)..(30): Xaa in position 30 is Ile, Leu or Val
  Variant (31)..(31): Xaa in position 31 is any amino acid
  Variant (32)..(32): Xaa in position 32 is Phe, Ile, Leu or Val
HYGXXXMXXRXXXLXXXXXXXXXXXXGXXXXX

SEQ ID NO: 3213 - protein, 33 aa, Artificial sequence
  protein pattern
  Variant (2)..(12): Xaa in position 2 to 12 is any amino acid
  Variant (14)..(16): Xaa in position 14 to 16 is any amino acid
  Variant (17)..(17): Xaa in position 17 is any or no amino acid
  Variant (19)..(19): Xaa in position 19 is any or no amino acid
  Variant (22)..(22): Xaa in position 22 is Ala or Ser
  Variant (23)..(24): Xaa in position 23 to 24 is any amino acid
  Variant (26)..(26): Xaa in position 26 is Ala, Ile or Val
  Variant (27)..(27): Xaa in position 27 is any amino acid
  Variant (28)..(28): Xaa in position 28 is Lys or Arg
  Variant (30)..(30): Xaa in position 30 is Ala or Ser
  Variant (31)..(31): Xaa in position 31 is any amino acid
  Variant (32)..(32): Xaa in position 32 is Ala or Gly
  Variant (33)..(33): Xaa in position 33 is Ala, Asp, Glu, Asn, Gln, Ser or Thr
LXXXXXXXXXXXHXXXXIXREXXXNXXXHXXXX

SEQ ID NO: 3214 - protein, 17 aa, Artificial sequence
  protein pattern
  Variant (2)..(2): Xaa in position 2 is any amino acid
  Variant (3)..(3): Xaa in position 3 is Ala, Leu or Val
  Variant (4)..(4): Xaa in position 4 is Ile or Val
  Variant (6)..(6): Xaa in position 6 is any amino acid
  Variant (7)..(7): Xaa in position 7 is Ala or Ser
  Variant (10)..(10): Xaa in position 10 is Leu or Met
  Variant (13)..(13): Xaa in position 13 is any amino acid
  Variant (14)..(14): Xaa in position 14 is Ala, Ser or Thr
  Variant (17)..(17): Xaa in position 17 is Phe, Ile, Leu, Met or Val
AXXXNXXGSXRMXXYRX

SEQ ID NO: 3215 - protein, 18 aa, Artificial sequence
  protein pattern
  Variant (2)..(4): Xaa in position 2 to 4 is any or no amino acid
  Variant (6)..(6): Xaa in position 6 is any amino acid
  Variant (7)..(7): Xaa in position 7 is Phe or Leu
  Variant (9)..(11): Xaa in position 9 to 11 is any amino acid
  Variant (12)..(12): Xaa in position 12 is Asp, Glu or Gln
  Variant (13)..(14): Xaa in position 13 to 14 is any amino acid
  Variant (15)..(15): Xaa in position 15 is Ala, Asn, Ser or Thr
  Variant (17)..(17): Xaa in position 17 is any amino acid
  Variant (18)..(18): Xaa in position 18 is Lys or Arg
VXXXDXXVXXXXXXXEXX

SEQ ID NO: 3216 - DNA, 864 bp, Escherichia coli K12
  CDS (1)..(864): transl_table=11
atgcgttggcaagggcgacgtgaaagtgacaatgttgaagacaggcgcaacagctctggtggtccatctatgggcggtcccggttttcgcctgccaagcggtaaaggcgggctgattttactgatagtcgtgctggttgcaggctactatggtgttgatttaaccgggttgatgaccgggcagccggtttcccaacaacaatcaacgcggtcaattagcccaaatgaagacgaagccgcaaaattcacctcggtgattctggcaaccacggaagacacctggggacaacagttcgagaagatgggtaagacctatcagcaaccgaagctggtcatgtaccgtggaatgacgcgtaccggctgcggggcgggccagtccataatggggccgttctattgcccggcggatggcacggtttatatcgatctctccttctatgatgacatgaaagacaaacttggcgcggatggcgattttgcccaggggtacgttatcgcccatgaagtcggtcatcatgtgcagaaactgttaggcatcgagccgaaagttcgtcaactgcaacaaaacgcgacgcaggcggaagtaaaccgcttatctgtgcgtatggaactccaggccgactgttttgccggtgtctgggggcatagtatgcagcagcaaggcgttctggaaaccggcgatctggaagaggcgctgaacgcggcgcaggccatcggcgatgaccgtttacaacagcaaagtcaggggcgagtagtaccagacagtttcactcatggcacttctcagcaacgctacagctggtttaaacgtggtttcgacagcggcgatccggcacaatgcaatacttttggtaaaagcatttaa

SEQ ID NO: 3217 - protein, 287 aa, Escherichia coli K12
MRWQGRRESDNVEDRRNSSGGPSMGGPGFRLPSGKGGLILLIVVLVAGYYGVDLTGLMTGQPVSQQQSTRSISPNEDEAAKFTSVILATTEDTWGQQFEKMGKTYQQPKLVMYRGMTRTGCGAGQSIMGPFYCPADGTVYIDLSFYDDMKDKLGADGDFAQGYVIAHEVGHHVQKLLGIEPKVRQLQQNATQAEVNRLSVRMELQADCFAGVWGHSMQQQGVLETGDLEEALNAAQAIGDDRLQQQSQGRVVPDSFTHGTSQQRYSWFKRGFDSGDPAQCNTFGKSI

SEQ ID NO: 3218 - DNA, 921 bp, Mesorhizobium loti MAFF303099
  CDS (1)..(921): transl_table=11
atgctctggagaggccgtcgtcagagtgacaatatcgaggacgaccgcagcgacagcggcggcggtgggatcggcggcggcggcgggttccaaattcctatcggcggccggaccggtggcggcggcagcatcctcctcgtcatcctggtggtgatcgcgggatggtatttcggcttcgatccctcggcgatcctgggcggtggcgatggcggcttgctgccgggtggcggtggccagatatcggacaatggcggcggccagggcagcggcacggcacctgccaatgacgagatgaagcagttcgtcgcgaccgttctggccgaaacagaggacacctggaccggcatcttcaagtcgcaaggcctgacctatgaggaccccaagctagtgctgttttccggccaggtccgctcggcctgcggctttgcctcggcggcagccggaccgttctattgtccgggcgaccacaaggtctatctcgacatgaccttcttccagcagctcgaccagcagttcggcgcctcgggcgagttcgccagagcctatgtcgtcgcgcatgaggtcggtcaccacgtgcagaacctcaccggcatcatgtccaagttcaaccagatgcggcagggcatgagcgaggccgatgccaaccagctgtcggtgcgcatcgagctgcaggccgactgcttcgccggcgtgtgggcgcattacaccgcgcagaagggcatattggagcaaggcgacatcgaaagcgccctgaacgcggccaagcaaatcggcgacgacacgctgcagaagaggacgcagggctatgtcgtgccggaaagcttcaaccacggcacttcgcagcagcggcagacctggctggcgcgcggctacaagagcggcaagctttcggactgcaacacgatgagcggcccgctttaa

SEQ ID NO: 3219 - protein, 306 aa, Mesorhizobium loti MAFF303099
MLWRGRRQSDNIEDDRSDSGGGGIGGGGGFQIPIGGRTGGGGSILLVILVVIAGWYFGFDPSAILGGGDGGLLPGGGGQISDNGGGQGSGTAPANDEMKQFVATVLAETEDTWTGIFKSQGLTYEDPKLVLFSGQVRSACGFASAAAGPFYCPGDHKVYLDMTFFQQLDQQFGASGEFARAYVVAHEVGHHVQNLTGIMSKFNQMRQGMSEADANQLSVRIELQADCFAGVWAHYTAQKGILEQGDIESALNAAKQIGDDTLQKRTQGYVVPESFNHGTSQQRQTWLARGYKSGKLSDCNTMSGPL

SEQ ID NO: 3220 - DNA, 828 bp, Pasteurella multocida subsp. multocida str. Pm70
  CDS (1)..(828): transl_table=11
atgcgttggcgtggtcgtagagaaagcacaaatgtagaagatcgtcgtgcctcaagcggtggtttaggtggcggtaagaaaacaggcatcttaggcatcattattttactcattggtgcctattacggtgtagacttatccagtttagtcggcactcccgattttggcatgcaacaatccagtccattggcgagtgaagaagaacaagagctcaacagtttatctagagtagtgcttgcggatacagaaaccgtatggggcaattattttgctagacagcaacaacgctatcaagcccctgtgatggtgctctataaccgtgtgactcacaccgcttgtggtacagggcaatcggctatgggaccgttttattgcccaaatgatcgcaaagtgtatctggatttatccttttatcaggacatgaaaacgaaacttggtgctgacggcgaagcagcatttgcttatgtaattgcacatgaagtggggcatcatatccaaaaccttcttggtatcttaccgaaagtacatcaactgcaaggacaaacaagccgaacccaagccaatcaactttccgttaaagtagaactccaagcagattgctttgccggtgtttgggcatatcaagcgtcaaaaacgggcttatttgaaactggtgatattgaaaaagctttcaatgccgctgaggcggtaggagatgatcgcctacaaaaacgcagtcaaggctatgtcgttcccgatagctttacccatggcacctcagcacaacgcttacattggttcaaacgtggcttaaacagcggcgaccctaatcaatgtaatacattctga

SEQ ID NO: 3221 - protein, 275 aa, Pasteurella multocida subsp. multocida str. Pm70
MRWRGRRESTNVEDRRASSGGLGGGKKTGILGIIILLIGAYYGVDLSSLVGTPDFGMQQSSPLASEEEQELNSLSRVVLADTETVWGNYFARQQQRYQAPVMVLYNRVTHTACGTGQSAMGPFYCPNDRKVYLDLSFYQDMKTKLGADGEAAFAYVIAHEVGHHIQNLLGILPKVHQLQGQTSRTQANQLSVKVELQADCFAGVWAYQASKTGLFETGDIEKAFNAAEAVGDDRLQKRSQGYVVPDSFTHGTSAQRLHWFKRGLNSGDPNQCNTF

SEQ ID NO: 3222 - DNA, 894 bp, Pseudomonas aeruginosa PAO1
  CDS (1)..(894): transl_table=11
atgctctggcgcaaaggacgacgcagtgacaacgtgattgatgcccggggcgaaggaggcgcaggcggcggtggcggcatgcgcatcggcggcaagggcctcagcctgggtggggtggccatcgtggtggtggtcggcctgctgatgggccaggacccgatgcagatcctcgggtcgctgctcggccagatggacagcccggcgccggccacccagcagcaggccggcggtcgggccccggcggccaatgacgagcagagcgagttcgtccgctcgatcctcggcgacaccgaggacacctgggaacagatcttcgccagcggccaggcacaataccaacagcccaagctggtgctgttcagcaatggggtgaattccgcctgcggcttcgcctcgtcggccaccgggccgttctactgtccggccgaccgccgggtctacctcgacctggagttcttccgcgagatggaacagcgcttctccgccgccggcgacttcgcccaggcctatgtgatcgcccacgaggtcggccaccacgtgcagaacctgatgggcatctcggccaagatcaacgcagcccgccagcgcggcgcgcgcatggagggcgccaacggcctgtcggtacgccaggaactgcaggcggactgcttcgccggggtctgggccaaccgtgcacagcagcggctgaactggctggagccgggcgacatcgaggaagccctgaacgccgccaacgccatcggcgacgatcgcctgcaacgccagggccgcggcatggtggtgccggattccttcacccatggctcctcggcgcaacgcatgcgctggttcaagaccggcttcgagagcggctcgccggccagttgcgataccttcaaggcccagacgctctga

SEQ ID NO: 3223 - protein, 297 aa, Pseudomonas aeruginosa PAO1
MLWRKGRRSDNVIDARGEGGAGGGGGMRIGGKGLSLGGVAIVVVVGLLMGQDPMQILGSLLGQMDSPAPATQQQAGGRAPAANDEQSEFVRSILGDTEDTWEQIFASGQAQYQQPKLVLFSNGVNSACGFASSATGPFYCPADRRVYLDLEFFREMEQRFSAAGDFAQAYVIAHEVGHHVQNLMGISAKINAARQRGARMEGANGLSVRQELQADCFAGVWANRAQQRLNWLEPGDIEEALNAANAIGDDRLQRQGRGMVVPDSFTHGSSAQRMRWFKTGFESGSPASCDTFKAQTL

SEQ ID NO: 3224 - DNA, 936 bp, Sinorhizobium meliloti 1021
  CDS (1)..(936): transl_table=11
atggaatggaagggccgccgccagtccggaaacatcgaggatcagcgcggggccggcccccggggaggcggccctttcggccgtggcggtggattccgcctgcccggtggcggcggcggaatgcgtcgcgccggcggcggcatgagctttggcacgctcatcttcctcgtgattctctatttcgtcctgaaggcaatgggcatcgacctgcttcaggtgctcgaaggcggtggtccggcgaacatgccgggcttcgagcagagcgacgggtcgggggcgccgcagggcacggccgaggaagaagagatgaaggccttcatggccacggttcttgccgaaacggaagacacctggaacggcatcttccaggcgagcggcgagcaatatgaggaaccgaggctggtgctgttcaacggctcggtccgttcggcctgcggctttgcctcttccgcctcgggtcccttctattgccccggcgaccgcaaggtctatctcgatatgagtttcttcgacgagctggcccagaaattcgaagcttccggcgatttcgcccaggcctatgtgcttgcgcatgaggtcggtcatcacgtccagaacctgatcggcgtattgcccaaattcaatgagatgcggcagcgcatgagcgaggccgaggcgaaccagatgtcggtccgggtcgagctgcaggcggactgcttcgccgggatctggggcaaatacaccgagcagaaggggctcctggaacgaggcgatctggaggaggcgctaaacgctgcgacccagatcggcgacgacacattgcagaagcgcatgcagggctatgtcgtcccggaaagtttcaatcacggcacgtcggagcagcggatgcggtggttccagcggggcttcgacagtggcaagatgtcggattgcgacaccttctccggcgctgtctga

SEQ ID NO: 3225 - protein, 311 aa, Sinorhizobium meliloti 1021
MEWKGRRQSGNIEDQRGAGPRGGGPFGRGGGFRLPGGGGGMRRAGGGMSFGTLIFLVILYFVLKAMGIDLLQVLEGGGPANMPGFEQSDGSGAPQGTAEEEEMKAFMATVLAETEDTWNGIFQASGEQYEEPRLVLFNGSVRSACGFASSASGPFYCPGDRKVYLDMSFFDELAQKFEASGDFAQAYVLAHEVGHHVQNLIGVLPKFNEMRQRMSEAEANQMSVRVELQADCFAGIWGKYTEQKGLLERGDLEEALNAATQIGDDTLQKRMQGYVVPESFNHGTSEQRMRWFQRGFDSGKMSDCDTFSGAV

SEQ ID NO: 3226 - DNA, 864 bp, Salmonella enterica subsp. enterica serovar Typhi str. CT18
  CDS (1)..(864): transl_table=11
atgcgctggcaagggcgtcgtgaaagtaacaatgtagaggacagacgtaatcggccaggcggcccctcgctgggtggccctggctttcgtcttccgcgcgggaaaggcggcatcattctgttggtggtggtggtggtcgcagggtactatggggtggatttaaccggtctgttgactggtcagccggtttcgcagcagcagtcgacgcgttcgataagccccaatgatgatgaagcggcaaaatttacctcggtgattctggcgacgaccgaagatacctgggggcaactctttcaaaaaatggggcgcggctatcagcagccaaaactggtgatgtaccgtggtatgacgcgtaccggctgtggtgcgggtcagtccgtgatggggccgttttactgcccggcggacggcaccgtctatatcgatctctcattttacgatgttatgaaaaataagctgggcgcggacggtgattttgcccagggttatgttatcgcccacgaagtcggccaccacgtacaaaaactgttaggcattgagccgaaagtacgccagttacaacaaaacgcgtcgcaaacggaggtgaatcgcctttcggtgcgcatggagctacaggcggattgctttgccggcgtgtggggacacagtatgcagcagcaaggcgtactggaggcgggcgatctggaagaggcgctcaatgccgcacaggctatcggcgacgatcgcttacagcaacaggggcaggggcgcgtggtgccggatagttttacccacggcacctcagaacagcgctacagctggtttaagcgtggatttgacagcggtgacccggcgcaatgtaatacgtttggtaaaaacttttga

SEQ ID NO: 3227 - protein, 287 aa, Salmonella enterica subsp. enterica serovar Typhi str. CT18
MRWQGRRESNNVEDRRNRPGGPSLGGPGFRLPRGKGGIILLVVVVVAGYYGVDLTGLLTGQPVSQQQSTRSISPNDDEAAKFTSVILATTEDTWGQLFQKMGRGYQQPKLVMYRGMTRTGCGAGQSVMGPFYCPADGTVYIDLSFYDVMKNKLGADGDFAQGYVIAHEVGHHVQKLLGIEPKVRQLQQNASQTEVNRLSVRMELQADCFAGVWGHSMQQQGVLEAGDLEEALNAAQAIGDDRLQQQGQGRVVPDSFTHGTSEQRYSWFKRGFDSGDPAQCNTFGKNF

SEQ ID NO: 3228 - DNA, 864 bp, Salmonella typhimurium LT2
  CDS (1)..(864): transl_table=11
atgcgctggcaagggcgtcgtgaaagcaacaatgtagaggacagacgtaatcggccaggcggcccctcgctgggtggcccaggctttcgtcttccgcgcggaaaaggcggcatcattctgttggtggtggtgttggtcgcagggtactatggggtggatttaaccggtctgttgaccggccagccggtttcgcagcagcagtcgacgcgttcgataagccccaatgatgatgaagcggcaaaatttacctcggtgattctggcgacgaccgaagatacctggggtcaactctttcaaaaaatggggcgcggctatcagcagccaaaactggtgatgtaccgtggtatgacgcgcaccggctgtggtgcgggtcagtccgtgatggggccgttttactgcccggcggacggcaccgtttatatcgatctctcattttacgatgatatgaaaaataagctgggcgcggacggtgattttgcccagggttatgtcatcgcccacgaagtcggccaccacgtacaaaaactgttaggtattgagccgaaagtacgccagttgcagcaaaacgcgtcgcaaacggaggtgaatcgcctttcggtgcgcatggagctacaggcggattgctttgccggcgtgtggggacacagtatgcagcagcaaggcgtactggaggcgggcgatctggaagaggcgctcaatgccgcacaggctatcggcgacgatcgcttacagcaacaggggcaggggcgcgtcgtgccggatagttttactcacggcacctcagaacagcgctacagctggtttaagcgtggatttgacagcggtgacccggcgcaatgtaatacgtttggcaaaaacttttga

SEQ ID NO: 3229 - protein, 287 aa, Salmonella typhimurium LT2
MRWQGRRESNNVEDRRNRPGGPSLGGPGFRLPRGKGGIILLVVVLVAGYYGVDLTGLLTGQPVSQQQSTRSISPNDDEAAKFTSVILATTEDTWGQLFQKMGRGYQQPKLVMYRGMTRTGCGAGQSVMGPFYCPADGTVYIDLSFYDDMKNKLGADGDFAQGYVIAHEVGHHVQKLLGIEPKVRQLQQNASQTEVNRLSVRMELQADCFAGVWGHSMQQQGVLEAGDLEEALNAAQAIGDDRLQQQGQGRVVPDSFTHGTSEQRYSWFKRGFDSGDPAQCNTFGKNF

SEQ ID NO: 3230 - DNA, 888 bp, Ralstonia solanacearum GMI1000
  CDS (1)..(888): transl_table=11
gtgcgttgggatgacatgcgcgaaagcgagaacgtcgaggatgatcgcgcatcctcgagtggcggcggcttcggcggcggcgggatgcgcctgggcgtgggcggtatcgcgctggtggcggtggtcggcctgctgatgggcaagaacccgctggaaatcctcggcatggtgatgcaggtgtcgcagaacgcgcccgtgcagagtgcaccgcatggcgccgcgcggcccaccggcgagaccgacaacgaccacagcaaatcgatggtgagccacgtgctgggcgacaccgaagacacctggtcgcaactcttcaagcaggccggccgcgcctatcagccgcccaagctggtgctgttccgccagggcatccgctcgggttgcggcgacgccacttcggcggtcggcccgttctactgcccggccgataccaaggtctacctggatctcggcttcttcgacgaactgcgccgccgcttcggcgcgccgggcgacttcgcggccgcctacgtggtcgcgcacgaggtcggccaccatgtgcagaatctgctcggcgtctcggagaaggtcagccgcgcgcaggccggccagtcgcaacgcgtgtcgaacgcgctgtcggtcaagctggaactgcaggccgactgcctggccggcgtgtggggccactacgcgcagcagcgcggcctgctcgagcgcggcgacctggaacaggccctcaccgccgcgcacgccatcggcgacgataccctgcagcgcaacgccggccgcagcgtcgcgcccgatgcgttcacgcacggcacctcggaacagcgcatgcactggttccgccagggcttcgacggcggcgatatccggcagtgcgacaccttccgcgccggggccgatgcctga

SEQ ID NO: 3231 - protein, 295 aa, Ralstonia solanacearum GMI1000
MRWDDMRESENVEDDRASSSGGGFGGGGMRLGVGGIALVAVVGLLMGKNPLEILGMVMQVSQNAPVQSAPHGAARPTGETDNDHSKSMVSHVLGDTEDTWSQLFKQAGRAYQPPKLVLFRQGIRSGCGDATSAVGPFYCPADTKVYLDLGFFDELRRRFGAPGDFAAAYVVAHEVGHHVQNLLGVSEKVSRAQAGQSQRVSNALSVKLELQADCLAGVWGHYAQQRGLLERGDLEQALTAAHAIGDDTLQRNAGRSVAPDAFTHGTSEQRMHWFRQGFDGGDIRQCDTFRAGADA

SEQ ID NO: 3232 - DNA, 918 bp, Agrobacterium tumefaciens str. C58
  CDS (1)..(918): transl_table=11
atggaatggaaagggcgtcgccagtcggacaatatcgaggaccggcgcggcatgtcggcgggttcgggtgatcctttttcccgaggcgggatgcgcgtgccaatcgggcgtcgcggcggcggtatagggattggtggtcttctggtcattcttctgatcagctgggtgcttggcatcaacccactgacgctgctgaccggcggcgatatgtcgatggatggcggcggcacgacgcaatcgggaacccagcaatccggcacacgtccgcagggccagtcatccgatgagacgacggctttcgtgcgcaccgtgctggcggaaaccgaggatacctggagcggtatcttccaatccgccggtgagacctatcagaaaccgacgctggtgctgttctccgggcaggtttcttccgcctgtggcaatgcttccgctgccagcggcccgttttattgccctggtgaccgcaaggtctatctcgataccaacttcttcaaggaactggatcagcgtttcggcgcgtccggcgacttcgcgcaggcctatgtgattgcgcatgaggttggccaccacgtacagaacctcaccggtgtcctgccggagttcaaccgtcgccgccagtcgatgagccagacggatgcaaacaagatgtcggtgcgtgtggagcttcaggcggattgttatgccggcatctggggcaagttcaccgaacagaagggcattctcgagaccggcgatcttgaggaagcgctgaatgcggcccatcagatcggcgacgatacgttgcagaagcagacgcaaggttatgtggtgcctgacagtttcaaccacggcacctcggcgcagcgcatggaatggttcaagcgcggcttccagaatggtcgtgtcgaggattgcgatactttctcggcgaatatctga

SEQ ID NO: 3233 - protein, 305 aa, Agrobacterium tumefaciens str. C58
MEWKGRRQSDNIEDRRGMSAGSGDPFSRGGMRVPIGRRGGGIGIGGLLVILLISWVLGINPLTLLTGGDMSMDGGGTTQSGTQQSGTRPQGQSSDETTAFVRTVLAETEDTWSGIFQSAGETYQKPTLVLFSGQVSSACGNASAASGPFYCPGDRKVYLDTNFFKELDQRFGASGDFAQAYVIAHEVGHHVQNLTGVLPEFNRRRQSMSQTDANKMSVRVELQADCYAGIWGKFTEQKGILETGDLEEALNAAHQIGDDTLQKQTQGYVVPDSFNHGTSAQRMEWFKRGFQNGRVEDCDTFSANI

SEQ ID NO: 3234 - DNA, 927 bp, Brucella melitensis 16M
  CDS (1)..(927): transl_table=11
atgcgctggcaaggccgtaggcaaagcgacaatgttgaagatctgcgcggtgagcagggtggtgtggttggcggcggcttcggccgcgggggtggtttcggcggccccggcttcaggatcgtgcgcggcggtggaatttccggcattctcattctcgtcgtcatgttcttcgtgttgcgcgcggttggcatcgatccgatgcccatcctctttggcgacggcagcatgagcccgaccgtgcagacgcaaggcacgggccgcacggtggctgaaggcggcactgtcgccaatgacgagacgacgcagttcgcccgcaccgttctggccgagacagaagatgtctggagcggtattttccagtcgcgcggccagacctatacgccgccgacgatggtgctgttttccgatcaggtccgttcggcctgcggctatgcttcggctgcttccggtccgttctactgtcccggcgaccgtaagctttatatcgacctcagcttctacaaggagcttgccaatcgctttggcgcttcgggcgatttcgcgcaggcctatgttctggcgcatgaagtgggccaccatgtccagaatcttctgggcatcctgccgaaattcaaccagatgcgccagcagatgagcgaggcgcaggccaaccagacgtcggtgcgcgtcgagcttcaggccgattgccttgcgggcgtatggggccactacacagaccagaagggcattctggaagcgggcgaccttgaggaagccttgaacgcggcgcatcagatcggtgatgacacattacagcgtcgcagccagggctatgtcgtaccggaaagcttcaaccatggcacctccgcgcaacgcgccaagtggttccagcgtgggttcgatagcggtcagcttggatcgtgtgacacgttcagcggcgatgtttag

SEQ ID NO: 3235 - protein, 308 aa, Brucella melitensis 16M
MRWQGRRQSDNVEDLRGEQGGVVGGGFGRGGGFGGPGFRIVRGGGISGILILVVMFFVLRAVGIDPMPILFGDGSMSPTVQTQGTGRTVAEGGTVANDETTQFARTVLAETEDVWSGIFQSRGQTYTPPTMVLFSDQVRSACGYASAASGPFYCPGDRKLYIDLSFYKELANRFGASGDFAQAYVLAHEVGHHVQNLLGILPKFNQMRQQMSEAQANQTSVRVELQADCLAGVWGHYTDQKGILEAGDLEEALNAAHQIGDDTLQRRSQGYVVPESFNHGTSAQRAKWFQRGFDSGQLGSCDTFSGDV

SEQ ID NO: 3236 - DNA, 867 bp, Yersinia pestis KIM
  CDS (1)..(867): transl_table=11
atgcgttggcaaggtcgtcgtgaaagtaataatgtggaagatcgtcgcgggaatgcttccggtggtggtgggttccggcccccaataaggggcaaaggaggggtcgctatcctgattattgtgttggtcgcgggctactacggcgttgatctgacgccgctattaaatggcggtgatccactgtcacaaacccagacgccgccccgttctcctaaagctgtcagtacgcaagatgaccaatatgctaaattcacctcggtcatcctggccgatactgaagatacctggaaacctatcttccagaagatgggccggacttatcaggatccaaaactggtcatgtaccgtggtgcaacccagaccggttgtggtaccggtcagtcggtcatggggccgttttattgcccggcagatagcaccatctatatcgatctctctttctatgaagatatgaagaataaattaggtgcgggcggtgattttgctcaggcgtatgttattgctcatgaagtcggccatcacgtacaacatttgatggggattgatgcgaaggttcgtcagcaacagcagggcgtttctcaggcggaaggtaatcgcttatcggtaaaaatggagctgcaagccgactgttttgccggggtttggggcaaggcgatggaagagcaacaggtgttggaagcaggggatttacaagaagcgctcaatgcggcacaggccattggcgatgaccggctacaacagcaaagccagggccgcgtcgtgccagatagctttactcacggaacctctcagcaacgttatacctggtttaaacgtggttttgacagtggtgatcctaatagctgtaacacgtttgctagtcactag

SEQ ID NO: 3237 - protein, 288 aa, Yersinia pestis KIM
MRWQGRRESNNVEDRRGNASGGGGFRPPIRGKGGVAILIIVLVAGYYGVDLTPLLNGGDPLSQTQTPPRSPKAVSTQDDQYAKFTSVILADTEDTWKPIFQKMGRTYQDPKLVMYRGATQTGCGTGQSVMGPFYCPADSTIYIDLSFYEDMKNKLGAGGDFAQAYVIAHEVGHHVQHLMGIDAKVRQQQQGVSQAEGNRLSVKMELQADCFAGVWGKAMEEQQVLEAGDLQEALNAAQAIGDDRLQQQSQGRVVPDSFTHGTSQQRYTWFKRGFDSGDPNSCNTFASH

SEQ ID NO: 3238 - DNA, 927 bp, Brucella suis 1330
  CDS (1)..(927): transl_table=11
atgcgctggcaaggccgtaggcaaagcgacaatgttgaagatctgcgcggtgagcagggtggtggggttggcggcggcttcggccgcgggggtggtttcggcggccccggcttcaggatcgtgcgcggcggtggaatttccggcattctcattctcgtcgtcatgttcttcgtgttgcgcgcggttggcatcgatccgatgcccatcctctttggcgacggcagcatgagcccgaccgtgcagacgcaaggcacgggccgcacggtggctgaaggcggcactgtcgccaatgacgagacgacgcagttcgcccgcaccgttctggccgagacagaagatgtctggagcggtattttccagtcgcgcggccagacctatacgccgccgacgatggtgctgttttccgatcaggtccgttcggcctgcggctatgcttcggctgcttccggcccgttctactgtcccggcgaccgtaagctttatatcgacctcagcttctacaaggagcttgccaatcgctttggcgcttcgggcgatttcgcgcaggcctatgttctggcgcatgaagtgggccaccatgtccagaatcttctgggcatcctgccgaaattcaaccagatgcgccagcagatgagcgaggcgcaggccaaccagatgtcggtgcgcgtcgagcttcaggccgattgccttgcgggcgtatggggccactacacagaccagaagggcattctggaagcgggcgaccttgaggaagccttgaacgcggcgcatcagatcggtgatgacacattacagcgtcgcagccagggctatgtcgtaccggaaagcttcaaccatggcacctccgcgcaacgcgccaagtggttccagcgtgggttcgatagcggtcagcttggatcgtgtgacacgttcagcggtgatgtttag

SEQ ID NO: 3239 - protein, 308 aa, Brucella suis 1330
MRWQGRRQSDNVEDLRGEQGGGVGGGFGRGGGFGGPGFRIVRGGGISGILILVVMFFVLRAVGIDPMPILFGDGSMSPTVQTQGTGRTVAEGGTVANDETTQFARTVLAETEDVWSGIFQSRGQTYTPPTMVLFSDQVRSACGYASAASGPFYCPGDRKLYIDLSFYKELANRFGASGDFAQAYVLAHEVGHHVQNLLGILPKFNQMRQQMSEAQANQMSVRVELQADCLAGVWGHYTDQKGILEAGDLEEALNAAHQIGDDTLQRRSQGYVVPESFNHGTSAQRAKWFQRGFDSGQLGSCDTFSGDV

SEQ ID NO: 3240 - DNA, 879 bp, Shewanella oneidensis MR-1
  CDS (1)..(879): transl_table=11
atgcgttggcgtgacagtgaccgcagctccaatatcgaagacagacgggaccaacagatggcctcggcgggggtgcccagtgcgctcttgcttaggttattgccttttctgctgcaaactaaaatcggccgagtgatattgctactaggcgggctatattttgcgtttcaatactttactggcggattatccctcgagccgagtaatcaagcggggtttagtcagtcacagtcggccagcaataccgctgctcaagatgaaaatgcccagtttgtggcggcgattcttggcacgacggagaccgtttggaatcaattactgcaagggcaatacgtcgaacctaagctagtgctttatcgcaatatgacctcaaccggatgcggtatggggcaggcgcaatcggggcctttctattgccccgctgacggcaaagtgtatatcgacttgagttttctcgaagagctgaaaaagcttggggcgtcgggggatttcgccttcgcatatgttatcgcccacgaggtgggtcaccatgtgcagaacttactcggcaccagcactaaagtgcgtcaggcgcagcaagccgctggcaaggcgcaggccaatcaactgagtgtcgcccttgaattgcaagccgattgttatgctggcgtgtggggtcattatgtcgatagacagctcaatttgcttgagcctggcgatgtagaagaaggcattgccgccgccagtgcagtgggggatgatcgcctgcaaaaaatggcgggtcgcgccgtgcaacctgaagcctttacccatggtagttcggcggacagggtgaaatggtttaatatcggctttgcctccggcaaacctgccagctgcaatacttttaatggcaaatag

SEQ ID NO: 3241 - protein, 292 aa, Shewanella oneidensis MR-1
MRWRDSDRSSNIEDRRDQQMASAGVPSALLLRLLPFLLQTKIGRVILLLGGLYFAFQYFTGGLSLEPSNQAGFSQSQSASNTAAQDENAQFVAAILGTTETVWNQLLQGQYVEPKLVLYRNMTSTGCGMGQAQSGPFYCPADGKVYIDLSFLEELKKLGASGDFAFAYVIAHEVGHHVQNLLGTSTKVRQAQQAAGKAQANQLSVALELQADCYAGVWGHYVDRQLNLLEPGDVEEGIAAASAVGDDRLQKMAGRAVQPEAFTHGSSADRVKWFNIGFASGKPASCNTFNGK

SEQ ID NO: 3242 - DNA, 951 bp, Pseudomonas putida KT2440
  CDS (1)..(951): transl_table=11
ttgcctgacaccagccgctttcctgaactaatctttgtcttcttgtttcacgctcggagagcattcatggaatggcgaaaaggccgacgcagcgacaacgtggtcgatgcccggggcgaaggtggcggtggcggcatgcgcttcggcggcggcaaggggctggggctcggggcgattctgctgatcgtcggcatcggctggctcaccgggcaggacccgctgcagattcttggccagctcaccggccagctggagcaacagcaaacggcccccagtggtacaagcgccaaggcccccccggccaacgaccagcaggccgagttcgtcgcctcgattctgggcgacaccgaggacacctggaaagccctgttcgcccaggccggcaaacaataccgtgaccccaaactggtcctgttcagcggccaggtcaattcggcctgtggttttgcctcggcagcggtcgggccgttctattgcccggcggaccagcgggtgtacctggacatgtcgttcttccgcgaaatggaaacccgcttcgctgcagcgggcgacttcgcccaggcctacgtgatcgcccacgaaatcggtcaccatgtgcagacactgctgggcgtttcggccaaggtggatgccgcacgacgcgccggccagcgcatggagggcgacaacggcctgttggtgcgccaggagttgcaggctgactgcctggccggggtatgggcctaccaggcgcagaaacgcctgaactggctggagccaggcgatgtcgaggaagcgctgaatgcggccaatgccattggcgacgaccgcctgcagcagcaaggccgcggccgcgtagtgccggactccttcacccatggcacttccgcgcagcgggtgcgttggttcaagatcgggtttgccgaaggtgaagtgaaccgctgcgacaccttcagcgcacgcaccctctga

SEQ ID NO: 3243 - protein, 316 aa, Pseudomonas putida KT2440
MPDTSRFPELIFVFLFHARRAFMEWRKGRRSDNVVDARGEGGGGGMRFGGGKGLGLGAILLIVGIGWLTGQDPLQILGQLTGQLEQQQTAPSGTSAKAPPANDQQAEFVASILGDTEDTWKALFAQAGKQYRDPKLVLFSGQVNSACGFASAAVGPFYCPADQRVYLDMSFFREMETRFAAAGDFAQAYVIAHEIGHHVQTLLGVSAKVDAARRAGQRMEGDNGLLVRQELQADCLAGVWAYQAQKRLNWLEPGDVEEALNAANAIGDDRLQQQGRGRVVPDSFTHGTSAQRVRWFKIGFAEGEVNRCDTFSARTL

SEQ ID NO: 3244 - DNA, 942 bp, Bradyrhizobium japonicum USDA 110
  CDS (1)..(942): transl_table=11
atgcgctacgatgatttccgccgcagcgacgacatcgaggatcgtcgcgacgaaggcggcggcgggtttggcggcggcggaggcggcgggtttggcctgcccatgggcggcggcgggctcggcatcggcaccatcatcgtgctcggcctgatcggctacgccttcggcatcgatccgcgcatcctgatcggcggcgccgagatcctcaccggcggcggccaggcgccgagctaccagaccgatcgccagtcgacgtcggccaagcgcggcgcgccgaccgacgagatgggcagcatgatctccggcatcctcggcgagatcgacgaccgctggagcgagatcttccaggccagcggccagtcctacaccggtccgaagatcgtgctgttccgcaacgccaccaatggcggccgctgcggcatggcgcagtcggcgatgggccccttctactgtccgccggatcgcaccatcttcctcgacaccggcttcttccgcgaggtcgagacgcgcttccgcggctgctccggcaagtcggcctgcaatttcaccaccgcctacatcatcgcgcatgaagccggccaccacatccagaacctgctcggcatcattccgcgcgtgacgcggcttcagcagcaggccggcagcaaggccgaggccaacgcgctccaggtcaaggtggagttgcaggcggactgtctgtccggcgtctgggtcaaccgcgaggcgaagaagcgtccgaacttcctggaagccggcgacatcgacgccgcgctgaccacggccagtgcgatcggcgacgacacgctccagcgtcaggccaccggacgcgtcgtgcccgattccttcacccatggctcggccgcgcagcgcaagcaatggttcatgaccggctaccagcagggcacggtccaggcctgcaacacgttcggcggcgggtcgtag

SEQ ID NO: 3245 - protein, 313 aa, Bradyrhizobium japonicum USDA 110
MRYDDFRRSDDIEDRRDEGGGGFGGGGGGGFGLPMGGGGLGIGTIIVLGLIGYAFGIDPRILIGGAEILTGGGQAPSYQTDRQSTSAKRGAPTDEMGSMISGILGEIDDRWSEIFQASGQSYTGPKIVLFRNATNGGRCGMAQSAMGPFYCPPDRTIFLDTGFFREVETRFRGCSGKSACNFTTAYIIAHEAGHHIQNLLGIIPRVTRLQQQAGSKAEANALQVKVELQADCLSGVWVNREAKKRPNFLEAGDIDAALTTASAIGDDTLQRQATGRVVPDSFTHGSAAQRKQWFMTGYQQGTVQACNTFGGGS

SEQ ID NO: 3246 - DNA, 891 bp, Pseudomonas syringae pv. tomato str. DC3000
  CDS (1)..(891): transl_table=11
atgctctggaaaaaaggccgacgcagcgacaacgtagtcgatgcacgcgatggcggcagcagtgggggcggcggcggtatgcgcatcggcggcaagggcctggggctgggcggcattgtgatcattgttgccatcggcctgctgaccggccaggacccgatgcagattcttggccagttgaccggccagggcaccgagcaaagcgcgccacccagtgcgcagacgcgacaggcgccaccggccaacgatcagcaggctgaatttgtgcgcagcattctgggcgataccgaggacacctggcgcgccgtgttcgcccagaatggccgcgaatacaaggacccgaccctggtgctgttcagcggtcaggtgaactccgcctgtggtcgcgccacctcggcgacaggtccgttctattgcccggcagaccagcaggtttatctggacctggatttcttccgtgaaatgtctcagcgcttctcggctgccggcgactttgcccaggcttacgtgatcgcccacgaggtcggccaccacgtgcagaccctgctgggcatttcggccaaggtcgacaaggcccgtcaggccggtcaaaagatggaaggcagcaacggtttgctggtgcgccaggaactgcaggctgactgttttgcaggcgtttgggcctataacgcacaaaatcgtttgaactggctggagccgggtgatattgaagaggcgctgaatgcggcgaatgccattggcgatgaccgcttacagcagcaaggcagtgggcgagtcgttccggactcctttacgcacggaacctccgcccagcgcgtgcgctggttcaaaaccggttttgcgcaaggccaaatcaatcaatgcgacacgttcgccgccaagagtctctga

SEQ ID NO: 3247 - protein, 296 aa, Pseudomonas syringae pv. tomato str. DC3000
MLWKKGRRSDNVVDARDGGSSGGGGGMRIGGKGLGLGGIVIIVAIGLLTGQDPMQILGQLTGQGTEQSAPPSAQTRQAPPANDQQAEFVRSILGDTEDTWRAVFAQNGREYKDPTLVLFSGQVNSACGRATSATGPFYCPADQQVYLDLDFFREMSQRFSAAGDFAQAYVIAHEVGHHVQTLLGISAKVDKARQAGQKMEGSNGLLVRQELQADCFAGVWAYNAQNRLNWLEPGDIEEALNAANAIGDDRLQQQGSGRVVPDSFTHGTSAQRVRWFKTGFAQGQINQCDTFAAKSL

SEQ ID NO: 3248 - DNA, 852 bp, Rhodopirellula baltica SH 1
  CDS (1)..(852): transl_table=11
atgcgttggcgtggacgacgacaaagtgacaatgtggaagatcgtcgaaccagcggcggtggcgcggtggtcggtggcggaatcggagtgattgtcatcgcgatcatcatcggattgctgggcggcaacccacagcagtttctacaacaagccgctcaacaacctgcccccggtggtgccggcggcgaagtcgagctgaccccgcaagaaatcgaagccggcgaatttgtcagcacggtgttcgctgacaccgaagatgtctggacggatctgtttgctcaggccggtcgcgactacaaaaaaccgacgttggtgcttttcaaagaccaggtcaacagcggatgcggcatggccagcagcggcacgggccctttctattgcccggccgatgaaaaggtttatctcgacacatcctttttcggccaactcgctcgccaactcggtgcaccgggggactttgcacaagcctatgtggtcgcccatgaagttggccatcacgttcagaacctgctgggatacaccgaccaactggatcaaattcgccaaagggttcccgaagtcgaatacaacaagtattcggttcgattggaattgcaagccgacttcttcgctggagtgatgctgcatcatgcggaaaagaaataccgcatcattgaagacggggacatcgaagaagcgatgacggccgcgcgggccatcggcgacgacacgctgcaaaaacgtagccgaggttacgtccaacccgagactttcaaccacggcaccagcgaacagcgattgcgttggttcaccaaaggcttgaaaacaggtgacctgaatcaaggcgacaccttccaagccgaccaactttga

SEQ ID NO: 3249 - protein, 283 aa, Rhodopirellula baltica SH 1
MRWRGRRQSDNVEDRRTSGGGAVVGGGIGVIVIAIIIGLLGGNPQQFLQQAAQQPAPGGAGGEVELTPQEIEAGEFVSTVFADTEDVWTDLFAQAGRDYKKPTLVLFKDQVNSGCGMASSGTGPFYCPADEKVYLDTSFFGQLARQLGAPGDFAQAYVVAHEVGHHVQNLLGYTDQLDQIRQRVPEVEYNKYSVRLELQADFFAGVMLHHAEKKYRIIEDGDIEEAMTAARAIGDDTLQKRSRGYVQPETFNHGTSEQRLRWFTKGLKTGDLNQGDTFQADQL

SEQ ID NO: 3250 - DNA, 852 bp, Bordetella pertussis Tohama I
  CDS (1)..(852): transl_table=11
atgcgcatggacgactcgcgcgaaagccagaacatcgaagatcggcgcgccgcggggccccggctgggcggcaagggccgcatcggcatcggcaccatcgtgcttgcgctggtggccatgtatttcggcatcgacccttccgtggtgctgcagatggccgaaggccccgccacctacgagcaggcgcccgccggcgcgccgccggccaacgacccgcaggcgcgcttcgtggccaaggtcctgggcgagaccgaagacacctggggcgccatcttcacgcaaagcctcaaccgcaattacgtgccgcccaagctggtgctgtttcgcggcgccacgcccacggcctgcggcaccggccaggccgccatgggcccgttctactgccccggcgacagcaaggtgtacatcgacctcggcttctttgacgaaatggagcgccgcctgaacgccccgggcgacttcgcccaggcctatgtcatcgcccatgaggtggggcaccacgtgcagcatctgctgggcgtggccgaacaggtcgaccgcctgcgccagcgcaatccggcccaggccaacgccctgtcggtgcgcatggaactgcaggccgactgcttcgccggcctgtgggcgcgacgcgccgaccaggcgcgcaacatcctcgaatcgggcgacatcgaggaaggcctgaatgccgccagcgccatcggcgacgacaccctgcaaaagaagagccagggctatgtcgtgcccgacgccttcacgcacggctcgtcggcccagcgcgtgcgctggttcaagcgcggcctggaaagcggcgacctgcgccagtgcgacaccttcggcgcggcgcaactctag

SEQ ID NO: 3251 - protein, 283 aa, Bordetella pertussis Tohama I
MRMDDSRESQNIEDRRAAGPRLGGKGRIGIGTIVLALVAMYFGIDPSVVLQMAEGPATYEQAPAGAPPANDPQARFVAKVLGETEDTWGAIFTQSLNRNYVPPKLVLFRGATPTACGTGQAAMGPFYCPGDSKVYIDLGFFDEMERRLNAPGDFAQAYVIAHEVGHHVQHLLGVAEQVDRLRQRNPAQANALSVRMELQADCFAGLWARRADQARNILESGDIEEGLNAASAIGDDTLQKKSQGYVVPDAFTHGSSAQRVRWFKRGLESGDLRQCDTFGAAQL

SEQ ID NO: 3252 - DNA, 852 bp, Bordetella parapertussis 12822
  CDS (1)..(852): transl_table=11
atgcgcatggacgactcgcgcgaaagccagaacatcgaagatcggcgcgccgcggggccccggctgggcggcaagggccgcatcggcatcggcaccatcgtgcttgcgctggtggccatgtatttcggcatcgacccttccgtggtgctgcagatggccgaaggccccgccacctacgagcaggcgcccgccggcgcgccgccggccaacgacccgcaggcgcgcttcgtggccaaggtcctgggcgaaaccgaagacacctggggcgccatcttcacgcaaagcctcaaccgcaattacgtgccgcccaagctggtgctgtttcgcggcgccacgcccacggcctgcggcaccggccaggccgccatgggcccgttctactgtcccggcgacagcaaggtgtacatcgacctcggcttcttcgacgaaatggagcgccgcctgaacgccccgggcgacttcgcccaggcctatgtcatcgcccatgaggtggggcaccacgtgcagcacctgttgggcgtgtccgaacaggtcgaccgcctgcgccagcgcaatccggcccaggccaacgccctgtcggtgcgcatggaactgcaggccgactgcttcgccggcctgtgggcgcgacgcgccgaccaggcgcgcaacatcctcgaatcgggcgacatcgaggaaggcctgaatgccgccagcgccatcggcgacgacaccctgcaaaagaagagccagggctatgtcgtgcccgacgccttcacgcacggctcgtcggcccagcgcgtgcgctggttcaagcgcggcctggaaagcggcgacctgcgccagtgcgacaccttcggcgcggcgcaactctag

SEQ ID NO: 3253 - protein, 283 aa, Bordetella parapertussis 12822
MRMDDSRESQNIEDRRAAGPRLGGKGRIGIGTIVLALVAMYFGIDPSVVLQMAEGPATYEQAPAGAPPANDPQARFVAKVLGETEDTWGAIFTQSLNRNYVPPKLVLFRGATPTACGTGQAAMGPFYCPGDSKVYIDLGFFDEMERRLNAPGDFAQAYVIAHEVGHHVQHLLGVSEQVDRLRQRNPAQANALSVRMELQADCFAGLWARRADQARNILESGDIEEGLNAASAIGDDTLQKKSQGYVVPDAFTHGSSAQRVRWFKRGLESGDLRQCDTFGAAQL

SEQ ID NO: 3254 - DNA, 846 bp, Bordetella bronchiseptica RB50
  CDS (1)..(846): transl_table=11
atggacgactcgcgcgaaagccagaacatcgaagatcggcgcgccgcggggccccggctgggcggcaagggccgcatcggcatcggcaccatcgtgcttgcgctggtggccatgtatttcggcatcgacccttccgtggtgctgcagatggccgaaggccccgccacctacgagcaggcgcccgccggcgcgccgccggccaacgacccgcaggcgcgcttcgtggccaaggtcctgggcgaaaccgaagacacctggggcgccatcttcacgcaaagcctcaaccgcaattacgtgccgcccaagctggtgctgtttcgcggcgccacgcccacggcctgcggcaccggccaggccgccatgggcccgttctactgtcccggcgacagcaaggtgtacatcgacctcggcttcttcgacgaaatggagcgccgcctgaacgccccgggcgacttcgcccaggcctatgtcatcgcccatgaggtggggcaccacgtgcagcacctgttgggcgtgtccgaacaggtcgaccgcctgcgccagcgcaatccggcccaggccaacgccctgtcggtgcgcatggaactgcaggccgactgcttcgccggcctgtgggcgcgacgcgccgaccaggcgcgcaacatcctcgaatcgggcgacatcgaggaaggcctgaatgccgccagcgccatcggcgacgacaccctgcaaaagaagagccagggctatgtcgtgcccgacgccttcacgcacggctcgtcggcccagcgcgtgcgctggttcaagcgcggcctggaaagcggcgacctgcgccagtgcgacaccttcggcgcggcgcaactctag

SEQ ID NO: 3255 - protein, 281 aa, Bordetella bronchiseptica RB50
MDDSRESQNIEDRRAAGPRLGGKGRIGIGTIVLALVAMYFGIDPSVVLQMAEGPATYEQAPAGAPPANDPQARFVAKVLGETEDTWGAIFTQSLNRNYVPPKLVLFRGATPTACGTGQAAMGPFYCPGDSKVYIDLGFFDEMERRLNAPGDFAQAYVIAHEVGHHVQHLLGVSEQVDRLRQRNPAQANALSVRMELQADCFAGLWARRADQARNILESGDIEEGLNAASAIGDDTLQKKSQGYVVPDAFTHGSSAQRVRWFKRGLESGDLRQCDTFGAAQL

SEQ ID NO: 3256 - DNA, 897 bp, Acinetobacter sp. ADP1
  CDS (1)..(897): transl_table=11
atgcgttggaaagggcgtcgtgttagtagtaacgtagaagatcgtcgtgggagtggtgcaaaggttggtggcatcagtattattggattagttgttgcttttgttgcatggaaatttttcggtgttgatccgcagcaagcctatcaagcaacacagcaaatcacggctgcacaaaatccatcttcaaatgcgccacagcaactcactgcagatcaaaaagaagcatctgattttgtgggaaccattttagcggatacagaagatacttggacacccatttttaagcagttgggtcaaacttatgtgccgccaaagttggtactatttaatggtattgtgcaatctggttgtggaacagcacaatctgccatggggccattttattgtcccacagatcaaaaagtatatatcgataccagcttctttaaagatatgcgtgagcaaatgggaatctctggtgaacagaatcagactgaactttcgcgacaggatcaagctggtgactttgctcaagcatatgtggtggcacatgaggtagggcaccatattcagaatctgctaggaatatcttctcaagtgcaacaggcacaagcgcaaggtagtcgtgctcaagccaatcaactttcagttcgtcttgaattgcaagcagattgctttgctggaatatgggccaatcataatcagcaacgaacacaatttttagaggcaggtgatattgaagaagcaatggatgctgcacaaaaaattggcgatgactacttacaaaaacgttctactggacaagtggtaccagatagttttactcatggcaccagtcagcaacgcatgcattggtttgaggtgggtctaaaatcgggtgatttaaatcagtgtgataccttcaaggccagtatttga

SEQ ID NO: 3257 - protein, 298 aa, Acinetobacter sp. ADP1
MRWKGRRVSSNVEDRRGSGAKVGGISIIGLVVAFVAWKFFGVDPQQAYQATQQITAAQNPSSNAPQQLTADQKEASDFVGTILADTEDTWTPIFKQLGQTYVPPKLVLFNGIVQSGCGTAQSAMGPFYCPTDQKVYIDTSFFKDMREQMGISGEQNQTELSRQDQAGDFAQAYVVAHEVGHHIQNLLGISSQVQQAQAQGSRAQANQLSVRLELQADCFAGIWANHNQQRTQFLEAGDIEEAMDAAQKIGDDYLQKRSTGQVVPDSFTHGTSQQRMHWFEVGLKSGDLNQCDTFKASI

SEQ ID NO: 3258 - DNA, 870 bp, Yersinia pseudotuberculosis IP 32953
  CDS (1)..(870): transl_table=11
atgcgttggcaaggtcgtcgtgaaagtaataatgtggaagatcgtcgcgggaatgcttccggtggtggcggtgggttccggcccccaataaggggcaaaggaggggtcgctatcctgattattgtgttggtcgcgggctactacggcgttgatctgacgccgctattaaatggcggtgatccactgtcacaaacccagacgccgccccgttctcctaaagctgtcagtacgcaagatgaccaatatgctaaattcacctcggtcatcctggccgatactgaagatacctggaaacctatcttccagaagatgggccggacttatcaggatccaaaactggtcatgtaccgtggtgcaacccagaccggttgtggtaccggtcagtcggtcatggggccgttttattgcccggcagatagcaccatctatatcgatctctctttctatgaagatatgaagaataaattaggtgcgggcggtgattttgctcaggcgtatgttattgctcatgaagtcggccatcacgtacaacatttgatggggattgatgcgaaggttcgtcagcaacagcagggcgtttctcaggcggaaggtaatcgcttatcggtaaaaatggagctgcaagccgactgttttgccggggtttggggcaaagcgatggaagagcaacaggtgttggaagcaggggatttacaagaagcgctcaatgcggcacaggccattggcgatgaccggctacaacagcaaagccagggccgcgtcgtgccagatagcttcactcacggaacctctcagcaacgttatacctggtttaagcgtggttttgacagtggtgatcctaatagctgtaacacgtttgctagtcgctag

SEQ ID NO: 3259 - protein, 289 aa, Yersinia pseudotuberculosis IP 32953
MRWQGRRESNNVEDRRGNASGGGGGFRPPIRGKGGVAILIIVLVAGYYGVDLTPLLNGGDPLSQTQTPPRSPKAVSTQDDQYAKFTSVILADTEDTWKPIFQKMGRTYQDPKLVMYRGATQTGCGTGQSVMGPFYCPADSTIYIDLSFYEDMKNKLGAGGDFAQAYVIAHEVGHHVQHLMGIDAKVRQQQQGVSQAEGNRLSVKMELQADCFAGVWGKAMEEQQVLEAGDLQEALNAAQAIGDDRLQQQSQGRVVPDSFTHGTSQQRYTWFKRGFDSGDPNSCNTFASR

SEQ ID NO: 3260 - DNA, 834 bp, Mannheimia succiniciproducens MBEL55E
  CDS (1)..(834): transl_table=11
atgcgttggcaaggtcgaagagaaagtacaaatgttgaagacagacgttcggaacgttccggcatttcgatgggcgggaagaaaacgggcgttttagggtttattattttattggtcggcgcttattacggcgtggatttatcgggattggtgggaacctcatcgaatattggtgaggtcggttcctcattaagccaaaacgaagaggaaacattggaaaaattatcccgggtggtgttagccgatacggaaagcacatggcaggattattttgcccgtagcggacaaaaatacagtgcgccgaccatggttttatataacggcgcaacccctagcgcctgcggaacgggtcaatccgctatggggcctttttattgcccgaacgatcataaagtttacttagacttatctttttataacgatatgaaaaatcagctgggtgccggtggtgaagcggcgttcgcttatgtaatcgctcatgaagtaggacatcatgttcagaatttaacgggcattttgcctcgaatcagccgcctgcaacaaagtaatcccgctcaagctaatcagctttcggttaatcttgaattacaggcggactgttttgccggtgtattcggttatcaggcggtaaaaaacaatatgtttgaagcgagtgatttagaagtagcgtttgccgcagcggaggcggtaggagacgaccgtttacaaaaacgcagtcaaggttatgcggtacccgatagttttactcacggtacatcgcaacagcgtctcacctggttccgaaaaggcttacaaaccggcgacccgacacaatgcaatacgtttactaactaa

SEQ ID NO: 3261 - protein, 277 aa, Mannheimia succiniciproducens MBEL55E
MRWQGRRESTNVEDRRSERSGISMGGKKTGVLGFIILLVGAYYGVDLSGLVGTSSNIGEVGSSLSQNEEETLEKLSRVVLADTESTWQDYFARSGQKYSAPTMVLYNGATPSACGTGQSAMGPFYCPNDHKVYLDLSFYNDMKNQLGAGGEAAFAYVIAHEVGHHVQNLTGILPRISRLQQSNPAQANQLSVNLELQADCFAGVFGYQAVKNNMFEASDLEVAFAAAEAVGDDRLQKRSQGYAVPDSFTHGTSQQRLTWFRKGLQTGDPTQCNTFTN

SEQ ID NO: 3262 - DNA, 858 bp, Azoarcus sp. EbN1
  CDS (1)..(858): transl_table=11
atgcgtatcggcggtcgtcgggaaagcgagaacgtcgaggatcggcgcggttcgcacttcaggctcggaggtggtggcaagatcggcatcggcacgatcgtgctcgcgctcgtcgcgatgtatttcggcatcgacccgagcgtcgtgttcgacaccgcgagcgtccagtcgccatcgccggccacgcagcccgcctcgccgcgctccgccgcggaagatgaactcgcccgcttcgcatcacaggtgctcgccgataccgaggatacctggggaccggtctttgcgtccgccggcggccagtaccgggagccgcgcatggtgctcttcaccggcgcgacgcgcagcgcgtgcggcgtggggcaggcggagatggggccgttctactgcccggccgacgagaaagtctacctcgacctgtccttcttcgacgacttgcagaaccgcttccgcgcgcccggcgactttgcccaggcgtacgtgatcgcgcatgaagtgggccatcacgtgcagaacctgctcggcatctccgaaaaagtccagcaggcgcgtgagcagctgccggcgcgcgaggcgaatgcgctgtcggtccgcgtcgaactgcaggccgactgccttgcgggcgtgtggggccatcatgccgaccgcacgcgccagctgctcgaagcgggcgacgtcgaggaggcgctcggcgcggcgtccgcgatcggcgacgaccggctgcagaaacaggcgcagggccaggtcgtgccggacagcttcacgcacggcagctcggcccagcgtgcgcgctggttccgcctcggcctcgagcgcggtgatctgcgcgcgtgcgacacgttcagcccgggcgcgctctga

SEQ ID NO: 3263 - protein, 285 aa, Azoarcus sp. EbN1
MRIGGRRESENVEDRRGSHFRLGGGGKIGIGTIVLALVAMYFGIDPSVVFDTASVQSPSPATQPASPRSAAEDELARFASQVLADTEDTWGPVFASAGGQYREPRMVLFTGATRSACGVGQAEMGPFYCPADEKVYLDLSFFDDLQNRFRAPGDFAQAYVIAHEVGHHVQNLLGISEKVQQAREQLPAREANALSVRVELQADCLAGVWGHHADRTRQLLEAGDVEEALGAASAIGDDRLQKQAQGQVVPDSFTHGSSAQRARWFRLGLERGDLRACDTFSPGAL

SEQ ID NO: 3264 - DNA, 852 bp, Silicibacter pomeroyi DSS-3
  CDS (1)..(852): transl_table=11
atgcggttgaaaggcgttcgcggcagcaggaatgtcgaggatcggcgcggacaacgcggcggtggcggcaagggtatcggcgggcgcggcctgggcatcggcggggtgctgctgctgttggtgatcggcgcctttaccggcatcgacgtgaccccgtttctgacagagcagccacaagcgccccagagcgccccaacagagctgtccgaggaagaacggcaggcgggcgaattcgtctcgcgcgtgctgaccacaaccgaagaggtctggaccggggtgttccgcgaccagctgggccgcgagtacaccccgccgacgctggtgctgttctcgcaggtgacatccagcccctgcggcggcgcctcgggtgcgaccgggccgttctattgcccggccgatcagaaggcctatctggacaccgatttctttgccaccctggcgcggcgattgcaggcggggggcgatttcgccgccgcctatgtcatcgcccatgaggtggcccatcacgtgcagaatcagctgggtattcttggcaaggtggatcaggcccggcggcgctcctcgcaggtcgaggccaacgccctgaccgtgcggctggaattgcaggccgattgcctgtccggggtctgggcgcgctcggtctggggcctgatggagcagggcgacctggaagaggcgctgaacgccgcccggatgatcggcgacgaccggctgcaacgtcaggcgggccgggttccgcagccgcatacctttacccacggcacctcggcgcagcgggcggcctggttcgaacgcgggttcgaaagcggccaagtcgcaacctgcgacaccttcaataccaaccggctctaa

SEQ ID NO: 3265 - protein, 283 aa, Silicibacter pomeroyi DSS-3
MRLKGVRGSRNVEDRRGQRGGGGKGIGGRGLGIGGVLLLLVIGAFTGIDVTPFLTEQPQAPQSAPTELSEEERQAGEFVSRVLTTTEEVWTGVFRDQLGREYTPPTLVLFSQVTSSPCGGASGATGPFYCPADQKAYLDTDFFATLARRLQAGGDFAAAYVIAHEVAHHVQNQLGILGKVDQARRRSSQVEANALTVRLELQADCLSGVWARSVWGLMEQGDLEEALNAARMIGDDRLQRQAGRVPQPHTFTHGTSAQRAAWFERGFESGQVATCDTFNTNRL

SEQ ID NO: 3266 - DNA, 891 bp, Pseudomonas syringae pv. syringae B728a
  CDS (1)..(891): transl_table=11
atgctctggaaaaaaggccgacgcagcgacaacgtagtcgatgcgcgcgatggcggcagcagtggtggcggcggtggcatgcgcatcggcggcaaggggctgggtctgggcggcatcgtgatcatcgtcgccatcggcctgctgaccggccaggacccgatgcagattctcggacaactgaccggacaagtgaccgagcaaagcgccccacccagcgcgcaaacgcgtgaggccccaccggccaacgaccagcaggccgaattcgtgcgcagcatccttggcgataccgaggacacctggcgtgccgtgttcgcccagaacggtcgcgaatacaaggaccccacgctggtgttgttcagcggccaggtgaactcggcctgcggtcgcgctacgtcggcaaccggtccgttctattgcccggctgaccagcaggtctatctggacatggagttcttccgtgaaatggcccagcgcttttccgccgctggcgacttcgcccaggcttacgtgatcgcccatgaagtcgggcaccatgtgcagaccctgctgggcatttccgccaaggtcgacaaggctcgccaggccgggcaaaaaatggaaggagccaacggtttactggtccgccaggagctgcaagcggactgctttgccggtgtttgggcgtacaacgcacaaaatcgtttgaactggctcgagccgggtgatattgaagaagcattgaacgcggccaacgctatcggcgatgatcgcttgcaacagcaaagcagtggtcgagtcgctccggactccttcactcacggcacgtctgcacagcgtgtacgctggttcaaggcaggctttgcccaaggtcaaatcaatcaatgcgatacattcgccgccaagagtctctga

SEQ ID NO: 3267 - protein, 296 aa, Pseudomonas syringae pv. syringae B728a
MLWKKGRRSDNVVDARDGGSSGGGGGMRIGGKGLGLGGIVIIVAIGLLTGQDPMQILGQLTGQVTEQSAPPSAQTREAPPANDQQAEFVRSILGDTEDTWRAVFAQNGREYKDPTLVLFSGQVNSACGRATSATGPFYCPADQQVYLDMEFFREMAQRFSAAGDFAQAYVIAHEVGHHVQTLLGISAKVDKARQAGQKMEGANGLLVRQELQADCFAGVWAYNAQNRLNWLEPGDIEEALNAANAIGDDRLQQQSSGRVAPDSFTHGTSAQRVRWFKAGFAQGQINQCDTFAAKSL

SEQ ID NO: 3268 - DNA, 897 bp, Pseudomonas fluorescens Pf-5
  CDS (1)..(897): transl_table=11
atgctttggaaaaaaggccggcgcagcgacaacgtcgtggacgcgcgagatgacagcagcgccggcggtggcggtggcatgcggttcggtggaggcaagggcttgagcctgacggcgatcgtactgatcgtcggcatcggctgggccaccggccaggatccgctgcagatcctcgggcaactgctgggccagcagagcgggcagacttcagcgccggccaccacccaggcacgcaaggcaccaccggccaatgacgaacaggcagagtttgtccgcgccatcctcggtgacaccgaagacacctggggccagatcttccagcaagccggccgccagtatcagccgcccaagctgatcctgttccggggccgggtcaattccgcctgtggcgcggccacttccgccagcgggcccttctactgccccgccgatcgccaggtgtacctggacatggacttcttccgggagatggcccagcgcttttccgccgccggcgacttcgcccaggcctacgtgattgcccatgaagtcgggcaccacgtgcagaccctgctcggggtctcggcaaaaatccaggccgcgcgccagcaaggccagcagatgcaaggcgatggcggcctgctggtacgccaggagctgcaggccgactgctttgccggggtctgggcctatcacgcacagaagcgcctgaactggttggaacccggggatgtggaagaagccctgaacgccgccaatgccatcggtgacgaccgcctgcagcagcaaggccagggccgggtggtgccggactccttcacccacggcacctcggcgcagcgagtgcgctggttcaagaccggcttcagccagggccaggtcagccagtgcgataccttcagcgccaggagcctgtag

SEQ ID NO: 3269 - protein, 298 aa, Pseudomonas fluorescens Pf-5
MLWKKGRRSDNVVDARDDSSAGGGGGMRFGGGKGLSLTAIVLIVGIGWATGQDPLQILGQLLGQQSGQTSAPATTQARKAPPANDEQAEFVRAILGDTEDTWGQIFQQAGRQYQPPKLILFRGRVNSACGAATSASGPFYCPADRQVYLDMDFFREMAQRFSAAGDFAQAYVIAHEVGHHVQTLLGVSAKIQAARQQGQQMQGDGGLLVRQELQADCFAGVWAYHAQKRLNWLEPGDVEEALNAANAIGDDRLQQQGQGRVVPDSFTHGTSAQRVRWFKTGFSQGQVSQCDTFSARSL

SEQ ID NO: 3270 - DNA, 885 bp, Psychrobacter arcticus 273-4
  CDS (1)..(885): transl_table=11
atgaaatggcaaggcagacgcggcagtactaacgtgcgcaccagtagtggtggcggtaagataatgggtggcggtatcggtggtatcattattgctggtattttatggctggtatttggggtaaatcccatgaccgcattgcagacaggtcaagaggttgcaggcggtggtaacacgtctactgaaccggccactagtgacgatcgcgatacacagtttgtcaaagtggtattagcggatactgaagaggtttggcatcagatattcaatgagggcggtagtacgtataaagagccgtcactgattttatttaatgggcaagtcagttctgcctgtggtagtgccagctcagcgacgggtcctttttattgcccaggtgatcagacggtctatttggacacgtcgttttttgtagaaatgcgccaaaagcttggtatctctggtgatattcaaaactcaggggatagtgaaaatcaaaacaaagctggcgattttgcccaagcttatgttatctcccatgaagtaggtcaccatgtgcagacactgcttggtattactcagcaagtaaatgaagctagccgtcaagtgactcgtgcacaagcaaataaattgtctgtactgcaagagctacaagccgattgctttgctggtgtttgggcgcagcgcaatcaagagcgtgtacagtttttagaggcaggtgatatcgatgaagccatcaatgcggctggtcaaattggtgatgaccgcttggcacgtgcaggcggcggggcagtagtacctgataactttactcatggtaccagccaacagcgtgtagagtggtttacgcgtggtctagagagtggtaatgtgcaaacttgtgatacgtttagcggtgctttataa

SEQ ID NO: 3271 - protein, 294 aa, Psychrobacter arcticus 273-4
MKWQGRRGSTNVRTSSGGGKIMGGGIGGIIIAGILWLVFGVNPMTALQTGQEVAGGGNTSTEPATSDDRDTQFVKVVLADTEEVWHQIFNEGGSTYKEPSLILFNGQVSSACGSASSATGPFYCPGDQTVYLDTSFFVEMRQKLGISGDIQNSGDSENQNKAGDFAQAYVISHEVGHHVQTLLGITQQVNEASRQVTRAQANKLSVLQELQADCFAGVWAQRNQERVQFLEAGDIDEAINAAGQIGDDRLARAGGGAVVPDNFTHGTSQQRVEWFTRGLESGNVQTCDTFSGAL

SEQ ID NO: 3272 - DNA, 888 bp, Pseudomonas syringae pv. phaseolicola 1448A
  CDS (1)..(888): transl_table=11
atgctctggaaaaaaggccgacgtagcgacaacgtagtcgatgcgcgtgatggcggcagcagtggcggcggcggcatgcgcatcggtggcaaggggctgggcctgggcggcattgtgatcatcgttgccatcggcctgctgaccggtcaggacccgatgcagattctcgggcaactgaccgggcaaggcaccgagcaaagcgccccacccagcgcgcaaacgcgtcaggcgccaccggccaacgaccagcaagccgaattcgtgcgcagcatcctcggtgataccgaagacacttggcgcgccgtgttcgctcagaacggtcgcgagtacaaggacccgacgctggtgctgttcagcggccaggtgaactcggcctgcggtcgcgcgacctcggcaaccggtccgttctattgcccggctgaccagcaggtctatctggacatggacttcttcagtgaaatggcccagcgcttttccgccgctggcgacttcgcccaggcttacgtgattgcccacgaagtcgggcaccatgtgcagaccctgctgggcatttctgccaaggtcgacaaggctcgtcaggccgggcaaaaaatggaaggtgccaacggtttactagtccgccaggagcttcaggcggactgctttgcaggtgtttgggcgtacaacgcacaaaatcgtttgaactggcttgagccgggtgatattgaagaggcattgaatgcggccaacgctatcggcgatgatcgcttgcaacagcaaagcagtggtcgagtcgctccggactcctttactcatgggacgtctgcccagcgtgtacgctggttcaaggcaggctttacccaaggccaaatcaatcaatgcgatacattcgcctccaagagtctctga

SEQ ID NO: 3273 - protein, 295 aa, Pseudomonas syringae pv. phaseolicola 1448A
MLWKKGRRSDNVVDARDGGSSGGGGMRIGGKGLGLGGIVIIVAIGLLTGQDPMQILGQLTGQGTEQSAPPSAQTRQAPPANDQQAEFVRSILGDTEDTWRAVFAQNGREYKDPTLVLFSGQVNSACGRATSATGPFYCPADQQVYLDMDFFSEMAQRFSAAGDFAQAYVIAHEVGHHVQTLLGISAKVDKARQAGQKMEGANGLLVRQELQADCFAGVWAYNAQNRLNWLEPGDIEEALNAANAIGDDRLQQQSSGRVAPDSFTHGTSAQRVRWFKAGFTQGQINQCDTFASKSL

SEQ ID NO: 3274 - DNA, 861 bp, Dechloromonas aromatica RCB
  CDS (1)..(861): transl_table=11
atgcgcctcgacgaccaacgcgaaagcgacaacatcgaagaccgcagggatggcggcggtggaggcatcggccgcggcggcgtcggcattggcggcatcgtgctggcgctggtcatcagctacttcaccggcatcaacccgatgaccctgctcggcatcgtcgagcaaaccccactcggccgccaggaggctcccgccgcccataagccgccggccaacgatgacacggcgcgcttcgtctccaaggttctcgcctcgaccgaagacgtgtggaccgacacttttcgccagaatggccgccagtatgaagtaccgaaactggtgctcttcacaggtgctacgccgaccgcctgcggcacgggccagaccgcgatgggtccgttctactgcccgggcgaccacaaggtttacatcgacctcgccttctaccgtgagctgaaagaccgcttcaaggcacccggcgagtttgcccaggcctatgtggtggcccacgaagtcggccaccacgtgcaaaacctgctcggcattgccgacaaggttcatcaagccaggcagcgcgccggcaaggtcgaaggcaatgccttgtccgtgcgcatggaactgcaggctgactgtctggctggcgtctggggcaagcgcaccgacaccatgaagcacgtcctcgaaccgggcgacctcgaggccgcactgacggctgcgacggccatcggtgacgaccgtcttcagcagcaggcccagggtcgcatcgttcccgaaagcttcacgcacggcagttccgaacagcgcgtccgctggttcaagcgcggcttcgaaagcggcgacatgaatcagtgcaacactttcaaggccgagcgcctctaa

SEQ ID NO: 3275 - protein, 286 aa, Dechloromonas aromatica RCB
MRLDDQRESDNIEDRRDGGGGGIGRGGVGIGGIVLALVISYFTGINPMTLLGIVEQTPLGRQEAPAAHKPPANDDTARFVSKVLASTEDVWTDTFRQNGRQYEVPKLVLFTGATPTACGTGQTAMGPFYCPGDHKVYIDLAFYRELKDRFKAPGEFAQAYVVAHEVGHHVQNLLGIADKVHQARQRAGKVEGNALSVRMELQADCLAGVWGKRTDTMKHVLEPGDLEAALTAATAIGDDRLQQQAQGRIVPESFTHGSSEQRVRWFKRGFESGDMNQCNTFKAERL

SEQ ID NO: 3276 - DNA, 963 bp, Ralstonia eutropha JMP134
  CDS (1)..(963): transl_table=11
atgggatgtcgtgcatgccagacacgccaaccctcattgctatacttcattccatccccgctcaaattccattccctggagccaccaatgcgtctcgatgacgaagccgaaagccaaaacgttgaagaccgccgtggcggctttggcggtggcgggttcggtggtccgaagaccatcggcatcggcaccgtcatcatcgcccttgccgcctcgtatttcttcggcatcgacccgtcggtcatcatgcagggcgcttcggtgctgcagggccagcaggcgccgcagcagcaacaggtcaaccggccaccggccactgacaagctgacggtgttcacgaagaaggtgctcggcaataccgagcgaacctgggaacacatcttcgaaaccgagctcaaccgccgctacgagccacccaagctcgtgctgttctcgggagccacgccgacggcgtgcggtacagggcaatcagccatgggcccgttctactgccccggcgatcacaaggtctatatcgacctggccttctatgacgaactgcgccagcgcttcggcgccagcggcgacttcgcgcaggcctatgtgatcgcgcatgaaatcggccaccatgtgcagaacctgctgggcgtctccgacaaggtcgatgcggcgcgccgccgcatgggcgaggcgcaggccaaccagctttcggtgcggatggaactgcaggccgattgcctggcgggcgtctgggccaccaacgcgcaacgcgcgaaccagcagttgctggagcctggcgatatcgaggaaggcctgaaggccgccgccgcaatcggcgacgatcggctgcagcgccaggcgcagggctatgtggtgccggaagccttcacgcatggcaccagcgagcagcgcgtgcgctggctgcggcaaggcctgactaccggcgatatccgcaagtgcgacacgttcgccgcgcgccagctctga

SEQ ID NO: 3277 - protein, 320 aa, Ralstonia eutropha JMP134
MGCRACQTRQPSLLYFIPSPLKFHSLEPPMRLDDEAESQNVEDRRGGFGGGGFGGPKTIGIGTVIIALAASYFFGIDPSVIMQGASVLQGQQAPQQQQVNRPPATDKLTVFTKKVLGNTERTWEHIFETELNRRYEPPKLVLFSGATPTACGTGQSAMGPFYCPGDHKVYIDLAFYDELRQRFGASGDFAQAYVIAHEIGHHVQNLLGVSDKVDAARRRMGEAQANQLSVRMELQADCLAGVWATNAQRANQQLLEPGDIEEGLKAAAAIGDDRLQRQAQGYVVPEAFTHGTSEQRVRWLRQGLTTGDIRKCDTFAARQL

SEQ ID NO: 3278 - DNA, 849 bp, Thiobacillus denitrificans ATCC 25259
  CDS (1)..(849): transl_table=11
atgcgctgggaacgcggacgacgcagcagcaacatcgaagatcggcgcggcatgcggatcggcggccgcgggctggccggcggcgggatcggcgcgatcgtgctcgcgctcgtcgcgatgtatttcggcgtcgacccgtcggtggtgctcaaccaggtgggcgggccggcggcgaccgagcagcaggtcgcgcagtcgcccgaggaggagcgactcaaggaattcatgtccgtcgtgctcgccgacacggaggatgtgtggggcacgttgttccagcagtcgggccagccatatcggcaaccgacgctggtgctgttttcgggtgcggtgcagtcggcgtgcgggtttgccgaagcggcgatggggcctttttactgcccgggcgaccagaagctctatctcgacatgagcttcttcgacgatctcgcgcagcgccacgacgcaccgggcgatttcgcccaggcctacgtcgtcgcccacgaggtcggccaccacgtgcagacgctgctcggcgtctcgcagcaggtacacgccgcgcgtcagcgctccggcgaggccgcgggcaacgcgatgcaggtgcgcatggaattgcaggccgactgtttcgccggcgtctgggcgcatcacgccgacaagacgcgtcaggtgctcgaaccgggtgatgcggaagaggcgctggccgctgcggccggggtcggcgacgaccgcctgcaacggcagacgcgtggcacggtcgtgcccgaatccttcacgcacggcgcgtcggaacagcgcatgcgctggttcgcgcgcggcatgcagacaggcgacccggggcaatgcgatacattcgaggcggcgaagctctga

SEQ ID NO: 3279 - protein, 282 aa, Thiobacillus denitrificans ATCC 25259
MRWERGRRSSNIEDRRGMRIGGRGLAGGGIGAIVLALVAMYFGVDPSVVLNQVGGPAATEQQVAQSPEEERLKEFMSVVLADTEDVWGTLFQQSGQPYRQPTLVLFSGAVQSACGFAEAAMGPFYCPGDQKLYLDMSFFDDLAQRHDAPGDFAQAYVVAHEVGHHVQTLLGVSQQVHAARQRSGEAAGNAMQVRMELQADCFAGVWAHHADKTRQVLEPGDAEEALAAAAGVGDDRLQRQTRGTVVPESFTHGASEQRMRWFARGMQTGDPGQCDTFEAAKL

SEQ ID NO: 3280 - DNA, 888 bp, Pseudomonas fluorescens PfO-1
  CDS (1)..(888): transl_table=11
atgctatggaaaaaaggccgacgcagtgacaacgtcgtcgatgcccgtggcgatgacatgggcggtggtggcggcatgcgcttcggcggtggcaagggcctgagtctcggggcgatcctgctgatcgtcggcatcggctggatcaccgggcaggacccgctgcagatccttggccagctcaccgggcagatgaccgaacaatcgacccctacttcgcaaacccgtcaggcaccgccggccaacgatgaacaggccgaattcgtacgctcgatcctcggcgacaccgaagacacctggggcgcgatcttccagcaggccggccggcaatataaggatccgaccctggtgctgttcagcaaccgggtcaattccgcctgcggtctggcgacctcggccaccggcccgttctattgcccggcggaccagaaagtctatctcgacatggcgttcttccaggaaatggcccaacgcttcaaggccgccggcgacttcgcccaggcctacgtgatcgctcatgaagtcggacaccatgtgcagacgcttctcggtgtctcggcgaaaattcagacagcccgccagcaaggccggcagatggaaggtgacggcggactgcttgtgcgtcaggaactgcaagccgattgtctggccggggtctgggcctacaacgcgcagaaacgcttgaactggctggaaccgggcgacatcgaagaagccttgaacgcagcgaacgccatcggtgatgatcgcctgcaacaacagggtcagggccgcgtggtgccggactcgtttacccacggtacgtcggcgcaaagggtgcgctggttcaaaaccggattcgcccagggccaggtcggccagtgcgatacctttgcggcgaaaaacctgtaa

SEQ ID NO: 3281 - protein, 295 aa, Pseudomonas fluorescens PfO-1
MLWKKGRRSDNVVDARGDDMGGGGGMRFGGGKGLSLGAILLIVGIGWITGQDPLQILGQLTGQMTEQSTPTSQTRQAPPANDEQAEFVRSILGDTEDTWGAIFQQAGRQYKDPTLVLFSNRVNSACGLATSATGPFYCPADQKVYLDMAFFQEMAQRFKAAGDFAQAYVIAHEVGHHVQTLLGVSAKIQTARQQGRQMEGDGGLLVRQELQADCLAGVWAYNAQKRLNWLEPGDIEEALNAANAIGDDRLQQQGQGRVVPDSFTHGTSAQRVRWFKTGFAQGQVGQCDTFAAKNL

SEQ ID NO: 3282 - DNA, 882 bp, Burkholderia sp. 383
  CDS (1)..(882): transl_table=11
atgaggctggacgacgaaagggaaagcacgaacgtcgaggatcgccgcggtgccggcgggttcggcggcgggcgcggcgcgacgatcggcatcggcacgatcgtggttgcgttcgccgcgtcgtatttcttcgggatcgacccgcgcgtgatactcgaaggcgcatcggcgctgcagggccaccagcagcaggcgcagcccgcgcccgcgcagcggcagggcgcggcggcgaacgaaccgaacgttgtgttcacgcgcaaggtgctcggcaatatcgagcgcacgtggacgagcgtgttcaatacccagttgcacgcgcagtaccagccgccgacgctcgtgatgttcaagaactcgacgccgaccgcatgcggcacgggccagaccgcgatggggccgttctattgcccgggcgaccgcaaggtgtacatcgatctcggtttctacgacgaattgcgcaagcgtttcggcgcgggcggcgatttcgcgcaggcttacgtgatcgcgcacgaagtcggccatcacgtgcagaacctgctcggcatctccgacaaggtcgacgccgcgcgtcggcgggcgagccaggcgcactcgaacgcgctgtcggtgcggatggaactgcaggccgattgcttcgccggcgtgtgggcgaacaacgcgcagcgcgcgaaccagcggctgatggaacccggcgatttcgagcaggggctgaaggccgccgccgcgatcggcgacgaccggctgcagcagcaagggcagggctacgtggtgccggaaagcttcacgcacggcaccagcgaccagcgcgtgtactggctgcggcgcgggatggaatcgggcgagctgagcgcctgcgacacgttcgccgcgaacgcacgctga

SEQ ID NO: 3283 - protein, 293 aa, Burkholderia sp. 383
MRLDDERESTNVEDRRGAGGFGGGRGATIGIGTIVVAFAASYFFGIDPRVILEGASALQGHQQQAQPAPAQRQGAAANEPNVVFTRKVLGNIERTWTSVFNTQLHAQYQPPTLVMFKNSTPTACGTGQTAMGPFYCPGDRKVYIDLGFYDELRKRFGAGGDFAQAYVIAHEVGHHVQNLLGISDKVDAARRRASQAHSNALSVRMELQADCFAGVWANNAQRANQRLMEPGDFEQGLKAAAAIGDDRLQQQGQGYVVPESFTHGTSDQRVYWLRRGMESGELSACDTFAANAR

SEQ ID NO: 3284 - DNA, 855 bp, Geobacter metallireducens GS-15
  CDS (1)..(855): transl_table=11
atgcgatggagtgacggacggagaagcgacaacgtggaagaccgccgggggatgaccgttggccggaaggcggtggggggcggcatcggcacgatcattctcgcgctggtcgccatgtacttcggcatcgacccgtcggtggtcctgcagcaggggggctctcccctcacagcgccgacagagacgagacaggccggcaagcctcccgccagtgacgaacttgcccagtttgtgtcggtggttctggccgacaccgaggatacctggcacgagctcttccggaagaacggcaagacctaccaggagccgaagctggtcctcttcaccggcgccgtggagtcggcctgcggctatgcccaggccgccatgggccccttttactgccccctggaccagaaggtctacatcgacctcagcttctaccgggacctgaaggagcgcttcaaggcgccgggggactttgcccaggcgtacgtcatcgcccacgaagtggggcaccacgtccagtcgctcctcggcatttcggagaaggcccacgacctccagcagcggagcggtaagacccaggcgaaccagctctcggtgcgactggagctccaggccgactgcctggccggcatctgggcccaccacgccgaccggagccggcaggttctcgaaagcggcgacgtggaggaggcgctccaggcggccaccagcatcggcgacgaccgcctccagcagcaggcccaggggtacgtcgtccccgaaagcttcacccacggcagctccgagcagcgggtccgctggttcaaaaccggcctcgacaccggcaacttcggggcgtgcaataccttcggggcccaatcgttgtag

SEQ ID NO: 3285 - protein, 284 aa, Geobacter metallireducens GS-15
MRWSDGRRSDNVEDRRGMTVGRKAVGGGIGTIILALVAMYFGIDPSVVLQQGGSPLTAPTETRQAGKPPASDELAQFVSVVLADTEDTWHELFRKNGKTYQEPKLVLFTGAVESACGYAQAAMGPFYCPLDQKVYIDLSFYRDLKERFKAPGDFAQAYVIAHEVGHHVQSLLGISEKAHDLQQRSGKTQANQLSVRLELQADCLAGIWAHHADRSRQVLESGDVEEALQAATSIGDDRLQQQAQGYVVPESFTHGSSEQRVRWFKTGLDTGNFGACNTFGAQSL

SEQ ID NO: 3286 - DNA, 858 bp, Syntrophus aciditrophicus SB
  CDS (1)..(858): transl_table=11
atgaacggtatgcgctggcaaaatcaaagaaggagcgagaatgttgaggacagacgaggggtgaccgtcaaacgcgggattgcgggggcggggatcggtacggttattctggtgcttctgagcctctacttcggcattgatccatcggtcgtcctgcaacaggttcaggaaaccggacctccgcccgtgtctcagcaggagcagacggtgcgacaggatcccacgagtcaatttgtatccgtcgtccttgccgatacggaaacgacctggcacgaaatattccgccgcagcggaagaacctatgaggagccgaagctggttcttttttccggggctgttcaatccgcctgcggattcgcgcaggcagccatgggacccttctattgtcctggtgatcgcaaggtttatatagacttgagctttttcgaagatatgaagaaccgctttcaggcacccggtgattttgcccaggcctatgtgattgcccatgaagtgggtcatcacgtacagaacctcctgggtattaccgatcagacccaaagggccatgcagcaaatgagcaaggtggaggccaaccagctttccgtgcgggtggaattgcaggccgactgttttgccggtgtctggggctgccatgcggacaaggtgcgcaacattctggaatccggtgatctggaagaggccctgggggccgcaagcgccatcggtgatgaccggatcatgaaacagacacggggaacaatcgtacccgatgccttcacccacggcacgtcggaacagagggtccggtggttcaaacgaggtttcgagtcgggtgatcccggccagtgcgatgcctttaacgcaaaatatttataa

SEQ ID NO: 3287 - protein, 285 aa, Syntrophus aciditrophicus SB
MNGMRWQNQRRSENVEDRRGVTVKRGIAGAGIGTVILVLLSLYFGIDPSVVLQQVQETGPPPVSQQEQTVRQDPTSQFVSVVLADTETTWHEIFRRSGRTYEEPKLVLFSGAVQSACGFAQAAMGPFYCPGDRKVYIDLSFFEDMKNRFQAPGDFAQAYVIAHEVGHHVQNLLGITDQTQRAMQQMSKVEANQLSVRVELQADCFAGVWGCHADKVRNILESGDLEEALGAASAIGDDRIMKQTRGTIVPDAFTHGTSEQRVRWFKRGFESGDPGQCDAFNAKYL

SEQ ID NO: 3288 - DNA, 894 bp, Ralstonia metallidurans CH34
  CDS (1)..(894): transl_table=11
atgcgtctcgatgacgaagccgaaagccagaacgtagaagatcgccgcggcggtggctacggcggaggcggagggttcggactgccgatcggcggcaagtcgatcggtatcggcacgatcgtcattgcgctggccgcttcatatttcttcggcatcgacccctcgctgattttccagggggcatcggtcgtccagaaccagcagcaacaggcgccgcagtcccaggcacatcgcccgcccgccaacgaccaactgacggttttcacccgcaaggtgctcggcaataccgagcgcacgtgggaacacatcttcgaaaccgacctgaaccgccgttacgcgccaccgaaactggtgctgttctccggcgccacgcaaaccgcctgcggtactggccagtccgccatgggtccgttctattgcccgggtgaccagaaggtctatatcgacctgtccttctatgacgaactgcgtcagcgcttcggcgccggtggtgatttcgcgcaggcatatgtgatcgcgcacgagatcggccaccatgtgcagaacctgctcggcgtctcggaaaaggtggatgcggcacgtcgccgcatgaacgaggcgcaggccaaccagctttcggtacgcatggaattgcaggccgattgcctggctggcgtgtgggctgccaacgcgcagaagctgaaccagcagttgctggaacccggcgatatcgagcaaggcctgaaggctgccgccgcaatcggcgacgaccggctgcagcgtcaggcacagggctacgtggtgcctgaagccttcacgcatggcacgagcgagcagcgtgtgcgctggctgcgtcagggcctgacgaccggcgatatccgcaagtgcgacacatttgccgcgcggcaactctag

SEQ ID NO: 3289 - protein, 297 aa, Ralstonia metallidurans CH34
MRLDDEAESQNVEDRRGGGYGGGGGFGLPIGGKSIGIGTIVIALAASYFFGIDPSLIFQGASVVQNQQQQAPQSQAHRPPANDQLTVFTRKVLGNTERTWEHIFETDLNRRYAPPKLVLFSGATQTACGTGQSAMGPFYCPGDQKVYIDLSFYDELRQRFGAGGDFAQAYVIAHEIGHHVQNLLGVSEKVDAARRRMNEAQANQLSVRMELQADCLAGVWAANAQKLNQQLLEPGDIEQGLKAAAAIGDDRLQRQAQGYVVPEAFTHGTSEQRVRWLRQGLTTGDIRKCDTFAARQL

SEQ ID NO: 3290 - DNA, 912 bp, Magnetospirillum magnetotacticum MS-1
  CDS (1)..(912)
atgcgctgggacgattttcgcgcctcggacaatgtcgaggaccgtcgcggcgagggcgggggaggcggtggcttcggctttcccggcggcggcgcggggggcttgggcatcggcaccatcgtggtgctgctgctggtctcctgggtcaccggcatcaatccggcgatcctgatcggcggcgcccagcagatggccggcggcggcagccagcgcgaggagcgggtcgatcccgacacccaggcgcggcgccgcgaggccccgtccgaccgggccgggcaattcgcctcgaagatcctcggcaacacggaggatgtctggaaggagatcctgccgaaccagaccggccggcaatacacgccgacgacgatggtgctctatcagggcggcacccgctcgggctgcggcatggcccaggcggcgatggggcctttctattgccccctcgacaagaaggtctatctcgacctcggcttcttcaaggagatgcagaccaagttcggcgtgaagggcgacttcgcctacgcctacgtcatcgcccacgaggtcggccaccacgtgcaggacgtgctcggcatcctcggcaaggtgcagagccgccagcagaacgcctccagcaagaccgaggcgaaccagctctccgtgcgggtcgaactgatggccgattgcctcgccggggtctgggccaagaattccaacgaccgctggaattccctcgaccagagcgacatccaggaggcgctcaacgccgccagcgccatcggcgacgacaagctccaggagaagtcgcagggctatgccgtgccggattccttcacccacggctcgtccgagcagcggatgcgctggttcatgaccggctacaagagcggccagaccaaatcctgcgacacgttccgcgccggccgcggctga

SEQ ID NO: 3291 - protein, 303 aa, Magnetospirillum magnetotacticum MS-1
MRWDDFRASDNVEDRRGEGGGGGGFGFPGGGAGGLGIGTIVVLLLVSWVTGINPAILIGGAQQMAGGGSQREERVDPDTQARRREAPSDRAGQFASKILGNTEDVWKEILPNQTGRQYTPTTMVLYQGGTRSGCGMAQAAMGPFYCPLDKKVYLDLGFFKEMQTKFGVKGDFAYAYVIAHEVGHHVQDVLGILGKVQSRQQNASSKTEANQLSVRVELMADCLAGVWAKNSNDRWNSLDQSDIQEALNAASAIGDDKLQEKSQGYAVPDSFTHGSSEQRMRWFMTGYKSGQTKSCDTFRAGRG

SEQ ID NO: 3292 - DNA, 885 bp, Rubrivivax gelatinosus PM1
  CDS (1)..(885)
atgaagtgggaaggccaggaacagagtgacaacgtcgaggaccgccgcggcatgggcggcggtgggcgcggcggactgccgatcggtggccgcggcatcggtgtcggcaccatcgtcatcgcgctggtggcgggctggatcttcggcatcaacccgctcaccgtgctcggcatcctgagcggtggcgggggcgcacccacggcgcaggtctccaccggcccggccccggcaccaccggccgacgacgcgcaggcgcgcttcgtctccgtggtgctgcgcagcaccgaggacgtgtggaccgaggtcttccgcagcggccaggcgcaatacgtgcggcccaagctggtgctgttccgcggtgccacggccaccgcctgcggcacgggccagagtgcgatgggcccgttctactgtcccggcgaccagcaggtctacatcgacctccagttcttcgacacgctgcaccagcgcctcggcgcgcccggcgatttcgcgcaggcctatgtgatcgcgcacgaggtcggccaccacgtgcagcagctgctgggcatcagcgagaaggtggaagcggcgcggcgcggcggcagcgaggcccaggccaacgcgatgagcgtgcgcctggagctgcaggccgactgcttcgccggcgtgtgggccaaccgctcgcagcaggcgcggcagtggctggagcagggcgacatcgacgaggcgctgaacgcggcctcgcagatcggcgacgacacgctgcagcggcgcagccaggggcagatcgtgcccgagagcttcacccacggcagcagtgcacagcgcgtgagctggttcaagcgcggcatgcagaccggccgcatcgccgactgcaacaccttcgaggccagccggctctga

SEQ ID NO: 3293 - protein, 294 aa, Rubrivivax gelatinosus PM1
MKWEGQEQSDNVEDRRGMGGGGRGGLPIGGRGIGVGTIVIALVAGWIFGINPLTVLGILSGGGGAPTAQVSTGPAPAPPADDAQARFVSVVLRSTEDVWTEVFRSGQAQYVRPKLVLFRGATATACGTGQSAMGPFYCPGDQQVYIDLQFFDTLHQRLGAPGDFAQAYVIAHEVGHHVQQLLGISEKVEAARRGGSEAQANAMSVRLELQADCFAGVWANRSQQARQWLEQGDIDEALNAASQIGDDTLQRRSQGQIVPESFTHGSSAQRVSWFKRGMQTGRIADCNTFEASRL

SEQ ID NO: 3294 - DNA, 852 bp, Cytophaga hutchinsonii
  CDS (1)..(852)
atgaaatggcagaatagaagagaaagtggaaatgtagatgaccgcagaggtttttcaggtggtaaaatcgcgttgggcggtggtgcaatcggtattgtattttttctggttcagatgtttcttggaggagacagtgcgcagatattaagtcagatcgagcagcaggtaaatactacttcacagacagaacaacccttaagtgcagaagatgaggagatgggtaagatggttcgggtaatgctggctgataacgaagatgtctggaacaagctgtttgccgaagctggtaaaacgtatgtggagcctacattggttttatacagagacgcaaccgaatcgggctgcggaaatgcaagtgcttcaatcgggcccttttattgcccggcagatcagaaggtatatattgatttagcattctttgatgaattaaaaaataagtatggtgccgaaggaggggattttgctattgcttacgtgattgcacatgagatcggccaccacgtgcagaatttattgggaacatctgaacaggtgtataatcaacgtcagcagctcagtgaaaaagaatcaaataaattatccgttgcattggagttgcaagctgatttttatgcgggtgtatgggcacatcataatgaagaaatgaatcacgtgcttgagccgggtgatattgaagaagcaatcagtgcggcaagtgcagtaggagacgatcacctgcaaaaaatggcacgtggctatgtacagcctgatggcttcacccacggtacctctgcacagcggatcgagtggtttacccgcgggtttaaaacaggagacatgagccagggaaatacatttgaagaagttttataa

SEQ ID NO: 3295 - protein, 283 aa, Cytophaga hutchinsonii
MKWQNRRESGNVDDRRGFSGGKIALGGGAIGIVFFLVQMFLGGDSAQILSQIEQQVNTTSQTEQPLSAEDEEMGKMVRVMLADNEDVWNKLFAEAGKTYVEPTLVLYRDATESGCGNASASIGPFYCPADQKVYIDLAFFDELKNKYGAEGGDFAIAYVIAHEIGHHVQNLLGTSEQVYNQRQQLSEKESNKLSVALELQADFYAGVWAHHNEEMNHVLEPGDIEEAISAASAVGDDHLQKMARGYVQPDGFTHGTSAQRIEWFTRGFKTGDMSQGNTFEEVL

SEQ ID NO: 3296 - DNA, 879 bp, Burkholderia vietnamiensis G4
  CDS (1)..(879): transl_table=11
atgaggctggacgacgaaagagaaagcgtgaacgtcgaggatcgacgcggcggcggcttcggcggcgggcgcgcgacgatcggcatcggcacgatcgtggtcgcgctggccgtatcgtatttcttcgggatcgatccgcgcgtcgtgctgcaaggcgcgtcggcgttgcagggccgcgagcagcagacgcagccggcgcccacgcagcatcagggcgcgccggcgaacgatgcgggcgcgttgttcacgcgcaaggtgctcggaaatatcgagcgcacgtggacgggcgtgttcagcacgcagctgcatgcgcaatacgagccgccgaagctggtgatgttcacgaattcgacgccgacggcatgcggcaccggccagaccgcgatgggcccgttctattgtccggccgaccgcaaggtgtacatcgacctcggcttctatgacgaattgcgcaagcgcttcggtgcgggcggcgattttgcgcaggcctacgtgatcgcccacgaagtcggccatcacgtgcagaacctgctcggcatttcggacaaggtcgatgccgcgcgccggcgttcgagccagacgcgcgcgaacgcgctgtcggtgcggatggaactgcaggccgactgcctcgcgggcgtgtgggcgaacaacgcgcagcgcgcgaaccagcacctgatggagcccggcgatttcgagcaggggctgaaggcggccgccgcgatcggcgacgaccggctgcagcagcagagccagggctacgtcgtgccggagagcttcacgcacggcaccagcgagcagcgcgtgtactggctgcggcgcgggatggagtcgggtcaggtgagcgcctgcgacaccttcgccgcgaacccgaaccgataa

SEQ ID NO: 3297 - protein, 292 aa, Burkholderia vietnamiensis G4
MRLDDERESVNVEDRRGGGFGGGRATIGIGTIVVALAVSYFFGIDPRVVLQGASALQGREQQTQPAPTQHQGAPANDAGALFTRKVLGNIERTWTGVFSTQLHAQYEPPKLVMFTNSTPTACGTGQTAMGPFYCPADRKVYIDLGFYDELRKRFGAGGDFAQAYVIAHEVGHHVQNLLGISDKVDAARRRSSQTRANALSVRMELQADCLAGVWANNAQRANQHLMEPGDFEQGLKAAAAIGDDRLQQQSQGYVVPESFTHGTSEQRVYWLRRGMESGQVSACDTFAANPNR

SEQ ID NO: 3298 - DNA, 855 bp, Solibacter usitatus Ellin6076
  CDS (1)..(855): transl_table=11
atgcggtggactcccggcgatgtaagcggcgatctcgaggaccggcgcgggtcaagtggaccgcgcatgggcggcgcacccctaggtatcggcgggatgatcgtgctggtgctgttgagcctgatcttcaagcgcgatttcgtctcgatgttttccggaagccagggggtcgcaccgaccatcaaccaggcttcgcgcagcgttgagggaggtcgggcggaagccaagcaggtgcaattcgtatccttcgtcctggacgatgcccagagcacctgggacagggttctgcctcagcagagcaaagtgccataccggcacgccaaacttgtgttgttccgcgacgcgaccgagtccgcttgcggcctggcgcaatcggccaccggacctttctattgtcctgccgacgaaaaggtctatgttgacctgggcttctttgacgagttgggcaaccggttcggcgcgcccggcgaatttgcgcaggcgtatgtgctggcacacgaaatcgggcatcacgttcaaaaggttcttggcatctccgggaaggtgcatgcactgcagcagagcgatccctcggaggctaacccgctttcggtgagcctggaattgcaggcggattgcctggccggcgtctgggcaaactcgaccgcgcagcgcgacctgatcgaacaacaggacgtggaggcggggatacgagccgccggcgcggtaggtgacgaccggctgcagcgcatggcgggccggcgggtgagtccggaaaacttcacccatggttcatcggcgcagcgcgcggaatggtttcagcgagggcttgcaagcggcgacctcgcgcagtgcaacaccttcgccgggagatga

SEQ ID NO: 3299 - protein, 284 aa, Solibacter usitatus Ellin6076
MRWTPGDVSGDLEDRRGSSGPRMGGAPLGIGGMIVLVLLSLIFKRDFVSMFSGSQGVAPTINQASRSVEGGRAEAKQVQFVSFVLDDAQSTWDRVLPQQSKVPYRHAKLVLFRDATESACGLAQSATGPFYCPADEKVYVDLGFFDELGNRFGAPGEFAQAYVLAHEIGHHVQKVLGISGKVHALQQSDPSEANPLSVSLELQADCLAGVWANSTAQRDLIEQQDVEAGIRAAGAVGDDRLQRMAGRRVSPENFTHGSSAQRAEWFQRGLASGDLAQCNTFAGR

SEQ ID NO: 3300 - DNA, 876 bp, Solibacter usitatus Ellin6076
  CDS (1)..(876): transl_table=11
atggagtggacacctggcggtgatcgatcggacgtagaagaccggcgcggagagagcggcggcggcggcttcaacctcggcgggttcggcggcattcacctcggcatcggcggaacgctgatactgctggtgctgagcttcctcttccgcaccaacctcttctcgatcttcggtggcggtacggttgcccccgcgcccaccgaagcctcgcggccgctctccgaccccgattccagcgcggcggaaaaacggcagacggatttcatcgtcttcgtattgaacgacgtgcagcatacgtgggagcagattcttccccgacagggcacgccctaccgtcacacgaaactggtgctgtttaccgacctgacgaactccggctgcggcaccgcgcaatcggccaccggcccgttttattgcccgcaggatgagaaggtctacatcgatctgggcttcttcaaggagttgcgcgatcgcttcggtgctccgggcgagttcgcgcaggcctacgtactggcccacgaaatcggccaccacgtgcagaagttactcggcatcgaaggccaggttcaccggctgcagcgcggcgatccttcacaggccaatccactctcggtgaagctcgaattgcaggcggattgcttcgcgggcgtgtggggccacagtacggaacaacgcaagatggtggatgatgccgatgtggcggcgggcctccgcgcagccgccgcggtgggcgacgaccggctgcagcgcctgaccaccggccgcgtcagccccgaaagcttcacgcacggaagctcggcccagcgcaccgattggttccgtcgcgggttgcaatccggccaggtctccacctgcgataccttcggcgcccggtaa

SEQ ID NO: 3301 - protein, 291 aa, Solibacter usitatus Ellin6076
MEWTPGGDRSDVEDRRGESGGGGFNLGGFGGIHLGIGGTLILLVLSFLFRTNLFSIFGGGTVAPAPTEASRPLSDPDSSAAEKRQTDFIVFVLNDVQHTWEQILPRQGTPYRHTKLVLFTDLTNSGCGTAQSATGPFYCPQDEKVYIDLGFFKELRDRFGAPGEFAQAYVLAHEIGHHVQKLLGIEGQVHRLQRGDPSQANPLSVKLELQADCFAGVWGHSTEQRKMVDDADVAAGLRAAAAVGDDRLQRLTTGRVSPESFTHGSSAQRTDWFRRGLQSGQVSTCDTFGAR

SEQ ID NO: 3302 - DNA, 846 bp, Exiguobacterium sibiricum 255-15
  CDS (1)..(846): transl_table=11
atgaaatggaagggcagagaaagaagttcgaacgtcgaagatcgacggggcatgggtggaaaaggagtcgccgggatcggaggtggactcgggatcatcattttaatcgtcgtcacgttgatgggcgggaatccggccgacatcctcggaggattgtccgattcacaaggcgacagtcaaggcgagtaccaggaaacggccaaagaaaaagaagcggctgattttgtatccgttgtcttagcggatacggaaaaagtctggacaaaggaatttaaacaggacggtatgacctataaagaaccgacgctcgttttatataccgatcaggtcagttcagcgtgtggacaagccggaaagtcagtcggaccgttttattgtccgggggatcagaaattatacattgatctaagtttttatgatgagttacaaaataaatacggggcaccgggagacttcgcgatggcgtatgtcattgcccacgaagttgggcaccatgttcagacgttgcttgggacatcagacgaaatcatgccgcttcgtcaaaagatgagcgaagagaagttcaacaaatacctggtccgctttgaattgcaggcggattactatgcgggtgtctgggccaaccatgcacaaggacaaaatctgcttgaagaaggcgatttggaagaggcacttggagcggcgaatgctgtcggagatgatacattgcagaaaaaagggcaaggatatgtcgtaccggaaagctttacacacggtacatcggctcaacgcgaacgatggttccaaaaaggatttgataacggaacgattgaaggcggcgataccttcaaagcgaagaatttataa

SEQ ID NO: 3303 - protein, 281 aa, Exiguobacterium sibiricum 255-15
MKWKGRERSSNVEDRRGMGGKGVAGIGGGLGIIILIVVTLMGGNPADILGGLSDSQGDSQGEYQETAKEKEAADFVSVVLADTEKVWTKEFKQDGMTYKEPTLVLYTDQVSSACGQAGKSVGPFYCPGDQKLYIDLSFYDELQNKYGAPGDFAMAYVIAHEVGHHVQTLLGTSDEIMPLRQKMSEEKFNKYLVRFELQADYYAGVWANHAQGQNLLEEGDLEEALGAANAVGDDTLQKKGQGYVVPESFTHGTSAQRERWFQKGFDNGTIEGGDTFKAKNL

SEQ ID NO: 3304 - DNA, 870 bp, Mesorhizobium sp. BNC1
  CDS (1)..(870): transl_table=11
atgcgctggaggggccgccgccaaagcagcaatatcgaagatcgtcggggggccggtggcatgcggcggggcggacccatccgcttgccggtcggtggccgggctggcggcggcgggatcggcacgatcattatcctcgtcattctcttcttcgggctgagggcgctcggcatcgacccgctgcagatgctggagcagggaacgggacaggtgacgacgcagcaggccggcaatgacgaagcaaggcaattcgtcggcgtggtgcttgccgacaccgaggatgtgtggggccagatcttccaatcggaaggagccgattatgaggagccgccgcttgtgcttttttcaagccaggtgaattcggcctgcggcttcgcatcggccgcgagcgggccgttctactgccccggagaccggaaggtctatctcgatctcagcttctttaacgagcttgcaaggcgcttcgatgcggccggcgacttcgcccaggcctatgtgattgcccatgaggtggggcatcatgtgcagaacctgacgggcgttttgccccgcttcaaccgtatgcgcgccaatctcagcgagggggaggccaatgccatgtcggtgcgcgtagagctccaggccgattgttatgccggggtttgggcctatcacaccaaccagcagggccttctggaacagggcgacatcgaggaggcgctgaatgccgcctttcagattggcgacgacacgctgcaaaggcgcacccagggatatgtggtgccggagagcttcaatcacggcacgtcggaacagcggagccggtggttcaggcgcggattcgaaagcggcaatcccacggattgcgatacgttcaatgggcccatctga

SEQ ID NO: 3305 - protein, 289 aa, Mesorhizobium sp. BNC1
MRWRGRRQSSNIEDRRGAGGMRRGGPIRLPVGGRAGGGGIGTIIILVILFFGLRALGIDPLQMLEQGTGQVTTQQAGNDEARQFVGVVLADTEDVWGQIFQSEGADYEEPPLVLFSSQVNSACGFASAASGPFYCPGDRKVYLDLSFFNELARRFDAAGDFAQAYVIAHEVGHHVQNLTGVLPRFNRMRANLSEGEANAMSVRVELQADCYAGVWAYHTNQQGLLEQGDIEEALNAAFQIGDDTLQRRTQGYVVPESFNHGTSEQRSRWFRRGFESGNPTDCDTFNGPI

SEQ ID NO: 3306 - DNA, 879 bp, Shewanella sp. ANA-3
  CDS (1)..(879): transl_table=11
atgcgttggcgtgacagtgaccgtagctccaatatcgaagacagacgtgaccaacagatggcgtcggcgggtgtgcccagtgcgctcctgctgcgcttgctgccttttctgcttcgcaccaaaatcggccgagtgatattgctactgggcgggctatattttgcgtttcaatattttactggcggattatccctagacccgagcaatcaagcggggtttagccagtcacaatcggccagcaataccgcggctcaagatgaaaatgcccagtttgtggcggcgatcctcggcacaaccgaaactgtctggaatcaattgctacaagggcgatatgtcgagcccaaactggtgctttatcgcaatatgacctcgacgggatgcggtatggggcaggcgcaatctgggcctttttattgccccgcagatagcaaagtttatatcgacttaagttttctcgaggagctgaaaaaactcggggcgccgggagatttcgcctttgcctatgtgattgcccacgaggtgggccaccatgtgcagaacctactcggcaccagcactaaagtgcgtcaggcgcagcaagccgctggcaaggcgcaggccaatcaactgagtgttgccctcgaattgcaagccgactgttatgctggcgtgtgggggcattatgtcgacagacagctcaatctgctcgaagctggtgacgtagaagaaggcattgccgcagcaagtgccgtgggggatgaccgtctgcaaaaaatggcggggcgcgctgtgcaacccgaagcctttacccatggcagttcggcggacagggtaaaatggtttaagacgggttttgcctctggcaagcttgccagttgtaatacctttaatcgcaactag

SEQ ID NO: 3307 - protein, 292 aa, Shewanella sp. ANA-3
MRWRDSDRSSNIEDRRDQQMASAGVPSALLLRLLPFLLRTKIGRVILLLGGLYFAFQYFTGGLSLDPSNQAGFSQSQSASNTAAQDENAQFVAAILGTTETVWNQLLQGRYVEPKLVLYRNMTSTGCGMGQAQSGPFYCPADSKVYIDLSFLEELKKLGAPGDFAFAYVIAHEVGHHVQNLLGTSTKVRQAQQAAGKAQANQLSVALELQADCYAGVWGHYVDRQLNLLEAGDVEEGIAAASAVGDDRLQKMAGRAVQPEAFTHGSSADRVKWFKTGFASGKLASCNTFNRN

SEQ ID NO: 3308 - DNA, 882 bp, Shewanella sp. MR-7
  CDS (1)..(882): transl_table=11
atgcgttggcgtgacagtgaccgcagctccaatatcgaagacagacgtgaccagcagatggcgtccgcgggcgtgcccagtgcgctcctgctgcgcttgctgccttttctacttcgcaccaaaataggccgagtgatactgctgctaggcggattgtattttgcgtttcaatattttactggcggattatccctagacccgagcaatcaagcggggtttagccaatcgcaatcgaccagtaatacagccgctcaagatgaaaatgcccagtttgtggcggcgatcctcggtaccaccgaaaccgtctggaatcaattgctacaagggcgatatgttgaacccaaactggtgctttatcgcaatatgacctcaacgggatgcggtatgggacaggcgcaatctgggcctttctattgccccgctgatagcaaagtttatatcgacttgagttttctcgaggagctgaaaaaactcggtgcgtcgggggattttgccttcgcctatgtgattgcccacgaggtgggtcaccacgtgcagaacctactcgggatcagcactaaagtgcgtcaggcgcagcaagccgtcggcaaggcgcaggccaatcaattgagtgttgccctcgaattgcaagctgactgttatgccggcgtgtgggggcattatgtcgacaggcagttcaatctgctcgaagccggagatgtagaagaaggcatcgctgctgcgagtgccgtgggggatgatcgcctgcaaaaaatggctggccgagccgttcaacccgaagcttttacccatggcagttcggctgacagggtgaaatggtttaagacaggctttgcctctggcaagcttgccagctgcaatacctttaaccacaacttgtga

SEQ ID NO: 3309 - protein, 293 aa, Shewanella sp. MR-7
MRWRDSDRSSNIEDRRDQQMASAGVPSALLLRLLPFLLRTKIGRVILLLGGLYFAFQYFTGGLSLDPSNQAGFSQSQSTSNTAAQDENAQFVAAILGTTETVWNQLLQGRYVEPKLVLYRNMTSTGCGMGQAQSGPFYCPADSKVYIDLSFLEELKKLGASGDFAFAYVIAHEVGHHVQNLLGISTKVRQAQQAVGKAQANQLSVALELQADCYAGVWGHYVDRQFNLLEAGDVEEGIAAASAVGDDRLQKMAGRAVQPEAFTHGSSADRVKWFKTGFASGKLASCNTFNHNL

SEQ ID NO: 3310 - DNA, 909 bp, Streptococcus suis 89/1591
  CDS (1)..(909): transl_table=11
atgaaaattgatgatttacgaaaaagttctaacattgaggaccgcaggggacaatccagttctaactcatctttctcgtctggttcatctggcggaaatgttctattaggactactcttttcacgacttggttggaaaggaaaactacttgttcttgtccttttattagccttcggaggcatgtcaaaccttggtgggctgctttccccatcaacagggaccaatccttaccaatcgagtcaagtcacaacgactggtacagatgtgtctgatgcagatgctgaattcatgagtaaggttttaggatcgacagaagatttttgggtccaagaatttaaagccaatggtttaacctacaatgcaccgactatggttttctatactaaccagacccaaaccggatgtggagttggttccgcccaagctggtccattctattgctctgctgaccgcaagatttatattgatacttctttctatcaagaattatctagcaagtataaggctgctggtgactttgccatggcctatgtcatagctcatgaagttggtcaccatgttcaaaatgaattagaagttcttggggcctaccatcaaaaacgggctcaactatccgataaggaaggcaatgcgctaaatgttcgcttagaattgcaagctgactattatgcaggagcctgggccaaatatgttgatggacaaggcatcttggatgctggtgatattgacgaagctatgaatgctgcccatgcagttggtgacgatactcttcaacaggaagcctacggccgtactgttccagacagttttacccacggcacttctgagcaaaggaaaaaatggtttaatctcggttatacctatggtgaccttgctcacgccgatacattctccgtagagaaaccgtaa

SEQ ID NO: 3311 - protein, 302 aa, Streptococcus suis 89/1591
MKIDDLRKSSNIEDRRGQSSSNSSFSSGSSGGNVLLGLLFSRLGWKGKLLVLVLLLAFGGMSNLGGLLSPSTGTNPYQSSQVTTTGTDVSDADAEFMSKVLGSTEDFWVQEFKANGLTYNAPTMVFYTNQTQTGCGVGSAQAGPFYCSADRKIYIDTSFYQELSSKYKAAGDFAMAYVIAHEVGHHVQNELEVLGAYHQKRAQLSDKEGNALNVRLELQADYYAGAWAKYVDGQGILDAGDIDEAMNAAHAVGDDTLQQEAYGRTVPDSFTHGTSEQRKKWFNLGYTYGDLAHADTFSVEKP

SEQ ID NO: 3312 - DNA, 882 bp, Shewanella sp. MR-4
  CDS (1)..(882): transl_table=11
atgcgttggcgtgacagtgaccgcagctccaatatcgaagacagacgtgaccagcagatggcgtccgcgggcgtgcctagcgcgctcctgctgcgcttgctgccttttctacttcgcaccaaaataggccgagtgatactgctgttgggcgggctatattttgcgtttcaatattttactggcggattgtccctagatccgagccatcaagcggggtttagtcaatcacaatcggccagcaatacagccgctcaagatgagaatgcccagtttgtggcggcgatcctcggcaccaccgaaaccgtctggaatcaattgctgcaagggcgatatgtcgagcccaaactggtgctctatcgcaatatgacctcaacgggatgcggtatgggacaggcgcaatcagggcctttctattgccccgctgatagcaaagtttatatcgacttgagttttctcgaggagctgaaaaaacttggggcgccgggggatttcgccttcgcctatgtgattgcccacgaggtgggtcatcatgtgcagaacctactcgggaccagcactaaagtgcgtcaggcgcagcaagccgtcggcaaggcgcaggccaatcaactgagtgttgccctcgaattgcaagccgactgttatgctggcgtgtgggggcattatgtcgacaggcagctcaatctgctcgaagccggagatgtagaagagggcatcgctgccgcgagtgccgtgggggatgaccgcctgcaaaaaatggctggccgagccgtacaacccgaagcttttacccatggcagttcggctgacagggtaaaatggtttaagacgggttttgcctcaggcaagcttgccagctgcaatacctttaatcacaactcgtga

SEQ ID NO: 3313 - protein, 293 aa, Shewanella sp. MR-4
MRWRDSDRSSNIEDRRDQQMASAGVPSALLLRLLPFLLRTKIGRVILLLGGLYFAFQYFTGGLSLDPSHQAGFSQSQSASNTAAQDENAQFVAAILGTTETVWNQLLQGRYVEPKLVLYRNMTSTGCGMGQAQSGPFYCPADSKVYIDLSFLEELKKLGAPGDFAFAYVIAHEVGHHVQNLLGTSTKVRQAQQAVGKAQANQLSVALELQADCYAGVWGHYVDRQLNLLEAGDVEEGIAAASAVGDDRLQKMAGRAVQPEAFTHGSSADRVKWFKTGFASGKLASCNTFNHNS

SEQ ID NO: 3314 - DNA, 864 bp, Croceibacter atlanticus HTCC2559
  CDS (1)..(864): transl_table=11
atgaaatggaaaggtagaagaaaaagtggcaatctcgatgaccgtcgtggtatgagtaccaaaggtaaagtcgccgctggtggtggcgtgattgctgttattgtcatcttactccaactttttggaggcgaaacaggacaacagattgcaccaattgttgagcaaatcaataattccagaacgacgactcagcaaaccacttcaagagaactcacttcagcagaacaagaaatgggcgattttatggcaactgttttagcagatacggaagatgtatggaatcagttattcagacaaaataatttgggcgattataaagaaccacaaatggtattatttaccgatgttgtaaacacacgttgtggaaaagcaagttcagcttctggaccattctattgtcctggcgaccaaaaggtctatatggatttagcattcttcaaagaattgcgaacgcgttttggcgccaaaggtggtgattttgctattgcctatgtcacagctcacgagattgggcatcacgttcaaaccttattaggaacatcgcgccaagttcaacaagcaaaacaagggcgttctcaggcagatgccaataagttatcagtcgctcaagaactccaagctgatttttacgcaggtttatgggcgcattacaataaaaaatatttggacgaaggcgatatcgaagaagcattaagcgcggcacaagccgttggtgatgatgccattcaaaaaagaaccagaggttatgttcagccagacagtttcacacacggcacaagcaggcaacgtatggagtggtttatgaaaggcttcagaagtggtgatatgagtcaacacgatacgtttaaggccattttaaattaa

SEQ ID NO: 3315 - protein, 287 aa, Croceibacter atlanticus HTCC2559
MKWKGRRKSGNLDDRRGMSTKGKVAAGGGVIAVIVILLQLFGGETGQQIAPIVEQINNSRTTTQQTTSRELTSAEQEMGDFMATVLADTEDVWNQLFRQNNLGDYKEPQMVLFTDVVNTRCGKASSASGPFYCPGDQKVYMDLAFFKELRTRFGAKGGDFAIAYVTAHEIGHHVQTLLGTSRQVQQAKQGRSQADANKLSVAQELQADFYAGLWAHYNKKYLDEGDIEEALSAAQAVGDDAIQKRTRGYVQPDSFTHGTSRQRMEWFMKGFRSGDMSQHDTFKAILN

SEQ ID NO: 3316 - DNA, 846 bp, Sulfitobacter sp. EE-36
  CDS (1)..(846): transl_table=11
atgcggttgcgcggcatcagaagaagcaaaaacgttgaggtccgccgcggcgggcgcgggggcggtgccgggcgtgcgggcggtctggggatcgtcggcgttttggcggtgctggcgatcggctatttcaccggcatcgacgtatcgcccttgctgaacgggggcggcgcgccgcaaacccagcagggcgcgccggtctctgactctgacgcgcaggccacgcagttcaccgcgcaggtgctggccaccaccgaagatgtctggggcgagattttcccgcagcagttgggtcgcgaatatgtgccgcccaagctcgttgtcttttccaacgtcacgcaaagtgcctgtggcggggcctctggcgcgacggggccgttctactgccctgcggatgaaaaggcttatatcgacacgcaattctttgatcttctggcgcagcgcatgggggcaggcggggatttcgccgccgcctatgtgattgcccacgaggtcgcccaccacgtccagaacgaactgggcatcctgcccaaggtcgatgcgctgcgccgccaatcctcgaccgccgaggcgaacgccctgaccgtacggctcgagctgatggccgattgtttttcgggcatctgggccaagaacgtcaaaggtctgatggagcggggcgatctggacgaggcattgaacgccgcgcgcaagatcggcgatgaccacctgcaacgtcaggccggtcgcgtcccccagccccacacctttacccacggcacgtccgagcagcgctccagctggttccagcgcgggttcgacagcggtcaggttggccaatgcgacactttcgcggcagagcagctgtaa

SEQ ID NO: 3317 - protein, 281 aa, Sulfitobacter sp. EE-36
MRLRGIRRSKNVEVRRGGRGGGAGRAGGLGIVGVLAVLAIGYFTGIDVSPLLNGGGAPQTQQGAPVSDSDAQATQFTAQVLATTEDVWGEIFPQQLGREYVPPKLVVFSNVTQSACGGASGATGPFYCPADEKAYIDTQFFDLLAQRMGAGGDFAAAYVIAHEVAHHVQNELGILPKVDALRRQSSTAEANALTVRLELMADCFSGIWAKNVKGLMERGDLDEALNAARKIGDDHLQRQAGRVPQPHTFTHGTSEQRSSWFQRGFDSGQVGQCDTFAAEQL

SEQ ID NO: 3318 - DNA, 897 bp, Roseovarius nubinhibens ISM
  CDS (1)..(897): transl_table=11
atgggcccgcgcgggcgtatcgtgacggcgtatctctgtcagaccttggggggtcacatgcgtttgagaaatatccggggcagccggaatatcgaggatcgccgccgcagcgggggcggggccgaggccgggatcggcggtgtcggtcttttggtggtgctcgccatcggctatttcgcggggatcgatgtgacgccgctcttgcaggggcaggacccctacgcccaaggccaatcggggcgcgcgccgacggcggaagaggaacgcgcggccgagttcacctcgaaggtgctggccaccaccgaggaggtctgggccgatctctttcgtgagcagctcggccaagagtatcgcccgccggttctggtgctctattccggggtgacgcagagcccctgtggcggggcctcgggggcgaccgggccgttctattgtccggcggatcgcaaggcctatctcgacaccgcgtttttcgccacgctggcgcagcggctcggggcggggggcgattttgccgccgcctatgtgatcgcccatgaggtggcgcatcatgtgcaaaacgagcttggcattctggggcaggtcaatgaggcgcggcaggccagcggcgaggcgcgggccaatgcgcttaccgtgcggctcgaattgcaggccgattgcctgagcggggtctgggcgcaggcggtgggcgggctgctggagcccggcgatatcgacgaggcgctgaatgcggcgcggatgatcggggacgatcatttgcagcgcagcgccgggcgggtgccgcagccccatacctttacccatggcacgtcggaacagcgctcgggctggttcaccaagggctatcgcagtggccggatgcaggcttgcgacacattcggggccgatcggctctga

SEQ ID NO: 3319 - protein, 298 aa, Roseovarius nubinhibens ISM
MGPRGRIVTAYLCQTLGGHMRLRNIRGSRNIEDRRRSGGGAEAGIGGVGLLVVLAIGYFAGIDVTPLLQGQDPYAQGQSGRAPTAEEERAAEFTSKVLATTEEVWADLFREQLGQEYRPPVLVLYSGVTQSPCGGASGATGPFYCPADRKAYLDTAFFATLAQRLGAGGDFAAAYVIAHEVAHHVQNELGILGQVNEARQASGEARANALTVRLELQADCLSGVWAQAVGGLLEPGDIDEALNAARMIGDDHLQRSAGRVPQPHTFTHGTSEQRSGWFTKGYRSGRMQACDTFGADRL

SEQ ID NO: 3320 - DNA, 840 bp, Oceanicola batsensis HTCC2597
  CDS (1)..(840): transl_table=11
atgcgtctcagaggtgtccgtcgcagccgcaacatcgaggaccgccggcgcagccgcgggcgcggcggcgccatcggcgggctgggcatcggcggtgtcctggtggttctggccatcggctatttcaccggcatcgacgtcaggccgctgctcgacggcgcaccgcagcagtcctccgccccgcgcgccctgaccccggccgaagagcgcgcggcggatttcagcgcctccgtcctcgccacgaccgaggacgtctggagccggctgtttcccgcacaggtgggcaccgaatacgccccgcccgtcctcgtgctcttctccggccggaccgaaagcccctgcggcggcgcctccggggccaccgggcccttctactgtcccgccgaccgcaaggcctatctcgacacccagttcttcgcgaccctctcggaacggctcggcgccgggggcgatttcgccgccgcctatgtcatcgcccacgaggtggcgcatcatgtccagaacgaactcggcatcctcgcccgcgtccacgaggcgcgccggcagtccgaccagacccgggccaacgccctgacggtgcggctggaactccaggccgactgtctctccggtgtctgggccgcccacgtcgacgggctgctcgaacccggcgacatcgaagaggcgctgaatgctgcccggatgatcggcgacgaccacctgcagcgacaggccggccgcgtcccgcagccgcacaccttcacccacggcacctcggaccagcgcgcccgctggttcgaaaacggctacgacacgggcgagatcggtgcctgcgacaccttcgcggcggacaggttgtga

SEQ ID NO: 3321 - protein, 279 aa, Oceanicola batsensis HTCC2597
MRLRGVRRSRNIEDRRRSRGRGGAIGGLGIGGVLVVLAIGYFTGIDVRPLLDGAPQQSSAPRALTPAEERAADFSASVLATTEDVWSRLFPAQVGTEYAPPVLVLFSGRTESPCGGASGATGPFYCPADRKAYLDTQFFATLSERLGAGGDFAAAYVIAHEVAHHVQNELGILARVHEARRQSDQTRANALTVRLELQADCLSGVWAAHVDGLLEPGDIEEALNAARMIGDDHLQRQAGRVPQPHTFTHGTSDQRARWFENGYDTGEIGACDTFAADRL

SEQ ID NO: 3322 - DNA, 858 bp, Photobacterium sp. SKA34
  CDS (1)..(858): transl_table=11
atgcgttggaaaaactcccgtcgaagtaccaatattgaagatcgtcgaggccaaggctcgtctaaagctgggttgccgattggtgctttatttcgctttattccttttttaattaaaacaaaaataggtagagttattatggttgtcggtggcttatttttagcgtatcaacactttactggcggtaacatgatgggacagcagcaatcagctataccttctcaacgaacaatccaaaatgatgagaataaacaatttgtcgctgcggtattaggcacaactgaaaccgtctggaataagatccttgatggtaaataccaaccacccaagctagtgctttacaataatgtaacccaaacagcttgtggcacaggctcagcgcagtctggcccattttattgccctgcggataaaaaagtgtatttagatttaagctttatgaacgagcttaaaaagctaggagcccccggtgattttgcttttgcttatgttattgctcatgaagtgggacaccatgtacaaaacttattaggcacaagtactaaagtacatcaaatgcagcaacgtagcagcaaagtggaagccaaccgcttaagtgtaaaacttgaactacaagcagactgctatgccggcgtatggggacattacgtcaatcaacaaggcatacttgaggcaggagatattgatgaagggctcaacgctgccagctcggtaggcgatgaccatttacagaaaatggcaggccatgcagttcaacctgacggttttacacatggcacctcagcacaacgcattgaatggtttaagaaaggactaacaactggcgatcctcgtcaatgtaatacctttcaacagtaa

SEQ ID NO: 3323 - protein, 285 aa, Photobacterium sp. SKA34
MRWKNSRRSTNIEDRRGQGSSKAGLPIGALFRFIPFLIKTKIGRVIMVVGGLFLAYQHFTGGNMMGQQQSAIPSQRTIQNDENKQFVAAVLGTTETVWNKILDGKYQPPKLVLYNNVTQTACGTGSAQSGPFYCPADKKVYLDLSFMNELKKLGAPGDFAFAYVIAHEVGHHVQNLLGTSTKVHQMQQRSSKVEANRLSVKLELQADCYAGVWGHYVNQQGILEAGDIDEGLNAASSVGDDHLQKMAGHAVQPDGFTHGTSAQRIEWFKKGLTTGDPRQCNTFQQ

SEQ ID NO: 3324 - DNA, 903 bp, Xanthobacter autotrophicus Py2
  CDS (1)..(903): transl_table=11
atgcgttgggacgatttccgctccagcgataatgtggaagaccggcggggcgacggcggtggcggtggcggcttccagatgccgggcggccggggcggcctcggcatcggcaccatcatcatcgtgggcatcgtcggctgggcgctgggcatcaatccggccctgctcatcggcgggctggaagccatcaacggcatgggcggcggcaacgccccgcagcagcaggccgcgccgcgcaccaccccccagggcgcgcccaaggatgagctcggccgattcgccgccgccgtgctggcccagaccgaggatgtgtggaccgagctgttccgcgccgatggcaagacctatcaggatcccaagctggtgctgttctccggcgccacgcgctcggcctgcggcggcgcccagtcggccatggggccgttctattgtccgctcgaccagaaggtctatctggacctctccttcttccaggagatgaagacccgcttcaaggcgccgggcgacttcgccgccgcctatgtcatcgcccacgaggtgggccaccatgtggaaaacctcatcggcatcctgcccaaggtgcagcaggcgcaggcgcgcgcctcatcgcgggcggaggcgaacaacctgtccgtccgcgtggagctgatggccgattgcctcgccggggtgtgggcctaccacgccaatgcccgcttccgcattctggagcccggcgatgtggaggaggcgctgaacgccgccacagccatcggcgacgaccggctacagaagcagtcgcaaggttatgcggtgcccgacagcttcacccacggcacctcgcagcagcgggtgaactggttcacgcgcgggctgaagggcggctccatgcagcaatgcaataccttctcaggggcgatctga

SEQ ID NO: 3325 - protein, 300 aa, Xanthobacter autotrophicus Py2
MRWDDFRSSDNVEDRRGDGGGGGGFQMPGGRGGLGIGTIIIVGIVGWALGINPALLIGGLEAINGMGGGNAPQQQAAPRTTPQGAPKDELGRFAAAVLAQTEDVWTELFRADGKTYQDPKLVLFSGATRSACGGAQSAMGPFYCPLDQKVYLDLSFFQEMKTRFKAPGDFAAAYVIAHEVGHHVENLIGILPKVQQAQARASSRAEANNLSVRVELMADCLAGVWAYHANARFRILEPGDVEEALNAATAIGDDRLQKQSQGYAVPDSFTHGTSQQRVNWFTRGLKGGSMQQCNTFSGAI

SEQ ID NO: 3326 - DNA, 909 bp, Rhodobacter capsulatus
  CDS (1)..(909): transl_table=11
atgaggtggcaaggccgtcacggcagcgacaatatcgaagaccgtcgcggcagcgacaatatcgaagaccgtcgcggtggtggcgggcggcggatctcgcttggtggcgcgggcgggcttggccttctggcgctggggctggcgggctggatcttcggcatcgacctgacgccgcttctgaacagcgaggggctgcacgggaacgggatgccgcgcgagagcgcaccgcaggtgcaggagggcggcgcgctgagcgcgcgcgaccgggcgatgggcgatttcgtctcggtgacgctggccgataccgaggagatctgggccgggcttttccgcaatgatctgggccgggtctatcacccggcggttctggtgctgttttcgcaggtgacgcgctcgccctgcggcaccgcctcgggggcgaccggcccgttttactgcccggccgacggcaaggtctatctggacacggcctttttcgacacgctctcgcaagagcttggcgccgcgggggattttgccgccgcctatgtggtggcgcatgagatcgggcatcgggtgcaggacgagcttggcctgctcgacaaggtcgaggccgcgcgcgcgacagccgatccggccacggcgaatgcgctttcggtgcggctcgagctgcaggcggattgcctggccgggatctgggcgcatcacgcggcggcggatttcggcacgctcgagcgcggcgacgtggccgaggcgatgagcgcggcggcacggatcggcgatgacacgctcgcgcgaaatgcgggccgccgtccgatgcccgacagcttcacccatggcacctcggaccagcgccagttctggttcgcccaggggttcacgaccggccagatcgcctcttgcgacagcttcgcccgccgcacgccctga

SEQ ID NO: 3327 - protein, 302 aa, Rhodobacter capsulatus
MRWQGRHGSDNIEDRRGSDNIEDRRGGGGRRISLGGAGGLGLLALGLAGWIFGIDLTPLLNSEGLHGNGMPRESAPQVQEGGALSARDRAMGDFVSVTLADTEEIWAGLFRNDLGRVYHPAVLVLFSQVTRSPCGTASGATGPFYCPADGKVYLDTAFFDTLSQELGAAGDFAAAYVVAHEIGHRVQDELGLLDKVEAARATADPATANALSVRLELQADCLAGIWAHHAAADFGTLERGDVAEAMSAAARIGDDTLARNAGRRPMPDSFTHGTSDQRQFWFAQGFTTGQIASCDSFARRTP

SEQ ID NO: 3328 - DNA, 21 bp, Artificial sequence
  primer
atgcgttggcaagggcgacgt

SEQ ID NO: 3329 - DNA, 26 bp, Artificial sequence
  primer
ttaaatgcttttaccaaaagtattgc

SEQ ID NO: 3330 - protein, 336 aa, Artificial sequence
  consensus sequence
  Variant (2)..(6): Xaa in position 2 to 6 is any amino acid
  Variant (8)..(8): Xaa in position 8 is any amino acid
  Variant (10)..(10): Xaa in position 10 is any amino acid
  Variant (12)..(12): Xaa in position 12 is any amino acid
  Variant (15)..(15): Xaa in position 15 is any amino acid
  Variant (17)..(22): Xaa in position 17 to 22 is any amino acid
  Variant (23)..(32): Xaa in position 23 to 32 is any or no amino acid
  Variant (34)..(48): Xaa in position 34 to 48 is any amino acid
  Variant (49)..(70): Xaa in position 49 to 70 is any or no amino acid
  Variant (72)..(97): Xaa in position 72 to 97 is any amino acid
  Variant (98)..(113): Xaa in position 98 to 113 is any or no amino acid
  Variant (115)..(118): Xaa in position 115 to 118 is any amino acid
  Variant (120)..(121): Xaa in position 120 to 121 is any amino acid
  Variant (124)..(125): Xaa in position 124 to 125 is any amino acid
  Variant (127)..(129): Xaa in position 127 to 129 is any amino acid
  Variant (131)..(133): Xaa in position 131 to 133 is any amino acid
  Variant (134)..(137): Xaa in position 134 to 137 is any or no amino acid
  Variant (139)..(140): Xaa in position 139 to 140 is any amino acid
  Variant (142)..(142): Xaa in position 142 is any amino acid
  Variant (146)..(153): Xaa in position 146 to 153 is any amino acid
  Variant (154)..(154): Xaa in position 154 is any or no amino acid
  Variant (157)..(162): Xaa in position 157 to 162 is any amino acid
  Variant (169)..(169): Xaa in position 169 is any amino acid
  Variant (171)..(173): Xaa in position 171 to 173 is any amino acid
  Variant (175)..(175): Xaa in position 175 is any amino acid
  Variant (177)..(178): Xaa in position 177 to 178 is any amino acid
  Variant (180)..(188): Xaa in position 180 to 188 is any amino acid
  Variant (189)..(189): Xaa in position 189 is any or no amino acid
  Variant (191)..(191): Xaa in position 191 is any amino acid
  Variant (193)..(193): Xaa in position 193 is any amino acid
  Variant (194)..(207): Xaa in position 194 to 207 is any or no amino acid
  Variant (211)..(211): Xaa in position 211 is any amino acid
  Variant (215)..(215): Xaa in position 215 is any amino acid
  Variant (225)..(225): Xaa in position 225 is any amino acid
  Variant (229)..(244): Xaa in position 229 to 244 is any amino acid
  Variant (245)..(246): Xaa in position 245 to 246 is any or no amino acid
  Variant (248)..(248): Xaa in position 248 is any amino acid
  Variant (250)..(250): Xaa in position 250 is any amino acid
  Variant (252)..(253): Xaa in position 252 to 253 is any amino acid
  Variant (260)..(260): Xaa in position 260 is any amino acid
  Variant (265)..(271): Xaa in position 265 to 271 is any amino acid
  Variant (272)..(275): Xaa in position 272 to 275 is any or no amino acid
  Variant (278)..(278): Xaa in position 278 is any amino acid
  Variant (281)..(282): Xaa in position 281 to 282 is any amino acid
  Variant (284)..(286): Xaa in position 284 to 286 is any amino acid
  Variant (289)..(291): Xaa in position 289 to 291 is any amino acid
  Variant (295)..(295): Xaa in position 295 is any amino acid
  Variant (298)..(305): Xaa in position 298 to 305 is any amino acid
  Variant (307)..(308): Xaa in position 307 to 308 is any amino acid
  Variant (313)..(313): Xaa in position 313 is any amino acid
  Variant (315)..(315): Xaa in position 315 is any amino acid
  Variant (318)..(319): Xaa in position 318 to 319 is any amino acid
  Variant (322)..(323): Xaa in position 322 to 323 is any amino acid
  Variant (325)..(327): Xaa in position 325 to 327 is any amino acid
  Variant (329)..(332): Xaa in position 329 to 332 is any amino acid
  Variant (334)..(334): Xaa in position 334 is any amino acid
MXXXXXRXSXNXEDXRXXXXXXXXXXXXXXXXGXXXXXXXXXXXXXXXXXXXXXXXXXXXXXXXXXXXXXGXXXXXXXXXXXXXXXXXXXXXXXXXXXXXXXXXXXXXXXXXXFXXXXLXXTEXXWXXXFXXXXXXXYXXPXLVLXXXXXXXXXCGXXXXXXGPFYCPXDXXXYXDXXFXXXXXXXXXXAXGXXXXXXXXXXXXXXXDFAXAYVXAHEVGHHVQXLLGXXXXXXXXXXXXXXXXXXNXLXVXXELQADCXAGVWXXXXXXXXXXXLEXGDXXEXXXAAXXXGDDXLQXXXXXXXXPXXFTHGXSXQRXXWFXXGXXXGXXXXCXTF

SEQ ID NO: 3331 - protein, 31 aa, Artificial sequence
  protein pattern
  Variant (2)..(2): Xaa in position 2 is Asp, Glu or His
  Variant (3)..(3): Xaa in position 3 is Ala, Gly, Asn, Ser or Thr
  Variant (8)..(8): Xaa in position 8 is Ser or Thr
  Variant (10)..(10): Xaa in position 10 is any amino acid
  Variant (11)..(11): Xaa in position 11 is Asp or Gln
  Variant (13)..(14): Xaa in position 13 to 14 is any amino acid
  Variant (16)..(16): Xaa in position 16 is Phe or Leu
  Variant (17)..(18): Xaa in position 17 to 18 is any amino acid
  Variant (20)..(22): Xaa in position 20 to 22 is any amino acid
  Variant (24)..(28): Xaa in position 24 to 28 is any amino acid
  Variant (29)..(29): Xaa in position 29 is Asp or Asn
PXXFTHGXSXXRXXWXXXGXXXGXXXXXXTF

SEQ ID NO: 3332 - protein, 21 aa, Artificial sequence
  protein pattern
  Variant (2)..(4): Xaa in position 2 to 4 is any amino acid
  Variant (5)..(6): Xaa in position 5 to 6 is any or no amino acid
  Variant (8)..(9): Xaa in position 8 to 9 is any or no amino acid
  Variant (16)..(16): Xaa in position 16 is any amino acid
  Variant (17)..(17): Xaa in position 17 is Ala or Ser
  Variant (19)..(19): Xaa in position 19 is Ile, Leu or Val
  Variant (21)..(21): Xaa in position 21 is Ala, Gly or Val
NXXXXXVXXELQADCXXGXWX

SEQ ID NO: 3333 - protein, 26 aa, Artificial sequence
  protein pattern
  Variant (2)..(2): Xaa in position 2 is any amino acid
  Variant (5)..(5): Xaa in position 5 is Phe, Ile, Leu or Val
  Variant (6)..(6): Xaa in position 6 is Asp, Glu or Gln
  Variant (7)..(7): Xaa in position 7 is Ala, Glu, Gln or Ser
  Variant (8)..(8): Xaa in position 8 is Ala or Gly
  Variant (9)..(9): Xaa in position 9 is Ile, Leu or Met
  Variant (10)..(10): Xaa in position 10 is any amino acid
  Variant (11)..(11): Xaa in position 11 is Ala or Thr
  Variant (13)..(14): Xaa in position 13 to 14 is any amino acid
  Variant (15)..(15): Xaa in position 15 is Ile or Val
  Variant (19)..(19): Xaa in position 19 is any amino acid
  Variant (22)..(24): Xaa in position 22 to 24 is any amino acid
  Variant (25)..(25): Xaa in position 25 is any or no amino acid
EXGDXXXXXXXAXXXGDDXLQXXXXG

SEQ ID NO: 3334 - protein, 17 aa, Artificial sequence
  protein pattern
  Variant (2)..(4): Xaa in position 2 to 4 is any amino acid
  Variant (5)..(5): Xaa in position 5 is Ile or Val
  Variant (7)..(7): Xaa in position 7 is any amino acid
  Variant (8)..(8): Xaa in position 8 is Asp, Glu, Asn, Gln, Ser or Thr
  Variant (11)..(12): Xaa in position 11 to 12 is any amino acid
  Variant (14)..(16): Xaa in position 14 to 16 is any amino acid
  Variant (17)..(17): Xaa in position 17 is Phe or Leu
FXXXXLXXTEXXWXXXX

SEQ ID NO: 3335 - DNA, 2019 bp, Escherichia coli K12
  CDS (1)..(2019): transl_table=11
atggatgccctgcaattattaacctggtcgctgattctctatctgtttgctagtctggcttcgctgtttttactcggtctggacagactggctattaagctttccggcatcacatcgctggtgggcggcgtgattggcatcatcagcggaattacgcaattacatgctggtgtaactttagtcgcccgttttgcccccccttttgaatttgccgatttaaccctgcgaatggatagcctctcggcatttatggtgctggttatctccttgctggtggtggtttgttctctctattcattgacttatatgcgcgaatacgagggcaaaggcgcggcggcgatgggcttctttatgaatattttcatcgcatcgatggttgccctgctggtgatggacaacgctttttggttcatcgtgctgtttgaaatgatgtcgctgtcttcctggtttctggtcattgccaggcaggataaaacgtcgatcaacgctggcatgctctacttttttatcgcccacgccggatcggtgctgataatgatcgccttcttgctgatggggcgcgaaagcggcagcctcgattttgccagtttccgcacgctttcactttctccggggctggcgtcggcggtgttcctgctggcctttttcggttttggcgcgaaagccgggatgatgccgttgcacagctggttgccgcgcgctcaccctgccgcaccatcgcacgcttcggcgttgatgtctggcgtaatggtcaaaataggtattttcggcatcctgaaagtagcgatggatctgctggcgcaaacgggtttgcctctgtggtggggcattctggtgatggcgatcggcgcaatctccgcgctcctgggcgtgctatatgcgctggcggaacaggatatcaaacggctgctggcctggagtaccgtcgaaaacgtcggcattattttgctggcagtcggtgtggcgatggtcggtctgtcactgcacgacccgctgctcaccgtggttggactgctcggcgcactgtttcatctgctcaaccatgcgctgttcaaagggctgctatttctcggcgcgggagcgattatttcgcgtttgcatacccacgacatggaaaaaatgggggcactagcgaaacggatgccgtggacagccgcagcatgcctgattggttgcctcgcgatatcagccattcctccgctgaatggttttatcagcgaatggtacacctggcagtcgctgttctcactaagtcgtgtggaagccgtagcgctacaacttgcgggtcctattgctatggtaatgctggcagtcactggtgggctggcagtaatgtgcttcgtaaaaatgtacggtattactttctgtggtgcgccgcgcagtacacacgctgaagaggcacaggaagtgccaaatacgatgatcgtcgccatgctactgctcgcggcactctgcgtattaattgcgcttagtgccagttggctggcaccgaagataatgcatattgcccatgcgtttaccaatacccctcccgccactgtcgccagcggaatagcacttgtacccggcacgtttcatacacaggtcaccccctcattactgttgctgttactactggcgatgcctttgctgcctggcctttactggctgtggtgtcgttcgcgccgcgcagcgtttcgtcgcacaggagatgcctgggcatgcggctacggctgggaaaatgcgatggccccgtcaggcaatggcgtgatgcagccgctgcgtgtggtcttttctgcgctatttcgtctacgacaacagctcgaccctacgctgaggctaaataaaggtcttgcgcacgtcaccgccagggctcagagcacagaacccttctgggatgagcgggtgatccgccccatcgtgagcgccacccaacggctggccaaagaaatacagcatctgcaaagcggcgactttcgtctctattgcctgtatgtggtcgccgcactggttgtgctgctaatcgctattgccgtctaa

SEQ ID NO: 3336 - protein, 672 aa, Escherichia coli K12
MDALQLLTWSLILYLFASLASLFLLGLDRLAIKLSGITSLVGGVIGIISGITQLHAGVTLVARFAPPFEFADLTLRMDSLSAFMVLVISLLVVVCSLYSLTYMREYEGKGAAAMGFFMNIFIASMVALLVMDNAFWFIVLFEMMSLSSWFLVIARQDKTSINAGMLYFFIAHAGSVLIMIAFLLMGRESGSLDFASFRTLSLSPGLASAVFLLAFFGFGAKAGMMPLHSWLPRAHPAAPSHASALMSGVMVKIGIFGILKVAMDLLAQTGLPLWWGILVMAIGAISALLGVLYALAEQDIKRLLAWSTVENVGIILLAVGVAMVGLSLHDPLLTVVGLLGALFHLLNHALFKGLLFLGAGAIISRLHTHDMEKMGALAKRMPWTAAACLIGCLAISAIPPLNGFISEWYTWQSLFSLSRVEAVALQLAGPIAMVMLAVTGGLAVMCFVKMYGITFCGAPRSTHAEEAQEVPNTMIVAMLLLAALCVLIALSASWLAPKIMHIAHAFTNTPPATVASGIALVPGTFHTQVTPSLLLLLLLAMPLLPGLYWLWCRSRRAAFRRTGDAWACGYGWENAMAPSGNGVMQPLRVVFSALFRLRQQLDPTLRLNKGLAHVTARAQSTEPFWDERVIRPIVSATQRLAKEIQHLQSGDFRLYCLYVVAALVVLLIAIAV

SEQ ID NO: 3337 - DNA, 1827 bp, Escherichia coli O157:H7 EDL933
  CDS (1)..(1827): transl_table=11
  misc_feature (522)..(522): r is g or a
  misc_feature (1034)..(1034): r is g or a
atgagcgcaatttccctgatcaatagcggcgtggcgtggtttgtcgccgccgctgttctggcatttctcttttcttttcaaaaggcgctaagcggctggatagccggaattggcggcgcggttggtagtctgtatacggcagccgcgggcttcactgtactgactggcgcggttggcgtgagcggtgcgctgtcgctggtaagctacgatgtgcaaatctctccgcttaacgcgatttggctgattacgctcggtctgtgcggtctgtttgtcagcctctacaacattgactggcatcgccacgcgcaggtgaagtgcaacggcttgcagatcaatatgttgatggctgccgccgtctgcgccgtcattgccagcaacctcggcatgttcgtggtaatggccgaagtcatggccttgtgtgcggtgttcctcaccagcaacagcaaagagggcaaactgtggtttgcgctggggcgtcttggcactctgctgctggcgattgcttgctggctgctgtggcarcgttacggcacgctggatctgcgcctgctggatatgcgtatgcaacagctgccgctcggttccgatatctggctgctcagtgtgattggctttggcctgctggccgggattattccgctgcacggctgggtgccgcaggcacatgcgaacgcctctgcgccagctgccgcgttgttttctacggtagtcatgaaaattggcctgctgggcattttaaccctgtcactgctgggcggtaatgcaccgctgtggtgggggatcgcgctgctggtgctcggtatgatcaccgcgtttgtcggcggtctgtatgcgttgatggaacataatatccagcgtctactggcttaccacaccctggaaaatatcggcattatcctgctggggctgggcgctggcgtaacgggtatcgcgctcgaacaaccggcgctgattgctcttggcctggtcggtggtctgtaccatctgcttaaccatagcctgttcaaaagcgtactgttcctcggggcggggarcgtctggttccgtaccggtcatcgcgatatcgaaaaactcggtggtattggcaagaaaatgccggttatctccatcgctatgttagtcgggctgatggcaatggctgcactgccgccgctgaacggttttgccggggaatgggttatctatcaatccttcttcaaactgagcaatagtggcgcgtttgttgcccgtctgctggggccgctgctcgctgtgggtctggcaattaccggtgcgctggcggtgatgtgtatggcgaaagtctatggcgtcacgttcctcggcgcgccgcgtaccaaagaagccgaaaacgccacctgtgcaccgctcctgatgagcgtaagcgtagtggcactggcgatttgctgcgtaattggcggtgttgctgcgccgtggctgctgccgatgctctctgctgctgtacctctgccgctggaacctgctaacaccaccgtttctcaaccgatgatcacgttgctgctgattgcctgcccgctgctgccattcatcattatggcgatttgcaaaggcgatcgtttgccatcgcgttcccgcggcgcggcctgggtgtgcggctacgaccatgaaaaatcaatggtaattaccgcccacggttttgccatgccggtgaaacaggcgtttgcgccggtgctgaaactgcgcaaatggctgaatccggtgtcgctggtgccgggctggcagtgcgaaagcagtgcgttgctgttccgccggatggcgctggttgaactggcggtgctggtggtgattattgtttcacgaggagcctga

SEQ ID NO: 3338 - protein, 608 aa, Escherichia coli O157:H7 EDL933
  misc_feature (345)..(345): The Xaa at location 345 stands for Asn, or Ser.
MSAISLINSGVAWFVAAAVLAFLFSFQKALSGWIAGIGGAVGSLYTAAAGFTVLTGAVGVSGALSLVSYDVQISPLNAIWLITLGLCGLFVSLYNIDWHRHAQVKCNGLQINMLMAAAVCAVIASNLGMFVVMAEVMALCAVFLTSNSKEGKLWFALGRLGTLLLAIACWLLWQRYGTLDLRLLDMRMQQLPLGSDIWLLSVIGFGLLAGIIPLHGWVPQAHANASAPAAALFSTVVMKIGLLGILTLSLLGGNAPLWWGIALLVLGMITAFVGGLYALMEHNIQRLLAYHTLENIGIILLGLGAGVTGIALEQPALIALGLVGGLYHLLNHSLFKSVLFLGAGXVWFRTGHRDIEKLGGIGKKMPVISIAMLVGLMAMAALPPLNGFAGEWVIYQSFFKLSNSGAFVARLLGPLLAVGLAITGALAVMCMAKVYGVTFLGAPRTKEAENATCAPLLMSVSVVALAICCVIGGVAAPWLLPMLSAAVPLPLEPANTTVSQPMITLLLIACPLLPFIIMAICKGDRLPSRSRGAAWVCGYDHEKSMVITAHGFAMPVKQAFAPVLKLRKWLNPVSLVPGWQCESSALLFRRMALVELAVLVVIIVSRGA

SEQ ID NO: 3339 - DNA, 1827 bp, Salmonella enterica subsp. enterica serovar Typhi str. CT18
  CDS (1)..(1827): transl_table=11
atgagttcactttcactgattactagcggcgtcgcgtggtttgccgccgccgccgttctggcgtttctgttttcgtttcataaagcgctgagcggctggattgccggtatcggcggcgcggtcggcagcctgtgtacggcaggcgcggggttcaccgcgctgaccagcgccgttacggttagcggcgtgatgccgtttaccggtcacatgctgcaaattacgccgctgaatgctatctggctgattacgctggggctgtgcggtctgttcgtcagcctgttcaatatcgactggcatcgccatccacaggtaaaagccaacggactgttgatcaacctgctgatggcggcagccgtctgcgctgtggtcgccagtaatctggggacgatggtggtgatggctgaaatcatggcgctctgcgccgtgttccttaccggcggtagcaaagagggcaaactgtggtttgcgctgggccgtctcggtacgctgctgctggcaatcgcctgctggctggtgtggcagcgctacggcacgctggatctggggctgctggatcaacgcgctcagcaactgccgctgggctccgatatctggctgctcggcgttatcggttttggtctgctggccgggattatcccgctacacggttgggtgccgcaggcgcacgccaacgccagcgctcccgccgccgcgctgttctcgaccgtggtgatgaaaatcgggctgctgggcattctctcgctatctctgcttggcggcaatgcgccactgtggtggggcgtggcgctgttggtgcttgggatgatcaccgcctttgtcggcggtctgtacgcgctgatggagcataacattcagcgcctgctggcctatcacacgctggaaaatatcggcatcattttgctcggtctgggcgcaggcgttaccgggattgctctcaatcagccggtactgatcgcgctgggtctgaccggcgggctctatcatctgctgaaccatagcctgttcaaaagcgtgctgttactgggcgcgggcagcatctggttccgtaccggtcatcgcgacatcgaaaaactgggcggtattggtaaacggatgccggttatttctatcgccatgctggtcggtctgatggcgatggcggcgctgccgccgctgaacggctttgccggcgagtgggtgatttaccagtccttcttcaaactgggcaacagcggcgcgtttgttggtcgtctgttaggaccgctgctggcggttggcctggcgattaccggcgcgctggcggtgatgtgtatggcgaaagtttacggcgtgacgttccttggcgcgccgcgcacgaaggaagctgaaaatgccagctgcgcgccgatcctgatgggcgtcagcgtggtggcattggcggtttgctgcgtactgggcggggttgccgcgccgtggctgctgccgatgatttccactgcggtaccgttgccgctggaaaccgcgcacaccaccgtatcgcagccgatgatcacgctgctgttggtcgcctgtccgctactgccattcatcattatggcgatgttcaaaggcaaccgtctgccgtcgcgttctcgcggcgcggcctgggtgtgcggctacgaccatgagcagtcgatggtgattaccgcgcacggtttcgccatgccggtgaaagaggcctttgccccggtactcaaactgcgtaaatggctgaacccggtatcgctggtgccgggctggcagaacgcggcggccgcggggctgttccgtcgtctggcgctgattgagctggcggtgctggtggtgattgtggtttcacgaggagcctga

SEQ ID NO: 3340 - protein, 608 aa, Salmonella enterica subsp. enterica serovar Typhi str. CT18
MSSLSLITSGVAWFAAAAVLAFLFSFHKALSGWIAGIGGAVGSLCTAGAGFTALTSAVTVSGVMPFTGHMLQITPLNAIWLITLGLCGLFVSLFNIDWHRHPQVKANGLLINLLMAAAVCAVVASNLGTMVVMAEIMALCAVFLTGGSKEGKLWFALGRLGTLLLAIACWLVWQRYGTLDLGLLDQRAQQLPLGSDIWLLGVIGFGLLAGIIPLHGWVPQAHANASAPAAALFSTVVMKIGLLGILSLSLLGGNAPLWWGVALLVLGMITAFVGGLYALMEHNIQRLLAYHTLENIGIILLGLGAGVTGIALNQPVLIALGLTGGLYHLLNHSLFKSVLLLGAGSIWFRTGHRDIEKLGGIGKRMPVISIAMLVGLMAMAALPPLNGFAGEWVIYQSFFKLGNSGAFVGRLLGPLLAVGLAITGALAVMCMAKVYGVTFLGAPRTKEAENASCAPILMGVSVVALAVCCVLGGVAAPWLLPMISTAVPLPLETAHTTVSQPMITLLLVACPLLPFIIMAMFKGNRLPSRSRGAAWVCGYDHEQSMVITAHGFAMPVKEAFAPVLKLRKWLNPVSLVPGWQNAAAAGLFRRLALIELAVLVVIVVSRGA

SEQ ID NO: 3341 - DNA, 1827 bp, Salmonella typhimurium LT2
  CDS (1)..(1827): transl_table=11
atgagttcactttcactgattactagcggcgtcgcgtggtttgccgccgccgccgttctggcgtttctgttttcgtttcataaagcgctgagcggctggattgccggtatcggcggcgcggtcggcagcctgtgtacggcaggcgcggggttcaccgcgctgaccagcgccgttacggttagcggcgtgatgccgtttaccggccacatgctgcaaattacgccgctgaatgctatctggctgattacgctggggctgtgcggtctgttcgtcagcctgttcaatatcgactggcatcgccatccacaggtaaaagccaacgggctgttaatcaacctgctgatggcggcagccgtctgcgccgtggtcgccagtaatctggggacgatggtggtgatggcggaaatcatggcgctctgcgccgtgttcctcaccggcggtagcaaagagggcaaactgtggtttgcgctgggccgtctcggtacgctgctgctggcaatcgcctgttggctggtgtggcagcgctacggcacgctggatctggggctgctggatcaacgcgctcagcaactgccgctgggctccgatatctggctgctcggcgttatcggttttggtctgctggccgggattatcccgctacacggttgggtgccgcaggcgcacgccaacgccagcgctcccgccgccgcgctgttctcgaccgtggtgatgaaaatcgggttgctgggtatcctcacgctatctctgcttggcggcaatgcgccgctgtggtggggcgtggcgctgttggtgctagggatgatcaccgcctttgtcggcggtctgtacgcgctgatggagcataacattcagcgcctgttggcctatcacacgctggaaaatatcggcatcattttgctcggtctgggcgcaggcgttaccgggattgctctcaatcagccggtactgatcgcgctgggtctgaccggcgggctctatcacctgctgaaccatagcctgttcaaaagcgtgctgtttctgggcgcgggcagcatctggttccgtaccggtcatcgcgatatcgaaaaactgggcggtattggtaaacggatgccggttatttctatcgccatgctggtcggtctgatggcgatggcggcgctgccgccgctgaacggctttgccggcgagtgggtgatttatcagtccttcttcaaactgggcaacagcggtgcgtttgttggtcgtctgttaggaccgctgctggcggttggcctggcgattaccggcgcgctggcggtgatgtgtatggcgaaagtgtatggcgtgacgttccttggcgcgccgcgcacgaaggaagctgaaaatgccagctgcgcgccgatcctgatgggcgtcagcgtggtggcattggcgatttgctgtgtactgggcggggttgccgcgccgtggctgttgccgatgatttccactgcggtaccgttgccgctggaaaccgcgcacaccaccgtatcgcagccgatgatcacgctgctgttggtcgcctgtccgctactgccgttcatcattatggcgatgttcaaaggcaaccgtctgccgtcgcgttctcgcgcggcggcctgggtgtgcggctacgaccatgagcagtcgatggtgattaccgcgcacggttttgccatgccggtgaaagaggcctttgccccggtactcaaactgcgtaagtggctcaacccggtatcgttgattccgggctggcagaacgcggcggccgcggtgctgttccgtcgtctggcgctgattgagctggcggtgctggtggtgattgtggtttcacgaggagcctga

SEQ ID NO: 3342 - protein, 608 aa, Salmonella typhimurium LT2
MSSLSLITSGVAWFAAAAVLAFLFSFHKALSGWIAGIGGAVGSLCTAGAGFTALTSAVTVSGVMPFTGHMLQITPLNAIWLITLGLCGLFVSLFNIDWHRHPQVKANGLLINLLMAAAVCAVVASNLGTMVVMAEIMALCAVFLTGGSKEGKLWFALGRLGTLLLAIACWLVWQRYGTLDLGLLDQRAQQLPLGSDIWLLGVIGFGLLAGIIPLHGWVPQAHANASAPAAALFSTVVMKIGLLGILTLSLLGGNAPLWWGVALLVLGMITAFVGGLYALMEHNIQRLLAYHTLENIGIILLGLGAGVTGIALNQPVLIALGLTGGLYHLLNHSLFKSVLFLGAGSIWFRTGHRDIEKLGGIGKRMPVISIAMLVGLMAMAALPPLNGFAGEWVIYQSFFKLGNSGAFVGRLLGPLLAVGLAITGALAVMCMAKVYGVTFLGAPRTKEAENASCAPILMGVSVVALAICCVLGGVAAPWLLPMISTAVPLPLETAHTTVSQPMITLLLVACPLLPFIIMAMFKGNRLPSRSRAAAWVCGYDHEQSMVITAHGFAMPVKEAFAPVLKLRKWLNPVSLIPGWQNAAAAVLFRRLALIELAVLVVIVVSRGA

SEQ ID NO: 3343 - DNA, 1947 bp, Methanosarcina acetivorans C2A
  CDS (1)..(1947): transl_table=11
gtgaatatattgctcgaaaccttagtgtacggcgcaattgccgctcttgtatccggaactgtccttcctctcctgtaccgcagtaaaaacacaagaaagactgcttttggcctttctcttatctcatcaatcctgctcctggtttttgcaggtacggtcctttatacagggaaagagcccgtatttccggccatcggattcctgccgggcctggacttcaccctggctgcagaccggctttcagccgggtttatcctcttaattgcagcagtcgtgcccggagtttcaatatattcggtcgaatatgtagaacacgcaaaaagcgaggacgggaaaaacctgcaggcagccctgacaaatctctttatccttgccatgctgatggtcgtacttgcaggcaatatggtaggcttcctgattttctgggaaataatgtccctttcctcgctcctactggtgctgcataactattcctcggaggagaacaaaaaagccggctttttctacttcgtgatgacaaatatcagcacagcttttctcttcctgggcttcataagcctcttcaggcttacaggctctacggagttcggaccgcttgaatacgctgcaggtgagctgactcttcccttcctctccctttttgtcggctttggggtcaaggcaggacttgtgcctttccacaagtggctgccctatgcccaccctgcagcgccgtcaagtgtctcggccctgatgtccggagttatgctgaaggttgcagtctacggtttcctgcgtttcctgctctcaatctccacgcctgaactctggtggggagtgcttatccttacagcaggcagcctttcagctctcttcggggtaatttacgccctgaaagaaaacgacataaaaaggctccttgcctacagcagcattgaaaacatagggatcattttcacgggaatcgggctatatgtcatctttggggttgaaggacttgaaacccttgccctgttaagccttgtaggagcctgtttccactcctttaaccatgccctcttcaaaagcctgcttttcctctgtgcaggctcggtggttcatgccacaggcacacggaaaatcgaagccctcgggggacttgtaaaaagcatgcctgcgacctcagcccttttcatgataggctcggtctcgattgcagccctgcccccaacaaacggttttgccggcgagctcctgctctaccaggctttcttccagtcctttgccgtaaccgacccccttcttaccgtatttctaataattgccctctcaagctttgctctgaccggagcgctggcagctgcccttttcgtaaaacttttcgggatcacctgccttgccatgccacgttcggaaaagagccgccttgcagaagaagtccggaaacccatgctgataggccccgcagtgccggcagccttctgcatacttggagggcttttctcaaagcagctcctttctcttgcaggctggaagattgagtttccggacctgcttttgctaggatttctactcgggttgatatatgcagcccttttcgtgctgatccgtacccgtacaaaagaaacgaacccttcaaggatcagcgagacctggagatgcggaattccgaccgttgccccttacatggaatacagttctgcaggcttttccgagcctcttgtgatgatcttcaaaagcgtttataggacaaagatcgtgcacagagccgagtacctcgacaggcaggaaagtctcgttaagaatgggaatgtggaaatccgcctggtccgcttctttgaagaatacctttacatccctcctgcacgggcaatcgagggcttttcgaaatacgtttcaaaactgcagaacggaaaacttgacagttacgtcctttacgcctttctggcagtcattgtattgacaatagcaacaggaggctttgtatga

SEQ ID NO: 3344 - protein, 648 aa, Methanosarcina acetivorans C2A
MNILLETLVYGAIAALVSGTVLPLLYRSKNTRKTAFGLSLISSILLLVFAGTVLYTGKEPVFPAIGFLPGLDFTLAADRLSAGFILLIAAVVPGVSIYSVEYVEHAKSEDGKNLQAALTNLFILAMLMVVLAGNMVGFLIFWEIMSLSSLLLVLHNYSSEENKKAGFFYFVMTNISTAFLFLGFISLFRLTGSTEFGPLEYAAGELTLPFLSLFVGFGVKAGLVPFHKWLPYAHPAAPSSVSALMSGVMLKVAVYGFLRFLLSISTPELWWGVLILTAGSLSALFGVIYALKENDIKRLLAYSSIENIGIIFTGIGLYVIFGVEGLETLALLSLVGACFHSFNHALFKSLLFLCAGSVVHATGTRKIEALGGLVKSMPATSALFMIGSVSIAALPPTNGFAGELLLYQAFFQSFAVTDPLLTVFLIIALSSFALTGALAAALFVKLFGITCLAMPRSEKSRLAEEVRKPMLIGPAVPAAFCILGGLFSKQLLSLAGWKIEFPDLLLLGFLLGLIYAALFVLIRTRTKETNPSRISETWRCGIPTVAPYMEYSSAGFSEPLVMIFKSVYRTKIVHRAEYLDRQESLVKNGNVEIRLVRFFEEYLYIPPARAIEGFSKYVSKLQNGKLDSYVLYAFLAVIVLTIATGGFV

SEQ ID NO: 3345 - DNA, 2022 bp, Thermoanaerobacter tengcongensis MB4
  CDS (1)..(2022): transl_table=11
ttgatgactgttcaacagttatttttgttatctattttcttatatgttgtaggagcacttatctctttgggattaaatagggacggcaaaattgcaaattatgtttctggaacaactgctttcttggcaggatgcactggagtcgcttcagctgttccggtccttattgaagggaaaggttttatattggaaggcatggagtttatcccttttgggcgatttacaattaatgttgatcctctttcagcttttatgacattggttatttctctacttagtattgccacaggtgtttattctatttcttatcaggaagagtatattgggaaaggcaccggcgtaatgggttttttaaataatatctttattgtttcaatgattttggtagttactagtgacaacgctttctattttttagttttttgggagctgatgacgctggtttcttatttcctggtttgttttgaacaggaaaacagagaggcaataaaagctggatttgtgtattttgtaatggcccatgttggcacagttttgataatgatttcgtttatattattttatgtttataccggtacttttgattttgccgcttttaggaatgcaaatctttcgcctgttatcaagaatttagcttttcttctggcttttttgggatttggggttaaggcaggcatcgttcccttccatttctggctgcctcaggctcatcctgccgctccttctaatgtttctgctcttatgtctggtgtcatgattaagacagctatttacggcattataagagttggggtggactttttgggggctgctacatggtggtggggccttacggtccttgcctttggggctatttcagcagtttttggagtgctttatgctgttagtgaaaatgaccttaaacgcttgttggcctattccagcatagagaatgtgggaattatcctgatgggagtcggtgcgggaatgatgggaatagccacaggatacgttagtgtaggcatattaggtattctggcggggctttatcatttgataaatcacgctgtcttcaaagggttgctttttcttggggcgggctcggtagtttaccgcctccacacaaggaatatggaggagatgggaggattggccagatatatgccatggactggattgaccttctttataggcgctttgtcgatttccgcccttcctccgctaaatggctttgtaagcaaatggtttacataccatactctgtttgctgtcagcacaaaagggagtgtgctgattagaatggcatttcctctcgccgcagtcgctttagccttaacaggagctttgacgtctctgtgttttgtaaaagcatatggagtgacttttactggaccttttcgaggtggcaatgaattaaagattaaagaggttcctgtgaccatgcttatagggatggggcttttagcaataggctgttttgttttggggcttggcgcgccggttggggctggatatattgcgaatgtggcttcagcgttgctacatgtatcttcacccaaggtaagtgacggtctgtcgatatttccagcaagcagtgagcaggccatgctttctacgccacttgtgcttgtttttgtcgtaggacttgcgatattgcccctattaattattggaacaggtggaaagcgagcaggaaggcgagtggactttgaaccctgggcatgtggctataaatattcatctcgcatggcgtggacatccacagcctttgctcactcactgtacccgcttttcagtccagtatatttgcttaggactgcatttacagaagctggtcgtttcattattttgcttttcaaaaaggcgatggcgtatatatcacagatagagctgatgtgggaacgttatatatactatcctttgcttcatttcatggtctatataggtaaacgtgcacaaactttccagacaggtaatgtccggatgtactgcctgtacataatcctgactcttggggttcttttgatagcgacggtgagatag

SEQ ID NO: 3346 - protein, 673 aa, Thermoanaerobacter tengcongensis MB4
MMTVQQLFLLSIFLYVVGALISLGLNRDGKIANYVSGTTAFLAGCTGVASAVPVLIEGKGFILEGMEFIPFGRFTINVDPLSAFMTLVISLLSIATGVYSISYQEEYIGKGTGVMGFLNNIFIVSMILVVTSDNAFYFLVFWELMTLVSYFLVCFEQENREAIKAGFVYFVMAHVGTVLIMISFILFYVYTGTFDFAAFRNANLSPVIKNLAFLLAFLGFGVKAGIVPFHFWLPQAHPAAPSNVSALMSGVMIKTAIYGIIRVGVDFLGAATWWWGLTVLAFGAISAVFGVLYAVSENDLKRLLAYSSIENVGIILMGVGAGMMGIATGYVSVGILGILAGLYHLINHAVFKGLLFLGAGSVVYRLHTRNMEEMGGLARYMPWTGLTFFIGALSISALPPLNGFVSKWFTYHTLFAVSTKGSVLIRMAFPLAAVALALTGALTSLCFVKAYGVTFTGPFRGGNELKIKEVPVTMLIGMGLLAIGCFVLGLGAPVGAGYIANVASALLHVSSPKVSDGLSIFPASSEQAMLSTPLVLVFVVGLAILPLLIIGTGGKRAGRRVDFEPWACGYKYSSRMAWTSTAFAHSLYPLFSPVYLLRTAFTEAGRFIILLFKKAMAYISQIELMWERYIYYPLLHFMVYIGKRAQTFQTGNVRMYCLYIILTLGVLLIATVR

SEQ ID NO: 3347 - DNA, 1932 bp, Methanosarcina mazei Go1
  CDS (1)..(1932): transl_table=11
ttgctcgaaaccttaatgtatggtgcaatctctgcccttgtattcggaacagtcctccctctcctgtaccgcagtaaaaacataagaaaggcttcttctggtctttctcttctctcatcaatcctgcttctgggctttgcgggcataattctttacaccagaacagagcctgtttttccagttaccggatttcttccgggcgctggttttaccctgagcgcagacaggcttgcagccgggtttatcctgctaatcggagcagtagtgcccggagtttcaatatattcggtagaatacgttgaacacgctaaaagcgaagccagaaaaagccttcaggcatcccttacaaatcttttcatccttgccatgcttatggtcattcttgcaggcaatatggtaagtttcctggttttctgggaaataatgtccctttcctctctcctcctggttctgcatgactactcttccgaggagaataaaaaagccggctttttctactttgtaatgaccaatataagtacggcttttcttttcgtgggcttcataagcctcttcaggctgacgggttctgccgatttcgggcctctggaataccctgcagcagatctggctttacctttcatctttctgttcatcggatttggagtcaaggcagggcttgtccctttccataaatggcttccctatgctcaccctgcagccccttcaagtgtttcagccctgatgtcaggagtcatgctgaaagttgcagtttacggcttcctgcgttttctgctatcggtatctgctcccgaactctggtggggagtgcttatccttacagcaggcagcatttcagcccttttcggggtaatctatgcccttaaagaaaatgacataaaaaggatgctcgcctacagcagcattgaaaacataggaattattttcacaggaatcgggctgtatgcagtatttaaagttgaggggcttgaatcccttgccctcttaagccttgtaggggcctgcttccatgcctttaaccatgctgtcttcaaaagcctgctcttcctctgtgcaggctcagtggtccatgctacaggcacgaggaaaatcgaagcatttggggggcttgtaaaaagcatgcctgtaacctctgcccttttcctgataggttcggtatctattgcagccatgccgccaacaaatggttttgccggcgagctcctgctttatcaggctttcttccagtcttttgccgtaacagatcctctactgaacatatttctgataatcgccctctcaagctttgcccttaccggagcccttgcagctgcccttttcgtaaaacttttcgggatcacctgccttgcaatcccgcgctctgagaagagcaggcttgcagaagaagtccagaaaccaatgcttgtagggcctgcagtgccggcagctttctgtatactgggcgggttgttttcaaagcagcttctatctctcgcaggctggaaaatcgattttccggaccttctcttgctggggattcttctcgggttgatatacacagcccttttcgtaataatccgctcaaaagaaacgggccctgcaaggattagcgagacatggggatgcgggatcccggcccttgcaccttatatggaatacagctctgcaggcttttccgagcctcttgtaatgatcttcaaaagtatttacaggacaaagattgtgaacagacccgagtacttcgacgaaaaggaaagcctctttaagaacggaaaggtggaaatacgcctgctccgcttctttgaagaatacctttacatcccacctgcgcgggcaattgatattttttcaaaatatgtttcaaaactgcagaacggaaaacttgacagttatgtcctttacgcctttcttgcagtgattgtactaattatagcaaccggaggctttgtatga

SEQ ID NO: 3348 - protein, 643 aa, Methanosarcina mazei Go1
MLETLMYGAISALVFGTVLPLLYRSKNIRKASSGLSLLSSILLLGFAGIILYTRTEPVFPVTGFLPGAGFTLSADRLAAGFILLIGAVVPGVSIYSVEYVEHAKSEARKSLQASLTNLFILAMLMVILAGNMVSFLVFWEIMSLSSLLLVLHDYSSEENKKAGFFYFVMTNISTAFLFVGFISLFRLTGSADFGPLEYPAADLALPFIFLFIGFGVKAGLVPFHKWLPYAHPAAPSSVSALMSGVMLKVAVYGFLRFLLSVSAPELWWGVLILTAGSISALFGVIYALKENDIKRMLAYSSIENIGIIFTGIGLYAVFKVEGLESLALLSLVGACFHAFNHAVFKSLLFLCAGSVVHATGTRKIEAFGGLVKSMPVTSALFLIGSVSIAAMPPTNGFAGELLLYQAFFQSFAVTDPLLNIFLIIALSSFALTGALAAALFVKLFGITCLAIPRSEKSRLAEEVQKPMLVGPAVPAAFCILGGLFSKQLLSLAGWKIDFPDLLLLGILLGLIYTALFVIIRSKETGPARISETWGCGIPALAPYMEYSSAGFSEPLVMIFKSIYRTKIVNRPEYFDEKESLFKNGKVEIRLLRFFEEYLYIPPARAIDIFSKYVSKLQNGKLDSYVLYAFLAVIVLIIATGGFV

SEQ ID NO: 3349 - DNA, 1818 bp, Shigella flexneri 2a str. 301
  CDS (1)..(1818): transl_table=11
ttgtcgccgccgctgttctggcatttctcttttcaaaaagcgctaagtggctggatagccggaattggcggcgcggttggtagtctgtatacggcagccgcgggcttcactgtactgactggcgcggttggcgtgagcggtgcgctgtcgctggtaagctacgatgtgcaaatctccccgcttaacgcgatttggctgattaccctcggcctttgcggtctgtttgtcagcctctataacattgactggcatcgccacgcgcaggtgaagtgcaacggcttgcagatcaatatgttgatggctgccgccgtctgcgccgtcatcgccagcaacctcggcatgttcgtggtaatggccgaagtcatggccttgtgtgcggtgttcctcaccagcaacagcaaagagggcaaactgtggtttgcgctgaggcgtcttggcactctgctgctggtgattgcttgctggctgctgtggcagcgttatggcacgctggatctgcgcctgctggatatgcgtatgcaacagctgccgctcggttccgatatctggctgctcggtgtgattggctttggcctgctggctgggattattccgctgcacggctgggtgccgcaggcacatgctaacgcctctgcgccagctgccgcgttgttttctacggtagtcatgaaaattggcctgctgggcatgttaaccctgtcactgctgggcggtaatgcaccgctgtggtgggggatcgcgctgctggtgctcggcatgatcaccgcgttcgtcggtggtctgtatgcgttgatggaacacaacatccagcgcctgctggcttaccacaccctggaaaatatcggcattatcctgctggggctggggctggggctggggctggggctggggctggggctgggcgctggcgtaacgggtatcgcgctcgaacaaccggcgctgattgctcttggcctggtcggtggtctgtaccatctgcttaaccatagcctgttcaaaagcgtactgttcctcggggcggggagcgtctggttccgtaccggtcatcgcgatatcgaaaaactcggtggtattggcaagaaaatgccggttatctccatcgccatgttagtcgggttgatggcaatggctgcgctgccgccactgaacgggtttgccggggaatgggttatctatcaatccttcttcaaactgagcaatagcggcgcgtttgttgcccgtctgctggggccgctgctcgctgtgggtctggcaattaccggtgcgctggcggtgatgtgtatggcgaaagtctatggcgtcacgttcctcggcgcgccgcgtaccaaagaagccgaaaacgccacctgtgcgccgctcctgatgagcgtaagcgtagtggcactggcgatttgctgcgtaattggcggtgttgctgcgccgtggctgctgccgatgctctctgctgctgtacctctgcctctggagcctgctaacaccaccgtttctcaaccaatgatcacattgctgctgattgcctgcccgctgctgccattcatcattatggcgatttgcaaaggcgaccgcctgccgtcacgttcccgcggtgcggcctgggtgtgcggctacgaccatgaaaaatcaatggtgattaccgctcacggttttgccatgccggttaaacaggcgtttgcgccagtgctgaaactgcgcaaatggctgaatccggtgtcgctagtgccgggctggcagtgcgaaggtagtgcgttgctgttccgccggatggcgctggttgaactggcggtactggtggtgattattgtttcacgaggagcctga

SEQ ID NO: 3350 - protein, 605 aa, Shigella flexneri 2a str. 301
MSPPLFWHFSFQKALSGWIAGIGGAVGSLYTAAAGFTVLTGAVGVSGALSLVSYDVQISPLNAIWLITLGLCGLFVSLYNIDWHRHAQVKCNGLQINMLMAAAVCAVIASNLGMFVVMAEVMALCAVFLTSNSKEGKLWFALRRLGTLLLVIACWLLWQRYGTLDLRLLDMRMQQLPLGSDIWLLGVIGFGLLAGIIPLHGWVPQAHANASAPAAALFSTVVMKIGLLGMLTLSLLGGNAPLWWGIALLVLGMITAFVGGLYALMEHNIQRLLAYHTLENIGIILLGLGLGLGLGLGLGLGAGVTGIALEQPALIALGLVGGLYHLLNHSLFKSVLFLGAGSVWFRTGHRDIEKLGGIGKKMPVISIAMLVGLMAMAALPPLNGFAGEWVIYQSFFKLSNSGAFVARLLGPLLAVGLAITGALAVMCMAKVYGVTFLGAPRTKEAENATCAPLLMSVSVVALAICCVIGGVAAPWLLPMLSAAVPLPLEPANTTVSQPMITLLLIACPLLPFIIMAICKGDRLPSRSRGAAWVCGYDHEKSMVITAHGFAMPVKQAFAPVLKLRKWLNPVSLVPGWQCEGSALLFRRMALVELAVLVVIIVSRGA

SEQ ID NO: 3351 - DNA, 1827 bp, Escherichia coli CFT073
  CDS (1)..(1827): transl_table=11
atgagcgcaatttccctgatcaatagcggcgtggcgtggtttgtcgccgccgctgttctggcatttctcttttcttttcaaaaagcgctaagtggctggatagccggaattggcggcgcggtgggtagcctgtatacggcagccgcgggcttcactgtgctgactggcgcggttggcgtgagcggtgcgctgtcgctggtaagctacgatgtgcaaatctctccgcttaacgcgatttggctgattacgctcggtctgtgcggtctgtttgtcagcctctacaacattgactggcatcgccacgcgcaggtgaaatgcaacggcttgcagatcaatatgttgatggctgccgccgtctgtgccgtcatcgccagcaacctcggcatgttcgtggtaatggccgaaatcatggccctgtgtgcggtgttcctcaccagcaacagcaaagagggcaaactgtggtttgcgctggggcgtcttggcactctgctgctggcgattgcctgctggctgctgtggcagcgttacggtacgctggatctgcgcctgctggatatgcgtatgcaacagctgccgctcggttccgatatctggctgctcggtgtgattggctttggcctgctggccgggattattccgctgcacggctgggtgccacaggcacatgccaacgcctctgcgccagctgccgcgctgttttccacggtagtcatgaaaattggcctgctgggcattttaactctgtcactactgggcggtaatgcaccgctgtggtgggggatcgtactgctggtactcggcatgatcaccgcattcgtcggcggtctgtatgcgttgatggaacacaatatccaacgtctgctggcttaccacaccctggaaaatatcggcattatcctgctggggctgggcgctggcgtaacgggtatcgcgctcgaacaaccggcgctgattgcccttggtctggttggtggtctgtaccatctgattaaccatagcctgttcaagagcgtactgttccttggtgcggggagcgtctggttccgtaccggtcatcgcgatatcgaaaaactcggtggtattggcaagaaaatgccggttatctccatcgccatgttagtcgggctgatggcaatggctgcgctgccgccgctgaacggttttgccggggaatgggttatctatcaatccttcttcaaactgagcaatagtggcgcgtttgttgcccgtctgttcgggccgctgctcgccgtgggtctggcaattaccggtgcgctggcggtgatgtgtatggcgaaagtttatggcgttactttcctcggcgcgccgcgtaccaaagaggccgaaaacgccacctgtgcgccgctcctgatgagcgtaagcgtagtggcactggcgatttgctgcgtaattggcggtgttgctgcgccgtggctactgccgatgctctctgctgctgtacctctgccgctggagcctgctaacaccaccgtttctcaaccgatgatcacgttgctgctgattgcctgcccgctgctgccgttcatcattatggcgatttgcaaaggcgatcgtttgccgtcgcgttcccgcggcgcggcctgggtgtgcggctacgatcatgaaaaatcaatggtgattaccgctcacggttttgccatgccggtgaaacaggcgtttgcgccggtgctgaaactacgcaaatggttgaatccggtgtcgctggtgccgggctggcagtgcgaggggagtgcgttgctgttccgccggatggcgctggttgaactggcggtgctggtggtgattattgtttcacgaggagcctga

SEQ ID NO: 3352 - protein, 608 aa, Escherichia coli CFT073
MSAISLINSGVAWFVAAAVLAFLFSFQKALSGWIAGIGGAVGSLYTAAAGFTVLTGAVGVSGALSLVSYDVQISPLNAIWLITLGLCGLFVSLYNIDWHRHAQVKCNGLQINMLMAAAVCAVIASNLGMFVVMAEIMALCAVFLTSNSKEGKLWFALGRLGTLLLAIACWLLWQRYGTLDLRLLDMRMQQLPLGSDIWLLGVIGFGLLAGIIPLHGWVPQAHANASAPAAALFSTVVMKIGLLGILTLSLLGGNAPLWWGIVLLVLGMITAFVGGLYALMEHNIQRLLAYHTLENIGIILLGLGAGVTGIALEQPALIALGLVGGLYHLINHSLFKSVLFLGAGSVWFRTGHRDIEKLGGIGKKMPVISIAMLVGLMAMAALPPLNGFAGEWVIYQSFFKLSNSGAFVARLFGPLLAVGLAITGALAVMCMAKVYGVTFLGAPRTKEAENATCAPLLMSVSVVALAICCVIGGVAAPWLLPMLSAAVPLPLEPANTTVSQPMITLLLIACPLLPFIIMAICKGDRLPSRSRGAAWVCGYDHEKSMVITAHGFAMPVKQAFAPVLKLRKWLNPVSLVPGWQCEGSALLFRRMALVELAVLVVIIVSRGA

SEQ ID NO: 3353 - DNA, 2013 bp, Bradyrhizobium japonicum USDA 110
  CDS (1)..(2013): transl_table=11
atgtcggctgtcgttttgcaaatgctgtgtgttgccggaatgcttgcatcggcagttctggcgattgttctgagccgctcaacgatcaccacgaccatcatctacggcgtgacattggccgcgtctgcgattgcgttgataggatccattcactggttgctgggcgataccgcgaacgccgatctgattctgccaatcggattgccgtggcttggcgcccatttccgcctcgacggactggcttcgttctttctcgtcgtcgtcaatctcggaggggcatcggcaagcctctatggtctcggctacggtcatcatgaggaggcgccgcagcgcgtgttgcccttcttccccgccttcctggcaggaatgaatcttgtggtgctggcgggtgatgcgttttcttatctgctttgttgggaattcatgtcgctcgcgtcctgggcgctcgtcatggcgcatcatcgtgaaccgggcaacgcgaaagccggttacgtctacctcgtcatggcgagcttcggcacgctcgccctgctgctagccttcggcctcttggcggggccggcgggagactacgaatttgccgccattcgcacggctcaacatacgccctacgtggccacgttggtgttgatcctgatgttgctcggcgccggttcaaaggccggcctggtgccgctgcacgtctggctgccgctcgcgcatcccgcggcgccgagccacgtctcggcgctgatgagcggcgtcatgaccaaggtcgcgatctacggcttcattcgcgtggtattcgatctcctgggacagccgagctggtgggcgagtgtgatcgtactttctcttggcggcctcactgccgtaatggggatcttgtatgcgatgatggaaaaggacctcaagcgcctgctcgcctacagtacgatcgaaaatgtcggcgtcatcttcgcaagcctcggccttgcattggccttccaggccaacggcctgaaactacaggccgcgctcgcgtttgcggcggctctgtttcacgttctcaatcactccttcttcaagagtctgcttttcttcggcgccggcgccgtgctgaccgcgaccggcgaacgggacatggacaagctgggtggcctcattcatcgcatgccgtacacaagcttcgccgttctcgtcggctgtgtctcgatctcagcgcttccgcccttcaacggtttcgtctcggaatggctcatgttccaggctgtattgcagagcccggagttgccgcaatgggcgctgaagatcaccgtgcctgcggtcggagctctattggccttggcggctgcgttggcagcggcgtgtttcgtgaaggcctacggcgtgacctttctagggcgtccgcgcggcgtggcggcggaaaccgcagaggaagtcgaccgctactcgctttcggcaatgttcaccctcgccgcactttgcttgctggccggaattctgccgggaccggtgatcgacgcgctttcgccgatcacgctacagatcctcggcggccgcatgccgatccaggccaacgaaccctggctttcgatcgcgccgattgcggagagtcgcagttcatacaacgggctgcttgttatggtgttcatcgcgatatccgcttcagcggccgtcgtctttattcatcgcttcgcctctcgtgccttaaggcgggggccggcctggggctgtggcttttccgatccgacacccgcggcccaatattcgagcggaagcttcgctcagcctatccgccgcgttttcggtacgctcgtgttccacgcccgcgatcatgtcgagatgccgccccccggggatatcaggccggcgcgcctgcgaatcgaattgcacgatctgatctgggagcgaatgtatgagccgatagcaggcgccgttggcttctctgccgataaactcaatcgcctacagttcctgaccatccggcgctatctcagcctggtctttgcgaccctcgtcacactccttctggttctcgcgatatggtcgtga

SEQ ID NO: 3354 - protein, 670 aa, Bradyrhizobium japonicum USDA 110
MSAVVLQMLCVAGMLASAVLAIVLSRSTITTTIIYGVTLAASAIALIGSIHWLLGDTANADLILPIGLPWLGAHFRLDGLASFFLVVVNLGGASASLYGLGYGHHEEAPQRVLPFFPAFLAGMNLVVLAGDAFSYLLCWEFMSLASWALVMAHHREPGNAKAGYVYLVMASFGTLALLLAFGLLAGPAGDYEFAAIRTAQHTPYVATLVLILMLLGAGSKAGLVPLHVWLPLAHPAAPSHVSALMSGVMTKVAIYGFIRVVFDLLGQPSWWASVIVLSLGGLTAVMGILYAMMEKDLKRLLAYSTIENVGVIFASLGLALAFQANGLKLQAALAFAAALFHVLNHSFFKSLLFFGAGAVLTATGERDMDKLGGLIHRMPYTSFAVLVGCVSISALPPFNGFVSEWLMFQAVLQSPELPQWALKITVPAVGALLALAAALAAACFVKAYGVTFLGRPRGVAAETAEEVDRYSLSAMFTLAALCLLAGILPGPVIDALSPITLQILGGRMPIQANEPWLSIAPIAESRSSYNGLLVMVFIAISASAAVVFIHRFASRALRRGPAWGCGFSDPTPAAQYSSGSFAQPIRRVFGTLVFHARDHVEMPPPGDIRPARLRIELHDLIWERMYEPIAGAVGFSADKLNRLQFLTIRRYLSLVFATLVTLLLVLAIWS

SEQ ID NO: 3355 - DNA, 1794 bp, Shigella flexneri 2a str. 2457T
  CDS (1)..(1794): transl_table=11
ttgtcgccgccgctgttctggcatttctcttttcaaaaagcgctaagtggctggatagccggaattggcggcgcggttggtagtctgtatacggcagccgcgggcttcactgtactgactggcgcggttggcgtgagcggtgcgctgtcgctggtaagctacgatgtgcaaatctccccgcttaacgcgatttggctgattaccctcggcctttgcggtctgtttgtcagcctctataacattgactggcatcgccacgcgcaggtgaagtgcaacggcttgcagatcaatatgttgatggctgccgccgtctgcgccgtcatcgccagcaacctcggcatgttcgtggtaatggccgaagtcatggccttgtgtgcggtgttcctcaccagcaacagcaaagagggcaaactgtggtttgcgctgaggcgtcttggcactctgctgctggtgattgcttgctggctgctgtggcagcgttatggcacgctggatctgcgcctgctggatatgcgtatgcaacagctgccgctcggttccgatatctggctgctcggtgtgattggctttggcctgctggctgggattattccgctgcacggctgggtgccgcaggcacatgctaacgcctctgcgccagctgccgcgttgttttctacggtagtcatgaaaattggcctgctgggcatgttaaccctgtcactgctgggcggtaatgcaccgctgtggtgggggatcgcgctgctggtgctcggcatgatcaccgcgttcgtcggtggtctgtatgcgttgatggaacacaacatccagcgcctgctggcttaccacaccctggaaaatatcggcattatcctgctggggctggggctggggctgggcgctggcgtaacgggtatcgcgctcgaacaaccggcgctgattgctcttggcctggtcggtggtctgtaccatctgcttaaccatagcctgttcaaaagcgtactgttcctcggggcggggagcgtctggttccgtaccggtcatcgcgatatcgaaaaactcggtggtattggcaagaaaatgccggttatctccatcgccatgttagtcgggttgatggcaatggctgcgctgccgccactgaacgggtttgccggggaatgggttatctatcaatccttcttcaaactgagcaatagcggcgcgtttgttgcccgtctgctggggccgctgctcgctgtgggtctggcaattaccggtgcgctggcggtgatgtgtatggcgaaagtctatggcgtcacgttcctcggcgcgccgcgtaccaaagaagccgaaaacgccacctgtgcgccgctcctgatgagcgtaagcgtagtggcactggcgatttgctgcgtaattggcggtgttgctgcgccgtggctgctgccgatgctctctgctgctgtacctctgcctctggagcctgctaacaccaccgtttctcaaccaatgatcacattgctgctgattgcctgcccgctgctgccattcatcattatggcgatttgcaaaggcgaccgcctgccgtcacgttcccgcggtgcggcctgggtgtgcggctacgaccatgaaaaatcaatggtgattaccgctcacggttttgccatgccggttaaacaggcgtttgcgccagtgctgaaactgcgcaaatggctgaatccggtgtcgctagtgccgggctggcagtgcgaaggtagtgcgttgctgttccgccggatggcgctggttgaactggcggtactggtggtgattattgtttcacgaggagcctga

SEQ ID NO: 3356 - protein, 597 aa, Shigella flexneri 2a str. 2457T
MSPPLFWHFSFQKALSGWIAGIGGAVGSLYTAAAGFTVLTGAVGVSGALSLVSYDVQISPLNAIWLITLGLCGLFVSLYNIDWHRHAQVKCNGLQINMLMAAAVCAVIASNLGMFVVMAEVMALCAVFLTSNSKEGKLWFALRRLGTLLLVIACWLLWQRYGTLDLRLLDMRMQQLPLGSDIWLLGVIGFGLLAGIIPLHGWVPQAHANASAPAAALFSTVVMKIGLLGMLTLSLLGGNAPLWWGIALLVLGMITAFVGGLYALMEHNIQRLLAYHTLENIGIILLGLGLGLGAGVTGIALEQPALIALGLVGGLYHLLNHSLFKSVLFLGAGSVWFRTGHRDIEKLGGIGKKMPVISIAMLVGLMAMAALPPLNGFAGEWVIYQSFFKLSNSGAFVARLLGPLLAVGLAITGALAVMCMAKVYGVTFLGAPRTKEAENATCAPLLMSVSVVALAICCVIGGVAAPWLLPMLSAAVPLPLEPANTTVSQPMITLLLIACPLLPFIIMAICKGDRLPSRSRGAAWVCGYDHEKSMVITAHGFAMPVKQAFAPVLKLRKWLNPVSLVPGWQCEGSALLFRRMALVELAVLVVIIVSRGA

SEQ ID NO: 3357 - DNA, 1941 bp, Wolinella succinogenes DSM 1740
  CDS (1)..(1941): transl_table=11
atggaaacgatctacactctctttctgctcgcctctctcctctctatcgcgctctataagaagcctctttgggcgcatagattgggatttgcactcgcgagtctattttcactttatgcggcgatcttcttcttttctcatctaggggagacgctggtgtggaaactccctggaagcttcatcagtgcgcccacttttaggcttgattccttggggatgctctttagcttcttaatctcggtggtggcgtttgcggtctcgctctttagccttgattatgctcgattctatgaaaaaaaggcgaatctagcagcctttgcctctcttatgaatgccttcatcctctccatgctgcttgtggtggcgagtgatggggtcttctctttcatgttgctttgggaggtgatgacgctcatctcagccctcttgattctaatcaatgatggcgaaggtgcctccaaaaaggcgatgatctatctaggaatcgcccaactaggagctttctgcctaatggtcgcccttttggtaatggcaagtttggcgggtagctttgaatttagcgagtttggacggctggatattagcgagggggcgagtatcgcactctttttgctgctattggtggggcttgggtcaaaggcggggatgtttccctttcatgtttggcttcctttggcttatggtcaatgcccttcaaatgcctcagcgcttatgagtggggtgatgatcaaggtggcgctttttgccttcatcaagttttcactcctgctcccgctctcgagcacttttggatatatcctcctcctttttgggggacttagcgttctttttggggtgctttatgcggtggttgccaatgattataaggctgcaatcgcctatagctcttgcgagaatgtgggcattatctttttgggactaggagcggctttttatggaataggggagaatcttcctgttgtagcgctgcttggttttgtcgcggcgctctttcatatcctcaaccatgcgctctttaaatcgctccttttcatgctaagcggcaatctctacacagccacaggctccaaagagatggattctttgggggggattcacaaaaagatgcctttcacctctatcctctttcttgtggcggtgctcgccattggcgcacttcctccgctcaatggctttgctagtgagtgggtcacctatcaggcgatgcttcaaggaggcgtagaggaggggattgctcctcgtctcttctttacctttggcatcattgcattggctgtgggtggagccttggcgatcatggctttttccaaagcttatggggcactctttttgggactcccaagggatgaggcaatctatgagggaatccaagaggtctctagtatcagattgtggcctttggcctttttggcgagtctctgtgtgggacttggaatctttatgggcgaggtggtctctctgctctcaacgatggtggcgagctatattcctacggccaatgccgaggatgcaagcaccctctccatgcctttggtggtgttagtgatgcttttgtgtgcggtggtgccttttgtcttgctctacatcaccaaggccaatcacgcccccattcgagtcaccgagccttgggcgtgcggatttatctataacaaaaacatgcagattggctccaatgccttcacgggcgatattcgccgtgcacttcgattcttgttgaggtatgagagtgagagcaaaatggagggctacttctctagggtgacctataagaaaaaagctcgcgatctcttctgggatcgactctatgagcctgtgattagctgggtgatggaggcggctgataagattggaattttccaaaacggtcgaacgaatctctatgcgggttatattttggtctatctttgcctagtgctgatttttggttattaccatctgtga

SEQ ID NO: 3358 - protein, 646 aa, Wolinella succinogenes DSM 1740
METIYTLFLLASLLSIALYKKPLWAHRLGFALASLFSLYAAIFFFSHLGETLVWKLPGSFISAPTFRLDSLGMLFSFLISVVAFAVSLFSLDYARFYEKKANLAAFASLMNAFILSMLLVVASDGVFSFMLLWEVMTLISALLILINDGEGASKKAMIYLGIAQLGAFCLMVALLVMASLAGSFEFSEFGRLDISEGASIALFLLLLVGLGSKAGMFPFHVWLPLAYGQCPSNASALMSGVMIKVALFAFIKFSLLLPLSSTFGYILLLFGGLSVLFGVLYAVVANDYKAAIAYSSCENVGIIFLGLGAAFYGIGENLPVVALLGFVAALFHILNHALFKSLLFMLSGNLYTATGSKEMDSLGGIHKKMPFTSILFLVAVLAIGALPPLNGFASEWVTYQAMLQGGVEEGIAPRLFFTFGIIALAVGGALAIMAFSKAYGALFLGLPRDEAIYEGIQEVSSIRLWPLAFLASLCVGLGIFMGEVVSLLSTMVASYIPTANAEDASTLSMPLVVLVMLLCAVVPFVLLYITKANHAPIRVTEPWACGFIYNKNMQIGSNAFTGDIRRALRFLLRYESESKMEGYFSRVTYKKKARDLFWDRLYEPVISWVMEAADKIGIFQNGRTNLYAGYILVYLCLVLIFGYYHL

SEQ ID NO: 3359 - DNA, 1986 bp, Geobacter sulfurreducens PCA
  CDS (1)..(1986): transl_table=11
atggaatccgcgttagaaggggcggaccccgcctctcagattcttgccgccatagtcctggtggccctttccggcgttccgggcgtgctggcgcgccgattcgtgccgggccagatcctggccgccgtcatggctgtggctgcgtctctgcttggcttgaccggcacgattcggacgctgctggagcaccggacaacggccttcagtcttgcctggaccctccccttcggccccgccgacctggccgtcgatcccctgtcggctctcttcctgattcccgtctttctcgtcttcggctgcggctccctctatgctctcggctactggcccgccgctgcgaaccgttccaccgagccggcccttacgttcttctacgggattctggccgcggccatggcgggcctggtggtggcccgcaacggggttctcttcctcatggcgtgggaggctatggccctgtcggcctggttcctcctcgccaccgagcaccgtgacccggccgtgcgccaggcggggatcgtctatctggcggcgacccatgccggcaccgcggcgctcttcgtgctcttctgcgtcctgcggggcgtcaccggatccttcgtgtttcccgcgccacacagcctcgacccggccttggtgccggccacggtcctgtttctggccgcccttgccgggttcggcgccaaggccgggatcatgccgctccacatctggctgcccgcggcccatgccagcgcgccgagccacgtctccgccctcatgtcgggggtcatgctcaagatggggctctacgggctggtgcggaccatctcgtttttcgcgccggtacccctctggtggggcggtctcattctggtgctgggggcggtttcggccctggccggcatcgtcctggcggcgtcccagcgcgatctgaaacggctgctggcctgcagcagcatcgagaacatcggcatcatcgccttgggcatcggtacggccctggtgggggaagccactggcaacgtccccctctataccctcggcatgaccggggcactgctccacctgctcaatcacagcctgttcaagccgctcctctttttcggggccggcgcggtgatccatgccaccggcacccgggagatggaccgaatgggagggcttgcccgcctcatgccccggagcgcgctcttcttcctggtggggtccgtggccatctgcgggctgcctcccctgaacggcttcgtgggggaatttctgctctatgccggcttcttcggcgaggccgtggctgacccggtgccgctcctggccctgtcggcgccgcttctggccgtggtggggggcatcgcgacggtctccttcgtgaagctctacggcgtgatttttctgggggttccccgctgcggcgcgcatcatcactcccacctgcccgactggcggatgggcgcgcccatggggctgctggccctgctctgcctcgcggcggggatcgcgcccgggccggtgctgagcctggtggagccggcagtgggggccttcggcatggttcccccggcccccctcgaaaccctcgttcccctggggtggctcaccctgggggcgggcatgctgggcgctgcggtgatcctctcggggctgctcctgatgttccggctgaaacggaccccggtcgcgcggggtactacctgggggtgcggctacccggccccgtcgccgcggatgcagtacacgggagtttcctttgccgattccctggtgaggcagttcgaaggggtcgtcgccccccgccgggaaggtccggccgtggcgggattcttcccggcaccggttctgttccggttcgtgcctactgaaacgatccttgagcgggtcatcatgccgctgttcagggtcgcggggttttccttcgccttcctgcggcggctgcagcacggccggctgcacctctacatgctctacatcctgaccacgctctttctgctgatggtctgggcccactga

SEQ ID NO: 3360 - protein, 661 aa, Geobacter sulfurreducens PCA
MESALEGADPASQILAAIVLVALSGVPGVLARRFVPGQILAAVMAVAASLLGLTGTIRTLLEHRTTAFSLAWTLPFGPADLAVDPLSALFLIPVFLVFGCGSLYALGYWPAAANRSTEPALTFFYGILAAAMAGLVVARNGVLFLMAWEAMALSAWFLLATEHRDPAVRQAGIVYLAATHAGTAALFVLFCVLRGVTGSFVFPAPHSLDPALVPATVLFLAALAGFGAKAGIMPLHIWLPAAHASAPSHVSALMSGVMLKMGLYGLVRTISFFAPVPLWWGGLILVLGAVSALAGIVLAASQRDLKRLLACSSIENIGIIALGIGTALVGEATGNVPLYTLGMTGALLHLLNHSLFKPLLFFGAGAVIHATGTREMDRMGGLARLMPRSALFFLVGSVAICGLPPLNGFVGEFLLYAGFFGEAVADPVPLLALSAPLLAVVGGIATVSFVKLYGVIFLGVPRCGAHHHSHLPDWRMGAPMGLLALLCLAAGIAPGPVLSLVEPAVGAFGMVPPAPLETLVPLGWLTLGAGMLGAAVILSGLLLMFRLKRTPVARGTTWGCGYPAPSPRMQYTGVSFADSLVRQFEGVVAPRREGPAVAGFFPAPVLFRFVPTETILERVIMPLFRVAGFSFAFLRRLQHGRLHLYMLYILTTLFLLMVWAH

SEQ ID NO: 3361 - DNA, 2016 bp, Erwinia carotovora subsp. atroseptica SCRI1043
  CDS (1)..(2016): transl_table=11
atggattcacttcagttgcttcagtggtcagcgatctgttacctcgcaggcgccgtgttatctctgctcatggcacgtaaagaaaacgcgtcaatcatcatcgccgccattaccgccatctgcggtggtgtactgggattatgcagcgccgtgcccgtattgttgagcgggcagattcagctatacgctacgcagggcctatttcactttgctacctttactgtgcgtctcgatatgttggccgcctttatggtgacggtcatctcgctgctggtcacagtctgctcgctctactccatcgcctatgtccgtgaatatataggacgaggcgccggcagtatggggggctttatgaatctgtttatcgcttccatggtgggtctggttgtgatggataatgcgttctacttcatcatcctgtttgaagccatgtcgctagcctcttggtttctggttatttctgaacaggatcgtgaatccgtcagcgcaggtctgctctacttctttattgcccatgccggatcggtactgatcatgatcgcattcttcctgatgtggagagaaagcggcagtctggattttgcggcgttccgccggttatcgctctctccagtgctgtcttcggtcgtcttcctgctggcctttttcggtttcggtgccaaagcgggcatgctgccattgcacagctggctgccgcgcgcccatcccgcggcgccgtctcatgcctccgcgttgatgtccggcgtcatggtaaaaataggtatcttcggcatcatcaaagtgggtatcgatctgctagcggcaccacagctgtggtgggggattgtggtgctggcgttcggatccatttccgccgtactgggtgtgttgtatgcgctggcagaacacgatattaagcgcctgctggcctggcataccgtcgaaaacgtcgggatcattttgatgggcgttggcgtagggatggtcggcatcgccactcagcatcaggtattagcgacgctcggtttgctgggcgcgctctatcacctgctgaatcacgctgtgtttaaagggctgctgtttttaggcgctggtgccgtcatctaccgcctgcatacccgtgatatggaaaaaatgggtggcctcggcaaactcatgcccaaaaccgcattggcctttctgattggctgcatgtccatctccgccctgccgccgctcaatggctttatcagtgaatggtacacctaccagtcactgttcagcatgagccacgacggcaatgttctcatgcgcctcagtgcacccgtagccattgtgatgctggccatcacgggggcattagccgcgatgtgcttcgtcaaagtctatggcgtcagtttttgcggcgcgccacgcagtgaggaagccagtcaggcccgggaagtaccgtggcaaatgacgttatccctattgctgctagcactgtgctgcgtagcgctaggccttggcgccagcaaggtagcgcccattattgctcaggttgcgatgtcgctgagcggtgctcaggacgtggcagtcgctcagggaaacttgctgattccggctcaggccgagcaggcgatgttctccccggcactcgtctttattctgctcatcgcgttgccggtgctgccgctgttgatctggttattcctgaaaggtaatcgtcccgcgtttcgccgccatggtgacccatgggcgtgtggttacgcctgggaaccgcagatggtcgtctcggccagcggctttacgcaaccgctgcgcgcgatgttcggcgggctctatcgcatgcgccagcggcttaatccagcccctcagctatccagagcgctacaaggcatcactcagggagccaccatcatcgaaccgttctgggatgaaaaaatcatttacccgttggtgcgtctggtacggcgtatcggtgcacagctacagcggttacagggtggcgacttccgcctctactgtctgtacgtggttgcggcactaaccgtactgctgttgattgtcgcggtgtga

SEQ ID NO: 3362 - protein, 671 aa, Erwinia carotovora subsp. atroseptica SCRI1043
MDSLQLLQWSAICYLAGAVLSLLMARKENASIIIAAITAICGGVLGLCSAVPVLLSGQIQLYATQGLFHFATFTVRLDMLAAFMVTVISLLVTVCSLYSIAYVREYIGRGAGSMGGFMNLFIASMVGLVVMDNAFYFIILFEAMSLASWFLVISEQDRESVSAGLLYFFIAHAGSVLIMIAFFLMWRESGSLDFAAFRRLSLSPVLSSVVFLLAFFGFGAKAGMLPLHSWLPRAHPAAPSHASALMSGVMVKIGIFGIIKVGIDLLAAPQLWWGIVVLAFGSISAVLGVLYALAEHDIKRLLAWHTVENVGIILMGVGVGMVGIATQHQVLATLGLLGALYHLLNHAVFKGLLFLGAGAVIYRLHTRDMEKMGGLGKLMPKTALAFLIGCMSISALPPLNGFISEWYTYQSLFSMSHDGNVLMRLSAPVAIVMLAITGALAAMCFVKVYGVSFCGAPRSEEASQAREVPWQMTLSLLLLALCCVALGLGASKVAPIIAQVAMSLSGAQDVAVAQGNLLIPAQAEQAMFSPALVFILLIALPVLPLLIWLFLKGNRPAFRRHGDPWACGYAWEPQMVVSASGFTQPLRAMFGGLYRMRQRLNPAPQLSRALQGITQGATIIEPFWDEKIIYPLVRLVRRIGAQLQRLQGGDFRLYCLYVVAALTVLLLIVAV

SEQ ID NO: 3363 - DNA, 1959 bp, Desulfotalea psychrophila LSv54
  CDS (1)..(1959): transl_table=11
atgatgaacatctttctactttcactcacagtgttatttgtcggtgggattttttcattactgagctatcgccattttaatgtaatgaaggtcggctatgtgataattacagctgtaggctgtgcgattggtatatatgcaatcacaatccccctgcacggtgctgtagtgcccagcttttcaaggccatggctacatcttttcaccctctctttttccctagatgctctttccgcatttttcctgattcctatctttgtcgtatgccctttagcagcactctacagctatcattatatggacaagattgaagagaagggacgaatcggtgtgagtttctttttctttaatcttctcctcatatctatggccctggtgacagcagctgataatattatcagctttcttttggtatgggagttgatgtcgctctcttccttttttcttgtcattcacgactatcaggaagaggatacacgcagagctggatatatctactttgtctttgcccaggcaggtgcaatgttcatcattgcagcactcgccttagcctatagccaaacaggaatccatgattttgcagcatttgccaccttgccagcccatatcaaattgattgttttcttcctcgccctggtaggatttggttcaaaagcaggcatctttcccctgcatatgtggttaccccatgctcacccggccgcaccatgtcatatctcggcgattatgtccggggtaatgattaagatgggtatctacgggattatccgcctctatgttgagcttgaagacaccagccttataatcggtcaaacagtgctcaccctgggtatgatctcagggattttaggtgtggtttacgcccttggcaagcaggacatcaagaaggtactcgcctatagtagtgtggaaaatataggtgtcatcctcattggtgccggtattggcatgatgggtatgagcacgggaaatatggtgatggcaagttttggctttgcaggctgcctcctccatgtgctcaaccactccctctttaaaaccctactttttcttggtgccggcgctatcgtacaaaagacaggaaccagacgcctcgacgaactgggcggcttgataaaacgtctgccccttaccggtaagagttttctcgcaggcagtgtctccatctctggtctgcctccctttaatggctttattagtgagtttttgatttattatggtgcctttcatggcctgagccttaagggttcagcctttcttttcgccatgctgtccatcctcgcactcgccatcatcggtggccttgccgcctcctgttttacccgaatgatggggataattttccttggtgagccacggactgccaaggcggcaaaggctactgaggcaggatttaccatgacccttcccatgattttcctcgctgcctcctgtctgtttattggccttttcccagcgccctttgtcggtattgtctttagcgcccttgcaagcattcccgctttaacgcctatagacggagcagaggtaacactactcgccgaaaaccttggccttgcagcccggctcttccttgctgtgctcattttcagcacattgctacgtaaacttttataccgcaataaggtggttgtacaagcgccaacctggggctgtgcttttgcccaacccagcgtaaagatgcaatacacagggacctcttatgcgatgagcatcatcgccttctttaggccatttattcaaataaagacaaactattcggggatcaaaagaatattccccaggaagaccacctataaaaccgaggtggacgatatagcagaggtctgtctgattgagcgaattgtaacgcctcttctctactttttaggcaaattccgttggattcaacatggccatattcaactctatattgcctatatagctgtgacaatcatcgtccttcttctctgcgtttaa

SEQ ID NO: 3364 - protein, 652 aa, Desulfotalea psychrophila LSv54
MMNIFLLSLTVLFVGGIFSLLSYRHFNVMKVGYVIITAVGCAIGIYAITIPLHGAVVPSFSRPWLHLFTLSFSLDALSAFFLIPIFVVCPLAALYSYHYMDKIEEKGRIGVSFFFFNLLLISMALVTAADNIISFLLVWELMSLSSFFLVIHDYQEEDTRRAGYIYFVFAQAGAMFIIAALALAYSQTGIHDFAAFATLPAHIKLIVFFLALVGFGSKAGIFPLHMWLPHAHPAAPCHISAIMSGVMIKMGIYGIIRLYVELEDTSLIIGQTVLTLGMISGILGVVYALGKQDIKKVLAYSSVENIGVILIGAGIGMMGMSTGNMVMASFGFAGCLLHVLNHSLFKTLLFLGAGAIVQKTGTRRLDELGGLIKRLPLTGKSFLAGSVSISGLPPFNGFISEFLIYYGAFHGLSLKGSAFLFAMLSILALAIIGGLAASCFTRMMGIIFLGEPRTAKAAKATEAGFTMTLPMIFLAASCLFIGLFPAPFVGIVFSALASIPALTPIDGAEVTLLAENLGLAARLFLAVLIFSTLLRKLLYRNKVVVQAPTWGCAFAQPSVKMQYTGTSYAMSIIAFFRPFIQIKTNYSGIKRIFPRKTTYKTEVDDIAEVCLIERIVTPLLYFLGKFRWIQHGHIQLYIAYIAVTIIVLLLCV

SEQ ID NO: 3365 - DNA, 2007 bp, Burkholderia pseudomallei K96243
  CDS (1)..(2007): transl_table=11
atggaacaggggctgcttctccgatgcgtgctgttcgttgcgctcgcgtggctcgcgctcggctgcgccggactcgcgaacctgcgccgcaccggtgtgatcgcacacggcctcttcccgctcggcgcgctggccgggctcgtgctcgcggcgctcggcctggccggcgtgttcgccgggccgtcgagcgccgtgctgccgctcgggctgcccgacctgccgttccatctgcgtgtcgatccgctgtccgcgtacttcctgttcgtgctcggcgtggtgacggcgggcgtcggcgcgttctcgtccggctacttccgcaagggcgagggcacggcgcccggcctcatctgcttcgagtaccacgtgtgcgtcgcgagcatggtgctgctgctcgtcgcggacgatgcgtactgcttcatggtcgcgtgggagacgctgacgctgtcggcgaccttcctcgtgatgacgaaccaccggatcgccgagatccgccgcgccgcattcgtgtatttcctgatctcgcacgtcggcgcgctcgcgctgctgctgtgcttcggcctgctgcaggcgggcacgggcgactacacgttcgcgaacatgcgcatccagcatctcgacgggctcgccgcatcggccgcgttcgtgctcgcgctcgtcggcttcggcgcgaaagccggcatctttccgctgcacgtctggctgccggacgcgcatccggctgcgccgtcgccggtatccgcgctgctgagcggcttcgtgctgaaggtcggcctgtatggcatattgcgcacggtgctcgatctgctgcacgtgcaggtggcgtggtggggcgtgctcatgctcgcgctcggcctgttcggcgcgttgctcggcgccgtgttcagcacgatccagaccgacatgaagcggctgctcgcctattcgtcgatcgacaacgtcggcctgatgtgcgtgagcctcgggctcacgatcctgttcctcggctaccggctgccctcgctcgccgcgctgtcgctgacggcgctgctgtatcagatcgtcgcgcacgcgtgcttcaagagcctgctgttcctcggcacgggcgccgtgctgcacgcgacgggcgagcgcaatctcggccggctcggcggcttgatccgcttcatgccgtggaccgcgtgggcgatgctcgtcggcgtcgccgcgagcgccgggctgccgccgtcgagcggcttcgtgtccgaatggctgctcgtgcagagcttcctgttcacgccggggctgccggattcggtgctcgggatgacggtgccgctcgtcgcggcgctcgtcgcgctgacggcggcgctcgccggctacgcgatggtcaagttcttcggcatcgtgttcctcggccggccgcgcgaggccaagctcgagcgcgcgcgcgacgcgagcccgtgggagcggatcgcgttcggctggttcgcggccgcgagcgtgctgctcggcctcgcgcccgttcagtacgtgaaggtgctcgatgcgctcacgcgcgcgctcgtcggcgcgggcatcgcgggcacgaatcacgggtggctgctgttcgcgcccgtgtccaccgcgcgcgcgagctacatgccggcgctcttcatgctgttcttcgtcgcgtgctgcgcgctcgcgtggctgctcgtgcggcgcttctatcacggcaggctgcggcgcgcggcgccgtggtcgtgcggcaatccgttcgtgaccgcgcgcatgcaggacacggccgaaggcttcggccagccgatccgcgagatcttcacgccgttcttccggatcgagcggcaactgccgtcgccgttcgatcggcagccggcctaccggatgagcgtcgcggaccgcacgtggcacctgctgtacgagccgatcgccgcgctcgcaaaccgcgtcgccgcgctcgtcgggcggttgcagacgggccgcatcgcgatctatctgacgtacagcttcatcgtgctgatcgtccttctgacggtggtgagacgatggtga

SEQ ID NO: 3366 - protein, 668 aa, Burkholderia pseudomallei K96243
MEQGLLLRCVLFVALAWLALGCAGLANLRRTGVIAHGLFPLGALAGLVLAALGLAGVFAGPSSAVLPLGLPDLPFHLRVDPLSAYFLFVLGVVTAGVGAFSSGYFRKGEGTAPGLICFEYHVCVASMVLLLVADDAYCFMVAWETLTLSATFLVMTNHRIAEIRRAAFVYFLISHVGALALLLCFGLLQAGTGDYTFANMRIQHLDGLAASAAFVLALVGFGAKAGIFPLHVWLPDAHPAAPSPVSALLSGFVLKVGLYGILRTVLDLLHVQVAWWGVLMLALGLFGALLGAVFSTIQTDMKRLLAYSSIDNVGLMCVSLGLTILFLGYRLPSLAALSLTALLYQIVAHACFKSLLFLGTGAVLHATGERNLGRLGGLIRFMPWTAWAMLVGVAASAGLPPSSGFVSEWLLVQSFLFTPGLPDSVLGMTVPLVAALVALTAALAGYAMVKFFGIVFLGRPREAKLERARDASPWERIAFGWFAAASVLLGLAPVQYVKVLDALTRALVGAGIAGTNHGWLLFAPVSTARASYMPALFMLFFVACCALAWLLVRRFYHGRLRRAAPWSCGNPFVTARMQDTAEGFGQPIREIFTPFFRIERQLPSPFDRQPAYRMSVADRTWHLLYEPIAALANRVAALVGRLQTGRIAIYLTYSFIVLIVLLTVVRRW

SEQ ID NO: 3367 - DNA, 2247 bp, Methylococcus capsulatus str. Bath
  CDS (1)..(2247): transl_table=11
gtggttcataacaacccaggccaggccggcaggggtggaaaatcgtccatcgtttcaggcaaacggcttattggcactaaatttgcatgccctggagtatccctctcgccttccccaggttcctccatgacattacttctggcctatgcctccgtggcggccgcgctatcttcgggtctgctggcgctgctgggggagcaccgcgccgcctggacgggaccggcgctgcaggtcgccaagctggtccgcatccccgttcccctgcgcccgaagccggcagtcggccatcatcggcgcttgccgcacgcctggcggcgcatggtgttcgctctcctgacggcgtccggcgtgtcgtccctgggggcgggcctcctgcagctccatgccgatgcggcggtttccggccaactgcctttcggtctgccctggctgcattggcatgtgcggctcgataccctgtcggccttctttctcgtggtgctcggcctgggcgtcatcgccgcgggcgtctacggtccgggctacacccgccagttcgccggccagtactcgttcggggcgctcggtctcttcaccggctcgttcgtggccggcatggagggggtcctgatcgcggacgatgcctatctcttcgtgatcgcatgggaggcgatgacggtatcgagctatttcctggtggtttaccagcacgagcatgcctcgcaccggcgggcggctttcctctacctgctgatgggcgaggtaggcgccatcgccatcatcctcgcgttcggcatcctggccgcggcttcacacagcttcgccttcgacgcctggcgggacgcacacgtcacgccggcctggggaaccgccgccttcctgctggccctggccgggttcgggatgaaggcgggtctggtgccgcttcacgcctggctgccggaagcccatcccgccgcgccggcccacgtttccggcctgatgagcggggtgatgctgaagatcgcggtctacggactgctgcgtttcgcgttcgacctgctgggcgacgtgcagtggtattggggcgcgatcgtgctgggcctcggaaccggctcggcggcgctcggcattctgtacgcggtggtgcagagcgacctgaagcgcctcctggcctactcttcgatcgagaacatggggatcgtgttcatggggttgggcctctgcatggtcttcatcggcaagggacacgtgcagctcgggctgatcggcctggtcgccgccctgtatcacgtgctcaaccactcattgttcaagaacctgctgttcctggcggcgggctcggtggtccaccagacccatcggcacgatctggaacacatggggggtttgatcaagcgcatgccggtcactgccggactgttcctggcgggctcggtcgcgatcgccggcctgccgccgctgaacggcttcgtctcggagtggctgacctttcaggcggccctgcaggcggcgtcggtcatcgacaacggcatcctgcgcagcatggtctcggtggcggcggcgatcctggcgttcaccgccgccgtggccgcggcctgtttcgtcaagctctacggcgtggccttcctgggccagccgcgcgagcggcgctcggcccatgcccacgaggtgtcgcattccggcatgctgtgggcgccggccatgctggccggcctgtgcctgctgctcggggtgcttccgacctgggtgctcgacgccatgcgccccatcacccgccaactgctcggggaaaccctgaccagcgcttcggcccgaggctggctgtggctgacgccgggcggcgtcagcacggcttcgtactcggccccgctggtgctgctggcgatggcgctggcctggtggctcctgcgtcggctcgagcgtcgcgggccggcggccgacgtccggcgcgcgccggcctgggattgcggcttcgggggactgagcccccgcatgcagtacaccgccgccgccttcgctcagccggtcagacgcatcttcgcaccggtgtgggagaccgtcgaaacctcgaccccggagacggcggccgccaatcccttgcaggtcaccgccctgagctaccggctggagatcggggaccgctcctggcgctggctgtacctgccgctgacccgtgtggtcgaggatttggcccgccagacggcgcggatccagaccgggcaggtgcggatctacatcgcgtattccttcatgacgctgatcgttctcctgggagtcgtaagctga

SEQ ID NO: 3368 - protein, 748 aa, Methylococcus capsulatus str. Bath
MVHNNPGQAGRGGKSSIVSGKRLIGTKFACPGVSLSPSPGSSMTLLLAYASVAAALSSGLLALLGEHRAAWTGPALQVAKLVRIPVPLRPKPAVGHHRRLPHAWRRMVFALLTASGVSSLGAGLLQLHADAAVSGQLPFGLPWLHWHVRLDTLSAFFLVVLGLGVIAAGVYGPGYTRQFAGQYSFGALGLFTGSFVAGMEGVLIADDAYLFVIAWEAMTVSSYFLVVYQHEHASHRRAAFLYLLMGEVGAIAIILAFGILAAASHSFAFDAWRDAHVTPAWGTAAFLLALAGFGMKAGLVPLHAWLPEAHPAAPAHVSGLMSGVMLKIAVYGLLRFAFDLLGDVQWYWGAIVLGLGTGSAALGILYAVVQSDLKRLLAYSSIENMGIVFMGLGLCMVFIGKGHVQLGLIGLVAALYHVLNHSLFKNLLFLAAGSVVHQTHRHDLEHMGGLIKRMPVTAGLFLAGSVAIAGLPPLNGFVSEWLTFQAALQAASVIDNGILRSMVSVAAAILAFTAAVAAACFVKLYGVAFLGQPRERRSAHAHEVSHSGMLWAPAMLAGLCLLLGVLPTWVLDAMRPITRQLLGETLTSASARGWLWLTPGGVSTASYSAPLVLLAMALAWWLLRRLERRGPAADVRRAPAWDCGFGGLSPRMQYTAAAFAQPVRRIFAPVWETVETSTPETAAANPLQVTALSYRLEIGDRSWRWLYLPLTRVVEDLARQTARIQTGQVRIYIAYSFMTLIVLLGVVS

SEQ ID NO: 3369 - DNA, 2001 bp, Azoarcus sp. EbN1
  CDS (1)..(2001): transl_table=11
gtgctgcttctcgactggatcctgatcgtcatcgccggctggctcgcgctcgggctcgccggaatcgcggcgctgcgcaacaccgcgttcgtcgcccgcacgctgttcccggcgggcgccgcgctcgggctcgcactggccggattcgcgctcgcggcgatgttcgacacgccgcagaccgcgatcctcgcgctcggcctgccggatctgccgttccacctgcggctcgacggcctgtcggcgttcttcctgttcgtgatcggcgcgaccggcgtcggcatctcgatcttcgccgcgggctatttccgcctcggcgaaggcacgccgccgggcctgatgtgcctcgaatatcacctcttcctcgccagcatggcgatggtcgtgctcgccgacgacgcctatgcgttcatggtgatgtgggagacgatggcgctgtcgtcgttcttcctcgtcacggcgaaccaccgcgtgccggcgatccgcgcagcgggcttcctgtacctgctcgtcgcgcacgtcggcgcgatcgcgatcctgctgtgcttcggcgtgctgcaggcgaacaccggcgactacacgttcgccaacatgcgcgcgcaatcactgccgccgctgtgggcctcggccgcattcctgctcgcgacggtcggtttcggcgcgaaagcaggcatcctgccgctgcacgtgtggctgcccgaagcgcatccggctgcgccgtcgccggtgtcggcgctgatgagcggcgtgatgctgaagaccgcgatctacggcctgctgcgcgtgagcttcgatcttctcggcgcgcagcagtggtggtggggcgtgctgctgctcgcagtgggactggcgacggcgctgtatggcgtcgtgttcagcgcggtgcagaccgacatgaagcgcctgctcgcctattcgtcgatcgagaacatcgggctcctcttcgtcggcctcggcctcggcgtgctgttcaatgcgtacgggatgaccgcgctgtccgcgctggcgctgaccgcagcgctgtaccacgtcatcggccacgcgtttttcaagagcctgctgttcctcgcgacgggctcggtgctgcactcgaccggcgagcgcagcctcggcaagctcggtgggctgatgcgacgcatgccgtgggtcgcgtggctgtcgctcgtcggcgtgctcgcgagctcggggctgccgccgttttccggtttcgtctccgaatggctgctgctgcagagcttcctgttcacgaccgacctgccggactccttcctcaacatgctggtgccggtgctcgccgcaggcatcgcgctggtcgcggcgctcgccggctacacgatggtgaagttcttcggcgtgatctttctcggccagccgcgcgaaccgaagctcgccgaagcccacccggcatcgccgctcgaacgcgccggccttgtatggctcggcgccggctgcgtgctgctcggcctgttcccggtgccgatcatcggcatcatcgaccgcgtcacgcagctcctcgtcggcggcggcatcggcgccacggtgcgggcgaacggctggctgctgctcgcgccgagctcgctcgagcgcgcgagctacaacccgctggtattcctcgttgtcgtcggcctctcggtcctgctcgcggccgtgctcgtgcgccgcttctaccacggccggctgcgccgcgcgccggcgtgggactgcggctatccggcgcagaccgcacgcatgcaggacactgccgagggcttcggccagccgatccgccagatcttcgagccggtgttccgcatgcgacgcgagctgccggcgcccttcgacgcgcggccggtgtatcgggtgacgatcgaggaccatttctggcactggctgtacctccctctcgcgcgcctcacggagcgcgtcgcacgcgtggtcgggcggctgcagcgggggcgcatcgcgatctacctgctgtacagcttcgtcacgctgatcgtgctgctgctggtggcgaaagcatga

SEQ ID NO: 3370 - protein, 666 aa, Azoarcus sp. EbN1
MLLLDWILIVIAGWLALGLAGIAALRNTAFVARTLFPAGAALGLALAGFALAAMFDTPQTAILALGLPDLPFHLRLDGLSAFFLFVIGATGVGISIFAAGYFRLGEGTPPGLMCLEYHLFLASMAMVVLADDAYAFMVMWETMALSSFFLVTANHRVPAIRAAGFLYLLVAHVGAIAILLCFGVLQANTGDYTFANMRAQSLPPLWASAAFLLATVGFGAKAGILPLHVWLPEAHPAAPSPVSALMSGVMLKTAIYGLLRVSFDLLGAQQWWWGVLLLAVGLATALYGVVFSAVQTDMKRLLAYSSIENIGLLFVGLGLGVLFNAYGMTALSALALTAALYHVIGHAFFKSLLFLATGSVLHSTGERSLGKLGGLMRRMPWVAWLSLVGVLASSGLPPFSGFVSEWLLLQSFLFTTDLPDSFLNMLVPVLAAGIALVAALAGYTMVKFFGVIFLGQPREPKLAEAHPASPLERAGLVWLGAGCVLLGLFPVPIIGIIDRVTQLLVGGGIGATVRANGWLLLAPSSLERASYNPLVFLVVVGLSVLLAAVLVRRFYHGRLRRAPAWDCGYPAQTARMQDTAEGFGQPIRQIFEPVFRMRRELPAPFDARPVYRVTIEDHFWHWLYLPLARLTERVARVVGRLQRGRIAIYLLYSFVTLIVLLLVAKA

SEQ ID NO: 3371 - DNA, 1935 bp, Dehalococcoides sp. CBDB1
  CDS (1)..(1935): transl_table=11
atgatagcgggtttattgcttggcggagggtttttactactggccgctgccctgacgggcattgtgtttaatcatggcagtaaaaaagtctggcaaggggtactatggctggttatagcggcggcgctatgcttgcttattgggtctttgcagatatttttcggtaatccgctggatatttccctctggagcattgcatccgggctggacatagcctttcatcttgaccgtctggcatcattctttgtcataataatcagccttatttctctctgcgtagccgtgtattcgctgggctacaataaccatatatcttcaaacgaacgagccaatctgctctcagcctttatggcggtcttcatactctccatgataggcgtggtggcctcggccaacacctttagcctgatatttttctgggagattatggcactaagctccttctttttgatgatgaatgactatcaggagtcttttacccagcgggcgggcatttattatttcgtgcttacccagcttagtacggttttcttgatgctgatggccgtagttatgtatattcagaacggcagtttcgcactcagcctgagcggtgcatcctccgtcatccagagtctggtttttgttctggcatttctggcattcggaataaaggccggtatcataccccttcacaagtggctgccttatgcccactctgccagcccttcaaatgtctctgccctgatgtccggggtaatgctgaaagtggccatttacggcttggtacgcttccttatggatgtgcttagcccggaaatgtggtggggtgtgggaatactcctgttcggggcaattagcgccctgttgggggttatatatgctcttaaagagcatgatttaaagaccctgctggcctttcatagtattgaaaatatcggcattatcctgatgggtattggtctgtatgttatttttggcttgtatggtctggatacgctggctatgctggcacttggttcagctttgtttcacagtctgaatcatgccatttttaaaagcctgctttttatgaccgccggttcggtggtaattgccgtgggtgaccgcaatattgaaaaaatgggcgggttgattaaactaatgccctacacttctgttatctttctggtgggggcagtttccatatcggctttgcctcccttcaatggttttatgagtgagctgatgctctttgagtcttttttccagtccttctctctggctgaaagcagtataaagatacttcttttcagtgtactggccatactggctcttacttcagctctggcggccgcttgctttgtaaaggccttcgggacggtctttctggctatgcctcgcagtcaggaagcagcctctgccaaagaagtttcaaaaagtatgattatagggccggccatactggcagttgcctgtctggtattgggtctgtttgctgtccagatattttcggtagccggatatagttttgacctgccggatatgtcactggttggcttggtactggttatcttcggggttttggttttcggcatggtcaggctgttttcgccccgaaaaagccgccggagcgagacctgggcttgcggctatgttcgacctactccccgctttgagtataccgcctccggttttgccgagccccttttccagatattccggctgatataccgcacccgccattacaatgaacgcagttacgaagataaccagcaggctattttcaaacagggcaaatcagctattcacaccataaagttttttgatgagtatatttatctgccggttgccggtttgttcgggcgtatttcccgtttcatatcccgcctgcaggatgttgatttgggcagccatatcctgtacagctttataactgttttgctggttatactggcggcaaggtggctgtggtga

SEQ ID NO: 3372 - protein, 644 aa, Dehalococcoides sp. CBDB1
MIAGLLLGGGFLLLAAALTGIVFNHGSKKVWQGVLWLVIAAALCLLIGSLQIFFGNPLDISLWSIASGLDIAFHLDRLASFFVIIISLISLCVAVYSLGYNNHISSNERANLLSAFMAVFILSMIGVVASANTFSLIFFWEIMALSSFFLMMNDYQESFTQRAGIYYFVLTQLSTVFLMLMAVVMYIQNGSFALSLSGASSVIQSLVFVLAFLAFGIKAGIIPLHKWLPYAHSASPSNVSALMSGVMLKVAIYGLVRFLMDVLSPEMWWGVGILLFGAISALLGVIYALKEHDLKTLLAFHSIENIGIILMGIGLYVIFGLYGLDTLAMLALGSALFHSLNHAIFKSLLFMTAGSVVIAVGDRNIEKMGGLIKLMPYTSVIFLVGAVSISALPPFNGFMSELMLFESFFQSFSLAESSIKILLFSVLAILALTSALAAACFVKAFGTVFLAMPRSQEAASAKEVSKSMIIGPAILAVACLVLGLFAVQIFSVAGYSFDLPDMSLVGLVLVIFGVLVFGMVRLFSPRKSRRSETWACGYVRPTPRFEYTASGFAEPLFQIFRLIYRTRHYNERSYEDNQQAIFKQGKSAIHTIKFFDEYIYLPVAGLFGRISRFISRLQDVDLGSHILYSFITVLLVILAARWLW

SEQ ID NO: 3373 - DNA, 2010 bp, Geobacter metallireducens GS-15
  CDS (1)..(2010): transl_table=11
atggaagcatcaacggcagggcctgacaatcctgtcagcctggtcatagccggcgcgctcctgatcggcgcgtcgggcattccgggcctttttctccccaagaagctggactgggggcagaaatgcgcctctctcaccgtcgttctcggctccatcctgggaatcatcggtgccctggcaacgctctttactgaacggaccgtctcctacaccctcgtaagctcgcttcccttcggcccccttgaggccggcatcgacccgctctccgccttcttcctcctccccgtcttcatcgtcagcgcctgctgcgccgtgtacggcatcggctactggcccgccagccaccacccccgcacggcaccgcggctcacctttttcttcggcgtcctcgccgcttccctggcattggtccccctggcccggaacggagtcctttttctcatcttctgggagatcatggccctttccgcctactttgccctcgccaccgacgatctggagcaggaggttcgagacgcatccctcatctatctcgtggcaacccacgcaagcaccctcaccctcttcgcctgcttctccctgctaaaagcgactgccggttccttttcatttcctgcgacaacggcgctggacggaacaactccccttggggccgccattttcgtgaccgctctcctgggctttggcctcaaggcaggggtgatgccgcttcacgtctggctcccgggcgcccatgccagcgcaccgagccacgtgtcggccctcatgtcgggagtcctcatcaagatgggaatctacggcatggtccgcatcctctccttcttcggagtggtcccgccctggtgggggatggttcttcttatggcgggaattgtgtcgggaatcctcggggttgcctttgccgtgggacagcacgacctgaagcggctcctggcctaccacagcatcgaaaacatcggcatcatcgtcatggggctcggcgttgccctcatcggcaggggagcgggactgccgctcctggtggtcctcgggctcgggggggcgcttctccatatcctgaatcacgcccttttcaagtccctcctcttcctcggggccggtgcggtaattcacgaggctgggacccgggagatcgacagcctcggcgggctgggccgacggatgccctggaccgcggccctctttctcaccggcgccgtggccatttgcggactcccccccctgaacggctttgtgagtgagcttctcgtctatctcggctttttctccggcctcgtgcaggaaaagggggccgcggcccccctgctggggctggcggcgccggccctggccatggtgggagggatggcggtcctctgcttcgtgaaggtattcggcacggtcttcctggggttaccccggtcgtccgacgcggccgggtgccacgaaccggggtgggccatgcggggccccatgatgctccttgccatactctgcgcagccatcggcctcctccccgtggcactcccacgctttctggagccggccctctttgcctggagcccccagctcccctttgccggcgtccggctggcggatgcggcgccctttggctggattaccctcatggggctcatcctccttctggcgattctcggcatcggcgcctggctctggaagcgggtaacggatcaacctcgggggagagtcggcacctggggctgcggctttgcccgtcccactgtccggatgcagtacaccgcctcttcctttgcagagatgttcgtgaacctattcgccgcggtgctccgcccccgggtccacccgcccaaggttcagggcctcttcccggggaaaagcgccttttcgagccatgttcccgaagcggtactggaactggtcatcacgccgctcctctcggccatggaccggaggttctctctggcccgcaagctccagcacggccggctccacctttatatcctctacatcttcgtgacgctggcgctcttgctggcgtgggcctattaa

SEQ ID NO: 3374 - protein, 669 aa, Geobacter metallireducens GS-15
MEASTAGPDNPVSLVIAGALLIGASGIPGLFLPKKLDWGQKCASLTVVLGSILGIIGALATLFTERTVSYTLVSSLPFGPLEAGIDPLSAFFLLPVFIVSACCAVYGIGYWPASHHPRTAPRLTFFFGVLAASLALVPLARNGVLFLIFWEIMALSAYFALATDDLEQEVRDASLIYLVATHASTLTLFACFSLLKATAGSFSFPATTALDGTTPLGAAIFVTALLGFGLKAGVMPLHVWLPGAHASAPSHVSALMSGVLIKMGIYGMVRILSFFGVVPPWWGMVLLMAGIVSGILGVAFAVGQHDLKRLLAYHSIENIGIIVMGLGVALIGRGAGLPLLVVLGLGGALLHILNHALFKSLLFLGAGAVIHEAGTREIDSLGGLGRRMPWTAALFLTGAVAICGLPPLNGFVSELLVYLGFFSGLVQEKGAAAPLLGLAAPALAMVGGMAVLCFVKVFGTVFLGLPRSSDAAGCHEPGWAMRGPMMLLAILCAAIGLLPVALPRFLEPALFAWSPQLPFAGVRLADAAPFGWITLMGLILLLAILGIGAWLWKRVTDQPRGRVGTWGCGFARPTVRMQYTASSFAEMFVNLFAAVLRPRVHPPKVQGLFPGKSAFSSHVPEAVLELVITPLLSAMDRRFSLARKLQHGRLHLYILYIFVTLALLLAWAY

SEQ ID NO: 3375 - DNA, 1983 bp, Geobacter metallireducens GS-15
  CDS (1)..(1983): transl_table=11
atgttcctccttgatccaacgttatttctactggttgcggcgtcctgtgttgctctctcgggtattccggggctgttggcgcgccgctctgcctgggggcaacggatcgcggccatacttgtaatcgctgcgtcgtgccttggcgaggtggctgtcatctcgctcctgtccggcattcccgcttcatcataccagattgactggccccttccttttggaccggcgctcttttccgccgatcatctttccacaatattcctctttccgctcttcctggttaccggtgctgtcgctctgtattccgtggcctactggccggccagggaaaaggcgagcgccggaaggctcaccttctttctcggactctttgccgccgcgatgatcatcgtggtcatggcccgtaacggggtgctgtttctcatggcctgggaggtcatggcgctctctgcctatttcctgctgaccaccgagcagcagagctccgatgttcagcgagtcggaacggtctaccttcttgccacccacaccggcaccatggcgctgtttgtcatgttttccctgctgcgcgggactgtcggcacgttcgcgtttccagccacgcatgccctttccttgaccgtgcctgttgcgacaacggtcatcataaccgccctgatcgggtttggcggcaaggcgggcctcatgcccctgcatttctggcttcccggcgcccatgccaatgcccccagtcacgtttcggcgatgatgtcggggttgatgctcaagatgggtgtgtacggcatcctgcggaccttgtcgtttttcgatcagctgccggtatggctcggctggctcatactcctgctcggtgcctggtccgccattaacgggattgccctggcagcaggacagcgcgacctgaaacgcctgctggcctgcagcagtatcgagaatatcggcattgtctttatcggcatcggcctggctctggtcggcctgaaccagcacgcgccatatctggtggtgtgcggccttgcgggcgcctttatccatatcgtcaaccatggcctgttcaagtcgctcctcttcttgggaagcggggtgctgatacatggcaccggaacccgggagatcgaccggatgggggggcttgcccggcgcatgccggtaacatcgccgctctttctggtcgggtcgctcgccatatgcggtttgccgccgctcaatggatttgtcggcgaattttttctctatatcggtgccatcaccgatggcatcgtcgctccgttgccgctggcggccctggttgcgcctgtcctggcgctggttggcgggctggcggtcctgaccttcgtcaagcttttcgggatcgtctttctcggctctccccgctcggtcgaatctgcccatggccatgaagcatcggcggtgatgaccggaccaatgatgttgctggccggcggatgcctggttgcaggtatggcaccggtgctgctggtgcggctggttaccccggttgtcggcttctatgccgggctcaccccccaggatagtgcccaggttatggggcagatcccccttgtggcgctcacctgcgccaacgtgctccttcttgtggtcattctggctgtcggcgcggcataccgccggcggctgcgtacatctccccgttcccagggaagcacgtgggggtgcggctatctcgagcctacaccccggatgcaatataccggcacatcgttcagcgagatggcggtaagcctgctggggagtatcgttgcccccaaccgtcgcaggcccacgcttgatacgcccattcctcccgccgacgcccgtttcagctatgagacaaccgaaaccgtgctggaccggattctgattcccgtcttccgggtcgtcggcacggcattttcctatctcaggaaagtgcagcacggccagcttcatatttacgtgttgtatatattcgccacgctctgcgtcctgatgatctggaagcactga

SEQ ID NO: 3376 - protein, 660 aa, Geobacter metallireducens GS-15
MFLLDPTLFLLVAASCVALSGIPGLLARRSAWGQRIAAILVIAASCLGEVAVISLLSGIPASSYQIDWPLPFGPALFSADHLSTIFLFPLFLVTGAVALYSVAYWPAREKASAGRLTFFLGLFAAAMIIVVMARNGVLFLMAWEVMALSAYFLLTTEQQSSDVQRVGTVYLLATHTGTMALFVMFSLLRGTVGTFAFPATHALSLTVPVATTVIITALIGFGGKAGLMPLHFWLPGAHANAPSHVSAMMSGLMLKMGVYGILRTLSFFDQLPVWLGWLILLLGAWSAINGIALAAGQRDLKRLLACSSIENIGIVFIGIGLALVGLNQHAPYLVVCGLAGAFIHIVNHGLFKSLLFLGSGVLIHGTGTREIDRMGGLARRMPVTSPLFLVGSLAICGLPPLNGFVGEFFLYIGAITDGIVAPLPLAALVAPVLALVGGLAVLTFVKLFGIVFLGSPRSVESAHGHEASAVMTGPMMLLAGGCLVAGMAPVLLVRLVTPVVGFYAGLTPQDSAQVMGQIPLVALTCANVLLLVVILAVGAAYRRRLRTSPRSQGSTWGCGYLEPTPRMQYTGTSFSEMAVSLLGSIVAPNRRRPTLDTPIPPADARFSYETTETVLDRILIPVFRVVGTAFSYLRKVQHGQLHIYVLYIFATLCVLMIWKH

SEQ ID NO: 3377 - DNA, 2022 bp, Moorella thermoacetica ATCC 39073
  CDS (1)..(2022): transl_table=11
atgcttacgcaacagcttctgctactctctgtgctcttgtacgttgccggagcccttgcctccctggctcttaatcgggccggtaaaattgccaactatgcttcaggtataagtgcccttgcagcagcaggtaccgggatggcctcggccgtccaggtacttgccggcggagcagcttttacctgggaagcggcggggtttataccctttgccaagtttattataaaggttgatcccctctctgcctttatgttactggttatttcccttctgacaggggctacggctctatattccctctcgtacctggatgagtataccggtaaaggcgcaggggttatgggttttttcaataacctctttattgcctctatggtattagtggtcattagtgggaatgctttttattttctaattttctgggaactgatgacgctggcctcttatttcctggttagctttgatcaggaagacagtgaagctgtcaaggccgggttcatctatctttttatggcccacgcgggaacggctttgattatgctggcttttatcttattctttgtctatacaggtaccttcgatttcgcttccttccgtggggcgaacctcccggtgtttacaaagagcttgatcttcctgctagctttcctgggattcggggccaaggccggtattattccgctccatatctggctgccgaaggctcacccggctgctccgtccaacgcttccgctctcatgtcgggtgtcatgattaaaaccgctatctatggtattctcagggtcagtgtcgatttcctgggggcttctgtttggtggtggggatttattgtcctggcctccggagcgatttcagcagttctgggtgttctctacgccctgggggagcacgatataaagcggctgctggcctatcacagtgttgaaaacgttgggattatattgatgggagccggcgccggcatgatcggcatcgctgccggccagcctgttttaggagtactcgggatcctggcaggcctctaccacttgttaaaccatgccgtctttaaaggcttgctctttcttggggcaggttcggtaatatatcgaacccatacgaaacatatggaggaacttggcggactggccaggcgcatgccctggacggcactcgcttttctggttggtgctgtagccatctcagccatccctcccctcaacggatttgtcagtgagtggtttacctaccagtcgttgtttattgcgagcaccagcagcatcctggctgtgagagtgtttgcgcccctgtttgttgttatgttagccctgacgggcgcgctggcggcgatgtgttttgtgaaggcatatggggttacttttggcggtccctgtcgcagcgggcatgcccgtgaggccagggaggttcccataccgatgcttgccgggatggcaattctggcaattagctgcattatcctcggtgtgggtgcaccggttgttgctccttatattggaaaggtggcttcggcattattagccattactgcggtccaggtaagcgacggtttgctggtatttcctgcaaacagcatgcaggccatgctctccacaccgctcatcgccattctcctcgttggtcttgctacgttacccttgttaattatcgggatccaaggtggtttccaggccggacggcgtatcgatgctgagccgtgggcatgtggatacaagtattcaccgcggatggcctataccgcaactgcctttgctcagccgttgcgcgtactttttcggccggtttattcgctcaggaccaccctcgatggacctggctataccgttgcatcgtatttcaaaggagcagtggtctacatcgccagtgtagaatcgttgtgggaacgttacatttacgctcctctggcacggggcacggtatatctgggtaaaaaattgcaggccttccagatagggaacgtcaggctatattgtctctatataatcataaccctcgtagtcctgttattagcgacggttagatag

SEQ ID NO: 3378 - protein, 673 aa, Moorella thermoacetica ATCC 39073
MLTQQLLLLSVLLYVAGALASLALNRAGKIANYASGISALAAAGTGMASAVQVLAGGAAFTWEAAGFIPFAKFIIKVDPLSAFMLLVISLLTGATALYSLSYLDEYTGKGAGVMGFFNNLFIASMVLVVISGNAFYFLIFWELMTLASYFLVSFDQEDSEAVKAGFIYLFMAHAGTALIMLAFILFFVYTGTFDFASFRGANLPVFTKSLIFLLAFLGFGAKAGIIPLHIWLPKAHPAAPSNASALMSGVMIKTAIYGILRVSVDFLGASVWWWGFIVLASGAISAVLGVLYALGEHDIKRLLAYHSVENVGIILMGAGAGMIGIAAGQPVLGVLGILAGLYHLLNHAVFKGLLFLGAGSVIYRTHTKHMEELGGLARRMPWTALAFLVGAVAISAIPPLNGFVSEWFTYQSLFIASTSSILAVRVFAPLFVVMLALTGALAAMCFVKAYGVTFGGPCRSGHAREAREVPIPMLAGMAILAISCIILGVGAPVVAPYIGKVASALLAITAVQVSDGLLVFPANSMQAMLSTPLIAILLVGLATLPLLIIGIQGGFQAGRRIDAEPWACGYKYSPRMAYTATAFAQPLRVLFRPVYSLRTTLDGPGYTVASYFKGAVVYIASVESLWERYIYAPLARGTVYLGKKLQAFQIGNVRLYCLYIIITLVVLLLATVR

SEQ ID NO: 3379 - DNA, 2007 bp, Burkholderia thailandensis E264
  CDS (1)..(2007): transl_table=11
atggaacagggcctgcttctccgatgcgtgctgttcgtcgcgctcgcgtggctcgtgctcggctgcgccggactcgcgaacatgcgccgcaccggtgtgatcgcacacggcctgtttccgctcggcgcgctggccgggctcgcactcgcggcgctcggcctggccggcgtgttcgccgcgccgtcgaccgccatgctgccgctcggcctgcccgatctgccgttccatctgcgcctcgacgcgctgtccgcctacttcctgttcgtgctcggcgtggtgaccgcgggcgtcggcgcgttttcgtccggctatttccgcaagggcgagggcaccgcgcccggcctcatttgcttcgaataccacgtgtgcatcgcgagcatggcgctcttgctcgtcgcggacgacgcatactgcttcatggtcgcgtgggagacgctgacgctgtcggcgacctttctcgtgatgacgaaccaccggatcgccgagatccgccgcgccgcgttcctctatttcctgatctcgcatgtcggcgcgctcgcgctgctgctgtgcttcggcctgctgcaggcgggcacgggcgattacacgttcgcgaacatgcgcgtgcagcatctcgacggactggccgcgtcggccgcgttcgtgctcgcgctcgtcggcttcggcgcgaaggcgggcattttcccgctgcacgtgtggctgccggacgcgcatccggccgcgccgtcacccgtgtccgcgctgctgagcggcttcgtgctgaaggtcggcctgtacggcatcctgcgcacggtgctcgacctgctgcacgtgcaggtggcgtggtggggcgtgctcatgctcgcgctcggcctgttcagcgcgctgctcggcgtggtgttcagcacgatccagaccgacatgaagcggctgctcgcctattcgtcgatcgacaatgtcggcctgatgtgcgtgagcctcgggctcacgatcctgttcctcggctaccggctacccgcgctcgccgcgctgtcgctgacggcgctgctgtatcagatcgtcgcgcacgcgtgcttcaagagcctgctgttcctcggcacgggcgcggtgctgcacgcgacgggcgagcgcaatctcggccggctcggcggcctgatccacttcatgccgtggaccgcgtgggcgatgctcgtcgccgtcgccgcgagcgccgggctgccgccgtcgagcggcttcgtgtccgagtggctgctcgttcagagcttcctgttcacgcctgggctgccggattcggtgctcgggatgacggtgccgctcgtcgcggcgctcgtcgcgctgacggccgcgctcgccggctacgcgatggtcaagttcttcggcatcgtgttcctcggccagccgcgcgaggcgaagctcgagcgcgcgcgcgacgcgagcccgtgggagcgcgtcgcgttcggctggttcgcggcggcgagcgtgctgcttggcctcgcgcccgtccagtacgtgaaggtgctcgatgcggtcacgcgcacgctgatcggcgcgggcatcggcggcacgaaccacgggtggctgctgttcgcgcccgtgtccaccgcgcgcgcgagctacatgccggcgctcttcatgctgttcttcgtcgcgtgctgtgcgctcgcgtggctgctcgtgcggcgcttctaccacggacggctgcggcgctcggcgccgtggtcgtgcggcaatccgttcgtgaccgcgcggatgcaggacacggccgaaggcttcggccagccgatccgcgagatcttcacgccgtttttccggatcgatcggcagttgccgtcgccgtacgaccggcagccggcataccggatgagcgtcgccgaccgcacctggcatctgctgtacgagccgatcgccgcgctcgtgaaccgcgtcgccgcgctcgtcgggctgttgcagacgggccgcatcgcgatctatctgacgtacagcttcttcgtgctgatcgtcctgctgacggtggtgagacgatggtga

SEQ ID NO: 3380 - protein, 668 aa, Burkholderia thailandensis E264
MEQGLLLRCVLFVALAWLVLGCAGLANMRRTGVIAHGLFPLGALAGLALAALGLAGVFAAPSTAMLPLGLPDLPFHLRLDALSAYFLFVLGVVTAGVGAFSSGYFRKGEGTAPGLICFEYHVCIASMALLLVADDAYCFMVAWETLTLSATFLVMTNHRIAEIRRAAFLYFLISHVGALALLLCFGLLQAGTGDYTFANMRVQHLDGLAASAAFVLALVGFGAKAGIFPLHVWLPDAHPAAPSPVSALLSGFVLKVGLYGILRTVLDLLHVQVAWWGVLMLALGLFSALLGVVFSTIQTDMKRLLAYSSIDNVGLMCVSLGLTILFLGYRLPALAALSLTALLYQIVAHACFKSLLFLGTGAVLHATGERNLGRLGGLIHFMPWTAWAMLVAVAASAGLPPSSGFVSEWLLVQSFLFTPGLPDSVLGMTVPLVAALVALTAALAGYAMVKFFGIVFLGQPREAKLERARDASPWERVAFGWFAAASVLLGLAPVQYVKVLDAVTRTLIGAGIGGTNHGWLLFAPVSTARASYMPALFMLFFVACCALAWLLVRRFYHGRLRRSAPWSCGNPFVTARMQDTAEGFGQPIREIFTPFFRIDRQLPSPYDRQPAYRMSVADRTWHLLYEPIAALVNRVAALVGLLQTGRIAIYLTYSFFVLIVLLTVVRRW

SEQ ID NO: 3381 - DNA, 2010 bp, Burkholderia xenovorans LB400
  CDS (1)..(2010): transl_table=11
atggaacacctgctggtcatccactacgtactgctggtcatcgtgggctggctggccgtcagcgttctggggctcgccggcctgcgacggacgcgcgtggtagcgcacgggctgtttccggtcggcgcagtgtttggcctggctctgttcgggctgggcctgaccggcgttttcgccggtccgcaggaaatcatcctgccgctcgggttgcccgagctcccttttcatctccggctggatggcctgtcggcgtatttcctcgcggtgctcggcatggtgagcacgggcgtgagcgcgttctccgccggttatttccgcaagggtgaaggcacgccgcccggcttactctgcttcgaataccacgtgtgcctcgcgagcatggcgacgctgttactggcagacgacgcgtacagcttcatggtcgcgtgggaaacgatgaccgtgtcggcagttttccttgtcatgaccaatcaccgcatcgcggagatccgtcgagccgcttacctctacttcctgatctcccatgtcggcgcgctggcgctcctgctgtgtttcggcctgctgcaagccaataccggcgactatacgttcgccaacatgcgccaacagcatctcgacgtattctgggcctccgcggcattcctgctggcgctattcggcttcggcgcaaaggcgggtgtgttccccctgcatgtgtggctacccgaggctcatccggccgcgccgtcaccggtgtccgccctcatgagcggctttatcctgaaggcgggactctacggcattctgcgcacggtattcgacctgctgcatgtccagctgtggtggtggggagtcttcgtgctggcgctcggactcttcaccgccctgttcggcgtcgtgttcagcgcgatccagacagacatgaagcggctgctcgcctattcgtcgatcgataacatcggcctgatgttcgtcagcatgggactggcgatcctgtttcgcgcgtacggcatgaacacgctcgccgcgctctcgttgacggcgctgttctaccagatcgccagccatgcgacgttcaaaagcctgctgtttctcggcacgggttccgtgctgcatgccaccggcgaacgcaatctcggccggctgggcggattgatccgcgtgatgccgtggaccgcatgggcggcgctcgtgggcgcgtttgcgagcgccgggctgccgccgttgagcggcttcgtctccgaatggctgttgctgcagagctttctgttcacgccgggcttgccgaacccgttcctgaacatggtggtgccgctggtcgcggcgctgatcgcgctggtagccgcgctagcgggctatacgatggtgaagttcttcggcattgtctttctgggtcaaccgagagagacgaagctggcgcaagcgcgcgacgcgagccgttgggagcgcgtcggcttcgtctggctggcggcgatatgcgtgttgctcgggctgctgccggtgcagttcgtggccgtgctggaccgcgtcacccgtatgctggtgggaaccggcatcggcgaggccgtggcgcgcaatggctggctgctgctcgcgcccaccagcgtagaccgggccagctatatgccggcggtttttctgctgtttttctgcgcgtgctgcgggctcgcctggctgctggtccgccgcctctaccacgggcgcctgaggcgcgcggcgccgtgggcctgcggctatccgttcgtgaccgcgcgcatgcaggacaccgccgaagggttcgggcaacccatccgcgaaatcttcacgccgctattcaaaatcgagcgccggcttccttcgccgttcgactcacacccggtgtacagcgtcaccgtgacggaccgcgcgtggaccctgatctatgcgccgctggaacggctgatcatgcgcatcgcggcattggccgggcggcttcagaccggccgcattgccatgtacctgatgcatagcttcatcgtgctgatcgtgctgctgatgctggtgagacgatga

SEQ ID NO: 3382 - protein, 669 aa, Burkholderia xenovorans LB400
MEHLLVIHYVLLVIVGWLAVSVLGLAGLRRTRVVAHGLFPVGAVFGLALFGLGLTGVFAGPQEIILPLGLPELPFHLRLDGLSAYFLAVLGMVSTGVSAFSAGYFRKGEGTPPGLLCFEYHVCLASMATLLLADDAYSFMVAWETMTVSAVFLVMTNHRIAEIRRAAYLYFLISHVGALALLLCFGLLQANTGDYTFANMRQQHLDVFWASAAFLLALFGFGAKAGVFPLHVWLPEAHPAAPSPVSALMSGFILKAGLYGILRTVFDLLHVQLWWWGVFVLALGLFTALFGVVFSAIQTDMKRLLAYSSIDNIGLMFVSMGLAILFRAYGMNTLAALSLTALFYQIASHATFKSLLFLGTGSVLHATGERNLGRLGGLIRVMPWTAWAALVGAFASAGLPPLSGFVSEWLLLQSFLFTPGLPNPFLNMVVPLVAALIALVAALAGYTMVKFFGIVFLGQPRETKLAQARDASRWERVGFVWLAAICVLLGLLPVQFVAVLDRVTRMLVGTGIGEAVARNGWLLLAPTSVDRASYMPAVFLLFFCACCGLAWLLVRRLYHGRLRRAAPWACGYPFVTARMQDTAEGFGQPIREIFTPLFKIERRLPSPFDSHPVYSVTVTDRAWTLIYAPLERLIMRIAALAGRLQTGRIAMYLMHSFIVLIVLLMLVRR

SEQ ID NO: 3383 - DNA, 2025 bp, Ralstonia metallidurans CH34
  CDS (1)..(2025): transl_table=11
gtggacggcgtgcctgcggtcggacagtggttgttgctcgactggatgctcgttgtcacggccgcgtggctgatgatcggggcaaccggtgtgctcgcactgcatcgtctggcactggtgtcgcgcctgctcttccctctgggcgctctgctcgggctggtgctcagcgcgctggctcttgcggcggtgggtaacagccccgaagtggcagtgctttccatcgggctgccgcgtctgcctttccatctccggctggatagcctgtccgcctatttcctgatggtaatcggtgccgcagcggccggaatctccgtgttcgcggcgggttacttccgccaaggcgagggcacgccccccggcttgctatgcctggagtatcacctgttcctggccagcatggctggcgttgtgctggccgacgacgcctacgcgttcatggtgatgtgggagaccatggcgttgtcatcgttcttcctggcgaccgccaaccaccgcatcgcggaggttcgcagcgccggctacctgtacatcaccatggcacacatcggggcgatcgcggtcctgttgtgctttggcgtcctgcaggccaataccggcgactacaccttcgcgaacatgcgcgcccaaacgctgacgccgttctgggcgtcggtcgcgttcctgcttgcaatgttcggcttcggcgccaaggccggtctgcttccactgcatgtgtggctgcccgaagcgcacccggctgcgccatcgccggtgtcggcaatgatgagtggcgtcatgctcaacaccgccatttatggcctcttgcgtgtggttctggacctggcacagatacatctgtggtggtggggcgggctactgttggcctccggcctggccaccgcgctgtatggcgtggtgttcgccgcagtgcaaaccgacatgaagcggttgctggcctactcatcgattgagaacatgggcctgctgttcgttgctattggcctcgctttgatcttctcggcctacggcatgaaaccgttggccgctctggcactgaccgcagcgctatatcacgtggccagccatgccttcttcaagagcctgcttttccttggtactggcagcgtgctgcatgctactgccgagcgcagcctcggcaagctgggaggtttgatacgccagatgccgtgggtgggctggctcacgctggtgggcgtgctgaccagcgcgggtctgccaccgcttggtgggttcgtctcggagtggttgctcctgcagagctttctgtttacgaccggattgccggtgccgctcctgaccatgcttatccccgtggtggcggcgctgattgcgctggtagcggccctggccggctacacgatggtgaagttcttcggtgtgatctttctcggccttccgcgcgagcccagactcaacgacgcgcaggacgctggcggctgggagcgcgccggcatgctatggctggcactgggaagcatcgcgcttggactattgccatctcctttcatcggcctgatcgatgcagtgacgcagcaattggtcggcagcggcctcggcgcacgtgtcgcgaccagcggctggctgcttgcgccgatcagtccggagcaggccagctacgggccggtcatcttcctgctaggtatccttgccagtttcgcgcttgcctatcttcttgtgcgcggtctctaccatggcaggctgcgtcgcagcgtggcctgggcctgcggctttccgtggggcaccccgcgcatgcaagataccgccgagggtttcggccagccgattcggcagatcttcgagcccttttttcagattaggcgtgacctgcccaccccgttcgacgaacacccgcaatatcgggtgatagtgtcagatccgttctggcgctggctgtacttgcccgtggtccgcctggtcgcggttatggcacgcgcggtcggtgcaattcagcaggggcgcatttcagcgtatctgctgttcagctttctgacgttgattgccgtgctgctggcggtcatgcggtga

SEQ ID NO: 3384 - protein, 674 aa, Ralstonia metallidurans CH34
MDGVPAVGQWLLLDWMLVVTAAWLMIGATGVLALHRLALVSRLLFPLGALLGLVLSALALAAVGNSPEVAVLSIGLPRLPFHLRLDSLSAYFLMVIGAAAAGISVFAAGYFRQGEGTPPGLLCLEYHLFLASMAGVVLADDAYAFMVMWETMALSSFFLATANHRIAEVRSAGYLYITMAHIGAIAVLLCFGVLQANTGDYTFANMRAQTLTPFWASVAFLLAMFGFGAKAGLLPLHVWLPEAHPAAPSPVSAMMSGVMLNTAIYGLLRVVLDLAQIHLWWWGGLLLASGLATALYGVVFAAVQTDMKRLLAYSSIENMGLLFVAIGLALIFSAYGMKPLAALALTAALYHVASHAFFKSLLFLGTGSVLHATAERSLGKLGGLIRQMPWVGWLTLVGVLTSAGLPPLGGFVSEWLLLQSFLFTTGLPVPLLTMLIPVVAALIALVAALAGYTMVKFFGVIFLGLPREPRLNDAQDAGGWERAGMLWLALGSIALGLLPSPFIGLIDAVTQQLVGSGLGARVATSGWLLAPISPEQASYGPVIFLLGILASFALAYLLVRGLYHGRLRRSVAWACGFPWGTPRMQDTAEGFGQPIRQIFEPFFQIRRDLPTPFDEHPQYRVIVSDPFWRWLYLPVVRLVAVMARAVGAIQQGRISAYLLFSFLTLIAVLLAVMR

SEQ ID NO: 3385 - DNA, 1935 bp, Dehalococcoides sp. BAV1
  CDS (1)..(1935): transl_table=11
atgatagcgggtttattgcttggcggagggtttttacttctggccgctgccctgacgggcattgtgtttaatcatggcagtaaaaaagtctggcaaggggtactatggctggttatagcggcggcgctatgcttgcttattgggtctttgcagatatttttcggtaatccgctggatatttccctctggagcattgcatccgggctggacatagcctttcatcttgaccgtctggcatcattcttcgtcataataattagccttatttcactctgcgtggccgtgtattcactgggctacaataaccatatatcttcaaacgaacgagccaatctgctctcagcctttatggctgttttcattctctccatgataggcgtggtggcctcggccaatacctttagcctgatatttttctgggagataatggccctaagctccttctttttaatgatgaatgactatcaggagccttttacccagcgggcgggcgtgtattatttcgtgcttacccagcttagcaccattttcctgatgctgatggcagtagttatgtatatccagaacggcagtttcgcactcagcctgagcggtgcatcctccgtcatccagagtctggtttttgttctggcatttctggccttcggaatcaaggccggtatcataccccttcacaagtggctgccttatgcccactctgccagcccttcaaatgtctctgccctgatgtccggggtaatgctgaaagtggccatttacggcttggtacgctttcttatggatgtgcttagcccggaaatgtggtggggtgtgggaatactccttttgggcatgataagtgccttgcttggtattatctacgcctttaaagaacatgaccttaaaatgctgctggctttttgtagtattgaaaatatcggcattatcctgatgggtattggtctgtatgttatttttggcttgtatggtctggatacgctggctatgctggcacttggttcagctttgtttcacagcctgaatcatgccatttttaaaagcctgctttttatgaccgccggttcggtggtaattgccgtgggtgaccgcaatattgaaaaaatgggcgggttgattaaactaatgccctacacttctgttatctttctggtgggggcagtttccatatcggctttgcctcccttcaatggttttatgagtgagctgatgctctttgagtcttttttccagtccttctctctggctgaaagcagtataaagatacttctgttcagtgtactggccatactggctcttacttcagctctggcggccgcttgctttgtaaaggccttcgggacggtctttctggctatgcctcgcagtcaggaagcagcctctgccaaagaagtttcaaaaagtatgattatagggccggccatactggcagttgcctgtctggtattgggtctgtttgctgtccagatattttcggtagccggatatagttttgacctgccggatatgtcactggttggcttggtactggttatcttcggggttttggttttcggcatggtcaggctgttttcgccccgaaaaagccgccggagcgagacctgggcttgcggctatgttcgcccaactccccgctttgagtatactgcctccggttttgccgagccccttttccagatattccggctgatataccgcacccgccattacaatgaacgcagttacgaagataaccagcaggctattttcaaacagggcaaatcagctattcacaccataaagttttttgatgagtatatttatctgccggttgccggtttgttcgggcgtatttcccgtttcatatcccgcctgcaggatgttgatttgggcagccatatcctgtacagctttataactgttttgctggttatactggcggcaaggtggctgtggtga

SEQ ID NO: 3386 - protein, 644 aa, Dehalococcoides sp. BAV1
MIAGLLLGGGFLLLAAALTGIVFNHGSKKVWQGVLWLVIAAALCLLIGSLQIFFGNPLDISLWSIASGLDIAFHLDRLASFFVIIISLISLCVAVYSLGYNNHISSNERANLLSAFMAVFILSMIGVVASANTFSLIFFWEIMALSSFFLMMNDYQEPFTQRAGVYYFVLTQLSTIFLMLMAVVMYIQNGSFALSLSGASSVIQSLVFVLAFLAFGIKAGIIPLHKWLPYAHSASPSNVSALMSGVMLKVAIYGLVRFLMDVLSPEMWWGVGILLLGMISALLGIIYAFKEHDLKMLLAFCSIENIGIILMGIGLYVIFGLYGLDTLAMLALGSALFHSLNHAIFKSLLFMTAGSVVIAVGDRNIEKMGGLIKLMPYTSVIFLVGAVSISALPPFNGFMSELMLFESFFQSFSLAESSIKILLFSVLAILALTSALAAACFVKAFGTVFLAMPRSQEAASAKEVSKSMIIGPAILAVACLVLGLFAVQIFSVAGYSFDLPDMSLVGLVLVIFGVLVFGMVRLFSPRKSRRSETWACGYVRPTPRFEYTASGFAEPLFQIFRLIYRTRHYNERSYEDNQQAIFKQGKSAIHTIKFFDEYIYLPVAGLFGRISRFISRLQDVDLGSHILYSFITVLLVILAARWLW

SEQ ID NO: 3387 - DNA, 2028 bp, Photobacterium sp. SKA34
  CDS (1)..(2028): transl_table=11
atgagttcactcaactatttgtttttatctgttttgttgtatgttatcggggcttttatctccttaacactacacaagcaagaacgtctagcaacaaaactttccggcattctatgtgctatgggcggattaactgggctggcatcatccattccaacattgttggatggtcaggttatttcttatcagatagcaagtccatttagctttgctgactgtattattcgaattgatgcattatctgcgtttatggtttttgtgatttcgttacttgttatcgcaagcgctatttattcactctcttacatgaaggaatacgaaggaaaaggtgcatgggcaatgggattctttatgaatatctttattgcctctatggttgccctcgtcgtttcagacaatgcattttattttattgtcttttttgaaatgatgtcgttagcatcttattttttggttatttcagagcaaaacgataaatcaataaatgccggtttacagtatttcttaattgcacacgcaggttcggtgttgattatgattgctttctttatcctgtatagccaatgcggcagtttaaactttcaggattttaaatcagcaaacttatctcaaacacaagcatcagttgtttttctattagctttttttggttttggagccaaggcgggcatgatcactcttcatgggtggctaccacaagctcaccctgccgcaccttcaaatgcatcttcgttaatgtctggtgtcatggtgaagataggtatttttgggataatcaaagtcggtattgattttctaggggctgatacggcttggtggggataccttgttcttgcctttggctgtgtatcatctgttcttggtgtgatgtatgcactggctgaacatgacattaaacgattattggcttatcacaccgttgaaaatgtgggcattattctaatgggtgttggtattggtatggttggcattgcaacgaaccatcctgttatcgcaacattaggtctactcggtggtttataccatttattaaatcacgctatatttaaagggttattgttcttaggtgcaggctccgttattttccgtgttcatactaaagatatggaaaaaatgggaggcttggcgaaagtgatgccttataccgctattgcttttcttatcggtacgatggctatttctgcgttaccgcctttaaatggcttcgttagtgaatggtttatctatcagtctcttctttccatgagtaaagaaggcaatttcttaatgacaattgctgggcctattgccgttgtaatgctggcattaacgggtgcattagcttgcatgtgttttgttaaagtgtatggaatttgttttggcggtgcaccacgtagtgaaagtgcggcaaaagcaacagaagtaccttggccaatggtggctgctacagcagggcttgctggagtttgtattgcacttggcgttggctcgccatgggttgcacctattatctctcatgttgcatcaagcttaacatctgcagaatcagtgacggttacgcaaggtatcgcgttaattcctgataacgcttcacaagctattctttctacgcctgtaatcgcattaacattaattggattactgattgtacctttattaattcttgccattttcaaaggtaaaaagttacaacgtcgccattccggcgatccatgggcatgtggttatgcttatgaagatcgaatgatggtttctgctggtggcttcactcaaccacttcgtgaaatgtttgccccgttataccgcattcgtcaacagctagatcctagtaggctaatggtttcaatcctaaaaggaacgacttctactgccgccaatattgaacctttctttgataacaaagttgttttaccgattgcacgaggtgtacagcgtgtaggtagagttgttcagtggcttcagtatggtgatttccgtacttactgtctgtacatggttatcgcattagtggtgctgttatttattcccgttgatttaggagcgaagtaa

SEQ ID NO: 3388 - protein, 675 aa, Photobacterium sp. SKA34
MSSLNYLFLSVLLYVIGAFISLTLHKQERLATKLSGILCAMGGLTGLASSIPTLLDGQVISYQIASPFSFADCIIRIDALSAFMVFVISLLVIASAIYSLSYMKEYEGKGAWAMGFFMNIFIASMVALVVSDNAFYFIVFFEMMSLASYFLVISEQNDKSINAGLQYFLIAHAGSVLIMIAFFILYSQCGSLNFQDFKSANLSQTQASVVFLLAFFGFGAKAGMITLHGWLPQAHPAAPSNASSLMSGVMVKIGIFGIIKVGIDFLGADTAWWGYLVLAFGCVSSVLGVMYALAEHDIKRLLAYHTVENVGIILMGVGIGMVGIATNHPVIATLGLLGGLYHLLNHAIFKGLLFLGAGSVIFRVHTKDMEKMGGLAKVMPYTAIAFLIGTMAISALPPLNGFVSEWFIYQSLLSMSKEGNFLMTIAGPIAVVMLALTGALACMCFVKVYGICFGGAPRSESAAKATEVPWPMVAATAGLAGVCIALGVGSPWVAPIISHVASSLTSAESVTVTQGIALIPDNASQAILSTPVIALTLIGLLIVPLLILAIFKGKKLQRRHSGDPWACGYAYEDRMMVSAGGFTQPLREMFAPLYRIRQQLDPSRLMVSILKGTTSTAANIEPFFDNKVVLPIARGVQRVGRVVQWLQYGDFRTYCLYMVIALVVLLFIPVDLGAK

SEQ ID NO: 3389 - DNA, 2046 bp, Xanthobacter autotrophicus Py2
  CDS (1)..(2046): transl_table=11
atgcccgatgccgccttcgccgcacagcttcccgtcagcggacaactcctcgtggccctcggcgcggtggcggtgcttctggctctcgccgggctcggtgtggcgacggcgcggcgccccgcgggccggccgctcgtctatggcggcgcgctggcggtgacacttttggccggtctctccgcccttaccgccatcgcggcgccggcggctgggatcgtgctgccccttggcattccctggatcggcgcccacctgcggctcgatgcgttgtctgcggtcttcctcgcggtgatcaatctcggcggcgcggcggcgagcctctatggcctcggctacggccggcacgatcatgcgccggaacgggtgctgcccttcttcccggccttcctcgccggcatgaacatggtgctgctggcggacgacgcctacagtttcctcctgtcgtgggaattcatgtcgctggcgtcctgggcgctggtggtggcccacgacaaggaggcgggcaatgtgcgcgccggcctcgtctacatcctcatggcctcgttcggcacgctggcgctgatgctggcctttggcctgctcgccgccggctccgggggcggctatgccttcgatgccatgcgcgaggcgccgcccgtgggcgccttcgccgcgctggtgctggcgcttgcgctgctgggggcggggtccaaggcgggtctgatgccgctgcacgtctggctgccgctggcccatcccgccgcgcccagccacgtctccgccctcatgagcggggtgatgaccaaggtggcggtctacggcttcatccgcatcgtgtttgatctctccggcccgccggactggtggtggggcatcccggtgctgggtgccggcggcgtcgcggcggtcatcggcgtgctgcaggcgctgttgcagggcgacaccaagcgcgtgctcgcctattccaccatcgagaatatcggcctcattttcatcggcctcgggctggcgctggccttctcggccaacggatttcccaccgccgccgcgctggcgctcacggcggcgctgttccatgtgctcaaccatgcggccatgaagagcctgctgttcttcggtgccggcgctgtgctgaccgccaccggcacccggcagatggaggaactgggcggcctcatccaccgcatgcccaccaccagcgtggtgatgctgatcggctgcgccgccatctcggccctgccgccgctcaatggttttgcctccgaatggctggtgtttcaggcggtgctgctgagcccggagcttccggtctgggggctgaagctgatggtgccggccgtgggcgcgctgatggcgctcgccgccgcgctcgccgccgcctgcttcgtgcggctctacggcatcgccttcctcggccggccgcgcagcccgaaggcgagcgaggcccacgaggtggacgccttctcccgtgccgccatgatcgcgcttgccgccgtgtgcgtgggcgccggcctgctgcccggctttgtcatcgatgtgctgcagccggcggtgggcggcctcgtgggccagaccatgccggcgcagggctcagtggcgtggctctccatcatcccggtggcggagagccgcagctcctacaacgggctgctggtctttgccttcacggcactgtcggcgctgctggcggccttcgtcatccaccgcttcgcctcgggcgcggtacggcgggcgccgccgtgggattgcggcttccccaatgccagcccgctgagccagtattccgccgcctccttcgcccagcccatccgccgggtgttcgcgcgcggcctgttcgcggcccgcgagaaggtggagatgccgccccccggcgcgctcactcccgcccggttctcctccagcgcgcgcgatcccgcctgggccttcctgttcctgcccctgacggcggcggtggactatgtggccgagcgggcgaaccggctgcaatacctcaccatccgccagtatctgggcctggttttttcggccctggtgctgctgcttctggtgctcgccctatggacctga

SEQ ID NO: 3390 - protein, 681 aa, Xanthobacter autotrophicus Py2
MPDAAFAAQLPVSGQLLVALGAVAVLLALAGLGVATARRPAGRPLVYGGALAVTLLAGLSALTAIAAPAAGIVLPLGIPWIGAHLRLDALSAVFLAVINLGGAAASLYGLGYGRHDHAPERVLPFFPAFLAGMNMVLLADDAYSFLLSWEFMSLASWALVVAHDKEAGNVRAGLVYILMASFGTLALMLAFGLLAAGSGGGYAFDAMREAPPVGAFAALVLALALLGAGSKAGLMPLHVWLPLAHPAAPSHVSALMSGVMTKVAVYGFIRIVFDLSGPPDWWWGIPVLGAGGVAAVIGVLQALLQGDTKRVLAYSTIENIGLIFIGLGLALAFSANGFPTAAALALTAALFHVLNHAAMKSLLFFGAGAVLTATGTRQMEELGGLIHRMPTTSVVMLIGCAAISALPPLNGFASEWLVFQAVLLSPELPVWGLKLMVPAVGALMALAAALAAACFVRLYGIAFLGRPRSPKASEAHEVDAFSRAAMIALAAVCVGAGLLPGFVIDVLQPAVGGLVGQTMPAQGSVAWLSIIPVAESRSSYNGLLVFAFTALSALLAAFVIHRFASGAVRRAPPWDCGFPNASPLSQYSAASFAQPIRRVFARGLFAAREKVEMPPPGALTPARFSSSARDPAWAFLFLPLTAAVDYVAERANRLQYLTIRQYLGLVFSALVLLLLVLALWT

SEQ ID NO: 3391 - DNA, 2037 bp, Candidatus Kuenenia stuttgartiensis
  CDS (1)..(2037): transl_table=11
atggctgagcatttatttgtaatatcgataatcttgtatgcgataggcgccctgtttgccttatgttttttcaagtggcaagcggtggggaattatatttcgcttatttgtgcagctattgcttcctgctttagcattgtcctgtctatctctgtgttgactaacggcctaataatacattttgatttcttaatataccatgccattataagatacaattttttattagaccctctatcctcattttttatgcttgtcatatctgtcattggttttgtagcctcgatctattcgatgggatataccaaattatacgtaaataaacgcgatacccggtttctgggatttgcctataatctccttcttgtatctatgcttctggtggtaactgccaataacgcattagtatttatgatagtgtgggagcttatgacattggtctcctttttcctcgtcatctttgaacatgagaatcctaccaacagaaaagcaggttatgtctatctcgtgatgtctcacattggcgcagggcttatagctgtagccttttttatcatgtttgcctatgcaggtgaggcatttacattcagctttgacgatttcaggcatattggtgcgcatatgccccctatatacaaaaatattgtattctttttaataattattggttttggaataaaggcaggcatcttccccctccatctttggcttcctatggcacatcctgcagcgccgagtaacgtctcgatggtcatgtcgggcgtgatgatcaaaacggctatctatggctttatacgattttatttcgaatttctaacgccttgtccgccctggtgggggtttatcgttcttgtcgcgggcgcttcttctgctattttgggaatactctacgcccttatggaaagggacatcaaaacgttgcttgcttacagcagtgtggaaaatatcggcatcatccttatagggatcggattgtcgatgatttttaagtcctacaatctcatgacattgtcttcccttgctatgatggcaggactttatcacctgattaatcatgcagtatttaagtgtctgctctttggttgtgcgggaaatatctattattcaacccacacaaaaaacattgaagaattaggcggcctgattaaacggctgcgggttactgccccattatttcttgtgggcgccttgtccatttctgctatcccgccgctgaatggatttatgagtgagtggcttatattccaatccctactgaatggcttttacatcccatcggtgtttttcaaagtaatgacggttatttgtggggcaattgttgccttgaccggggcactagtggctatgtgttttgtcaaggcctttggggtttcatttcttgccctgccacgttctgagcatacgcgaaaggcaaaggaggttcccctggttatgcttgtaagtatgggcattttggcctcgatgtgtgtgtttatgggtcttttcccggcaacgattatggcaaccattaatcaggtaaatacacatctgctgggcacaaatattataaatattattacttcatatgattggttgcaaacaaagtcaatccatactaattttacagatttatctccaaaaagcgcgccgatatttggcttaatccttttagtgatcaccttcgggtttttgaccatgttaaggccgggcttcacaaagaggatctatgagacatggacttgtggcataacaccggagcccaggtttggttatacggcaacggccttcacaaaaccgttcaaggtcatctttggtaatctgtacagaccccggtttgagattagcacaacatattcagtccctaaatatttcgctaaatctataacctatcttggcgagataacgcctatattcgaaaaatatttttataatcctgtttccagctatgttttaaatatatcaaataagatacggtgggtgcataccgggagtattcatgtgtaccttgcctatatatttgtaacattgttgattgccatattgtctgttatatactga

SEQ ID NO: 3392 - protein, 678 aa, Candidatus Kuenenia stuttgartiensis
MAEHLFVISIILYAIGALFALCFFKWQAVGNYISLICAAIASCFSIVLSISVLTNGLIIHFDFLIYHAIIRYNFLLDPLSSFFMLVISVIGFVASIYSMGYTKLYVNKRDTRFLGFAYNLLLVSMLLVVTANNALVFMIVWELMTLVSFFLVIFEHENPTNRKAGYVYLVMSHIGAGLIAVAFFIMFAYAGEAFTFSFDDFRHIGAHMPPIYKNIVFFLIIIGFGIKAGIFPLHLWLPMAHPAAPSNVSMVMSGVMIKTAIYGFIRFYFEFLTPCPPWWGFIVLVAGASSAILGILYALMERDIKTLLAYSSVENIGIILIGIGLSMIFKSYNLMTLSSLAMMAGLYHLINHAVFKCLLFGCAGNIYYSTHTKNIEELGGLIKRLRVTAPLFLVGALSISAIPPLNGFMSEWLIFQSLLNGFYIPSVFFKVMTVICGAIVALTGALVAMCFVKAFGVSFLALPRSEHTRKAKEVPLVMLVSMGILASMCVFMGLFPATIMATINQVNTHLLGTNIINIITSYDWLQTKSIHTNFTDLSPKSAPIFGLILLVITFGFLTMLRPGFTKRIYETWTCGITPEPRFGYTATAFTKPFKVIFGNLYRPRFEISTTYSVPKYFAKSITYLGEITPIFEKYFYNPVSSYVLNISNKIRWVHTGSIHVYLAYIFVTLLIAILSVIY

SEQ ID NO: 3393 - DNA, 1827 bp, Escherichia coli
  CDS (1)..(1827): transl_table=11
atgagcgcaatttccctgatcaatagcggcgtggcgtggtttgtcgccgccgctgttctggcatttctcttttcttttcaaaaagcgttaagtggctggatagctggaattggcggcgcggttggtagtctgtatacggcagccgcgggcttcactgtactgactggcgcggttggcgtgagcggtgcgctgtcgctggtaagctacgatgtgcaaatctctccgcttaacgcgatttggctgattacgctcggtctgtgcggtctgtttgtcagcctctacaacattgactggcatcgccacgcgcaggtgaagtgcaacggcttgcagatcaatatgttgatggctgccgccgtctgcgccgtcattgccagcaacctcggcatgttcgtggtaatggccgaaatcatggccctgtgcgcggtgttcctcaccagcaacagcaaagagggcaaactgtggtttgcgctggggcgtcttggcactctgctgctggcgattgcttgctggctgctgtggcagcgttacggcacgctggatctgcgcctgctggatatgcgtatgcaacagctgccgctcggttccgatatctggctgctcggagtgattggctttggcctgctggccgggattattccgctgcacggctgggtgccgcaggcacatgcgaacgcctctgcgccagctgccgcgttgttttctacggtagtcatgaaaattggcctgctgggcattttaaccctgtcactgctgggcggtaatgcaccgctgtggtgggggatcgcgctgctggtgctcggcatgatcaccgcgtttgtcggtggtctgtatgcgctggtggagcacaacatccagcgcctgctggcttaccacaccctggaaaatatcggcatcatcctgctggggctgggcgctggcgtaacgggtatcgcgctcgaacaaccggcgctgattgctcttggcctggtcggtggtctgtaccatctgcttaaccatagcctgttcaaaagcgtactgttcctcggggcggggagcgtctggttccgtaccggtcatcgcgatatcgaaaaactcggtggtattggcaagaaaatgccggttatctccatcgccatgttagtcgggctgatggcaatggctgcgctgccgccgctgaatggttttgccggggaatgggttatctatcaatcatttttcaaactgagcaatagtggcgcgtttgttgcccgtctgctggggccgctgctcgctgtggggctggcaattaccggtgcgctggcggtgatgtgtatggcgaaagtctatggcgtcacgttcctcggcgcgccgcgcaccaaagaagccgaaaacgccacctgtgcgccgctcctgatgagcgtaagcgtagtggcactggcgatttgctgcgtaattggcggtgttgctgcgccgtggctactgccgatgctctctgctgctgtacctctgccgctggagcctgctaacaccaccgtttctcaaccgatgatcacgttgctgctgattgcctgcccgctgctgccattcatcattatggcgatttgcaaaggcgatcgtttgccatcgcgttcccgcggtgcggcctgggtgtgcggttacgaccacgaaaaatcaatggtgattaccgctcacggttttgccatgccggtgaaacaggcgtttgcgccggtgctgaaactacgcaaatggctgaatccggtgtctctggtgccgggctggcagtgcgaggggagtgcgttgctgttccgccggatggcgctggttgaactggcggtactggtggtgattattgtttcacgaggagcctga

SEQ ID NO: 3394 - protein, 608 aa, Escherichia coli
MSAISLINSGVAWFVAAAVLAFLFSFQKALSGWIAGIGGAVGSLYTAAAGFTVLTGAVGVSGALSLVSYDVQISPLNAIWLITLGLCGLFVSLYNIDWHRHAQVKCNGLQINMLMAAAVCAVIASNLGMFVVMAEIMALCAVFLTSNSKEGKLWFALGRLGTLLLAIACWLLWQRYGTLDLRLLDMRMQQLPLGSDIWLLGVIGFGLLAGIIPLHGWVPQAHANASAPAAALFSTVVMKIGLLGILTLSLLGGNAPLWWGIALLVLGMITAFVGGLYALVEHNIQRLLAYHTLENIGIILLGLGAGVTGIALEQPALIALGLVGGLYHLLNHSLFKSVLFLGAGSVWFRTGHRDIEKLGGIGKKMPVISIAMLVGLMAMAALPPLNGFAGEWVIYQSFFKLSNSGAFVARLLGPLLAVGLAITGALAVMCMAKVYGVTFLGAPRTKEAENATCAPLLMSVSVVALAICCVIGGVAAPWLLPMLSAAVPLPLEPANTTVSQPMITLLLIACPLLPFIIMAICKGDRLPSRSRGAAWVCGYDHEKSMVITAHGFAMPVKQAFAPVLKLRKWLNPVSLVPGWQCEGSALLFRRMALVELAVLVVIIVSRGA

SEQ ID NO: 3395 - DNA, 24 bp, Artificial sequence
  primer
atggatgccctgcaattattaacc

SEQ ID NO: 3396 - DNA, 24 bp, Artificial sequence
  primer
ttagacggcaatagcgattagcag

SEQ ID NO: 3397 - protein, 536 aa, Artificial sequence
  consensus sequence
  Variant (2)..(2): Xaa in position 2 is any amino acid
  Variant (4)..(54): Xaa in position 4 to 54 is any amino acid
  Variant (55)..(58): Xaa in position 55 to 58 is any or no amino acid
  Variant (60)..(63): Xaa in position 60 to 63 is any amino acid
  Variant (65)..(65): Xaa in position 65 is any amino acid
  Variant (67)..(67): Xaa in position 67 is any amino acid
  Variant (69)..(71): Xaa in position 69 to 71 is any amino acid
  Variant (74)..(79): Xaa in position 74 to 79 is any amino acid
  Variant (80)..(86): Xaa in position 80 to 86 is any or no amino acid
  Variant (88)..(96): Xaa in position 88 to 96 is any amino acid
  Variant (98)..(132): Xaa in position 98 to 132 is any amino acid
  Variant (133)..(140): Xaa in position 133 to 140 is any or no amino acid
  Variant (142)..(144): Xaa in position 142 to 144 is any amino acid
  Variant (148)..(149): Xaa in position 148 to 149 is any amino acid
  Variant (152)..(153): Xaa in position 152 to 153 is any amino acid
  Variant (157)..(157): Xaa in position 157 is any amino acid
  Variant (159)..(159): Xaa in position 159 is any amino acid
  Variant (161)..(161): Xaa in position 161 is any amino acid
  Variant (164)..(165): Xaa in position 164 to 165 is any amino acid
  Variant (167)..(171): Xaa in position 167 to 171 is any amino acid
  Variant (174)..(174): Xaa in position 174 is any amino acid
  Variant (176)..(176): Xaa in position 176 is any amino acid
  Variant (178)..(179): Xaa in position 178 to 179 is any amino acid
  Variant (181)..(184): Xaa in position 181 to 184 is any amino acid
  Variant (186)..(197): Xaa in position 186 to 197 is any amino acid
  Variant (198)..(201): Xaa in position 198 to 201 is any or no amino acid
  Variant (205)..(207): Xaa in position 205 to 207 is any amino acid
  Variant (209)..(210): Xaa in position 209 to 210 is any amino acid
  Variant (212)..(214): Xaa in position 212 to 214 is any amino acid
  Variant (216)..(217): Xaa in position 216 to 217 is any amino acid
  Variant (219)..(221): Xaa in position 219 to 221 is any amino acid
  Variant (223)..(229): Xaa in position 223 to 229 is any amino acid
  Variant (235)..(237): Xaa in position 235 to 237 is any amino acid
  Variant (240)..(240): Xaa in position 240 is any amino acid
  Variant (242)..(245): Xaa in position 242 to 245 is any amino acid
  Variant (247)..(247): Xaa in position 247 is any amino acid
  Variant (249)..(260): Xaa in position 249 to 260 is any amino acid
  Variant (261)..(272): Xaa in position 261 to 272 is any or no amino acid
  Variant (274)..(275): Xaa in position 274 to 275 is any amino acid
  Variant (277)..(281): Xaa in position 277 to 281 is any amino acid
  Variant (283)..(283): Xaa in position 283 is any amino acid
  Variant (285)..(286): Xaa in position 285 to 286 is any amino acid
  Variant (289)..(290): Xaa in position 289 to 290 is any amino acid
  Variant (293)..(294): Xaa in position 293 to 294 is any amino acid
  Variant (297)..(299): Xaa in position 297 to 299 is any amino acid
  Variant (301)..(308): Xaa in position 301 to 308 is any amino acid
  Variant (310)..(314): Xaa in position 310 to 314 is any amino acid
  Variant (317)..(320): Xaa in position 317 to 320 is any amino acid
  Variant (323)..(328): Xaa in position 323 to 328 is any amino acid
  Variant (330)..(330): Xaa in position 330 is any amino acid
  Variant (332)..(337): Xaa in position 332 to 337 is any amino acid
  Variant (341)..(341): Xaa in position 341 is any amino acid
  Variant (345)..(346): Xaa in position 345 to 346 is any amino acid
  Variant (348)..(373): Xaa in position 348 to 373 is any amino acid
  Variant (374)..(377): Xaa in position 374 to 377 is any or no amino acid
  Variant (379)..(381): Xaa in position 379 to 381 is any amino acid
  Variant (385)..(389): Xaa in position 385 to 389 is any amino acid
  Variant (391)..(392): Xaa in position 391 to 392 is any amino acid
  Variant (394)..(395): Xaa in position 394 to 395 is any amino acid
  Variant (399)..(399): Xaa in position 399 is any amino acid
  Variant (402)..(421): Xaa in position 402 to 421 is any amino acid
  Variant (422)..(422): Xaa in position 422 is any or no amino acid
  Variant (425)..(426): Xaa in position 425 to 426 is any amino acid
  Variant (428)..(430): Xaa in position 428 to 430 is any amino acid
  Variant (432)..(481): Xaa in position 432 to 481 is any amino acid
  Variant (482)..(509): Xaa in position 482 to 509 is any or no amino acid
  Variant (511)..(511): Xaa in position 511 is any amino acid
  Variant (514)..(519): Xaa in position 514 to 519 is any amino acid
  Variant (520)..(520): Xaa in position 520 is any or no amino acid
  Variant (522)..(527): Xaa in position 522 to 527 is any amino acid
  Variant (529)..(530): Xaa in position 529 to 530 is any amino acid
  Variant (532)..(535): Xaa in position 532 to 535 is any amino acid
LXAXXXXXXXXXXXXXXXXXXXXXXXXXXXXXXXXXXXXXXXXXXXXXXXXXXXXXXXFXXXXEXMXLXXXFLXXXXXXXXXXXXXGXXXXXXXXXGXXXXXXXXXXXXXXXXXXXXXXXXXXXXXXXXXXXXXXXXXXXLXXXGFGXXAGXXPLHXWXPXAHXXAXXXXXALXSXVXXKXXXXGXXXXXXXXXXXXXXXXWWGXXXLXXGXXXAXXGXXXAXXXXXXXRLLAYXXXENXGXXXXGXGXXXXXXXXXXXXXXXXXXXXXXXXLXXLXXXXXLXHXXNHXXFKXXLFXXXGXXXXXXXXRXXXXXGGXXXXMPXXXXXXLXGXXXXXXLPPXNGFXXEXXXXXXXXXXXXXXXXXXXXXXXXXXXXXXAXXXALAXXXXXKXXGXXFLGXPRXXXXXXXXXXXXXXXXXXXXXLAXXCXXXGXXXXXXXXXXXXXXXXXXXXXXXXXXXXXXXXXXXXXXXXXXXXXXXXXXXXXXXXXXXXXXXXXXXXXXXXXXXXXXWXCGXXXXXXXMXXXXXXFXXPXXXXF

SEQ ID NO: 3398 - protein, 43 aa, Artificial sequence
  protein pattern
  Variant (4)..(5): Xaa in position 4 to 5 is any amino acid
  Variant (8)..(8): Xaa in position 8 is Ile, Leu, Met or Val
  Variant (9)..(9): Xaa in position 9 is Phe, Ile, Leu, Met or Val
  Variant (11)..(11): Xaa in position 11 is Phe or Leu
  Variant (13)..(13): Xaa in position 13 is any amino acid
  Variant (15)..(15): Xaa in position 15 is Leu or Val
  Variant (17)..(17): Xaa in position 17 is any amino acid
  Variant (20)..(20): Xaa in position 20 is Ala or Pro
  Variant (21)..(21): Xaa in position 21 is Ala, Asn or Ser
  Variant (23)..(23): Xaa in position 23 is Pro or Ser
  Variant (24)..(24): Xaa in position 24 is Ala, Cys or Ser
  Variant (25)..(25): Xaa in position 25 is any amino acid
  Variant (26)..(26): Xaa in position 26 is Ala, Ile or Val
  Variant (27)..(27): Xaa in position 27 is Ala or Ser
  Variant (28)..(28): Xaa in position 28 is any amino acid
  Variant (29)..(29): Xaa in position 29 is Ile, Leu, Met or Val
  Variant (30)..(30): Xaa in position 30 is Phe, Leu or Met
  Variant (32)..(32): Xaa in position 32 is Gly or Thr
  Variant (33)..(33): Xaa in position 33 is Phe, Leu or Val
  Variant (34)..(35): Xaa in position 34 to 35 is Ile, Leu, Met or Val
  Variant (36)..(37): Xaa in position 36 to 37 is any amino acid
  Variant (38)..(38): Xaa in position 38 is Ala or Gly
  Variant (39)..(39): Xaa in position 39 is Ile, Leu or Val
  Variant (40)..(40): Xaa in position 40 is any amino acid
  Variant (42)..(42): Xaa in position 42 is Phe, Ile, Leu or Met
  Variant (43)..(43): Xaa in position 43 is Ile, Leu or Val
GFGXXAGXXPXHXWXPXAHXXAXXXXXXXXSXXXXXXXXXGXX

SEQ ID NO: 3399 - protein, 32 aa, Artificial sequence
  protein pattern
  Variant (2)..(2): Xaa in position 2 is Gly, Ile or Val
  Variant (3)..(4): Xaa in position 3 to 4 is any amino acid
  Variant (5)..(5): Xaa in position 5 is Ala or Ser
  Variant (6)..(7): Xaa in position 6 to 7 is any amino acid
  Variant (8)..(8): Xaa in position 8 is Glu or Gln
  Variant (9)..(9): Xaa in position 9 is any amino acid
  Variant (10)..(10): Xaa in position 10 is Asp or Asn
  Variant (11)..(12): Xaa in position 11 to 12 is any amino acid
  Variant (14)..(14): Xaa in position 14 is any or no amino acid
  Variant (16)..(16): Xaa in position 16 is any or no amino acid
  Variant (18)..(19): Xaa in position 18 to 19 is any amino acid
  Variant (20)..(20): Xaa in position 20 is Ser or Thr
  Variant (21)..(21): Xaa in position 21 is Ile, Leu or Val
  Variant (22)..(22): Xaa in position 22 is Asp or Glu
  Variant (24)..(24): Xaa in position 24 is Ile, Met or Val
  Variant (26)..(26): Xaa in position 26 is Ile, Leu or Val
  Variant (27)..(27): Xaa in position 27 is Ile, Leu, Met or Val
  Variant (28)..(29): Xaa in position 28 to 29 is any amino acid
  Variant (30)..(30): Xaa in position 30 is Ala, Gly or Ser
  Variant (31)..(31): Xaa in position 31 is any amino acid
GXXXXXXXXXXXRXLXAXXXXXNXGXXXXXXG

SEQ ID NO: 3400 - protein, 17 aa, Artificial sequence
  protein pattern
  Variant (2)..(3): Xaa in position 2 to 3 is any amino acid
  Variant (4)..(6): Xaa in position 4 to 6 is any or no amino acid
  Variant (8)..(9): Xaa in position 8 to 9 is Ile, Leu, Met or Val
  Variant (10)..(11): Xaa in position 10 to 11 is any amino acid
  Variant (13)..(13): Xaa in position 13 is any amino acid
  Variant (14)..(14): Xaa in position 14 is Leu or Met
  Variant (15)..(15): Xaa in position 15 is Ala, Ser or Thr
  Variant (16)..(16): Xaa in position 16 is Leu or Val
  Variant (17)..(17): Xaa in position 17 is Ala, Cys, Ser or Val
AXXXXXFXXXXEXXXXX

SEQ ID NO: 3401 - DNA, 813 bp, Escherichia coli K12
  CDS (1)..(813): transl_table=11
atgagcgatctgcataacgagtccatttttattaccggcggcggatcgggattagggctggcgctggtcgagcgatttatcgaagaaggcgcgcaggttgccacgctggaactgtcggcggcaaaagtcgccagtctgcgtcagcgatttggcgaacatattctggcggtggaaggtaacgtgacctgttatgccgattatcaacgcgcggtcgatcagatcctgactcgttccggcaagctggattgttttatcggcaatgcaggcatctgggatcacaatgcctcactggttaatactcccgcagagacgctcgaaaccggcttccacgagctgtttaacgtcaatgttctcggttacctgctgggcgcaaaagcctgcgctccggcgttaatcgccagtgaaggcagcatgattttcacactgtcaaatgccgcctggtatcctggcggcggtggcccgctgtacaccgccagtaaacatgccgcaaccggacttattcgccaactggcttatgaactggcaccgaaagtgcgggtgaatggcgtcggcccgtgtggtatggccagcgacctgcgcggcccacaggcgctcgggcaaagtgaaacctcgataatgcagtctctgacgccggagaaaattgccgccattttaccgctgcaatttttcccgcaaccggcggattttacggggccgtatgtgatgttgacatcgcggcgcaataatcgcgcattaagcggtgtgatgatcaacgctgatgcgggtttagcgattcgcggcattcgccacgtagcggctgggctggatctttaa

SEQ ID NO: 3402 - protein, 270 aa, Escherichia coli K12
MSDLHNESIFITGGGSGLGLALVERFIEEGAQVATLELSAAKVASLRQRFGEHILAVEGNVTCYADYQRAVDQILTRSGKLDCFIGNAGIWDHNASLVNTPAETLETGFHELFNVNVLGYLLGAKACAPALIASEGSMIFTLSNAAWYPGGGGPLYTASKHAATGLIRQLAYELAPKVRVNGVGPCGMASDLRGPQALGQSETSIMQSLTPEKIAAILPLQFFPQPADFTGPYVMLTSRRNNRALSGVMINADAGLAIRGIRHVAAGLDL

SEQ ID NO: 3403 - DNA, 1047 bp, zea mays
  CDS (43)..(894)
ccaccggagcgcggaggaggcacaggcgccgatctagagacgatggccgccgcgggctcctcgccgtccttctcctcctcgagtaagcgactggaagggaaggtggccctcgtcactggtggcgccaccggcatcggcgaggccatcgttcgcctcttcatggagcacggcgccaaggtctgcatcgcggacatccaggatgaggccgggcagcagctgcgcgacgccctgggaggtgacgcgcagggcgccatgttcgtccactgcgacgtgacgtcggaggaggacgtgagccgcgccgtggacgctgcggcggagcggttcggcgcactggacgtgatggtgaacaacgccggcgtgacgggcgccaaggtgacggacatccgcgccgtggacttcgcggaggcgcgcagggtgctcgacgtcaacgtgcacggcgtgttcctggggatgaagcacgcggcgcgcgctatgatcccgcggaagcggggctccatcgtgtcgctggccagcgtggccagcgccatcggcgggacgggcccgcacgtctacacggcgtccaagcacgccgtggtcgggctcaccaagagcgtcgccgcggagctcggccgccacggggtgcgcgtcaactgcgtgtccccctatgccgtgcccacggcgctgtcgatgccgcacctgccccagggcgcgcgcgcagatgacgcgctcaaggacttcctggcctttgtcggcggcgaggccaacctcaagggcgtcgacgccatgcccgaggacgtcgcccaggcggtgctctacctggccagcgacgaggcgaggtacgtcagcgcggtcaacctcatggtggacggaggcttcacagccgtaaacaataacctcagggcgtttgaggattagttgaggcatgtatgccagctctgggattgggagggagtattaccactatttcttctgctgttgtgacaagtgtgtgcaagactaataaaccgcagcatgttcatgtagccaacagatgattgaacattccaagtatcattgctgaattcacgc

SEQ ID NO: 3404 - protein, 283 aa, zea mays
MAAAGSSPSFSSSSKRLEGKVALVTGGATGIGEAIVRLFMEHGAKVCIADIQDEAGQQLRDALGGDAQGAMFVHCDVTSEEDVSRAVDAAAERFGALDVMVNNAGVTGAKVTDIRAVDFAEARRVLDVNVHGVFLGMKHAARAMIPRKRGSIVSLASVASAIGGTGPHVYTASKHAVVGLTKSVAAELGRHGVRVNCVSPYAVPTALSMPHLPQGARADDALKDFLAFVGGEANLKGVDAMPEDVAQAVLYLASDEARYVSAVNLMVDGGFTAVNNNLRAFED

SEQ ID NO: 3405 - DNA, 1054 bp, zea mays
  CDS (98)..(901)
gcggcgaccaccggagcgcggaggaggcacaggcgccgatctaaagacgatggccgccgcgggctcctcgccgtccttctcctcctcgagtaagcggctggaagggaaggtggccctcgtcactggtggcgccaccggcatcggtgaggccatcgttcgcctcttcatggagcacggcgccaaggtctgcatcgcggacatccaggatgaggctgggcagcagctgcgcgacgccctgggaggtgacgcgcagggcgccatgttcgtccactgcgacgtgacgtcggaggaggacgtgagccgcgccgtggacgctgcggcggagcggttcggcgcgctggacgtgatggtgaacaacgccggcgtgacgggcaccaaggtgacggacatccgcaacgtggacttcgcggaggcgcgcagggtgctcgacgtcaacgtgcacggcgtgttcctggggatgaagcacgcggcgcgcgctatgatcccgcggaagcggggctccatcgtgtcgctggccagcgtggccagcgccatcggcgggacgggcccgcacgtctacacggcgtccaagcacgccgtggtcgggctcaccaagagcgtcgccgcggagctcggccgccacggggtgcgcgtcaactgcgtgtccccctatgccgtgcccacggcgctgtcgatgccgcacctgccccagggcgcgcgcgcagatgacgcgctcaaggacttcctggcctttgtcggcggcgaggccaacctcaagggcgtcgacgccatgcccgaggacgtcgcccaggcggtgctctacctggccagcgacgaggcgaggtacgtcagcgcggtcaacctcatggtggacggaggcttcacagccgtaaacaataacctcagggcgtttgaggattagttgaggcatttatgccagctctgggattgggagggagtattaccgctatttcttctgctgttgtgacaagtgtgtgcaagactaataaaccgcagcatgttcatgtagccaacagatgattgaacattccaagtatcattgctgaattcacgc

SEQ ID NO: 3406 - protein, 267 aa, zea mays
LEGKVALVTGGATGIGEAIVRLFMEHGAKVCIADIQDEAGQQLRDALGGDAQGAMFVHCDVTSEEDVSRAVDAAAERFGALDVMVNNAGVTGTKVTDIRNVDFAEARRVLDVNVHGVFLGMKHAARAMIPRKRGSIVSLASVASAIGGTGPHVYTASKHAVVGLTKSVAAELGRHGVRVNCVSPYAVPTALSMPHLPQGARADDALKDFLAFVGGEANLKGVDAMPEDVAQAVLYLASDEARYVSAVNLMVDGGFTAVNNNLRAFED

SEQ ID NO: 3407 - DNA, 1204 bp, Glycine max
  CDS (29)..(871)
gcatatagttttcctcctagctagatacatgatcaagtcctcctccatggcttcaattgccaaaatgcttgaaggcaaagtggcgataatcacaggaggagcaagtggcattggtgccgccaccgccaagctattcgtccaacacggcgccaaagtaatcattgccgacgtgcaagacgagttaggccagttccactgcaaaaccctcggcacaacaaacattcactacgtccactgcgacgtaaccagcgactccgacgtcaaaaacgtggtcgaatttgccgtgtccaagtatggcaagctcgacataatgtacaacaacgccggcatctccggagactcaaatcgctccataacgacatccgacaacgaaggctttaagaatgttttcggggttaacgtgtacggagctttcttgggcgccaagcatgccgctagggtcatgatccccgcaaagagaggggttattctcttcacctcaagcgttgcttcgcttctcggcggcgaaacaacgcacgcttacgctgtttcgaagcacgcggtggtggggctaatgaagaacctgtgcgtggaacttggggaacatgggatcagagtgaattgcgtttgtccaggtggaattcccactccgatgctcaacaatgcgttgaagatgaacaagaaagagacgcaggaagtgctgtgtaaggttgcggtgttgaaaggaacggttcttgaagccgaggacatagccaaagctgcagtttatttgtgcagcgacgaggccaagtttgtgagcggagttaactttgtcttggacggaggttatagcatcaccaataattctttcacttctgcgctcaacgctctcatcaacaacaaccatgcttagtaatggctagctatatatccattcccgcattttctgcccagttccatgtgctgaaataattaagctacactatctactttctctgtatttttgtggtctttctgcaagatcgatcaggatggaacacttaattaccacagtttccccctctcatgcaacaatgtagtaccaactagctagttctttttcctaagtgaaaatgtgtgttatgtgatgtataatgatctatgttgatgttgtattcacaaaaataaaataacaataatcaatccgatcgagtgaaaatgtgtgttatgtgatgtataataacattaattatttgtgaatatgatt

SEQ ID NO: 3408 - protein, 280 aa, Glycine max
MIKSSSMASIAKMLEGKVAIITGGASGIGAATAKLFVQHGAKVIIADVQDELGQFHCKTLGTTNIHYVHCDVTSDSDVKNVVEFAVSKYGKLDIMYNNAGISGDSNRSITTSDNEGFKNVFGVNVYGAFLGAKHAARVMIPAKRGVILFTSSVASLLGGETTHAYAVSKHAVVGLMKNLCVELGEHGIRVNCVCPGGIPTPMLNNALKMNKKETQEVLCKVAVLKGTVLEAEDIAKAAVYLCSDEAKFVSGVNFVLDGGYSITNNSFTSALNALINNNHA

SEQ ID NO: 3409 - DNA, 994 bp, Zea mays
  CDS (41)..(829)
cacgcgtgcacaccaccccaacaacccacacaccgcaaccatggtcttcaccatcgatctctccggcaagacgattgtcgtctcgggcggcaaccgcggcatcggactggccatgtccgaggcctgcgccaacgccggcgccaacgtggccattctcttccactcgcaccccaaggcgcacgaggcggccgagaacgtggccaagcagttcaacgtcaagtgcaaggcgtaccagtgcgacgtcggcgacgccaagctcgtcaaggacacggtggcgcagatcgagggcgacctcggcacgcccatccacggcctctgcgccaacgccggtgtctcggtcgtcaagcctgctctggagctcaccaccgaggacttccacaaggtcttcaacgcaaacgtcctcggcgccttcaacacgtgccaggccctcgcgcagcactgggtcgagaagggctacaagacgggctccatcgtcatcaccagctccatgtcgtcgagcctgtacaaccagaagggcctcaacgaccctctgacgcagatcttctacaacgcctccaagggcgccgtgacgaacatggtcaagggtcttgccaccgagtgggtcaagcacggcatccgcgtcaacgccctcgagccgggcttctgcgagacggagcagacgagcggcatggaccccaagattcgcgagtggcaggccgcctcggtgcccatgggccgcttcagccagccgcacgagcaggccgacccggccatcctgctgctgtccgacaaggcgtcgtacatcaccggcacgcagctgcggcccgacggcggcttcagcgcctactaagcgctgcgccgcgacatgtactgcgcacgctccggcctcgatacctgtctactccgggccgggagctgcgcagcagaagggacatacacgcacacacacacacacacgcacaaccgttttgtagttgagcgcaacctgatgaactcacgatactagcacctaaaa

SEQ ID NO: 3410 - protein, 262 aa, Zea mays
MVFTIDLSGKTIVVSGGNRGIGLAMSEACANAGANVAILFHSHPKAHEAAENVAKQFNVKCKAYQCDVGDAKLVKDTVAQIEGDLGTPIHGLCANAGVSVVKPALELTTEDFHKVFNANVLGAFNTCQALAQHWVEKGYKTGSIVITSSMSSSLYNQKGLNDPLTQIFYNASKGAVTNMVKGLATEWVKHGIRVNALEPGFCETEQTSGMDPKIREWQAASVPMGRFSQPHEQADPAILLLSDKASYITGTQLRPDGGFSAY

SEQ ID NO: 3411 - DNA, 1070 bp, Zea mays subsp. mays
  CDS (109)..(960)
agattttgacaacgccttcccaacttgctcgctcccgcaacgacagcgcgcacttggattcggcgaccaccggagcgcggaggaggcacaggcgccgatctagagacgatggccgccgcgggctcctcgccgtccttctcctcctcgagtaagcggctggaagggaaggtggccctcgtcaccggtggcgccaccggcatcggcgaggccatcgttcgcctcttcatggagcacggcgccaaggtctgcatcgcggacatccaggatgaggccgggcagcagctgcgcgacgccctgggaggtgacgcgcagggcgccatgttcgtccactgcgacgtgacgtcggaggaggacgtgagccgcgccgtggacgctgcggcggagcggttcggcgcgctggacgtgatggtgaataacgccggcgtgacgggcaccaaggtgacggacatccgcaccgtggacttcgcggaggcgcgcagggtgctcgacgtcaacgtgcacggcgtgttcctggtgatgaagcacgcggcgcgcgctatgatcccgcggaagcggggctccatcgtgtcgctggccagcgtggccagcgccatcggcgggacgggcccgcacgtctacacggcgtccaagcacgccgtggtcgggctcaccaagagcgtcgccgcggagctcggccgtcatggggtgcgcgtcaactgcgtgtccccctatgccgtgcccacggcgctgtcgatgccgcacctgccccagggcgcgcgcgcagatgacgcgctcaaggacttcctggcctttgtcggcggcgaggccaacctcaagggcgtcgacgccatgcccgaggacgtcgcccaggcggtgctctacctggccagcgacgaggcgaggtacgtcagcgcggtcaacctcatggtggacggaggcttcacagccgtaaacaataacctcagggcgtttgaggattagttgaggcatttatgccagctctgggattgggagggagtattaccactatttcttctgctgttgtgacaagtgagtgcaagactaataaactgcagcatgttcatgtagcc

SEQ ID NO: 3412 - protein, 283 aa, Zea mays subsp. mays
MAAAGSSPSFSSSSKRLEGKVALVTGGATGIGEAIVRLFMEHGAKVCIADIQDEAGQQLRDALGGDAQGAMFVHCDVTSEEDVSRAVDAAAERFGALDVMVNNAGVTGTKVTDIRTVDFAEARRVLDVNVHGVFLVMKHAARAMIPRKRGSIVSLASVASAIGGTGPHVYTASKHAVVGLTKSVAAELGRHGVRVNCVSPYAVPTALSMPHLPQGARADDALKDFLAFVGGEANLKGVDAMPEDVAQAVLYLASDEARYVSAVNLMVDGGFTAVNNNLRAFED

SEQ ID NO: 3413 - DNA, 1197 bp, Glycine max
  CDS (56)..(937)
aacatttgttctagacaagatctccatatctgttcccaaaagcttgtttgtaagaatggcttccggtgaacagaaattccctcctcaacaacaacaaacacagcctgggaaggagcatgctatgactccagtaccccaattcactagccctgactacaagccttcaaataaacttcaagggaagattgcattagtcactgggggtgattctgggattggacgagcggtgtgtaacttgtttgccttagaaggtgctaccgtggccttcacgtatgtgaaggggcatgaggacaaggacgcgagggacacattggaaatgatcaagagagcaaagacttcggatgccaaggatccaatggcaataccatctgatttgggttacgatgagaactgcaagagggtggttgatgaggtcgtgagtgcttatggttgtattgacattctggtaaacaatgcagctgagcagtacgagtgtggaaccgtggaggacatagacgagcctaggcttgagagggtctttcgtacaaatatcttctcctatttcttcatggcgaggcatgccttgaagcacatgaaggaaggaagcagcattatcaacacgacatcagtgaatgcatacaagggacatgcgaaactattggactacacgtccaccaagggggcaattgtggcctatacaaggggtcttgcccttcagctggtgagtaagggaattcgggttaatggggtggctccagggcccatttggacccctttgataccagcctctttcaaggaggaagaaacggcccaatttggagcgcaggtcccaatgaagagagctggtcaacctattgaggttgctccttcctatgtttttcttgcttccaaccaatgctcctcttacataactggacaagtccttcaccccaatggtggaaccgttgtgaatggttaaaccgttggtgatgatgatattcgggatgaatatatgtggcgagagtagtaggccagtgttacgttttgtgtgaatgttttacgatgtgttttaatgcatggctaactcactcaggtcctctctgcactgttagaggtggggcttggaggattatccacttttgaatgtacgagttattagcctaagaaaatgtgtcttttgtagccaaatatatgtaaacaagtaaaagtatataataaagatcggtatgtataaggttt

SEQ ID NO: 3414 - protein, 293 aa, Glycine max
MASGEQKFPPQQQQTQPGKEHAMTPVPQFTSPDYKPSNKLQGKIALVTGGDSGIGRAVCNLFALEGATVAFTYVKGHEDKDARDTLEMIKRAKTSDAKDPMAIPSDLGYDENCKRVVDEVVSAYGCIDILVNNAAEQYECGTVEDIDEPRLERVFRTNIFSYFFMARHALKHMKEGSSIINTTSVNAYKGHAKLLDYTSTKGAIVAYTRGLALQLVSKGIRVNGVAPGPIWTPLIPASFKEEETAQFGAQVPMKRAGQPIEVAPSYVFLASNQCSSYITGQVLHPNGGTVVNG

SEQ ID NO: 3415 - DNA, 1197 bp, Glycine max; identical to SEQ ID NO: 3413
  CDS (122)..(937)

SEQ ID NO: 3416 - protein, 271 aa, Glycine max
MTPVPQFTSPDYKPSNKLQGKIALVTGGDSGIGRAVCNLFALEGATVAFTYVKGHEDKDARDTLEMIKRAKTSDAKDPMAIPSDLGYDENCKRVVDEVVSAYGCIDILVNNAAEQYECGTVEDIDEPRLERVFRTNIFSYFFMARHALKHMKEGSSIINTTSVNAYKGHAKLLDYTSTKGAIVAYTRGLALQLVSKGIRVNGVAPGPIWTPLIPASFKEEETAQFGAQVPMKRAGQPIEVAPSYVFLASNQCSSYITGQVLHPNGGTVVNG

SEQ ID NO: 3417 - DNA, 807 bp, Mycobacterium avium subsp. paratuberculosis str. k10
  CDS (1)..(807)
atgtcgggtctgagcggacgggtagtgctggttaccggcgccggtcgcgggatcggtcgcagccattgccagcggttcgccgaggagggcgccgacgtgatcgcggtggatgtgcccgcggcggctcccgacctcgcgcagaccgccgccgcggtgcaacagcgcggcgtgcgcgcggcgaccgctctggctgacgtcagcgacttcgccgcgttggcggccgcggtggacgaggccgtcggccgactcggtcgcctggacgtgctcgtcggcaacgcgggaatccacccggccgccgcgcccgcgtgggagatcaccccgcagaactggcagcagacgttggatgtcaacctcaccggcgtgtggcacaccgtcaaggcgggcgtcccccacatgagccggaccgcccgaggcggatcgatcgtgatcatcagctccaccagtggtattcgcggaacgcccggcgccgccccgtactccgcgagcaagcacgccgtcgtggggttggcgcgcaccctcgccaacgagctgggaccgcaaggcatccgcgtcaacaccgttcaccccggagcggtggcgaccgcgatggtgctcaacgaggccaccttccggcggctgcggcccgacctggacaacgcgacggcagacgacgccgccgaggcgctcagcgcccggcacctgctgccggttccgtgggtggagccggtcgacgtgagcaatgccgtggtgtttctggcctccgaccaggcgcgctacatcaccggcacccagatcgtggtcgacgccggattgctggccagggcttag

SEQ ID NO: 3418 - protein, 268 aa, Mycobacterium avium subsp. paratuberculosis str. k10
MSGLSGRVVLVTGAGRGIGRSHCQRFAEEGADVIAVDVPAAAPDLAQTAAAVQQRGVRAATALADVSDFAALAAAVDEAVGRLGRLDVLVGNAGIHPAAAPAWEITPQNWQQTLDVNLTGVWHTVKAGVPHMSRTARGGSIVIISSTSGIRGTPGAAPYSASKHAVVGLARTLANELGPQGIRVNTVHPGAVATAMVLNEATFRRLRPDLDNATADDAAEALSARHLLPVPWVEPVDVSNAVVFLASDQARYITGTQIVVDAGLLARA

SEQ ID NO: 3419 - DNA, 834 bp, Burkholderia sp; C1
  CDS (1)..(834)
atggcatggcttgaaggacaaagcgtttttttgacgggtggtgttgcaggtctcggtcgagcgctcgtaaaaagacttgtagaagaaggtgccaacgtcactgtgttggatcgaaatgcacgggggcttgatgagctcgttgaaagttttaagggacgggtcgcgggctcgcccggcgatgtgcgcaacttggccgataaccgcaaggccgtcgaactggctgtggagcgtttcggcaagctggatactttcatcggcaacgccggcatctgggactattctgtgccccttgtcgacctgccggacgatgccatcagcgaagcctttgatgaggtcattggaatcaatctaatgggctacgtgatgggcatcaaagccgcagcgccggcgttggtgcgctcccgagggtcagttatcttgaccctgtcaaactccgctttctatgcaggtggcggcggcgtgctctacaccgcagccaagcacgcggcagtgggactgattaagcaggcggcgcatgagttggccccctatgtgcgcgtcaacggtgtggcacctggcgcgattgcttctgatctgcgtggaccgaagtcgcttgggatgggtgagcagtcgttaacctctgtacccttggccgacctcgtcaaagacattgccccgatcggcaggctgtctgacacagaggagtacaccggtaactatgtctacctggcttctgcccgcaactcagcaccagcaaccggcgtgatcatcaactgcgatggtggcttgggtgtgcgaagcgtccttggccctgccagcggtggcaagggcttactagaaaaattcggcggctga

SEQ ID NO: 3420 - protein, 277 aa, Burkholderia sp; C1
MAWLEGQSVFLTGGVAGLGRALVKRLVEEGANVTVLDRNARGLDELVESFKGRVAGSPGDVRNLADNRKAVELAVERFGKLDTFIGNAGIWDYSVPLVDLPDDAISEAFDEVIGINLMGYVMGIKAAAPALVRSRGSVILTLSNSAFYAGGGGVLYTAAKHAAVGLIKQAAHELAPYVRVNGVAPGAIASDLRGPKSLGMGEQSLTSVPLADLVKDIAPIGRLSDTEEYTGNYVYLASARNSAPATGVIINCDGGLGVRSVLGPASGGKGLLEKFGG

SEQ ID NO: 3421 - DNA, 831 bp, Nocardioides sp. KP7
  CDS (1)..(831)
atggaggtagctatgggctggttggacggacgggtagcgctcgtcacgggcggtgcctcgggtatcggactgtcggtggtcgaacggttcctggccgagggtgcccgagtggcggttctcgaccgttcgaaggagggcgtggagaagctccaggacgagcatcccggcgccgtcgcgttcaccggggacgtgacctcgttcgaggacaatcagcaggccgtcacgggcgtggtcgccgcgttcgggaagttggatgtcttcgttgggaatgcggggatcttcgactacttcgcctcgctcgtcagcttcgagggggacaagctcggtgccgcgttcgacgagatcttcgcggtgaacgtcaaggcctacctgctcggggccagggcggccgtccctgaactgcttaagagcgacgccccgagcatgatcttcacggtctcgaactcaggcttctacacctccggtggggggccgctgtacacggcctcgaagcacgcggtggtcggtgtcgtgcgagaactggcctacgagctggcgccgaagatccgggtgaacggggtggcgcccggcggcaccgtgacggagttgcgcggcatcgagaagttgggtcagggcaacatcgtcctgtcgaccgtccccgacatcgaggacctgatgcgcacgaacccgctgcagaccgcgcagcacccggccgaccacgccggcctctacgtgctgctcgcgtccgccgagaactccagggccgtcacgggagtggtcatcaacagcgacggcggcctcggcatccggggcatgacccagctcgccggcggagtcgacctaaccgtctaa

SEQ ID NO: 3422 - protein, 276 aa, Nocardioides sp. KP7
MEVAMGWLDGRVALVTGGASGIGLSVVERFLAEGARVAVLDRSKEGVEKLQDEHPGAVAFTGDVTSFEDNQQAVTGVVAAFGKLDVFVGNAGIFDYFASLVSFEGDKLGAAFDEIFAVNVKAYLLGARAAVPELLKSDAPSMIFTVSNSGFYTSGGGPLYTASKHAVVGVVRELAYELAPKIRVNGVAPGGTVTELRGIEKLGQGNIVLSTVPDIEDLMRTNPLQTAQHPADHAGLYVLLASAENSRAVTGVVINSDGGLGIRGMTQLAGGVDLTV

SEQ ID NO: 3423 - DNA, 1187 bp, Glycine max
  CDS (38)..(919)
gatctccatatctgttcccaaaagcttgtttgtaagaatggcttccggtgaacagaaattccctcctcaacaacaacaaacacagcctgggaaggagcatgctatgactccagtaccccaattcactagccctgactacaagccttcaaataaacttcaagggaagattgcattagtcactgggggtgattctgggattggacgagcggtgtgtaacttgtttgccttagaaggtgctaccgtggccttcacgtatgtgaaggggcatgaggacaaggacgcgagggacacattggaaatgatcaagagagcaaagacttcggatgccaaggatccaatggcaatagcatctgatttgggttacgatgagaactgcaagagggtggttgatgaggtcgtgagtgcttatggttgtattgacattctggtcaacaatgcagctgagcagtacgagtgtggaaccgtggaggacatagacgagcctaggcttgagagggtctttcgtacaaatatcttctcctatttcttcatggcgaggcatgccttgaagcacatgaaggaaggaagcagcattatcaacacgacatcagtgaatgcatacaagggacatgcgaaactattggactacacgtccaccaagggggcaattgtggcctatacaaggggtcttgcccttcagctggtgagtaagggaattcgggttaatggggtggctccagggcccatttggacccctttgataccagcctctttcaaggaggaagaaacggcccaatttggagcgcaggtcccaatgaagagagctggtcaacctattgaggttgctccttcctatgtttttcttgcttccaaccaatgctcctcttacataactggacaagtccttcaccccaatggtggaaccgttgtgaatggttaaaccgttggtgatgatgatattcgggatgaatatatgtggcgagagtagtaggccagtgttacgttttgtgtgaatgttttacgatgtgttttaatgcatggctaactcactcaggtcctctctgcactgttagaggtggggcttggaggattatccacttttgaatgtacgagttattagcctaagaaaatgtgtcttttgtagccaattatatgtaaacaagtaaaagtatataataaagatcggtatgtataaggtttaaacttta

SEQ ID NO: 3424 - protein, 293 aa, Glycine max
MASGEQKFPPQQQQTQPGKEHAMTPVPQFTSPDYKPSNKLQGKIALVTGGDSGIGRAVCNLFALEGATVAFTYVKGHEDKDARDTLEMIKRAKTSDAKDPMAIASDLGYDENCKRVVDEVVSAYGCIDILVNNAAEQYECGTVEDIDEPRLERVFRTNIFSYFFMARHALKHMKEGSSIINTTSVNAYKGHAKLLDYTSTKGAIVAYTRGLALQLVSKGIRVNGVAPGPIWTPLIPASFKEEETAQFGAQVPMKRAGQPIEVAPSYVFLASNQCSSYITGQVLHPNGGTVVNG

SEQ ID NO: 3425 - DNA, 801 bp, Novosphingobium aromaticivorans
  CDS (1)..(801): transl_table=11
gtgactgcaagactcgaaggacaggtggcgctgctgaccggcggcgccaccgggatcggcgcggcggtcgtcgcccgctatctcgaagaaggtgcaaaggtaggcgtcctggtcagggacgccgaccaagctgacatggtgcgcatgcggcatggcaaaggaatagtcgtggttgagggcgatgtccgcaactattccgacaaccagaacgcggttgcggcgaccgtggctaccttcggcaagctcgacgtgtttgtcggcaatgtcggcatctgggattacatgaccccgctggcggacatggatccggacaagctctccgaaacgttggacgagatttttggggtcaacgtcaagggctacttcttcggtgcccgcgccgcaatcccggaactcaggaagaccaagggcagcatcatcttcacggcctcgacctcgagcttctataccggcggcggtggcacgccctatgtggcatcgaagcacgcggtccttggtctgatccgccagctggcatgggaacttacccccgatgtcagggtcaacggcgtggctccgggcggcacccggacacccctcggcggcaccaaggcgggcggaacggccgatgtccacatggaggacatggaaggcctcgacgcgatgattgccgggatgacgccgctcgcgcggatcgctgaaccggatgatcacacagggctctatgccttgctagcctcgcgtcgggactcggcctacatgacaggagcggttttgctcagcgatggtggcatcggcattggcaagcgtcccgaaggctga

SEQ ID NO: 3426 - protein, 266 aa, Novosphingobium aromaticivorans
MTARLEGQVALLTGGATGIGAAVVARYLEEGAKVGVLVRDADQADMVRMRHGKGIVVVEGDVRNYSDNQNAVAATVATFGKLDVFVGNVGIWDYMTPLADMDPDKLSETLDEIFGVNVKGYFFGARAAIPELRKTKGSIIFTASTSSFYTGGGGTPYVASKHAVLGLIRQLAWELTPDVRVNGVAPGGTRTPLGGTKAGGTADVHMEDMEGLDAMIAGMTPLARIAEPDDHTGLYALLASRRDSAYMTGAVLLSDGGIGIGKRPEG

SEQ ID NO: 3427 - DNA, 813 bp, Escherichia coli O157:H7 EDL933
  CDS (1)..(813): transl_table=11
atgagcgatctgcataacgagtccatttttattaccggcggcggatcgggattagggctggcgctggtcgagcgatttatcgaagaaggcgcgcaggttgccacgctggaactgtcggcggcgaaagtcgccagtctgcgtcagcgatttggtgaacatattctggcggtggaaggcaacgtgacctgttatgccgattatcaacgcgcggtcgatcagatcctgactcgttccggcaagctggattgttttatcggcaatgcgggcatctgggatcacaatgcctcactggttaatactcccgcagagacgctcgaaaccggcttccacgagctgtttaacgtcaacgtactcggttacctgctgggtgcaaaagcctgcgctccggcgttaatcgccggtgaaggcagcatgattttcacactatcaaatgccgcctggtatcccggcggcggtggcccgctgtacaccgccagtaaacatgccgcaaccgggcttattcgccaactggcttatgaactggctccgaaagtacgggtgaatggcgtcggcccttgtggtatggccagcgacctgcgcggcccacaggcgctcgggcaaagtgaaacctcaataatgcagtctctgacgccggagaaaattgccgccattttaccgctgcaatttttcccgcaaccggctgattttacgggtccgtatgtgatgttggcatcgcggcgcaataatcgcgcattaagcggtgtgatgatcaacgctgatgcgggtttagcaattcgcggcattcgccacgtagcggctgggttggatctttaa

SEQ ID NO: 3428 - protein, 270 aa, Escherichia coli O157:H7 EDL933
MSDLHNESIFITGGGSGLGLALVERFIEEGAQVATLELSAAKVASLRQRFGEHILAVEGNVTCYADYQRAVDQILTRSGKLDCFIGNAGIWDHNASLVNTPAETLETGFHELFNVNVLGYLLGAKACAPALIAGEGSMIFTLSNAAWYPGGGGPLYTASKHAATGLIRQLAYELAPKVRVNGVGPCGMASDLRGPQALGQSETSIMQSLTPEKIAAILPLQFFPQPADFTGPYVMLASRRNNRALSGVMINADAGLAIRGIRHVAAGLDL

SEQ ID NO: 3429 - DNA, 813 bp, Shigella flexneri 2a str. 301
  CDS (1)..(813): transl_table=11
atgagcgatctgcataacgagtccatttttattaccggcggcggatcgggattagggctggcgctggtcgagcgatttatcgaagaaggcgcgcaagttgccacgctggaactgtcggcggcaaaagtcgccagtctgcgtcagcgatttggcgaacatattctggcggtggaaggtaacgtgacctgttatgccgattatcaacgcgcggtcgatcagatcctgactcgttccggcaagctggattgttttatcggcaatgcaggcatctgggatcacaatgcctcactggttaatactcccgcagagacgctcgaaaccggcttccacgagctgtttaacgtcaacgtactcggttacctgctgggcgcaaaagcctgcgctccggcgttaatcgccagtgaaggcagcatgattttcacactgtcaaatgccgcctggtatcctggcggcggtggcccgctgtacaccaccagtaaacatgccgcaaccggacttattcgccaactggcttatgaactggcaccgaaagtgcgggtgaatggcgtcggcccgtgtggtatggccagcgacctgcgcggcccacaggcgctcgggcaaagtgaaacctcgataatgcagtctctgacgccggagaaaattgccgccattttaccgctgcaatttttcccgcaaccggcggattttacggggccgtatgtgatgttggcatcgcggcgcaataatcgcgcattaagcggtgtgatgatcaacgctgatgcgggtttagcgattcgcggcattcgccacgtagcggctgggctggatctttaa

SEQ ID NO: 3430 - protein, 270 aa, Shigella flexneri 2a str. 301
MSDLHNESIFITGGGSGLGLALVERFIEEGAQVATLELSAAKVASLRQRFGEHILAVEGNVTCYADYQRAVDQILTRSGKLDCFIGNAGIWDHNASLVNTPAETLETGFHELFNVNVLGYLLGAKACAPALIASEGSMIFTLSNAAWYPGGGGPLYTTSKHAATGLIRQLAYELAPKVRVNGVGPCGMASDLRGPQALGQSETSIMQSLTPEKIAAILPLQFFPQPADFTGPYVMLASRRNNRALSGVMINADAGLAIRGIRHVAAGLDL

SEQ ID NO: 3431 - DNA, 813 bp, Rhodococcus erythropolis
  CDS (1)..(813): transl_table=11
atgggttggctggaagacaacgtcatgatcgtcaccggcggagggtcgggcctaggccgggcgctggtcgagcgattcctgggagagggagcccgggtgggtgtcctggagaagtcggcggagaaggctgagaagcttgccaacgacttcggcgaggatgtcctcgtggtcgaaggcgacgtgcgcaagtacgacgacaatgcgcgcgtcgtccaggaaacggttcgccagttcggtcgcctcgacacgttcgtcgcgaacgccgcgatctgggacttctcgacgaagatggtcgatatcccggtggaccgactggacgccctcttcgacgaaatgttccacatcaacgtcaagggctacttgcacggtgcacgtgcggcggtcgaggagctcgccgccaccggaggctcgatcatctacaccgtgtcgaacgccggcttctaccccggcggcggcggcccgctctacaccgcgtcgaagcacgcggtagtcgggctgatcaaggaactggccttcgaactcggccccaagatccgcgtcaacggagtggctccgggcgcaatgcccaccgatctgagaggacctggttcgctcggaatgggcgaaaccaccatcacctcagtgccgctcggcgatctggtcaaacagtgcaccgtgctgcaggagctgcccgaggcggcggactacaccgggcactatgttctgctggcttcgaaggcgaactcgaggacggcaaccggcgcgattatcaactgtgacggcgggatgggggtgcgcggcttggccgagacggccggcggaaatgacctgtaa

SEQ ID NO: 3432 - protein, 270 aa, Rhodococcus erythropolis
MGWLEDNVMIVTGGGSGLGRALVERFLGEGARVGVLEKSAEKAEKLANDFGEDVLVVEGDVRKYDDNARVVQETVRQFGRLDTFVANAAIWDFSTKMVDIPVDRLDALFDEMFHINVKGYLHGARAAVEELAATGGSIIYTVSNAGFYPGGGGPLYTASKHAVVGLIKELAFELGPKIRVNGVAPGAMPTDLRGPGSLGMGETTITSVPLGDLVKQCTVLQELPEAADYTGHYVLLASKANSRTATGAIINCDGGMGVRGLAETAGGNDL

SEQ ID NO: 3433 - DNA, 843 bp, Photorhabdus luminescens subsp. laumondii TTO1
  CDS (1)..(843): transl_table=11
atgagttggatcaaagatcaagtcattttattaacaggcggtggctccggtttaggtttggctttaatagagcgttttattgctgaaggcgccaaagtgggcgttttggagttatcggcagaaaaagcgacagctttggcacactgttttggtaacgatatctgtgttattcacggtgatgttgtctcttttgaggacaatgagcgagcagtggctgaaactgttcggtgttttggcaaactagactgctttgttggtaatgccgggatatgggatcacaaaattagcctgcttgacgcctcaccagagcagattgataaaggatttgatgagctgatgggggttaacctgaaagggtatattctaggggctaaagccgcgttaccggcgctaaccgcatcagaaggcagcatgatttttacgttgtcaaactcgtcatggttttctggtggtggaggggtgttgtataccgccagcaagcacggtgcggtcggcatgatccgccagttagcttatgaattagcgccagttatcagggttaatggtgttgcgccttgtgggatgccaagtgatcttcgtggggcggcttcactatctcagcaagatagatgcattacagataacctgtcattagaaagtctcagtgcaattttacctttgcaattcatacctcagccaaaagatttcaccggtccgtatgtcatgttggcttcccgtgccaataaccgcactttaacgggggtgatgataacggctgatgccggattaagtatccgtggcattcgccaaacgacagcgggagtgatgtctccgaccaagaaggagagttcagatgaccgttaa

SEQ ID NO: 3434 - protein, 280 aa, Photorhabdus luminescens subsp. laumondii TTO1
MSWIKDQVILLTGGGSGLGLALIERFIAEGAKVGVLELSAEKATALAHCFGNDICVIHGDVVSFEDNERAVAETVRCFGKLDCFVGNAGIWDHKISLLDASPEQIDKGFDELMGVNLKGYILGAKAALPALTASEGSMIFTLSNSSWFSGGGGVLYTASKHGAVGMIRQLAYELAPVIRVNGVAPCGMPSDLRGAASLSQQDRCITDNLSLESLSAILPLQFIPQPKDFTGPYVMLASRANNRTLTGVMITADAGLSIRGIRQTTAGVMSPTKKESSDDR

SEQ ID NO: 3435 - DNA, 828 bp, Pseudomonas sp. ND6
  CDS (1)..(828): transl_table=11
atggtcactgcaaccgcggtcaccattaatcaaagggaatgtacgtgtatgggcaatcaacaagtcgtttcgataaccggtgcaggctcaggaatcggtctcgaactggttcggtcctttaagtcggccggttattacgtatccgctctcgtacgaaacgaggagcaagaggcgcttctttgcaaagagttcaaggacgcactcgagattgtagtgggcgatgtccgggaccacgcaacaaatgagaagctgataaagcaaacaatcgatagattcggtcatcttgattgttttattgcaaatgccggtatctgggattacatgctgagcatcgaagagccttgggagaaaatatcgagcagttttgacgaaatattcgacattaatgtcaagagctatttcagtggcatcagtgccgccctgccggaactgaaaaagactaacggatcagtggtgatgaccgcttcggtgtcgtcccatgcggtcggtggtggtggttcttgctacatcgccagcaagcatgcggtgctcggtatggttaaggctttggcctacgaattggcccccgaagttcgcgtgaacgctgtttcgccggggggcaccgtgacgtctctgtgcggtcccgcgagcgccggtttcgacaaaatgcacatgaaagacatgcccggcatcgacgatatgatcaaaggtctcacgcctcttgggtttgcagccaagcccgaagacgtggtggcaccctatttgttgctggcttcgcgaaagcaaggaaaattcatcaccggcaccgtgattagcattgatggcggtatggcgctcggtcgcaagtga

SEQ ID NO: 3436 - protein, 275 aa, Pseudomonas sp. ND6
MVTATAVTINQRECTCMGNQQVVSITGAGSGIGLELVRSFKSAGYYVSALVRNEEQEALLCKEFKDALEIVVGDVRDHATNEKLIKQTIDRFGHLDCFIANAGIWDYMLSIEEPWEKISSSFDEIFDINVKSYFSGISAALPELKKTNGSVVMTASVSSHAVGGGGSCYIASKHAVLGMVKALAYELAPEVRVNAVSPGGTVTSLCGPASAGFDKMHMKDMPGIDDMIKGLTPLGFAAKPEDVVAPYLLLASRKQGKFITGTVISIDGGMALGRK

SEQ ID NO: 3437 - DNA, 795 bp, Mycobacterium avium subsp. paratuberculosis K-10
  CDS (1)..(795): transl_table=11
atgaccggctggcttgacggcaagcgcgccctcgtcgtcggcgcggggtcgggaatcgggcgcgccgtcgtcgacgccttcgccgccgagggcgcgaaagtcgctgcgctggaacgcgatagcgacaagtgcgaccggctgcgccggcagctgcccgaggtggccgtcgccgagggcgacgccaccacccgccaggccaacgaacgggccgtggcgctcgcggtggacaccttcggcgggctggacaccctggtcaactgcgtcggggtgttcgacttctaccgcggggtggccgacatcgacgcgggcgcgctcgccgacgcgttcgacgagatgtttcgcaccaacgtgctgagccacctgcagtcggttaaggcggcgctgcccgcgctgcgggccgccggtgcttcctcgatcgtgctgaccgagtccgcatcgtcgttctatccgggccgcggcggggtgctctacgtgtcgtcgaaattcgcggtgcgcgggctggtttcggcgttggcgcacgagctggcgccggggatccgggtcaacggcgtggccccgggcggcacgctgggcaccgacctgcgcggcctggccagcctggggctgcagggcacccgcctggacgacgccccggaccgggcggccgaggtggccgcccgcactcccctgcgggtcgcgctgtccggcgccgaccatgcctggagtttcgtgttcctggcctccgaccggtcccgcggcatcaccggcgaaaccgtaaggcccgacggcggattcgggctggggacgccccggtga

SEQ ID NO: 3438 - protein, 264 aa, Mycobacterium avium subsp. paratuberculosis K-10
MTGWLDGKRALVVGAGSGIGRAVVDAFAAEGAKVAALERDSDKCDRLRRQLPEVAVAEGDATTRQANERAVALAVDTFGGLDTLVNCVGVFDFYRGVADIDAGALADAFDEMFRTNVLSHLQSVKAALPALRAAGASSIVLTESASSFYPGRGGVLYVSSKFAVRGLVSALAHELAPGIRVNGVAPGGTLGTDLRGLASLGLQGTRLDDAPDRAAEVAARTPLRVALSGADHAWSFVFLASDRSRGITGETVRPDGGFGLGTPR

SEQ ID NO: 3439 - DNA, 795 bp, Dechloromonas aromatica RCB
  CDS (1)..(795): transl_table=11
atgggctggctcgatggctacgtggcgctggtgacaggcggtggttccggaatcggacgcgccgtggtcaaaagatatcttcaggaaggctgcaccggggtcggtgtgatggcgcgtagccagaagcaggccgacagcctggttgccgagttcggcgaccgggttgtcgtcagcctgggcgacgtgcgttccggggcggataaccgggccgcggtggacaccaccgtcgggcgcttcggcaagctcgatacgctggtcggcaacgccggggtctgggactttttcacccggctcgaaaagatgagcctggaagatatcgaccgcagcttcgacgaaatcttcggggtcaatgtgaagggctatgtgctggctgcccgcgctgctgccgaggcgctgcgggccagccggggcagcatgatcttcacgctgtccaactcggcctactacgccgggggcggcgggccgctctatgtggcttccaagcacgctgggcttggcctgatcaagcaactggcctacgagttcgcgccggatgtccgcgtcaacggcgtggcaccgggcgggacggtgacgccgttgcgcgggccggaaagtcttggcaagggcgagcgccgactgtcggaaattccgaatttccaggaaagcgtcgccagcgtcatgccgctgaagatgatagcccagccggaagaccatgccggtcattacgtgctgctggcctcgaaagagaacagtcgggcgacaacggcggcggtgatccagagcgatggtgggtgggagataaggccgatgagatga

SEQ ID NO: 3440 - protein, 264 aa, Dechloromonas aromatica RCB
MGWLDGYVALVTGGGSGIGRAVVKRYLQEGCTGVGVMARSQKQADSLVAEFGDRVVVSLGDVRSGADNRAAVDTTVGRFGKLDTLVGNAGVWDFFTRLEKMSLEDIDRSFDEIFGVNVKGYVLAARAAAEALRASRGSMIFTLSNSAYYAGGGGPLYVASKHAGLGLIKQLAYEFAPDVRVNGVAPGGTVTPLRGPESLGKGERRLSEIPNFQESVASVMPLKMIAQPEDHAGHYVLLASKENSRATTAAVIQSDGGWEIRPMR

SEQ ID NO: 3441 - DNA, 780 bp, Pseudomonas putida
  CDS (1)..(780): transl_table=11
atgggcaatcaacaagtcgtttcgataaccggtgccggctcaggaatcggtctcgaactggttcgatcctttaagttggccggttattgcgtatccgctctcgtgcgaaacgaggagcaagaggcgcttctttgcaatgagttcaaggacgcactcgagatcgtagtgggcgatgtccgggaccacgcgacaaatgagaagctgataaagcagacaattgatagattcggtcatctcgattgtttcatcgcaaatgccggtatttgggattacatgctgaatatcgaagagccttgggagaaaatctcgagcagttttgacgaaatattcgacatcaatgtcaagagctatttcagtggcatcagtgccgccctgcccgagctgaaaaagactaacggatcagtggtgatgaccgcttcggtgtcgtcccatgcggtcggtggtggtggttcttgctacatcgccagcaagcatgcggtgctgggtatggtcaaggctttggcctacgaattggcccccgaaattcgcgtgaacgctgtttcgcctggcggcaccgtgacgtctctgtgcggtcccgctagcgccggtttcgacaaaatgcacatgaaagacatgcccggcatcgacgatatgatcaaaggtctcacacctcttgggtttgcagccaagcccgaagacgtggtggcaccctatctgttgctggcttcgcgaaagcaaggaaaattcatcactggcaccgtgattagcattgatggcggtatggcgctcggtcgcaagtga

SEQ ID NO: 3442 - protein, 259 aa, Pseudomonas putida
MGNQQVVSITGAGSGIGLELVRSFKLAGYCVSALVRNEEQEALLCNEFKDALEIVVGDVRDHATNEKLIKQTIDRFGHLDCFIANAGIWDYMLNIEEPWEKISSSFDEIFDINVKSYFSGISAALPELKKTNGSVVMTASVSSHAVGGGGSCYIASKHAVLGMVKALAYELAPEIRVNAVSPGGTVTSLCGPASAGFDKMHMKDMPGIDDMIKGLTPLGFAAKPEDVVAPYLLLASRKQGKFITGTVISIDGGMALGRK

SEQ ID NO: 3443 - DNA, 1056 bp, Mycobacterium sp. MCS
  CDS (1)..(1056): transl_table=11
gtgcgaggaactggctacgctgctggccggggcgaccggcgatgcactgaacgtcgccaacgagttcgcagaggtcgtcgtgcgccgagtgaccactcgcaacggagctcggctgttgattcaggcgccaaaatcggcgcagtgggtctcgctggatgccttggagatcgaggcgctgacctggcagaacccagccaccttagcggccatggtggggaacgcaggtactccgttgattctgggcgacgagatatgactggctggctggcgggcaaacgcgcattgatcgtcggcggaggttcgggtatcggtcgggccaccgtcgacgcgttcctgaacgaggatgcccgggtggccgtgctcgagtacgacagcggtaagtgcgccacgctgcgccagcagctgcccgacgttccggtgatcgagggcgatgggaccacccgcaccgccaacgacgaagcagtgcaggtcgctgtcgacgccttcggcggactcgacacattggtgaactgcgtggggattttcgatttctaccgccgtattcaggacatccccgccgagcgaatcgaccaggcgttcgacgaaatgtttcgcatcaacgtcctgagtcatatccactcagtcaaggcagcagtgccggcgctgatgggccaggacggcgcctcgatcgtgctcaccgagtccgcgtcatcgttctatccaggacgcggcggcctgctgtatgtggcgtcgaagttcgcggtgcgcggcgtagtcactgcactggctcacgaactcgcgccgaggatccgtgtgaacggtgtcgcccccggggggacgttgaacaccgacctgcgcggactcgacagcctcgaccttggcgcccgccgtctggatgctgcaccagatcgggcccgcgaattggctgcccgcacaccgctgggcgtggccctatcgggtcacgaccacgcgtggagttacgtcttcctcgcttctcaccgctcccgcgggctcaccggcgaaacgatccatcccgacggcggtttcagcctcggacccccaccccagcggaattga

SEQ ID NO: 3444 - protein, 351 aa, Mycobacterium sp. MCS
MRGTGYAAGRGDRRCTERRQRVRRGRRAPSDHSQRSSAVDSGAKIGAVGLAGCLGDRGADLAEPSHLSGHGGERRYSVDSGRRDMTGWLAGKRALIVGGGSGIGRATVDAFLNEDARVAVLEYDSGKCATLRQQLPDVPVIEGDGTTRTANDEAVQVAVDAFGGLDTLVNCVGIFDFYRRIQDIPAERIDQAFDEMFRINVLSHIHSVKAAVPALMGQDGASIVLTESASSFYPGRGGLLYVASKFAVRGVVTALAHELAPRIRVNGVAPGGTLNTDLRGLDSLDLGARRLDAAPDRARELAARTPLGVALSGHDHAWSYVFLASHRSRGLTGETIHPDGGFSLGPPPQRN

SEQ ID NO: 3445 - DNA, 906 bp, Mycobacterium sp. MCS
  CDS (1)..(906): transl_table=11
gtgggcagatgcagagcaacaagagcattgcgcatcaccggagggacgatagttttgagttggttgaccgggcaagtcgccctggtgaccggcggggcagccggaatcggtttggccgtggtcgagcgtttcttggccgagggcgcatgcgtgggcgtcctggatcgctcggaaggcgacctggctaccatcggcaacgccgacggcaggctcatcgcggtaacaggtgacgtgacgtcgtatgcagacaacgtcatggcggtgcgcgaaacggtcgatgcgttcggaaagctcgacgtcttcgtcggcaacgctgggatcttcgattactttgcccctttggtgggtttcgacggagccgacctcagcagcgccttcgatgagatcttcgcggtcaatgtaaagggctacctccttggtgccagggccgccgttcctgaactcctcaaaagcgatggcccgagcatgatcttcaccgtctccaactctggcttctatgccgccggtggcggcccgctgtacaccgcttccaagcacgcggtcgttggcgtagtgcgtgaactggcctacgagttggcgccgaagatcagggtgaatggcgtcgctccaggcggcacggtaacgggcctgcgtggaatcgaggacctcggccagggtcaggacgtgttgtcatcggtgcccggcatcgccgacattatgagtactacaaacccattgcagtacgcgcagcagcccgccgatcacgccggcctgtatctgctactcgcgtcggcagacaactcgcgagcggtgaccggcgtcgtcatcaacagcgacggcggcttgggcgtgcggggcctcaaccagccgtccggagggacggaacttgccaccggcgcgatgcgcatcgacgtcgggtcaacatag

SEQ ID NO: 3446 - protein, 301 aa, Mycobacterium sp. MCS
MGRCRATRALRITGGTIVLSWLTGQVALVTGGAAGIGLAVVERFLAEGACVGVLDRSEGDLATIGNADGRLIAVTGDVTSYADNVMAVRETVDAFGKLDVFVGNAGIFDYFAPLVGFDGADLSSAFDEIFAVNVKGYLLGARAAVPELLKSDGPSMIFTVSNSGFYAAGGGPLYTASKHAVVGVVRELAYELAPKIRVNGVAPGGTVTGLRGIEDLGQGQDVLSSVPGIADIMSTTNPLQYAQQPADHAGLYLLLASADNSRAVTGVVINSDGGLGVRGLNQPSGGTELATGAMRIDVGST

SEQ ID NO: 3447 - DNA, 816 bp, Rhodococcus sp. RHA1
  CDS (1)..(816): transl_table=11
atgggttggctggaagacaacgtcatgatcgtcaccggcggagggtcgggcctaggccgggcgctggtcgagcgattcctgggagagggagcccgggtgggtgtcctggagaagtcggcggagaaggctgagaagcttgccaacgacttcggcgaggatgtcctcgtggtcgaaggcgacgtgcgcaagtacgacgacaatgcgcgcgtcgtccaggaaacggttcgccagttcggtcgcctcgacacgttcgtcgcgaacgccgcgatctgggacttctcgacgaagatggtcgatatcccggtggaccgactggacgccctcttcgacgaaatgttccacatcaacgtcaagggctacttgcacggtgcacgtgcggcggtcgaggagctcgccgccaccggaggctcgatcatctacaccgtgtcgaacgccggcttctaccccggcggcggcggcccgctctacaccgcgtcgaagcacgcggtagtcgggctgatcaaggaactggccttcgaactcggccccaagatccgcgtcaacggggtggctccgggcgcaatgcccaccgatctgaggggacctggttcgctcggaatgggcgaaaccaccatcacctcagcggtatccctcggtgatctggtcaaacagtgcacagtgctgcaggagctgcccgaggctgcggactacaccgggcactacgttctgctggcttcgaaggcgaactcgaggacggcaaccggcgcgatcatcaactgtgacggcgggatgggtgtgcgcggcttggccgagacggccggcggaaacgacctgtaa

SEQ ID NO: 3448 - protein, 271 aa, Rhodococcus sp. RHA1
MGWLEDNVMIVTGGGSGLGRALVERFLGEGARVGVLEKSAEKAEKLANDFGEDVLVVEGDVRKYDDNARVVQETVRQFGRLDTFVANAAIWDFSTKMVDIPVDRLDALFDEMFHINVKGYLHGARAAVEELAATGGSIIYTVSNAGFYPGGGGPLYTASKHAVVGLIKELAFELGPKIRVNGVAPGAMPTDLRGPGSLGMGETTITSAVSLGDLVKQCTVLQELPEAADYTGHYVLLASKANSRTATGAIINCDGGMGVRGLAETAGGNDL

SEQ ID NO: 3449 - DNA, 813 bp, Rhodococcus sp. RHA1
  CDS (1)..(813): transl_table=11
atgggttggctagaaggcaacgttgcggttatcaccggtggcggatcgggcctgggtagggcgctggttgagcgattcatcgaggagggcgcaaaagtaggagtcctggagaggtcggcggagaaggtcaagaagcttgcggctgatttcggcgagaatgtcgtcactgtcgagggcgacgtgagcaagtacgaggacaacgcttcggtcgtgcgagaaacggtgcgacagttcggccgcctcgacaccttcgtgggtaacgcggcgatctgggacttttcgacaaagctggtcgacatcccggaggacagactggacccgctcttcgacgagatgttccacatcaacgtcaagggctatctgaacggggcgaaagcggcagtcaaggagcttgcactcacaggtggttcgatcgtcttcacggtgtccaacgccggtttctacccaggtggcggcgggccgctgtacacggcctcgaagcacgcggtcgtgggtctggtcaaggaactggccttcgaattcgcccccaaaatccgagtaaacggagtggcccctggtgccatggccacggatctgcgcgggccaggatcgatcggactcggcgaaacgaacgtctcgtccctcccgctcgcagatctgatcaagcagtgcacggtactgcaggaactctgtgagcccgcggattacactgggcactacgtcctgctcgcctcgaaggataattcacgaaccgcgactggtgcgatcatcaactgtgacggcggaatgggcgtacgcggcctcgccgaaaccgcaggcggaaatgacctttag

SEQ ID NO: 3450 - protein, 270 aa, Rhodococcus sp. RHA1
MGWLEGNVAVITGGGSGLGRALVERFIEEGAKVGVLERSAEKVKKLAADFGENVVTVEGDVSKYEDNASVVRETVRQFGRLDTFVGNAAIWDFSTKLVDIPEDRLDPLFDEMFHINVKGYLNGAKAAVKELALTGGSIVFTVSNAGFYPGGGGPLYTASKHAVVGLVKELAFEFAPKIRVNGVAPGAMATDLRGPGSIGLGETNVSSLPLADLIKQCTVLQELCEPADYTGHYVLLASKDNSRTATGAIINCDGGMGVRGLAETAGGNDL

SEQ ID NO: 3451 - DNA, 804 bp, Mycobacterium sp. JLS
  CDS (1)..(804): transl_table=11
atgactggctggctggcgggcaaacgcgcgttaatcgtgggagcaggttcgggtatcggtcgggccacggtcgacgcgttcctgaacgaggatgcccgggtggccgtgctcgagtacgacagcgataagtgcgccacgctgcgccagcagctgcccgacgttccggtgatcgagggcgatgggaccactcgcaccgccaacgacgaagcagtgcaggtcgctgtcgacgccttcggcggactcgacacattggtgaactgcgtggggattttcgatttctaccgccgtattcaggacatccccgccgagctgatcgaccaggcgttcgacgaaatgtttcgcatcaacgtcctgagtcatatccactcagtcaaggcagcagtgccggcgctgatgggccaggacggcgcctcgatcgtgctcaccgagtccgcgtcatcgttctatccaggacgcggcggcctgctgtatgtggcgtcgaagttcgcggtgcgcggcgtagtcactgcactggctcacgaactcgcgccgaggatccgtgtgaacggtgtcgcccccggggggacgttgaacaccgacctgcgcggactcgacagcctcgaccttggcgcccgccgtctggatgctgcaccagatcgggcccgcgaattggctgctcgcacaccgctgggcgtggccctatcgggtgaagaccacgcctggagttacgtcttcctcgcttctcaccgctcccgcgggctcaccggcgaaacgatccatcccgacggcggtttcagcctcggacccccaccccagcggaattga

SEQ ID NO: 3452 - protein, 267 aa, Mycobacterium sp. JLS
MTGWLAGKRALIVGAGSGIGRATVDAFLNEDARVAVLEYDSDKCATLRQQLPDVPVIEGDGTTRTANDEAVQVAVDAFGGLDTLVNCVGIFDFYRRIQDIPAELIDQAFDEMFRINVLSHIHSVKAAVPALMGQDGASIVLTESASSFYPGRGGLLYVASKFAVRGVVTALAHELAPRIRVNGVAPGGTLNTDLRGLDSLDLGARRLDAAPDRARELAARTPLGVALSGEDHAWSYVFLASHRSRGLTGETIHPDGGFSLGPPPQRN

SEQ ID NO: 3453 - DNA, 1542 bp, Mycobacterium sp. KMS
  CDS (1)..(1542): transl_table=11
atgcccaagactacgacaggtggctgggtgttcttaccgaggacattcactattacatgccggtgcggatcaccaccgccgccggcgccggattcgatagctcaccgggaatggcgcatttcgacgagaacaaatactcactcagtcgccgcgttgcccgattcgccaccgagcatgcctggactgaggatccgccgtcgcgcctgcgccacttcatcaccaacgtgcgcacattcctcaccgacgacgccgaccacctcgcggtcgacagcgctgagttgttgttccgcagccgcggcgacgtcaatgagtccacgctcctctcatgcggtcgtgaagatcttctacgtcgcgatggcaacgccctcaaactcgcccggcgcacaatcgccgtcgatgaatcagtgcttcgaatgcagaatctggcggtattcctatgagctcgaatcgacccggcgagggcgcgcagtcaccaccacaatcggggtgcgaggaactggctacgctgctggccggggcgaccggcgatgcactgaacgtcgccaacgagttcgcagaggtcgtcgtgcgccgagtgaccactcgcaacggagctcggctgttgattcaggcgccaaaatcggcgcagtgggtctcgctggatgccttggagatcgaggcgctgacctggcagaacccagccaccttagcggccatggtggggaacgcaggtactccgttgattctgggcgacgagatatgactggctggctggcgggcaaacgcgcattgatcgtcggcggaggttcgggtatcggtcgggccaccgtcgacgcgttcctgaacgaggatgcccgggtggccgtgctcgagtacgacagcggtaagtgcgccacgctgcgccagcagctgcccgacgttccggtgatcgagggcgatgggaccacccgcaccgccaacgacgaagcagtgcaggtcgctgtcgacgccttcggcggactcgacacattggtgaactgcgtggggattttcgatttctaccgccgtattcaggacatccccgccgagcgaatcgaccaggcgttcgacgaaatgtttcgcatcaacgtcctgagtcatatccactcagtcaaggcagcagtgccggcgctgatgggccaggacggcgcctcgatcgtgctcaccgagtccgcgtcatcgttctatccaggacgcggcggcctgctgtatgtggcgtcgaagttcgcggtgcgcggcgtagtcactgcactggctcacgaactcgcgccgaggatccgtgtgaacggtgtcgcccccggggggacgttgaacaccgacctgcgcggactcgacagcctcgaccttggcgcccgccgtctggatgctgcaccagatcgggcccgcgaattggctgcccgcacaccgctgggcgtggccctatcgggtcacgaccacgcgtggagttacgtcttcctcgcttctcaccgctcccgcgggctcaccggcgaaacgatccatcccgacggcggtttcagcctcggacccccaccccagcggaattga

SEQ ID NO: 3454 - protein, 513 aa, Mycobacterium sp. KMS
MPKTTTGGWVFLPRTFTITCRCGSPPPPAPDSIAHREWRISTRTNTHSVAALPDSPPSMPGLRIRRRACATSSPTCAHSSPTTPTTSRSTALSCCSAAAATSMSPRSSHAVVKIFYVAMATPSNSPGAQSPSMNQCFECRIWRYSYELESTRRGRAVTTTIGVRGTGYAAGRGDRRCTERRQRVRRGRRAPSDHSQRSSAVDSGAKIGAVGLAGCLGDRGADLAEPSHLSGHGGERRYSVDSGRRDMTGWLAGKRALIVGGGSGIGRATVDAFLNEDARVAVLEYDSGKCATLRQQLPDVPVIEGDGTTRTANDEAVQVAVDAFGGLDTLVNCVGIFDFYRRIQDIPAERIDQAFDEMFRINVLSHIHSVKAAVPALMGQDGASIVLTESASSFYPGRGGLLYVASKFAVRGVVTALAHELAPRIRVNGVAPGGTLNTDLRGLDSLDLGARRLDAAPDRARELAARTPLGVALSGHDHAWSYVFLASHRSRGLTGETIHPDGGFSLGPPPQRN

SEQ ID NO: 3455 - DNA, 852 bp, Mycobacterium sp. KMS
  CDS (1)..(852): transl_table=11
gtgggttggttgaccgggcaggtcgccctggtgaccggcggggcagccggaatcggtttggccgtggtcgagcgtttcttggccgagggcgcatgcgtgggcgtcctggatcgctcggaaggcgacctggctaccatcggcaacgccgacggcaggctgatcgcggtatcgggtgacgtgacgtcgtatgcagacaacgtcatggcggtgcgcgaaacggtcgatgcgttcggaaagctcgacgtcttcgtcggcaacgctgggatcttcgattactttgcccctttggtgggtttcgacggagccgacctcagcagcgccttcgatgagatcttcgcggtcaatgtcaagggttacctccttggtgccagggccgccgttcctgaactcctcaaaagcgatggcccgagcatgatcttcaccgtctccaactctggtttctatgcctccggtggcggcccgctgtacaccgcttccaagcacgtagtcgttggcgtggtgcgtgaactggcctacgagttggcgccgaagatcagggtgaatggcgtcgctccaggcggcacggtaacgggcctgcgtgggatcgaggacctcggccagggtcaggacgtgttgtcatcggtgcccggcgtcgccgacatgatgagtatcacgaaccctctgcagtacgcgcagcagcccgccgatcatgccggcctgtatctgctactcgcgtctgcagacaactcgcgagcggtgaccggcgtcgtcatcaacagtgacggcggcttgggcgtgcggggcctgaaccagccgtccggagggctggaacttgccaccggcgcgatgcgcatcgacgtcgggtcaacatag

SEQ ID NO: 3456 - protein, 283 aa, Mycobacterium sp. KMS
MGWLTGQVALVTGGAAGIGLAVVERFLAEGACVGVLDRSEGDLATIGNADGRLIAVSGDVTSYADNVMAVRETVDAFGKLDVFVGNAGIFDYFAPLVGFDGADLSSAFDEIFAVNVKGYLLGARAAVPELLKSDGPSMIFTVSNSGFYASGGGPLYTASKHVVVGVVRELAYELAPKIRVNGVAPGGTVTGLRGIEDLGQGQDVLSSVPGVADMMSITNPLQYAQQPADHAGLYLLLASADNSRAVTGVVINSDGGLGVRGLNQPSGGLELATGAMRIDVGST

SEQ ID NO: 3457 - DNA, 831 bp, Pseudomonas putida
  CDS (1)..(831): transl_table=11
atgagattgacaggtgaagtgatattgataacgggtggtgcggctggacttgggcgcgctcttgtggatcggttcgtggccgaaggtgccaaggtggctgtgctcgacaaaagcgcagaacgcctgcaacagctggaatcggatcatggcgaagaagtggtatgcatcgtcggcgatgtgcgctctctggaagaccagaagcgggctgccagctgctgtattgctaagttcgggaagatcgacactttgatccccaacgccggtatctgggattacaacacgtcattagtcgatctgcctgaagatagtatcgatgctgcatttgatgaagtgttccagatcaatgttaagggctatatccacgccgttaaggcctgcctgccggccttggtcgcaagtcgtggcagcgtgatctgcacgatctcgaatgcaggtttctaccccaatggcggaggtcctctttacacagcgaccaagcatgcggtcgtgggcttggtgcgcgagctggcattcgagctggcaccgtatgtgagggtcaatggcgtgggggtgggtggtatcagcacggatttgagaggactttgctcgctgggtatgagcgagcaatcgatatcgagcctgccattggctgagttgctgcaggacgtactgccaattggccgtatgcctaacgctgaagaatatacaggcgcctatgtgtttttcgctacgcggtgcgactcggtaccggccaccggggccttgctgaattacgacggtggcatgggcgttcgcggaattttttccgcggtaggtggtaaagatcttctcgaaaaactgaacatcaattaa

SEQ ID NO: 3458 - protein, 276 aa, Pseudomonas putida
MRLTGEVILITGGAAGLGRALVDRFVAEGAKVAVLDKSAERLQQLESDHGEEVVCIVGDVRSLEDQKRAASCCIAKFGKIDTLIPNAGIWDYNTSLVDLPEDSIDAAFDEVFQINVKGYIHAVKACLPALVASRGSVICTISNAGFYPNGGGPLYTATKHAVVGLVRELAFELAPYVRVNGVGVGGISTDLRGLCSLGMSEQSISSLPLAELLQDVLPIGRMPNAEEYTGAYVFFATRCDSVPATGALLNYDGGMGVRGIFSAVGGKDLLEKLNIN

SEQ ID NO: 3459 - DNA, 780 bp, Ralstonia sp
  CDS (1)..(780): transl_table=11
atgaacatacagcaagttattgccattactggcgccggttcaggcatcgggctggaactggttcgatccttcaaagcagctggctattgcgtgtccgcacttgttcgcaacgaggaacaagaggcgggccttcgcagtgaattcaaagatgccattgagatcgtagcgggcgatgtttgtgatcacgccaccaatgaaaagctggtcaacaaggcggtcgccaggttcggacacctcgactgcttcatcggaaatgccgggatatgggattacatgctgggcgtcgacgagccatgggagaaattatccggcagtttcgaggagatatttgatatcaacgtcaaaagctatttcagcggcatcagcgcggccttgccggaactcaaaaaaacgaacggatcggtcgtagtgacggcttccgtttcttcctatgcggccggcggcggcggctcttgctacattgccagcaagcatgcagtgctgggtatggtcaaggcgttggcctacgaattggccccgcacatccgggtcaatggcgttgcgccaggtggtacggtcacttctttggctgggccggcaagcgccggtttcgacaaaaccaaaatgaaagacatgcccggcatcgatgacatgatcaagggcctgacccccttggggttcgcagcaaggcccgaggacgtggtggcaccgtatcttttgctggcctcccgggaacaagggaagttcatcactggcaccgtaatcggcattgatggcggcatggcgctcggtcgaaagtga

SEQ ID NO: 3460 - protein, 259 aa, Ralstonia sp
MNIQQVIAITGAGSGIGLELVRSFKAAGYCVSALVRNEEQEAGLRSEFKDAIEIVAGDVCDHATNEKLVNKAVARFGHLDCFIGNAGIWDYMLGVDEPWEKLSGSFEEIFDINVKSYFSGISAALPELKKTNGSVVVTASVSSYAAGGGGSCYIASKHAVLGMVKALAYELAPHIRVNGVAPGGTVTSLAGPASAGFDKTKMKDMPGIDDMIKGLTPLGFAARPEDVVAPYLLLASREQGKFITGTVIGIDGGMALGRK

SEQ ID NO: 3461 - DNA, 828 bp, Burkholderia sp
  CDS (1)..(828): transl_table=11
atgaaactcaaaggtgaagtggcattggtgacgggcggaggcgccggactggggcgagcgatcgtcgatcgctatgtcgcagagggcgcccgcgtcgcggtgctggacaagtcggcagcaggcctggaggaaatcaggaagcgccacggcgatgccgtggtcggcatcgagggcgatgttcggtcgctcgacagccatcgtgaagccgtggcgcgctgcgtcgagaccttcggaaagctcgattgcctgatcggcaacgccggcgtttgggactaccagacccaactggcggacattcccgacaacggcatctcggaagccttcgacgaaatgttcgcgatcatcgtcaaaggctacatcctggccgccaaggccgcgttgcccgcgctgtacaagagcaaaggcagcgcgatcttcaccgtgtcgaacgctggcttctaccctggtggcggaggcgttctctacaccgcgggcaagcatgccgtgatcggcttggtcaagcagctcgcgcatgaatgggggcctcgcatccgtgtcaacggcatcgcccctggagggatcctcggcagcgacatacgcgggctcaagacgctgggtctgcaagaccaaaccattgcgacgatgccactggccgacatgctgggtcctgtccttccgaccgggcgggtggccaccgccgaggaatacgccggagcctacgtgttcttcgccacgcgcgcggataccgtcccgctcaccggcagcgtgctgaacatcgacggcggcatgggcgtgcgcggcttgttcgaagccagtctcggtgcacagctcgacaagcatttcgcttga

SEQ ID NO: 3462 - protein, 275 aa, Burkholderia sp
MKLKGEVALVTGGGAGLGRAIVDRYVAEGARVAVLDKSAAGLEEIRKRHGDAVVGIEGDVRSLDSHREAVARCVETFGKLDCLIGNAGVWDYQTQLADIPDNGISEAFDEMFAIIVKGYILAAKAALPALYKSKGSAIFTVSNAGFYPGGGGVLYTAGKHAVIGLVKQLAHEWGPRIRVNGIAPGGILGSDIRGLKTLGLQDQTIATMPLADMLGPVLPTGRVATAEEYAGAYVFFATRADTVPLTGSVLNIDGGMGVRGLFEASLGAQLDKHFA

SEQ ID NO: 3463 - DNA, 801 bp, Rhodococcus erythropolis
  CDS (1)..(801): transl_table=11
gtgggctggctggacggatattccgcggtagtcactggcgccgggtcaggcctcggcaaggctatcgttggacgattcttgacggagggcgcaaacgtcgtcgcattcgacaaatctggagagaaactctccgccttgaaaactcatcatggcgacgccgtcgagaccgtgacgggtgacgtccgaagcattgaagacaacaagagggcctgcgagcgtgcgatcgaaaagttcggcaaactcgacaccttcgtcggaaacgctggactgtgggacttcaacaggacactcaccgacacgccgtcagagcttctagaagccggttttgacgagctcttcggggtgaacgtgaagggttacgtgcttggagccaaggcagcgatccctgcactgcaagcctctggtggttcgattgtcctcacactttccaatgcctctttcttctctggcggcggtgggggaccgctttacgtggcctccaaacacgccggagtgggcttggtcaagcagctcgcctacgaactcgcaccccgcgtgcgcgtcaacgcggtcgcacctggcggcatggacaccgaccttcgcggccccgatgctctggggctgtcaaatactgcgattggccaggcattcccgatcggtgaggtcatgaagcagcgttcggcgctgcacttcgaacctgcgcccgaggactacgttgccgcctacgtcctccttgcggcgaaatcccagtcaaggacggtgaccgggtcagtcttcgatgtcagtagcttcggcacccctactagaccgtctggaggatga

SEQ ID NO: 3464 - protein, 266 aa, Rhodococcus erythropolis
MGWLDGYSAVVTGAGSGLGKAIVGRFLTEGANVVAFDKSGEKLSALKTHHGDAVETVTGDVRSIEDNKRACERAIEKFGKLDTFVGNAGLWDFNRTLTDTPSELLEAGFDELFGVNVKGYVLGAKAAIPALQASGGSIVLTLSNASFFSGGGGGPLYVASKHAGVGLVKQLAYELAPRVRVNAVAPGGMDTDLRGPDALGLSNTAIGQAFPIGEVMKQRSALHFEPAPEDYVAAYVLLAAKSQSRTVTGSVFDVSSFGTPTRPSGG

SEQ ID NO: 3465 - DNA, 828 bp, Ralstonia sp
  CDS (1)..(828): transl_table=11
atgaaactcaaaggtgaagtggccttggtgaccggtggtggcgcgggcctggggagggcgatcgtggatcgctatgtcgcggaaggcgcccgtgtcgccgtactcgataaatctgcggcgggtctggaagaactcaagaaagtacatggcgacgccattgtgggggtggagggggatgtccggtcgctcgacagccatcgtgaagccgtggcccgctgtgtcgatgcgttcggcaagctcgactgcctggtcggcaacgccggcgtctgggactacctgacccagctggtcgatatccccgatgacctgatctcggaggcattcgaggaaatgttcgcggtcaacgtcaagggctacatccttgcggcgaaggccgcgctacctgctctctatcaaagcaagggcagcgcgatcttcacggtgtcgaatgccggtttctaccccggcgggggcggcgttctgtataccgccggcaagcatgccgtgatcggtctgatccggcagctcgcacacgaatggggcccgcatatccgtgtcaacggcatcgcccccggcgggatcctgggaagcgatctgcgcgggctcaagaccctggacttgcaggacaagagcatttcgacctttccactggacgacatgctgaaatccgtccttccgacggggcgggctgccacggccgaggaatacgccggcgcctttgtcttcttcgcaacgcgtgcggacacggtcccgcttaccggcagtgtgctgaacttcgacggcggcatgggcgtgcgcggcctgttcgaagccagtctgggcgcacagcttgacaagcacttcggttga

SEQ ID NO: 3466 - protein, 275 aa, Ralstonia sp
MKLKGEVALVTGGGAGLGRAIVDRYVAEGARVAVLDKSAAGLEELKKVHGDAIVGVEGDVRSLDSHREAVARCVDAFGKLDCLVGNAGVWDYLTQLVDIPDDLISEAFEEMFAVNVKGYILAAKAALPALYQSKGSAIFTVSNAGFYPGGGGVLYTAGKHAVIGLIRQLAHEWGPHIRVNGIAPGGILGSDLRGLKTLDLQDKSISTFPLDDMLKSVLPTGRAATAEEYAGAFVFFATRADTVPLTGSVLNFDGGMGVRGLFEASLGAQLDKHFG

SEQ ID NO: 3467 - DNA, 834 bp, Sphingomonas sp
  CDS (1)..(834): transl_table=11
gtgcctcagcttgatcagcaaagcgtccttatcactggtggcgcgtccgggctggggcgggcgatcgtcgcgcgtttcctcgccgagggcgctcacgtcacgatccttgatcgcaatgcggatgcattggcggagatggagcgggagtatgaaggccgcgtggcgggacttatcggcgatgtccgaagccttgccgccaatgaagcggccgtgagcctggcctgcgatcggttcggcaagctcgattgcctgatcgcgaatgcgggcatctgggactatgacgtgtccttggtcgatctccccgccagcgcgatcgacgccgcattcgacgagcttttttcgatcaacaccaaggggtccctcttggcgatgaaagcggccacccccgcgttggtgcgtgcgacgggtagcatcatattgacgctttccaatgctgccttctaccctggtggcggcggaatgctttacacggcatcgaagcacgccaacctcgggctgatgcggcaggccgcgtacgagctggcgccgagcgtgcgggtgaacgcggtcgcgccaggggctatcgcgacgaaccttcgggggctggccacgctgggtcaggataaaagggctatcggctcggatcttccgcttgaagagtatctcaaggtcggcgttccgctcgcccggcttccggacgtggccgagtttaccggcgcttatgtgcttctggcctcccgcaaggatggggccgttgcaacaggcgccgtcatccagatcgacggtgggatcggcgtccgcggactcgcgggcgtttctggcggaacgagccttgctgaacgctttgccgagtga

SEQ ID NO: 3468 - protein, 277 aa, Sphingomonas sp
MPQLDQQSVLITGGASGLGRAIVARFLAEGAHVTILDRNADALAEMEREYEGRVAGLIGDVRSLAANEAAVSLACDRFGKLDCLIANAGIWDYDVSLVDLPASAIDAAFDELFSINTKGSLLAMKAATPALVRATGSIILTLSNAAFYPGGGGMLYTASKHANLGLMRQAAYELAPSVRVNAVAPGAIATNLRGLATLGQDKRAIGSDLPLEEYLKVGVPLARLPDVAEFTGAYVLLASRKDGAVATGAVIQIDGGIGVRGLAGVSGGTSLAERFAE

SEQ ID NO: 3469 - DNA, 831 bp, Pseudomonas sp
  CDS (1)..(831): transl_table=11
gtgaaactaaaagaagaagttatattaatcacggggggcgcatctgggactgggcatgcccttgtggaacggttcgtggccgaaggtgccaaggtggctgtcctcgataagtgtgccgagcgacttcaacagttggagtctgatcacggcgaagatgtggtatgcattgtcggtgatgtgcgttcaatggaagaccagaaactggctgccagtcgttgtattgccaagttcgggaggattgacactctgatccccaacgccgctatctgggattacaacacggcacttgtcgatctacctgaagacagtatcgacaaagcatttgatgaagtatttcagattaatgttaagggctatattctcgccgtcaaggcatgcctgccagcgctggttgccagccgaggcagcgtgatctgcacgatctcgaatgcaggtttttaccccaatggcggtggtcctctttacacggcgacgaagcacgcagtggtggggctggtgcgcgagctggcattcgagttggcaccatacgtccgggtcaatggtgtgggggttggcggtatcaatacggatttgagaggaccttgctcgttgggaatgagtgagcagtcgatatcgaatgtgccgttggctgagttgctgcaggacgtactgccaatcggccgcctgcctgacgccgaagatacacaggagcttatgtgttttttcgccacgcgtggcgactctgcgcccgccaccggtgccttactgaattatgacggaggcatgggcgttcgcggacttttttccgcagtcggaggtaaggacctgctcgaaaaacttaacattgattga

SEQ ID NO: 3470 - protein, 276 aa, Pseudomonas sp
MKLKEEVILITGGASGTGHALVERFVAEGAKVAVLDKCAERLQQLESDHGEDVVCIVGDVRSMEDQKLAASRCIAKFGRIDTLIPNAAIWDYNTALVDLPEDSIDKAFDEVFQINVKGYILAVKACLPALVASRGSVICTISNAGFYPNGGGPLYTATKHAVVGLVRELAFELAPYVRVNGVGVGGINTDLRGPCSLGMSEQSISNVPLAELLQDVLPIGRLPDAEDTQELMCFFATRGDSAPATGALLNYDGGMGVRGLFSAVGGKDLLEKLNID

SEQ ID NO: 3471 - DNA, 780 bp, Pseudomonas putida
  CDS (1)..(780): transl_table=11
atgggcaatcaacaagtcgtttcaataaccggtgccggctcaggaatcggtctcgaactggttcgatccttcaagtcggccggttattgcgtatccgctctcgtacgaaacgaggagcaagaggcgcttctttgcaatgaattcaaggacgcactcgagatcgttgtgggcgatgtccgagatcacgcaataaatgagaagctgatcaagcagacaatcgctagattcggtcatctcgattgtttcatcgcaaatgccggtatttgggattacatgctgagcatcgaagagccttgggagaaaatctccagcagttttgacgaaatattcgacatcaatgtaaagagctatttcagtggcatcagtgcagctctgccggaactgaaaaagacgaacggatcggtggtgatgaccgcttcggtgtcgtcccatgcggtcggtggtggtggttcttgctacatcgccagcaagcatgcggtgttaggtatggtcaaggctttggcctacgaattggctcccgaaattcgcgtgaacgctgtctcgccgggcggcaccgtgacgtctctgtgcggtcctgcaagcgccggtttcgacaaaatgcacatgaaagacatgcccggcatcgacgatatgatcaaaggcctcactcctcttgggtttgcagccaagcccgaagacgtggtggagccctatctgttgctggcttcgcgaaagcagggaaaattcatcaccggcaccgtgattagcattgatggcggtatggcgctcggtcgcaagtga

SEQ ID NO: 3472 - protein, 259 aa, Pseudomonas putida
MGNQQVVSITGAGSGIGLELVRSFKSAGYCVSALVRNEEQEALLCNEFKDALEIVVGDVRDHAINEKLIKQTIARFGHLDCFIANAGIWDYMLSIEEPWEKISSSFDEIFDINVKSYFSGISAALPELKKTNGSVVMTASVSSHAVGGGGSCYIASKHAVLGMVKALAYELAPEIRVNAVSPGGTVTSLCGPASAGFDKMHMKDMPGIDDMIKGLTPLGFAAKPEDVVEPYLLLASRKQGKFITGTVISIDGGMALGRK

SEQ ID NO: 3473 - DNA, 801 bp, Sphingomonas sp
  CDS (1)..(801): transl_table=11
  misc_feature (126)..(126): n is a, g, c or t
gtgactgcaaggctcgaaggacaagtggcgctgctaaccggcggcgccacagggatcggtgaggcggtcgtcgcgcgctttatcgaagaaggtgccaaggttggcgtcctggtcagggatgccgcncaggccgacttggtgcgtacgcggcatggcaacgcagtagtcgtgattgagggcgatgtccgcaattatgtcgacaacgaaaaggcagtcgtcgcaaccgtggctgcattcggcaagcttgacgtgttcgtcggcaatgtcgggatctgggatttcatgaccccgcttgcggacatggaacccgaaaagctctcggaaacgctggacgagatcttcggcgtcaacgtaaagggctacttccttggcgcccgtgccgcaattccggagttgcgtaagaccaagggcagcatcatctttactgcctcgacttcaagcttctacaccggcggtggcggtacgccctatgtggcgtcgaagcacgccgtgctgggcctgatccgccagctcgcctgggaactaacccccgacgtcagggtcaacggcgtggcgccaggcggcacccgaacgccgctgggcggtacccatgcgggcggaacagccgatgttcacatggaagatatggaagggctcgacgcgatgattgccgggatgacgccgctcgcgcggatcgccgaaccggatgatcactccggcctctatgccttgctcgcctcgcgtcgggactcggcctacatgacaggaacggttttgctcagcgacggtggaatcggcatcggcaaacgccccggaagctga

SEQ ID NO: 3474 - protein, 266 aa, Sphingomonas sp
MTARLEGQVALLTGGATGIGEAVVARFIEEGAKVGVLVRDAAQADLVRTRHGNAVVVIEGDVRNYVDNEKAVVATVAAFGKLDVFVGNVGIWDFMTPLADMEPEKLSETLDEIFGVNVKGYFLGARAAIPELRKTKGSIIFTASTSSFYTGGGGTPYVASKHAVLGLIRQLAWELTPDVRVNGVAPGGTRTPLGGTHAGGTADVHMEDMEGLDAMIAGMTPLARIAEPDDHSGLYALLASRRDSAYMTGTVLLSDGGIGIGKRPGS

SEQ ID NO: 3475 - DNA, 816 bp, Rhodococcus opacus
  CDS (1)..(816): transl_table=11
ttgggattcctggacggcaaggtcgcgctcgtcaccggcggcggatcgggtatcggccgcgctgtggtcgagctctacgtgcaacagggcgcaaaagtggggatcctcgagatctccccggagaaggtgaaggacctgcgcaacgcactgcccgccgactccgtcgtggtgacggaaggcgacgccacgtcgatggccgacaacgaacgcgccgtcgccgacgtcgtggacgcgttcgggccgctcaccacgctcgtctgcgtggtcggcgtattcgactacttcaccgagattccgcaactgcccaaggacaagatcagcgaggcgttcgatcaactcttcggcgtcaacgtcaagagcaacctgctcagcgtgaaggcggcgctcgacgagctgatcgagaacgagggcgacatcatcctgaccctctccaacgctgcgttctaccccggtggcggcggcccgctgtatgtgtcgtcgaagttcgccgtacgcggcctcgtgaccgagctcgcgtacgagctggcgccgaaggtgcgcgtcaacggcgtggcaccaggcggcaccatcaccgagctgcgcggcatccctgctctggccaacgaaggccaacgtctcaaggacgtgccggacatcgagggtttgatcgagggcatcaatccgttgggcatcgtcgcccagcctgaggatcactcatgggcatacgcgcttctcgcctcgcgggagcggacctcggcggtgaccggcaccatcatcaacagcgacggcggtctcggggtccgcggtatgacgcggatggcgggtctcgcgcagtga

SEQ ID NO: 3476 - protein, 271 aa, Rhodococcus opacus
MGFLDGKVALVTGGGSGIGRAVVELYVQQGAKVGILEISPEKVKDLRNALPADSVVVTEGDATSMADNERAVADVVDAFGPLTTLVCVVGVFDYFTEIPQLPKDKISEAFDQLFGVNVKSNLLSVKAALDELIENEGDIILTLSNAAFYPGGGGPLYVSSKFAVRGLVTELAYELAPKVRVNGVAPGGTITELRGIPALANEGQRLKDVPDIEGLIEGINPLGIVAQPEDHSWAYALLASRERTSAVTGTIINSDGGLGVRGMTRMAGLAQ

SEQ ID NO: 3477 - DNA, 828 bp, Pseudomonas putida
  CDS (1)..(828): transl_table=11
gtgagacttgaaggcgaagtggccttggtgacaggcggtggcgcaggcctgggcagagcgatcgtggatcgttatgtcgcggaaggtgcgcgtgtcgcagtgctggataaatccgcggcaggcctggaagcgctcaggaaactccatggcgatgcaatcgtgggcgtggagggggatgttcgctcgctcgacagccatcgtgaggctgtggcccgctgcgtcgaagcgttcggcaagctggactgcctggttggcaatgctggcgtttgggactacctgacccaactggtggatattcccgacgacctcatctcggaggcattcgaggaaatgttcgaggtcaatgtcaagggctacatcctggcggcaaaggctgcgctacctgcgctttatcagagcaaaggcagcgcgatattcactctgtcgaatgccggtttctacccgggcggtggcggtgttctgtatacagctggcaagcatgccgtgattggattgatcaagcagctcgcgcacgaatgggggccgcgtatccgcgtcaacggcatcgcccccggtggcattttggggagcgatctgcgcgggctgaagagccttgatttacaagacaagagcatttcgacctttccattggacgacatgctgaaatccgttcttccgaccgggcgggccgccactgccgaggaatacgccggcgcctatgtcttcttcgcgacgcgcggcgacacggttccgctcaccggtagcgtgttgaacttcgatggcggcatgggcgtgcgtggcttgttcgaagccagcctaggcgcacagctcgacaagcacttcggttga

SEQ ID NO: 3478 - protein, 275 aa, Pseudomonas putida
MRLEGEVALVTGGGAGLGRAIVDRYVAEGARVAVLDKSAAGLEALRKLHGDAIVGVEGDVRSLDSHREAVARCVEAFGKLDCLVGNAGVWDYLTQLVDIPDDLISEAFEEMFEVNVKGYILAAKAALPALYQSKGSAIFTLSNAGFYPGGGGVLYTAGKHAVIGLIKQLAHEWGPRIRVNGIAPGGILGSDLRGLKSLDLQDKSISTFPLDDMLKSVLPTGRAATAEEYAGAYVFFATRGDTVPLTGSVLNFDGGMGVRGLFEASLGAQLDKHFG

SEQ ID NO: 3479 - DNA, 786 bp, Pseudomonas aeruginosa
  CDS (1)..(786): transl_table=11
atgtgtatgagcaatcaacaagtcgtttcgataaccggtgctggctcaggaattggtctcgaactggttcgatcctttaagtccgccggttattgcgtatccgctctcgtacaaaacgaggagcaaaaggcgagcctttgcaatgagttcaaggacgcactcgagatcgtcgtgggcgatgtccgggaccacgcaacaaatgagaagctgataaagcaaacaaccgatagattcggccatctcgattgtttcattgcaaatgccggtatttgggattacatgcttggcatcgaagagccttgggagaaaatatcgagcagttttgatgagatattcaacatcaatgtcaagagctatttcagcggtatcagggccgccctgcaggaactgaaaaagactagcggatcagtggtgatgaccgcttcagtgtcgtcccatgcggtcggtgctggtggttcttgctacatcgccagcaagcatgcggtcctgggcatgatgaaagctttggcttacgaattggctccccacattcgcgtcaacgccgtagcaccgggcggcactgtgacgcctctgagcggtcccgcaagcgccggcttcgacaaaactcacatggaaaacatgcccggtatcgaggacatgatcaagggtctaacgcctcttggaatttcagccaaggccgaagacgtagtggcaccctatttgttgttggcgtcgcgagatcaagggaaattcattaccgggactgtcattaatatagatggagggatggcgctcggtcgcaagtag

SEQ ID NO: 3480 - protein, 261 aa, Pseudomonas aeruginosa
MCMSNQQVVSITGAGSGIGLELVRSFKSAGYCVSALVQNEEQKASLCNEFKDALEIVVGDVRDHATNEKLIKQTTDRFGHLDCFIANAGIWDYMLGIEEPWEKISSSFDEIFNINVKSYFSGIRAALQELKKTSGSVVMTASVSSHAVGAGGSCYIASKHAVLGMMKALAYELAPHIRVNAVAPGGTVTPLSGPASAGFDKTHMENMPGIEDMIKGLTPLGISAKAEDVVAPYLLLASRDQGKFITGTVINIDGGMALGRK

SEQ ID NO: 3481 - DNA, 831 bp, Pseudomonas fluorescens
  CDS (1)..(831): transl_table=11
gtgaaactaaaagaagaagttatattaatcacagggggcgcatctggactggggcatgcccttgtggaacggttcgtggccgaaggtgccaaggtggctgtcctcgataagtgtgccgatcgacttcaacagttggagtctgatcacggcgaagatgtggtatgcattgtcggtgatgtgcgttcaatggaagaccagaaactggctgccagtcgttgtattgccaagttcgggaggattgacactctgatccccaacgccgctatctgggattacaacacggcacttgtcgatctacctgaagacagtatcgacaaagcatttgatgaagtatttcagattaatgttaagggctatattctcgccgtcaaggcatgcctgccagccctggttgccagccgaggcagcgtgatctgcacgatctcgaatgcaggtttttaccccaatggcggtggtcctctttacacggcgacgaagcacgcagtggtggggctggtgcgcgagctggcattcgagttggcaccatacgtccgggtcaatggtgtgggggttggcggtatcaatacggatttgagaggaccttgctcgttgggaatgagtgagcagtcgatatcgaatgtgccgttggctgagttgctgcaggacgtactgccaatcggccgcctgcctgacgccgaagaatacacaggagcttatgtgtttttcgccacgcgtgggacatctgcgcccgccaccggtgccttactgaattatgacggaggcatgggcgttcgcggacttttttccgcagtcggaggtaaggacctgctcgaaaaacttaacattgattga

SEQ ID NO: 3482 - protein, 276 aa, Pseudomonas fluorescens
MKLKEEVILITGGASGLGHALVERFVAEGAKVAVLDKCADRLQQLESDHGEDVVCIVGDVRSMEDQKLAASRCIAKFGRIDTLIPNAAIWDYNTALVDLPEDSIDKAFDEVFQINVKGYILAVKACLPALVASRGSVICTISNAGFYPNGGGPLYTATKHAVVGLVRELAFELAPYVRVNGVGVGGINTDLRGPCSLGMSEQSISNVPLAELLQDVLPIGRLPDAEEYTGAYVFFATRGTSAPATGALLNYDGGMGVRGLFSAVGGKDLLEKLNID

SEQ ID NO: 3483 - DNA, 834 bp, Pseudomonas pseudoalcaligenes
  CDS (1)..(834): transl_table=11
atgaaactgaaaggtgaagcggtactgatcacggggggcgcctccggattagggcgcgcgctcgtggaccgattcgtggccgaaggcgccaaagtggcggtgctcgacaagtcggcagagcgccttgcagagctggaaaccgatcatggcgacaacgtgctcggcatcgtcggcgatgtgcgttcactggaagaccagaaacaggctgccagccgctgcgtggccaggttcgggaaaatcgacaccttgattcccaatgcaggcatctgggattactcgacggccttggtcgacctgcccgaagagagcctcgatgccgcgttcgatgaggtctttcacatcaatgtcaagggttatatccatgcagtgaaggcctgcctgccggccctggtcgccagccgtggcaacgtgatcttcacgatctccaatgcgggcttctatcccaatggcggcggccctctttacaccgcagccaagcacgccatcgtgggcctggtgcgtgaactggcgttcgagctggcgccatacgtgcgcgtcaacggcgtggggccgggcggcatcaatagcgatatgagaggtccttcctcgctgggaatgggcagcaaggcgatttcgaccgtaccgctggccgacatgctgaagtcggtgctgccgattggtcgcatgcccgaggtcgaagagtacaccggggcctatgtgttttttgccacccgaggcgatgcggcgcctgcgaccggggccttgctgaactacgacggtggcttgggcgttcgtggattcttctcgggtgccggaggtaatgacttgctcgaacagctgaatatccatccctaa

SEQ ID NO: 3484 - protein, 277 aa, Pseudomonas pseudoalcaligenes
MKLKGEAVLITGGASGLGRALVDRFVAEGAKVAVLDKSAERLAELETDHGDNVLGIVGDVRSLEDQKQAASRCVARFGKIDTLIPNAGIWDYSTALVDLPEESLDAAFDEVFHINVKGYIHAVKACLPALVASRGNVIFTISNAGFYPNGGGPLYTAAKHAIVGLVRELAFELAPYVRVNGVGPGGINSDMRGPSSLGMGSKAISTVPLADMLKSVLPIGRMPEVEEYTGAYVFFATRGDAAPATGALLNYDGGLGVRGFFSGAGGNDLLEQLNIHP

SEQ ID NO: 3485 - DNA, 828 bp, Pseudomonas sp
  CDS (1)..(828): transl_table=11
atgaaactcaaaggtgaagtggcattggtgacgggcggaggcgccggactggggcgagcgatcgtcgatcgctatgtcgcagagggcgcccgcgtcgcggtgctggacaagtcggcagcaggcctggaggaaatcaggaagcgccacggcgatgccgtggtcggcatcgagggcgatgttcggtcgctcgacagccatcgtgaagccgtggcgcgctgcgtcgagaccttcggaaagctcgattgcctgatcggcaacgccggcgtttgggactacctgacccaactggcggacattcccgacaacggcatctcggaagccttcgacgaaatgttcgcgatcaacgtcaaaggctacatcctggccgccaaggccgcgttgcccgcgctgtacaagagcaaaggcagcgcgatcttcaccgtgtcgaacgctggcttctaccctggtggcggaggcgttctctacaccgcgggcaagcatgccgtgatcggcttggtcaagcagctcgcgcatgaatgggggcctcgcatccgtgtcaacggcatcgcccctggagggatcctcggcagcgacctgcgcgggctcaagacgctgggtctgcaagaccaaaccattgcgacgatgccactggccgacatgctgggtcctgtccttccgaccgggcggatggccaccgccgaggaatacgccggagcctacgtgttcttcgccacgcgcgcggataccgtcccgctcaccggcagcgtgctgaacatcgacggcggcatgggcgtgcgcggcttgttcgaagccagtctcggtgcacagctcgacaagcatttcgcttga

SEQ ID NO: 3486 - protein, 275 aa, Pseudomonas sp
MKLKGEVALVTGGGAGLGRAIVDRYVAEGARVAVLDKSAAGLEEIRKRHGDAVVGIEGDVRSLDSHREAVARCVETFGKLDCLIGNAGVWDYLTQLADIPDNGISEAFDEMFAINVKGYILAAKAALPALYKSKGSAIFTVSNAGFYPGGGGVLYTAGKHAVIGLVKQLAHEWGPRIRVNGIAPGGILGSDLRGLKTLGLQDQTIATMPLADMLGPVLPTGRMATAEEYAGAYVFFATRADTVPLTGSVLNIDGGMGVRGLFEASLGAQLDKHFA

SEQ ID NO: 3487 - DNA, 792 bp, Rhodococcus sp
  CDS (1)..(792): transl_table=11
atgatcgtcaccggcggagggtcgggcctaggccgggcgctggtcgagcgattcctgggagagggagcccgggtgggtgtcctggagaagtcggcggagaaggctgagaagcttgccaacgacttcggcgaggatgtcctcgtggtcgaaggcgacgtgcgcaagtacgacgacaatgcgcgcgtcgtccaggaaacggttcgccagttcggtcgcctcgacacgttcgtcgcgaacgccgcgatctgggacttctcgacgaagatggtcgatatcccggtggaccgactggacgccctcttcgacgaaatgttccacatcaacgtcaagggctacttgcacggtgcacgtgcggcggtcgaggagctcgccgccaccggaggctcgatcatctacaccgtgtcgaacgccggcttctaccccggcggcggcggcccgctctacaccgcgtcgaagcacgcggtagtcgggctgatcaaggaactggccttcgaactcggccccaagatccgcgtcaacggggtggctccgggcgcaatgcccaccgatctgaggggacctggttcgctcggaatgggcgaaaccaccatcacctcagcggtatccctcggtgatctggtcaaacagtgcacagtgctgcaggagctgcccgaggctgcggactacaccgggcactacgttctgctggcttcgaaggcgaactcgaggacggcaaccggcgcgatcatcaactgtgacggcgggatgggtgtgcgcggcttggccgagacggccggcggaaacgacctgtaa

SEQ ID NO: 3488 - protein, 263 aa, Rhodococcus sp
MIVTGGGSGLGRALVERFLGEGARVGVLEKSAEKAEKLANDFGEDVLVVEGDVRKYDDNARVVQETVRQFGRLDTFVANAAIWDFSTKMVDIPVDRLDALFDEMFHINVKGYLHGARAAVEELAATGGSIIYTVSNAGFYPGGGGPLYTASKHAVVGLIKELAFELGPKIRVNGVAPGAMPTDLRGPGSLGMGETTITSAVSLGDLVKQCTVLQELPEAADYTGHYVLLASKANSRTATGAIINCDGGMGVRGLAETAGGNDL

SEQ ID NO: 3489 - DNA, 816 bp, Rhodococcus sp
  CDS (1)..(816): transl_table=11
ttgggattcctggacggcaaggtggcgctcgtcaccggcggcggatcgggtatcggccgcgctgtggtcgagctctacgtgcaacagggcgcaaaagtggggatcctcgagatctccccggagaaggtgaaggacctgcgtaacgcactgcccgccgactccgtcgtggtgacggaaggcgacgccacgtcgatggccgacaacgaacgcgccgtcgccgacgtcgtggacgcgttcgggccgctcaccacgctcgtctgcgtggtcggcgtattcgactacttcaccgagattccgcaactgcccaaggacaagatcagcgaggcattcgatcaactcttcggcgtcaacgtcaagagcaacctgctcagcgtgaaggcggcgctcgacgagctgatcgagaacgagggcgacatcattctcaccctctccaacgctgcgttctacgccggtggcggcggcccgctgtacgtgtcgtcgaagttcgccgtacgcggcctcgtgaccgagctcgcgtacgagctggcgccgaaggtgcgcgtcaacggcgtggcaccaggcggcaccatcaccgagctgcgcggcatccctgctctggccaacgagggccaacatctcaaggacgtgccggacatcgagggtttgatcgagggcatcaatccgttgggcatcgtcgcccagcctgaggatcactcatgggcatacgcgcttctcgcctcgcgggagcgtacctcggcggtgaccggcaccatcatcaacagcgacggcggtctcggggtccgcggtatgacgcggatggcgggtctcgcgcagtga

SEQ ID NO: 3490 - protein, 271 aa, Rhodococcus sp
MGFLDGKVALVTGGGSGIGRAVVELYVQQGAKVGILEISPEKVKDLRNALPADSVVVTEGDATSMADNERAVADVVDAFGPLTTLVCVVGVFDYFTEIPQLPKDKISEAFDQLFGVNVKSNLLSVKAALDELIENEGDIILTLSNAAFYAGGGGPLYVSSKFAVRGLVTELAYELAPKVRVNGVAPGGTITELRGIPALANEGQHLKDVPDIEGLIEGINPLGIVAQPEDHSWAYALLASRERTSAVTGTIINSDGGLGVRGMTRMAGLAQ

SEQ ID NO: 3491 - DNA, 816 bp, Rhodococcus sp
  CDS (1)..(816): transl_table=11
ttgggattcctggacggcaaggtggcgctcgtcaccggcggcggatcgggtatcggccgcgctgtggtcgagctctacgtgcaacagggcgcaaaagtggggatcctcgagatctccccggagaaggtgaaggacctgcgtaacgcactgcccgccgactccgtcgtggtgacggaaggcgacgccacgtcgatggccgacaacgaacgcgccgtcgccgacgtcgtggacgcgttcgggccgctcaccacgctcgtctgcgtggtcggcgttttcgactacttcaccgagattccgcaactgcccaaggacaagatcagcgaggcgttcgatcaactcttcggcgtcaacgtcaagagcaacctgctcagcgtgaaggcggcgctcgacgagctgatcgagaacgagggtgacatcattctcaccctctccaacgctgcgttctacgccggtggcggcggcccgctgtatgtgtcgtcgaagttcgccgtccgcggcctcgtgaccgagctcgcgtacgagctggcgccgaaggtgcgcgtcaacggcgtggcaccaggcggcaccatcaccgagctgcgcggcatccctgctctggccaacgagggccaacgtctcaaggacgtgccggacatcgagggtttgatcgagggcatcaatccgttgggcatcgtcgcccagcctgaggatcactcatgggcatacgcgcttctcgcctcgcgggagcggacctcggcggtgaccggcaccatcatcaacagcgacggcggtctcggggtccgcggtatgacgcggatggcgggtctcgcgcagtga

SEQ ID NO: 3492 - protein, 271 aa, Rhodococcus sp
MGFLDGKVALVTGGGSGIGRAVVELYVQQGAKVGILEISPEKVKDLRNALPADSVVVTEGDATSMADNERAVADVVDAFGPLTTLVCVVGVFDYFTEIPQLPKDKISEAFDQLFGVNVKSNLLSVKAALDELIENEGDIILTLSNAAFYAGGGGPLYVSSKFAVRGLVTELAYELAPKVRVNGVAPGGTITELRGIPALANEGQRLKDVPDIEGLIEGINPLGIVAQPEDHSWAYALLASRERTSAVTGTIINSDGGLGVRGMTRMAGLAQ

SEQ ID NO: 3493 - DNA, 804 bp, Mycobacterium vanbaalenii
  CDS (1)..(804): transl_table=11
atgactggctggctggcgggcaaacgcgcgttaatcgtgggagcaggttcgggtatcggtcgggccacggtcgacgcgttcctgaacgaggatgcccgggtggccgtgctcgagtacgacagcgataagtgcgccacgctgcgccatcagctgcccgacgttccggtgatcgagggtgatgggaccactcgcaccgccaacgacgaagcagtgcaggtcgctgtcgacgccttcggcggactcgacacattggtgaactgcgtggggattttcgatttctaccgccgtattcaggacatccccgccgagctgatcgaccaggcgttcgacgaaatgtttcgcatcaacgtcctgagtcatatccactcagtcaaggcagcagtgccggcgctgatgggccaggacggcgcctcgatcgtgctcaccgagtccgcgtcatcgttctatccaggacgcggcggcctgctgtatgtggcgtcgaagttcgcggtgcgcggcgtagtcactgcactggctcacgaactcgcgccgaggatccgtgtgaacggtgtcgcccccggggggacgttgaacaccgacctgcgcggactcgacagcctcgaccttggcgcccgccgtctggatgctgcaccagatcgggcccgcgaattggctgcccgcacaccgctgggcgtggccctatcgggtgaagaccacgcgtggagttacgtcttcctcgcttctcaccgctcccgcgggctcaccggcgaaacgatccatcccgacggcggtttcagcctcggacccccaccccagcggaattga

SEQ ID NO: 3494 - protein, 267 aa, Mycobacterium vanbaalenii
MTGWLAGKRALIVGAGSGIGRATVDAFLNEDARVAVLEYDSDKCATLRHQLPDVPVIEGDGTTRTANDEAVQVAVDAFGGLDTLVNCVGIFDFYRRIQDIPAELIDQAFDEMFRINVLSHIHSVKAAVPALMGQDGASIVLTESASSFYPGRGGLLYVASKFAVRGVVTALAHELAPRIRVNGVAPGGTLNTDLRGLDSLDLGARRLDAAPDRARELAARTPLGVALSGEDHAWSYVFLASHRSRGLTGETIHPDGGFSLGPPPQRN

SEQ ID NO: 3495 - DNA, 828 bp, Xanthobacter polyaromaticivorans
  CDS (1)..(828): transl_table=11
atgtgtaaatggccggtggcacttgtcaccgggggcggttcgggactcggcaaggcgatcgtcgagcggttcctggccgagggggcgaaagtcgctatcctcgaccgttcggaggagcgtgtgcaagaagttgttgccatgtttggcggcaaggtcgtcggcacttctggtgacgtccgcagcatggccgacaacaaggcggcggtggcgagatgtgtcgaagccttcggcaagatcgacacccttgtcggcaacgccggtgtctgggactacaacgcctcgatcgccggcacgtcggaagaaaagcttgcggaggccatcgatgaactggtcgggatcaacctcaagggttacattctcgctgccaaggcggccttgccggaactctacaagaccaagggcaatgcaatcttcaccgtctcgaacgccggcttttacccgggcggtggcggcgtgctttataccgcatccaaacatggtgtggtgggaatgatcaagcaactcgcccatgaatgggctccgcatatccgcgtgaacggcgtggcgccgggcggtatcggcggaatctcgcggggctttccgtcgctttcacaggagggcatccgtttttccaatctgccgctcgacgatctgatgaagcagatgctgccgctcgaaaaagcattttacgcgagcgaatatactggcggctatgtcttcttcgctaatcgcaaggacaacggaccggccaccggaagtgtgctcaatttcgacggcgggatcgggatgcgtggcttcatgtcgccaaacatgggcaaggaactcgatgagaaattcaggggcgcctga

SEQ ID NO: 3496 - protein, 275 aa, Xanthobacter polyaromaticivorans
MCKWPVALVTGGGSGLGKAIVERFLAEGAKVAILDRSEERVQEVVAMFGGKVVGTSGDVRSMADNKAAVARCVEAFGKIDTLVGNAGVWDYNASIAGTSEEKLAEAIDELVGINLKGYILAAKAALPELYKTKGNAIFTVSNAGFYPGGGGVLYTASKHGVVGMIKQLAHEWAPHIRVNGVAPGGIGGISRGFPSLSQEGIRFSNLPLDDLMKQMLPLEKAFYASEYTGGYVFFANRKDNGPATGSVLNFDGGIGMRGFMSPNMGKELDEKFRGA

SEQ ID NO: 3497 - DNA, 1092 bp, Rhodococcus opacus
  CDS (1)..(1092): transl_table=11
atgagcatcatccacaacgaccgcggagaaccgataatccagatcgccaacgagttcacggtgatccaggtcggctacacccgcaccggcagtggtgagcgtctcgtcatcacctcgccgcgcctcggattccagacccatctggatccgctgcaactcgagagcctcacctggcagacgccgacatgtactcggcgctgctcgacacgccctacggaccgggctcggaactcaaagcgagccccctgtcgctctattcagaaaggactgattcccttgggattcctggacggcaaggtggcgctcgtcaccggcggcggatcgggtatcggccgcgctgtggtcgagctctacgtgcaacagggcgcaaaagtggggatcctcgagatctccccggagaaggtgaaggacctgcgtaacgcactgcccgtcgacgccgtcgtggtgacggaaggcgacgccacgtcgatggccgacaacgaacgcgccgtcgccgacgtcgtggacgcgttcgggccgctcaccacgctcgtctgcgtcgtcggcgtattcgactacttcaccgagattccgcaactgcccaaggacaagatcagcgaggcgttcgatcaactcttcggcgtcaacgtcaagagcaacctgctcagcgtgaaggcggcgctcgacgagctgatcgagaacgagggcgacatcatcctcaccctctccaacgctgcgttctaccccggtggcggcggcccgctgtatgtgtcgtcgaagttcgccgtccgcggcctcgtgaccgagctcgcgtacgagctggcgccgaaggtgcgcgtcaacggcgtggcaccaggcggcaccatcaccgagctgcgcggcatccccgctctggccaacgagggccaacgtctcaaggacgtgccggacatcgagggtttgatcgagggcatcaatccgctgggcatcgtcgcccagcctgaggatcactcatgggcatacgcgcttctcgcctcgcgggagcgtaccccggcggtgaccggcaccatcatcaacagcgacggcggtctcggggtccgcggtatgacgcggatggcgggtctcgcgccgtga

SEQ ID NO: 3498 - protein, 363 aa, Rhodococcus opacus
MSIIHNDRGEPIIQIANEFTVIQVGYTRTGSGERLVITSPRLGFQTHLDPLQLESLTWQTPTCTRRCSTRPTDRARNSKRAPCRSIQKGLIPLGFLDGKVALVTGGGSGIGRAVVELYVQQGAKVGILEISPEKVKDLRNALPVDAVVVTEGDATSMADNERAVADVVDAFGPLTTLVCVVGVFDYFTEIPQLPKDKISEAFDQLFGVNVKSNLLSVKAALDELIENEGDIILTLSNAAFYPGGGGPLYVSSKFAVRGLVTELAYELAPKVRVNGVAPGGTITELRGIPALANEGQRLKDVPDIEGLIEGINPLGIVAQPEDHSWAYALLASRERTPAVTGTIINSDGGLGVRGMTRMAGLAP

SEQ ID NO: 3499 - DNA, 843 bp, Rhodococcus erythropolis
  CDS (1)..(843): transl_table=11
gtgagactcaaggatgaggttgtcctcgtcaccggcggttgtgccggcctgggacgcgctatcgtagatcggttcgtctgcgagggcgccagggttgccgtgctcgaccggtctgttgcaggtctcgaggagctgcgtgccgctcatggtgacgcggtcgtggccgtcgagggagacgtccgttatctcgacagtcacaaggagaccgtcgcgaagtgcgtcgagacatttggaaagctagattgctacatcggaaacgcgggagtttgggactactcgacggcgctcgtcgaaattccagaggaccgtctcgatgaggcgttcgacgagatgtactccatcaatgtgaagggctacctcctcggcgtcaaggccgctctgggggccctctacgccagcaggggcagcgtcatcttcacggtgtccaatgctggcttctaccctgccggtggtggcgctctctacacgggcgcgaagcacgcgatcgtcggcatggtcaagcagctggcctacgagctaggcccacacatcagggtgaatggaatcgcgccaggcggcctcgggggaagcgatctgcgaggtctcaaggccctcgacctcgccgaggtctcgctctcgaaggtcccgctgggcgacatgctcaaggacatcctcccgacggggcagatggcctccgccgaggagtcgacgggcgcctatgtcttcttcgccacccggtccgaaaccgtgcctctgacagggagtgttcttaactacgacggcgggatcggggtacggggcatgtccgaggcaaatcgcggcgacctattggatcagttctactcaaagggagcgctagtatga

SEQ ID NO: 3500 - protein, 280 aa, Rhodococcus erythropolis
MRLKDEVVLVTGGCAGLGRAIVDRFVCEGARVAVLDRSVAGLEELRAAHGDAVVAVEGDVRYLDSHKETVAKCVETFGKLDCYIGNAGVWDYSTALVEIPEDRLDEAFDEMYSINVKGYLLGVKAALGALYASRGSVIFTVSNAGFYPAGGGALYTGAKHAIVGMVKQLAYELGPHIRVNGIAPGGLGGSDLRGLKALDLAEVSLSKVPLGDMLKDILPTGQMASAEESTGAYVFFATRSETVPLTGSVLNYDGGIGVRGMSEANRGDLLDQFYSKGALV

SEQ ID NO: 3501 - DNA, 819 bp, Bacillus sp
  CDS (1)..(819): transl_table=11
atgggctggttagatggaaaagttgcattggtgataggtggaggctcaggaattggcaggggcgtggttgaggcttttcttcgggaaggggcatccgttggtgtcctggagatcaatcctcagaaagtctcaaagctggaggaacacgggacggccgtaaaagcgattcaaggagatgccaccatgttgaaagataacgaacgagcagtccgacttaccgtggagacgtttggcagattggatatcttggtctcgtgcgtaggggtatgggattacttcgcggacctgccgaatatacctgcagaaaaaatcagcgacgcttttgatgaattgtttgccgtcaatgtgaaaagcaatcttctgagcgcgaaagcggctttgcctgaattgttaaaaacggagggaaacatcgtattgaccgtttcaaattccggtttttatcccgccggaggaggacctttatacgtttcctcgaagtttgccgtacgcgggttgattatggaattggcctatgagctggcgcctaaaattcgcgtcaatggagttgcccctggggggactattaccgatttgtcagggcttaaaagcttggaacagcagaatatgtcattatctcagattccaaatcttccggacatcatgcgaactacgaatccgctacaagtcttgggaacaccggaagaccacgcatgggcttatgtatacctggcgtccaaagaacggactcgtactgtaacgggcaccatcatccatacggacggaggaatcggagtaaggggaatcggcaaggtagcaggattgttgccggacgaaaaatga

SEQ ID NO: 3502 - protein, 272 aa, Bacillus sp
MGWLDGKVALVIGGGSGIGRGVVEAFLREGASVGVLEINPQKVSKLEEHGTAVKAIQGDATMLKDNERAVRLTVETFGRLDILVSCVGVWDYFADLPNIPAEKISDAFDELFAVNVKSNLLSAKAALPELLKTEGNIVLTVSNSGFYPAGGGPLYVSSKFAVRGLIMELAYELAPKIRVNGVAPGGTITDLSGLKSLEQQNMSLSQIPNLPDIMRTTNPLQVLGTPEDHAWAYVYLASKERTRTVTGTIIHTDGGIGVRGIGKVAGLLPDEK

SEQ ID NO: 3503 - DNA, 828 bp, Ralstonia sp
  CDS (1)..(828): transl_table=11
atgcaactcaacaatgaagtagccctggtcaccggcggtggctcgggcctgggccgggccatcgtggaccggttcgtggccgaaggcgcgcgtggccgtgctcgacaaatcggccgccagctccaggaactccaggccgcgcacggcgccaaagtgctgggcatcgaaggtgacgtgcgcgtgctggccgaccaccagaaggccgcgcgcgaatgcgtggccgcctttggcaagatcgactgcctgatccccaacgcgggcatctgggattattcgatgccgctcgtggacatccctgacgacaggatcgacgccgccttcgacgaggtcttccacatcaacgtcaagggctatctgcttgccgtcaaggcctgcctgcccgcgctggtgcaaagccgcggcagctgggtcttcacgatctcgaacgcgggcttctacccgaacggcggcggcccgctctatacaggggccaaacatgccgtggtgggcatggtgcgcgaactcgcctacgaacttgcgccacacgtgcgcgtcaatggcgtggcgcccggcggcatgagcactgacctgcgcggcccggcctcgctgggcatggccaaccaggccatttcgagcgtgccgctgggtgaaatgctgacctctgtgcttcccgtggggcgcatgcctgtggcagcggaatacaccggagcctacgtgttctttgccacgcgcggcgacaccttccccacgacaggcgcgttgctcaaccacgatggtggcatgggcgtgcgcggctttttcgaggctgccgggggcaaagacctgccgcagaaactgcggctttcataa

SEQ ID NO: 3504 - protein, 275 aa, Ralstonia sp
MQLNNEVALVTGGGSGLGRAIVDRFVAEGARGRARQIGRQLQELQAAHGAKVLGIEGDVRVLADHQKAARECVAAFGKIDCLIPNAGIWDYSMPLVDIPDDRIDAAFDEVFHINVKGYLLAVKACLPALVQSRGSWVFTISNAGFYPNGGGPLYTGAKHAVVGMVRELAYELAPHVRVNGVAPGGMSTDLRGPASLGMANQAISSVPLGEMLTSVLPVGRMPVAAEYTGAYVFFATRGDTFPTTGALLNHDGGMGVRGFFEAAGGKDLPQKLRLS

SEQ ID NO: 3505 - DNA, 831 bp, Cupriavidus oxalaticus
  CDS (1)..(831): transl_table=11
atgcaactcaccaatgaagtagccctggtcaccggcggcggctcgggcctgggccgcgccatcgtggaccgcttcgtcgccgaaggcgcgcgcgtggccgtgctcgacaagtcggccgccaggctccaggagttgaaggccgcgcacggcgccaaggtgcttggcatcgaaggcgatgtgcgcgtgctggccgaccaccagaaggccgcgcgcgaatgcgttgctgccttcggcaagatcgactgcctgatccccaacgcgggcatctgggactattcgatgccactggtcgacatccccgacgacaagatcgatgccgccttcgacgaggtgttccacatcaacgtcaaaggctatctgctggccgtcaaggcctgcctgcccgcgctggtgcaaagccgcggcagcgtggtcttcacgatctcgaacgccggcttctaccccaatggcggcggcccgctctacacagccaccaaacatgccgtcgtgggcatggtgcgcgaactcgctttcgaactggccccgcacgtgcgcgtcaacggtgtggcgcccggcggcatgagcaccgacctgcgtggcccggcctcgctgggcatggccaaccaggccatctccagcgtgccgctgggcgacatgctggcctcggtgctgccggtgggccgcatgcccgtggccgcggaatacaccggggcctatgtgttctttgccacgcgcggcgacaccttccccaccacgggcgctctgctgaaccatgacggtggcatgggcgtgcgcggctttttcgaggctgccgggggcaaagacctgccgcagaaactgcagctttcataa

SEQ ID NO: 3506 - protein, 276 aa, Cupriavidus oxalaticus
MQLTNEVALVTGGGSGLGRAIVDRFVAEGARVAVLDKSAARLQELKAAHGAKVLGIEGDVRVLADHQKAARECVAAFGKIDCLIPNAGIWDYSMPLVDIPDDKIDAAFDEVFHINVKGYLLAVKACLPALVQSRGSVVFTISNAGFYPNGGGPLYTATKHAVVGMVRELAFELAPHVRVNGVAPGGMSTDLRGPASLGMANQAISSVPLGDMLASVLPVGRMPVAAEYTGAYVFFATRGDTFPTTGALLNHDGGMGVRGFFEAAGGKDLPQKLQLS

SEQ ID NO: 3507 - DNA, 810 bp, Terrabacter sp
  CDS (1)..(810): transl_table=11
gtgaccgccggctggctcgaggggcggcgagcgctggtcgtgggcgcgggctcgggcatcggccgtgcggttgtggacgtcttcctcgccgagggcgcgcgagtcgcggtcctggagcgcgatccggacaagagcgcggcgatcggggcggccctgcccgaagtcccggtcactgtcggcgacgcggtcacccgtcaggccaacgacgccgcggtcaccgcggcggtcgaggccttcggggggctggacgttctggtcaactgcgtgggggtgttcgacttctaccgcagtcttctcgacctcgacgccgacgtgctagacgtcgccttcgacgagatgttccgcaccaatgtgctttcccacttgcagtccgtgaaagcggcactgccccatctgcaggcgtcggggcgcggagtggtgctccttacagagtcgacgtcctcctatttcccgggtcgaggcggcgttctgtacctgtcctcgaagttcgccgtccgcgggatcgtcacggcgctcgcccacgacctggcgccagaggtgcgggtcaacggggtcgcaccgggcggcacgctgggcaccgacctgcgtgggttgcctagcctgggaactgcggggagcagcctgggcgacatcccgggccgcgccgaggaactggcgtcccgggtaccgctgcaggtcgcgctgacggctgcggaccacgcgtggagctacgtgttcctagcctccgaccggtcccgcggcatcaccggcggggtggtccaccccgacggcgggatcggcgtctccgcttcccccagaaaacgttcctga

SEQ ID NO: 3508 - protein, 269 aa, Terrabacter sp
MTAGWLEGRRALVVGAGSGIGRAVVDVFLAEGARVAVLERDPDKSAAIGAALPEVPVTVGDAVTRQANDAAVTAAVEAFGGLDVLVNCVGVFDFYRSLLDLDADVLDVAFDEMFRTNVLSHLQSVKAALPHLQASGRGVVLLTESTSSYFPGRGGVLYLSSKFAVRGIVTALAHDLAPEVRVNGVAPGGTLGTDLRGLPSLGTAGSSLGDIPGRAEELASRVPLQVALTAADHAWSYVFLASDRSRGITGGVVHPDGGIGVSASPRKRS

SEQ ID NO: 3509 - DNA, 813 bp, Sphingopyxis macrogoltabida
  CDS (1)..(813): transl_table=11
atgggttggctagacggcaaggtagctttgattaccggcggtggcgcgggcatagggcgcgcgctggtggagcggtttgtcgcggaaggggcaaaggtcggcgtacttgaagtcaatgccgggcgtgcggaggagttggctgcggttcttggggattcggtttgcgtcgtaacgggcagcgttgcgagctttgctgacaatgcagcggcggtgcagcgcactgtcgagaagttcgggcggctggatacgttcgttgccaatgcaggtgttttcgatttcttccagcccttggcgcaatacgaaggcgaccagatcggcgccgcgttcgacgaactgatgtcagtcaacgtgaagggcggcctgttgggcgtacgggcggccttgcccgaactcgtgcggtcgcgcggaagcgtgatcttcacgatttcgaatgctggcttctacgctggcggtggcgggccgctctatacggcgtcgaagcatgcgctggtcggactggtcaagcagctggcgcatgaactcgcccccaaggtgagggtgaacgcggttgccccggggggcatgaaaaccgaattgagcggtctttcggcaaccggcacctccggccagagccttagccagatggacgggctggatacgctgctgaaggatatcacgccgctgcaggtttcgcccatgcctgagcaatattgcgggccgtacgtgctgctcgcctcggatgactcagtggtgaccaccggggcgatcatcaataccgatggcggctttggcgtgcgcggcattactggcgtgaggggtggagaaggcctgtag

SEQ ID NO: 3510 - protein, 270 aa, Sphingopyxis macrogoltabida
MGWLDGKVALITGGGAGIGRALVERFVAEGAKVGVLEVNAGRAEELAAVLGDSVCVVTGSVASFADNAAAVQRTVEKFGRLDTFVANAGVFDFFQPLAQYEGDQIGAAFDELMSVNVKGGLLGVRAALPELVRSRGSVIFTISNAGFYAGGGGPLYTASKHALVGLVKQLAHELAPKVRVNAVAPGGMKTELSGLSATGTSGQSLSQMDGLDTLLKDITPLQVSPMPEQYCGPYVLLASDDSVVTTGAIINTDGGFGVRGITGVRGGEGL

SEQ ID NO: 3511 - DNA, 849 bp, Comamonas testosteroni
  CDS (1)..(849): transl_table=11
atgcaactcaccaatgaagtagccctggtcaccggcggcggctcgggcctgggccgcgccatcgtggaccgcttcgtcgccgaaggcgcgcgcgtggccgtgctcgacaagtcggccgccaggctccaggagttgaaggccgcgcacggcgccaaggtgcttggcatcgaaggcgatgtgcgcgtgctggccgaccaccagaaggccgcgcgcgaatgcgttgctgccttcggcaagatcgactgcctgatccccaacgcgggcatctgggactattcgatgccactggtcgacatccccgacgacaagatcgatgccgccttcgacgaggtgttccacatcaacgtcaaaggctatctgctggccgtcaaggcctgcctgcccgcgctggtgcaaagccgcggcagcgtggtcttcacgatctcgaacgccggcttctaccccaatggcggcggcccgctctacaccgccaccaaacatgccgtcgtgggcatggtgcgcgaactcgctttcgaactggccccgcacgtgcgcgtcaacggtgtggcgcccggcggcatgagcaccgacctgcgtggcccggcctcgctgggcatggccaaccaggccatctccagcgtgccgctgggcgacatgctggcctcggtgctgccggtgggccgcatgcccgtggccgcggaatacaccggggcctatgtgttctttgccacgcgcggcgacaccttccccaccacgggcgctctgctgaaccatgacggtggcatgggcgtgcgcggctttttcgatgctgctgggcggcaaagacctgccgcagaaactgcagctttcataaccaaggagaagacatga

SEQ ID NO: 3512 - protein, 282 aa, Comamonas testosteroni
MQLTNEVALVTGGGSGLGRAIVDRFVAEGARVAVLDKSAARLQELKAAHGAKVLGIEGDVRVLADHQKAARECVAAFGKIDCLIPNAGIWDYSMPLVDIPDDKIDAAFDEVFHINVKGYLLAVKACLPALVQSRGSVVFTISNAGFYPNGGGPLYTATKHAVVGMVRELAFELAPHVRVNGVAPGGMSTDLRGPASLGMANQAISSVPLGDMLASVLPVGRMPVAAEYTGAYVFFATRGDTFPTTGALLNHDGGMGVRGFFDAAGRQRPAAETAAFITKEKT

SEQ ID NO: 3513 - DNA, 780 bp, Pseudomonas fluorescens
  CDS (1)..(780): transl_table=11
atgggcaatcaacaagtcgtttcaataaccggtgccggctcaggaatcggattcgaactggttcgatccttcaagtcggccggttattgcgtatccgctctcgtacgaaacgaggagcaagaggcgcttctttgcaatgaattcaaggcagcactcgagagcgttgtgggcgatgtccgagatcccgcaataaatgagaagctgatcaagcagacaatcgctagattcggtcatctcgattgtttcatcgcaaatgccggtatttgggattacatgctgagcatcgaagagccttgggagaaaatctccagcagttttgacgaaatattcgacatcaatgtaaagagctatttcagtggcatcagtgcagctctgccggaactgaaaaagacgaacggatcggtggtgatgaccgcttcggtgtcgtcccatgcggtcggtggtggtggttcttgctacatcgccagcaagcatgcggtgttaggtatggtcaaggctttgggctacgaattggctcccgaaattcgcgtgaacgctgtctcgccgggcggcaccgtgacgtctctgtgcggtcctgcaagcgccggtttcgacaaaatgcacatgaaagacatgcccggcatcgacgatatgatcaaaggcctcactcctcttgggtttgcagccaagcccgaagacgtggtggagccctatctgttgctggcttcgcgaaagcagggaaaattcatcaccggcaccgtgattagcattgatggcggtatggcgctcggtcgcaagtga

SEQ ID NO: 3514 - protein, 259 aa, Pseudomonas fluorescens
MGNQQVVSITGAGSGIGFELVRSFKSAGYCVSALVRNEEQEALLCNEFKAALESVVGDVRDPAINEKLIKQTIARFGHLDCFIANAGIWDYMLSIEEPWEKISSSFDEIFDINVKSYFSGISAALPELKKTNGSVVMTASVSSHAVGGGGSCYIASKHAVLGMVKALGYELAPEIRVNAVSPGGTVTSLCGPASAGFDKMHMKDMPGIDDMIKGLTPLGFAAKPEDVVEPYLLLASRKQGKFITGTVISIDGGMALGRK

SEQ ID NO: 3515 - DNA, 819 bp, Burkholderia sp
  CDS (1)..(819): transl_table=11
atgaaattaccagaaaaccaggtcgttatcgtgacaggtgctggctccggtctcggacatgcgctaactgaacgttttttggcggaaggcgcagcggttgtttgtatggaaattaatccggaaaaagccaaaagactgaaagaggatttcggtaagtcagtgtcgatcgtggtaggtgacgtgactaaatatgaagataatcgacgcgccgtagaagaagcggtgagccggttcggtcatctggatacgttcgtcgctaatgccggtgtgtttgattttttcaggccgattacggatacgcctcccgatgctttgtcgcaggcattcgatcagattttcgctattaacgtaaaggggggattgctcggcgccaaggcagctgtgacggaattgaagaaaaccggtggttcgatcatatacaccgtttcaaatgcaggattctattcgggcggcggtggagcaatttatacgtcaactaagcacgcattggtgggcctggttcgccagctggcttatgagtttgctccgtatgtccgcgtgaatggcgtggcacctggtggaatgaaaacggagctgtccggagtttctgcattgggatccgacaagcagaaactgagcgacgtggaagaactggaaagcatgctctgccaaatcacccccctaaatatcgcgccgattccagccgactatacaggaccgtatgtgcttttgtcgtcaaaagtggatgcgggaccgattaccggcgtggtgatcaacacggacggagggctgggtgtgcgagggatcgcaaatgtcaggggcggtgaggccttaaggtga

SEQ ID NO: 3516 - protein, 272 aa, Burkholderia sp
MKLPENQVVIVTGAGSGLGHALTERFLAEGAAVVCMEINPEKAKRLKEDFGKSVSIVVGDVTKYEDNRRAVEEAVSRFGHLDTFVANAGVFDFFRPITDTPPDALSQAFDQIFAINVKGGLLGAKAAVTELKKTGGSIIYTVSNAGFYSGGGGAIYTSTKHALVGLVRQLAYEFAPYVRVNGVAPGGMKTELSGVSALGSDKQKLSDVEELESMLCQITPLNIAPIPADYTGPYVLLSSKVDAGPITGVVINTDGGLGVRGIANVRGGEALR

SEQ ID NO: 3517 - DNA, 834 bp, Pseudomonas sp
  CDS (1)..(834): transl_table=11
atgaaactgaaaggtgaagcggtactgatcacggggggcgcctccggattagggcgcgcgctcgtggaccgattcgtggccgaaggcgccaaagtggcggtgctcgacaagtcggcagagcgccttgcagagctggaaaccgatcatggcgacaacgtgctcggcatcgtcggcgatgtgcgttcactggaagaccagaaacaggctgccagccgctgcgtggccaggttcgggaaaatcgacaccttgattcccaatgcaggcatctgggattactcgacggccttggtcgacctgcccgaagagagcctcgatgccgcgttcgatgaggtctttcacatcaatgtcaagggttatatccatgcagtgaaggcctgcctgccggccctggtcgccagccgtggcaacgtgatcttcacgatctccaatgcgggcttctatcccaatggcggcggccctctttacaccgcagccaagcacgccatcgtgggcctggtgcgtgaactggcgttcgagctggcgccatacgtgcgcgtcaacggcgtggggccgggcggcatcaatagcgatctgagaggtccttcctcgctgggaatgggcagcaaggcgatttcgaccgtaccgctggccgacatgctgaagtcggtgctgccgattggtcgcatgcccgaggtcgaagagtacaccggggcctatgtgttttttgccacccgaggcgatgcggcgcctgcgaccggggccttgctgaactacgacggtggcttgggcgttcgtggattcttctcgggtgccggaggtaatgacttgctcgaacagctgaatatccatccctaa

SEQ ID NO: 3518 - protein, 277 aa, Pseudomonas sp
MKLKGEAVLITGGASGLGRALVDRFVAEGAKVAVLDKSAERLAELETDHGDNVLGIVGDVRSLEDQKQAASRCVARFGKIDTLIPNAGIWDYSTALVDLPEESLDAAFDEVFHINVKGYIHAVKACLPALVASRGNVIFTISNAGFYPNGGGPLYTAAKHAIVGLVRELAFELAPYVRVNGVGPGGINSDLRGPSSLGMGSKAISTVPLADMLKSVLPIGRMPEVEEYTGAYVFFATRGDAAPATGALLNYDGGLGVRGFFSGAGGNDLLEQLNIHP

SEQ ID NO: 3519 - DNA, 831 bp, Pseudomonas putida
  CDS (1)..(831): transl_table=11
atgagatttacaggtgaagtgatattgataccgggtggtgcggctggacttgggcgcgctcttgttgatcggttcgtggccgaaggtgccaaggtggctgtgctcgacaagagcgccgaacgcctacaacagctggaatcggatcatggcgaagaagtggtatgcatcgtcggcgatgtgcgctctctggaagaccagaagcgggctgccagctgctgtattgctaagttcgggaagatcgacactttgatccccaacgcaggtatctgggattacaacacgcaattagtcgatctgcctgaagatagtatcgatactgcatttgatgaattgtttcaaatcaatgtcaagggttacatccacgccgtcaaggcctgcctgccggctttggtcgcaagtcgtggcagcgtgatctgcacgatctcgaatgcaggcttctaccccaatggcggaggccctctttacacggcgaccaagcatgcggtcgtgggcttggtgcgtgagctggccttcgagctggcaccatatgtgcgagtcaatggcgtgggggtgggcggtatgagcacggatttgagaggtccttgctcgctgggaatgagtgagcaatcgatatcgagcgtgccgttggctgagttgctgcaggatgtactgccgattggccgcatgcctgacgctgaagaatatacaggcgcctatgtgtttttcgctacgcgttgcgactcggtaccggccaccgggaccttgctgaattacgacggtggcatgggcgttcgcggaattttttccgcggtaggtggtaaagatcttctcgcaaaactgaacatcgattaa

SEQ ID NO: 3520 - protein, 276 aa, Pseudomonas putida
MRFTGEVILIPGGAAGLGRALVDRFVAEGAKVAVLDKSAERLQQLESDHGEEVVCIVGDVRSLEDQKRAASCCIAKFGKIDTLIPNAGIWDYNTQLVDLPEDSIDTAFDELFQINVKGYIHAVKACLPALVASRGSVICTISNAGFYPNGGGPLYTATKHAVVGLVRELAFELAPYVRVNGVGVGGMSTDLRGPCSLGMSEQSISSVPLAELLQDVLPIGRMPDAEEYTGAYVFFATRCDSVPATGTLLNYDGGMGVRGIFSAVGGKDLLAKLNID

SEQ ID NO: 3521 - DNA, 846 bp, Burkholderia sp
  CDS (1)..(846): transl_table=11
atgaagctgacaggtgaagtggcattgattaccggtggcgcctccggactggggcgcgccttgctcgaccggttcgtcgccgagggagcacgcgtggcgctgctcgacaagtcggccgagcgcctgcgggaactggaggtggtccatggagggaacgcggtcggcgtcgtcggcgatgtgcgctccctgcaggatcagaagcgcgccgccgagcgctgtcttgctgcattcggaaagatcgacacgcttattcctaatgcgggcatctgggactattcgaccgccttggccgatctgccggaagacaagatcgatgcggcattcgacgacatttttcatgtcaacgtgaagggctacatccacgccgtcaaggcctgcctgccagccctggtgtccagccgcggcagtgttgtcttcacgatctctaacgctggcttctatcccaacggcggcggcccgctctataccgcgaccaagcacgcagtggtgggcctagtccgccaaatggcgtttgagctggctcctcatgtgcgcgtcaacggcgtggcaccgggcggcatgaacaccgatctgcgcggtccctcttcgctcgggctgagcgaacagtcgatctcgtcggtgccgctcgccgacatgctgaaatcggtgctgccgatcggccgcatgccagcgctcgaagagtataccggtgcctatgtcttcttcgccacgcggggagattcgctgcccgccaccggcgccttactgaactacgacggcggcatgggcgttcgaggttttttgacggcagcgggcggcgccgacctgcccgagaagctgaacatcaatcgcgagggacaagaatga

SEQ ID NO: 3522 - protein, 281 aa, Burkholderia sp
MKLTGEVALITGGASGLGRALLDRFVAEGARVALLDKSAERLRELEVVHGGNAVGVVGDVRSLQDQKRAAERCLAAFGKIDTLIPNAGIWDYSTALADLPEDKIDAAFDDIFHVNVKGYIHAVKACLPALVSSRGSVVFTISNAGFYPNGGGPLYTATKHAVVGLVRQMAFELAPHVRVNGVAPGGMNTDLRGPSSLGLSEQSISSVPLADMLKSVLPIGRMPALEEYTGAYVFFATRGDSLPATGALLNYDGGMGVRGFLTAAGGADLPEKLNINREGQE

SEQ ID NO: 3523 - DNA, 780 bp, Comamonas testosteroni
  CDS (1)..(780): transl_table=11
atgagcacacagcaagttattgccattactggagccggctcgggcatcgggctggaactggttcgatccttcaaagcagctggctattgcgtgtccgcacttgttcgcaatgaggaacaagaggcgggtcttcgcagtgaattcaaagatgccattgagatcgtggcgggcgatgtccgtgatcacgccaccaatgaaaagctggtcaacaaggcgatcgccaggttcggacacctcgactgcttcatcggaaatgccgggatatgggattacatgctgggcgtcgacgagccatgggagaaattatccggcagtttcgaggagatatttgatatcaacgtcaaaagctatttcagcggcatcagcgcggccttgccggaactcaaaaaaacgaacggatcggtcgtagtgacggcttccgtttcttcctatgcggccggcggcggcggctcttgctacattgccagcaagcatgcagtgctgggcatggtcaaggcgttggcctacgaattggccccgcacatccgggtcaatggcgttgcgccaggtggtacggtcacttctttggcggggccggcaagcgccggtttcgacaaaaccaaaatgaaagacatgcccggcatcgatgacatgatcaagggcctgacccccttggggttcgcagcaaggcccgaggacgtggtggcaccgtatcttttgctggcctcccgggaacaagggaagttcatcactggcaccgtaatcggcattgatggcggcatggcgctcggccgaaagtga

SEQ ID NO: 3524 - protein, 259 aa, Comamonas testosteroni
MSTQQVIAITGAGSGIGLELVRSFKAAGYCVSALVRNEEQEAGLRSEFKDAIEIVAGDVRDHATNEKLVNKAIARFGHLDCFIGNAGIWDYMLGVDEPWEKLSGSFEEIFDINVKSYFSGISAALPELKKTNGSVVVTASVSSYAAGGGGSCYIASKHAVLGMVKALAYELAPHIRVNGVAPGGTVTSLAGPASAGFDKTKMKDMPGIDDMIKGLTPLGFAARPEDVVAPYLLLASREQGKFITGTVIGIDGGMALGRK

SEQ ID NO: 3525 - DNA, 819 bp, Nocardioides sp
  CDS (1)..(819): transl_table=11
atgggctggttggacggacgggtagcgctcgtcacgggcggtgcctcgggtatcggactgtcggtggtcgaacggttcctggccgagggtgcccgagtggcggttctcgaccgttcgaaggagggcgtggagaagctccaggacgagcatcccggcgccgtcgcgttcaccggggacgtgacctcgttcgaggacaatcagcaggccgtcacgggcgtggtcgccgcgttcgggaagttggatgtcttcgttgggaatgcggggatcttcgactacttcgcctcgctcgtcagcttcgagggggacaagctcggtgccgcgttcgacgagatcttcgcggtgaacgtcaaggcctacctgctcggggccagggcggccgtccctgaactgcttaagagcgacgccccgagcatgatcttcacggtctcgaactcaggcttctacacctccggtggggggccgctgtacacggcctcgaagcacgcggtggtcggtgtcgtgcgagaactggcctacgagctggcgccgaagatccgggtgaacggggtggcgcccggcggcaccgtgacggagttgcgcggcatcgagaagttgggtcagggcaacatcgtcctgtcgaccgtccccgacatcgaggacctgatgcgcacgaacccgctgcagaccgcgcagcacccggccgaccacgccggcctctacgtgctgctcgcgtccgccgagaactccagggccgtcacgggagtggtcatcaacagcgacggcggcctcggcatccggggcatgacccagctcgccggcggagtcgacctaaccgtctaa

SEQ ID NO: 3526 - protein, 272 aa, Nocardioides sp
MGWLDGRVALVTGGASGIGLSVVERFLAEGARVAVLDRSKEGVEKLQDEHPGAVAFTGDVTSFEDNQQAVTGVVAAFGKLDVFVGNAGIFDYFASLVSFEGDKLGAAFDEIFAVNVKAYLLGARAAVPELLKSDAPSMIFTVSNSGFYTSGGGPLYTASKHAVVGVVRELAYELAPKIRVNGVAPGGTVTELRGIEKLGQGNIVLSTVPDIEDLMRTNPLQTAQHPADHAGLYVLLASAENSRAVTGVVINSDGGLGIRGMTQLAGGVDLTV

SEQ ID NO: 3527 - DNA, 834 bp, Alcaligenes faecalis
  CDS (1)..(834): transl_table=11
atggcatggcttgaaggacaaagcgtttttttgacgggtggtgttgcaggtctcggtcgagcgctcgtaaaaagacttgtagaagaaggtgccaacgtcactgtgttggatcgaaatgcacgggggcttgatgagctcgttgaaagttttaagggacgggtcgcgggctcgcccggcgatgtgcgcaacttggccgataaccgcaaggccgtcgaactggctgtggagcgtttcggcaagctggatactttcaatcggcaacgccggcatctgggattattgtgtcccccttgtcgacctgccggacgatgccatcagcgaagctttgatgaggtcattggaatcaatctaatgggctacgtgatgggcatcaaagccgcagcgccggcgttggtgcgctcccgagggtcagttatcttgaccctgtcaagctccgctttctatgcaggtggcggcggcgtgctctataccgtagccaagcacgcggcagtgggactgattaagcaggcggcgcatgagttggccccctatgtgcgcgtcaacggtgtggcacctggcgggattgcttctgatctgcgtggaccgaagtcgcttgggatgggtgagcagtcgataacctctgtacccttggccgacctcgtcaaagacattgccccgatcggcaggctgtctgacacagaggagtacaccggtagctatgtctacctggcttctgcccgcaactcagcaccagcaaccggcgtgatcatcaactgcgatggtggcatgggtgtgcgaagcgtccttggccctgccagcggtggcaagggcttactagaaaaattcggcggctga

SEQ ID NO: 3528 - protein, 277 aa, Alcaligenes faecalis
MAWLEGQSVFLTGGVAGLGRALVKRLVEEGANVTVLDRNARGLDELVESFKGRVAGSPGDVRNLADNRKAVELAVERFGKLDTFNRQRRHLGLLCPPCRPAGRCHQRSFDEVIGINLMGYVMGIKAAAPALVRSRGSVILTLSSSAFYAGGGGVLYTVAKHAAVGLIKQAAHELAPYVRVNGVAPGGIASDLRGPKSLGMGEQSITSVPLADLVKDIAPIGRLSDTEEYTGSYVYLASARNSAPATGVIINCDGGMGVRSVLGPASGGKGLLEKFGG

SEQ ID NO: 3529 - DNA, 816 bp, Rhodococcus sp
  CDS (1)..(816): transl_table=11
gtgggatttctggacggcaaggtggcgctcgtcaccggcggcggatcgggtatcggccgcgctgtggtcgagctctacgtgcaagaaggcgcgaaagtgggggtcctcgaaatctctccggagaaggtgaaggacttgcgtaacgcactgcccgccgactccgtcgtggtgacggaaggcgacgccacgtcgatggctgataacgaacgcgccgtcgccgacgtcgtggacgcattcgggccgcttaccacgctcgtctgcgtggtcggcgtattcgactacttcaccgagattccacaactgcccaaggacaggatcagtgaggcgttcgatcaactcttcggcgtcaacgtaaagagcaatctgttgagtgtgaaggcggcgctcgaccagctgatcgagaacgagggcgacatcatccttaccctttccaacgccgccttctatcccggtggcggcggtccgctgtatgtgtcgtcaaagttcgctgtccgtggccttgtggccgaactcgcgtacgagctggcgccgaaggtacgcgtcaacggcgttgcaccaggcggcactatcaccgaactgcgcggcatcccggccctggccaacgagggccaaagcctcaaggacgtgccagacatcgagggtctaatcgagggcatcaatccgctgggcgtcgtcgcccagcctgaggatcactcttggtcatacgcgcttctcgcctcgcgggagcgtacctcggcggtgaccggcaccataatcaatagcgacggcggtctcggggtccgcggcatgacgcggatggcgggcctctcgcagtga

SEQ ID NO: 3530 - protein, 271 aa, Rhodococcus sp
MGFLDGKVALVTGGGSGIGRAVVELYVQEGAKVGVLEISPEKVKDLRNALPADSVVVTEGDATSMADNERAVADVVDAFGPLTTLVCVVGVFDYFTEIPQLPKDRISEAFDQLFGVNVKSNLLSVKAALDQLIENEGDIILTLSNAAFYPGGGGPLYVSSKFAVRGLVAELAYELAPKVRVNGVAPGGTITELRGIPALANEGQSLKDVPDIEGLIEGINPLGVVAQPEDHSWSYALLASRERTSAVTGTIINSDGGLGVRGMTRMAGLSQ

SEQ ID NO: 3531 - DNA, 801 bp, Sphingomonas xenophaga
  CDS (1)..(801): transl_table=11
atgtctaacaggcttgatggacaggtggcgctacttaccggtggcgccaccgggatcggggcggcggtggtcgcgcgttatattgaggagggtgccaaggttggcgtcctggtcaaggacgatgagcaggtagaactcgtgcgttcgcggcatggggacagcgtggtggccgtggcgggagacgtgcgttcctatgccgacaatgcccgcgccgtggcggaaaccgtggcggctttcggcaagctcgatgtatttgtcgggaacgttgggatctgggattttatggtcccgctcgaacagcaggatcccgagcaactcggcaaggtcttcgacgaaatcttcgacgtcaacctgaagggttatttctttggtgcccgcgccgccatccccgaactcaggaaggttaagggaagcatcattttcacggcctcgacctcgagttattataccggaggcggcggcacgctatacgtcgcctctaagcacgcggtgctcgggctgatcaagcaactggcttgggaactggcacccgaaatccgggttaacggcgttgcaccgggagggacccggaccccactcagcggcactcagacgggtggctttgcagaaatgaagatggaacagatgcccgggcttgacgaaatgatttccagcatgaccccgctcgggcggatagccgaaccagccgaccatgctggtctttacgcgcttttggcttcgcgccgggactcttcgtacctgactggcactatgctgctcagtgatggcggtagcggaatcggcaatcgtcctgatggttga

SEQ ID NO: 3532 - protein, 266 aa, Sphingomonas xenophaga
MSNRLDGQVALLTGGATGIGAAVVARYIEEGAKVGVLVKDDEQVELVRSRHGDSVVAVAGDVRSYADNARAVAETVAAFGKLDVFVGNVGIWDFMVPLEQQDPEQLGKVFDEIFDVNLKGYFFGARAAIPELRKVKGSIIFTASTSSYYTGGGGTLYVASKHAVLGLIKQLAWELAPEIRVNGVAPGGTRTPLSGTQTGGFAEMKMEQMPGLDEMISSMTPLGRIAEPADHAGLYALLASRRDSSYLTGTMLLSDGGSGIGNRPDG

SEQ ID NO: 3533 - DNA, 819 bp, Burkholderia sp
  CDS (1)..(819): transl_table=11
atgggctggttgaataatactgtcactatcattaccggcggcggttcgggacttggaaaagcgttggttgagcgcttcatcaacgaaggggggcgggtgggcgtccttgaacgaagtggcgagagggcacgcgagcttgcgcgggagttcggagacgcggtcgaagttgtggtcggagacgtgaccctctatgaggacaacgtcctggtggtgcagaaaactgtcgcgcggtttggccggttggacaatttcgttggtaacgccggggtctttgattttttccagacgttgcctcaaatggacgcgggcagtatttcgcgagcctttgatgaattgtttgcagttaatgtcaaggcagcactgctcggcgccaaggctgcattggccgaactcgtcaagagtcaagggagcctgattttcacggtatcgaatgccgggttctatcctgggggcggtgggccgctttacacggcgtcgaaacacgcattagttgggttgattcgagagctggctcacgaactggcacccaaagtacgcgtgaacggcgttgcgccaggcggtatgcgcaccaatctcggcggactaagtgcgaccggcacctctgcgcagacgctggaccaggttgacaatctggaggcgatgctcgtcgaaaatacgccacttcgtatggcccctgttcccgccgattactgtgggccatatgtgctgcttgcatcacgtgaaaactcaggtccgatgaccggcgtggttatcaatacggatggtggatttggtgtgcgcggcatcatgaaagtgtgtggcggagacgatttgcactga

SEQ ID NO: 3534 - protein, 272 aa, Burkholderia sp
MGWLNNTVTIITGGGSGLGKALVERFINEGGRVGVLERSGERARELAREFGDAVEVVVGDVTLYEDNVLVVQKTVARFGRLDNFVGNAGVFDFFQTLPQMDAGSISRAFDELFAVNVKAALLGAKAALAELVKSQGSLIFTVSNAGFYPGGGGPLYTASKHALVGLIRELAHELAPKVRVNGVAPGGMRTNLGGLSATGTSAQTLDQVDNLEAMLVENTPLRMAPVPADYCGPYVLLASRENSGPMTGVVINTDGGFGVRGIMKVCGGDDLH

SEQ ID NO: 3535 - DNA, 780 bp, Pseudomonas stutzeri
  CDS (1)..(780): transl_table=11
atgagcaatcaacaagtcgtttcgataaccggtgctggctcaggaattggtctcgcactggttcgatcctttaagtccgccggttattgcgtatccgctctcgtacaaaacgaggagcaaaaggcgagcctttgcaatgagttcaaggacgcactcgagatcgtcgtgggcgatgtccgggaccacgcaacaaatgagaagctgataaagcaaacaaccgatagattcggccatctcgattgtttcattgcaaatgccggtatttgggattacatgcttggcatcgaagagccttgggagaaaatatcgagcagttttgatgagatattcaacatcaatgtcaagagctatttcagcggtatcagggccgccctgcaggaactgaaaaagactagcggatcagtggtgatgaccgcttcagtgtcgtcccatgcggtcggtgctggtggttcttgctacatcgccagcaagcatgcggtcctgggcatgatgaaagctttggcttacgaattggctccccacattcgcgtcaacgccgtagcaccgggcggcactgtgacgtctctgtgcggtcccgcaagcgccggcttcgacaaaactcacatggaaaacatgcccggtatcgaggacatgatcaagggtctaacgcctcttggatttgcagccaaggccgaagacgtagtggcaccctatttgttgttggcgtcgcgagatcaagggaaattcattaccgggactgtcattaatatagatggagggatggcgctcggtcgcaagtag

SEQ ID NO: 3536 - protein, 259 aa, Pseudomonas stutzeri
MSNQQVVSITGAGSGIGLALVRSFKSAGYCVSALVQNEEQKASLCNEFKDALEIVVGDVRDHATNEKLIKQTTDRFGHLDCFIANAGIWDYMLGIEEPWEKISSSFDEIFNINVKSYFSGIRAALQELKKTSGSVVMTASVSSHAVGAGGSCYIASKHAVLGMMKALAYELAPHIRVNAVAPGGTVTSLCGPASAGFDKTHMENMPGIEDMIKGLTPLGFAAKAEDVVAPYLLLASRDQGKFITGTVINIDGGMALGRK

SEQ ID NO: 3537 - DNA, 834 bp, Burkholderia xenovorans
  CDS (1)..(834): transl_table=11
atgaaactgaaaggtgaagcggtactgatcacggggggcgcctccggattagggcgcgcgctcgtggaccgattcgtggccgaaggcgccaaagtggcggtgctcgacaagtcggcagagcgccttgcagagctggaaaccgatcatggcgacaacgtgctcggcatcgtcggcgatgtgcgttcactggaagaccagaaacaggctgccagccgctgcgtggccaggttcgggaaaatcgacaccttgattcccaatgcaggcatctgggattactcgacggccttggtcgacctgcccgaagagagcctcgatgccgcgttcgatgaggtctttcacatcaatgtcaagggttatatccatgcagtgaaggcctgcctgccggccctggtcgccagccgtggcaacgtgatcttcacgatctccaatgcgggcttctatcccaatggcggcggccctctttacaccgcagccaagcacgccatcgtgggcctggtgcgtgaactggcgttcgagctggcgccatacgtgcgcgtcaacggcgtggggtcgggcggcatcaatagcgatctgagaggtccttcctcgctgggaatgggcagcaaggcgatttcgaccgtaccgctggccgacatgctgaagtcggtgctgccgattggtcgcatgcccgaggtcgaagagtacaccggggcctatgtgttttttgccacccgaggcgatgcggcgcctgcgaccggggccttgctgaactacgacggtggcttgggcgttcgtggattcttctcgggtgccggaggtaatgacttgctcgaacagctgaatatccatccctaa

SEQ ID NO: 3538 - protein, 277 aa, Burkholderia xenovorans
MKLKGEAVLITGGASGLGRALVDRFVAEGAKVAVLDKSAERLAELETDHGDNVLGIVGDVRSLEDQKQAASRCVARFGKIDTLIPNAGIWDYSTALVDLPEESLDAAFDEVFHINVKGYIHAVKACLPALVASRGNVIFTISNAGFYPNGGGPLYTAAKHAIVGLVRELAFELAPYVRVNGVGSGGINSDLRGPSSLGMGSKAISTVPLADMLKSVLPIGRMPEVEEYTGAYVFFATRGDAAPATGALLNYDGGLGVRGFFSGAGGNDLLEQLNIHP

SEQ ID NO: 3539 - DNA, 846 bp, Comamonas testosteroni
  CDS (1)..(846): transl_table=11
atgaagctgacaggtgaagtggcattgattaccggtggcgcctccggactggggcgcgccttggtcgaccggttcgtcgccgagggagcacgcgtggccgtgctcgacaagtcggccgagcgcctgcgggaactggaggtggcccatggagggaacgcggtaggcgtcgtcggcgatgtgcgctccctgcaggatcagaagcgcgccgccgagcgctgtcttgctgcattcggaaagatcgacacgcttattcctaatgcgggcatctgggactattcgaccgccttggccgatctgccggaagacaagatcgatgcggcattcgacgacatttttcatgtcaacgtgaagggctacatccacgccgtcaaggcctgcctgccagccctggtgtccagccgcggcagtgttgtcttcacgatctctaacgctggcttctatcccaacggcggcggcccgctctataccgcgaccaagcacgcagtggtgggcctagtccgccaaatggcgtttgagctggctcctcatgtgcgcgtcaacggcgtggcaccgggcggcatgaacaccgatctgcgcggtccctcttcgctcgggctgagcgaacagtcgatctcgtcggtgccgctcgccgacatgctgaaatcggtgctgccgatcggccgcatgccagcgctcgaagagtataccggtgcctatgtcttcttcgccacgcggggagattcgctgcccgccaccggcgccttactgaactacgacggcggcatgggcgttcgaggttttttgacggcagcgggcggcgccgacctgcccgagaagctgaacatcaatcgcgagggacaagaatga

SEQ ID NO: 3540 - protein, 281 aa, Comamonas testosteroni
MKLTGEVALITGGASGLGRALVDRFVAEGARVAVLDKSAERLRELEVAHGGNAVGVVGDVRSLQDQKRAAERCLAAFGKIDTLIPNAGIWDYSTALADLPEDKIDAAFDDIFHVNVKGYIHAVKACLPALVSSRGSVVFTISNAGFYPNGGGPLYTATKHAVVGLVRQMAFELAPHVRVNGVAPGGMNTDLRGPSSLGLSEQSISSVPLADMLKSVLPIGRMPALEEYTGAYVFFATRGDSLPATGALLNYDGGMGVRGFLTAAGGADLPEKLNINREGQE

SEQ ID NO: 3541 - DNA, 828 bp, Pseudomonas pseudoalcaligenes
  CDS (1)..(828)
atgaaactgaaaggtgaagcggtactgatcacggggggcgcctccggattagggcgcgcgctcgtggaccgattcgtggccgaagccaaagtggcggtgctcgacaagtcggcagagcgccttgcagagctggaaaccgatctgggcgacaacgtgctcggcatcgtcggcgatgtgcgttcactggaagaccagaaacaggctgccagccgctgcgtggccaggttcgggaaaatcgacaccttgattcccaatgcaggcatctgggattactcgacggccttggtcgacctgcccgaagagagcctcgatgccgcgttcgatgaggtctttcacatcaatgtcaagggttatatccatgcagtgaaggccctgccggccctggtcgccagccgtggcaacgtgatcttcacgatctccaatgcgggcttctatcccaatggcggcggccctctttacaccgcagccaagcaggccatcgtgggcctggtgcgtgaactggcgttcgagctggcgccatacgtgcgcgtcaacggcgtggggccgggcggcatgaatagcgatatgagaggtccttcctcgctgggaatgggcagcaaggcgatttcgaccgtaccgctggccgacatgctgaagtcggtgctgccgattggtcgcatgcccgaggtcgaagagtacaccggggcctatgtgttttttgccacccgaggcgatgcggcgcctgcgtccggggccttggtgaactacgacggtggcttgggcgttcgtggattcttctcgggtgccggaggtaatgacttgctcgaacagctgaatatccatccctaa

SEQ ID NO: 3542 - protein, 275 aa, Pseudomonas pseudoalcaligenes
MKLKGEAVLITGGASGLGRALVDRFVAEAKVAVLDKSAERLAELETDLGDNVLGIVGDVRSLEDQKQAASRCVARFGKIDTLIPNAGIWDYSTALVDLPEESLDAAFDEVFHINVKGYIHAVKALPALVASRGNVIFTISNAGFYPNGGGPLYTAAKQAIVGLVRELAFELAPYVRVNGVGPGGMNSDMRGPSSLGMGSKAISTVPLADMLKSVLPIGRMPEVEEYTGAYVFFATRGDAAPASGALVNYDGGLGVRGFFSGAGGNDLLEQLNIHP

SEQ ID NO: 3543 - DNA, 834 bp, Pseudomonas putida
  CDS (1)..(834): transl_table=11
atgaaattgacaggcgaagtggtgttgatcacgggaggcgcctccgggctggggcgagcgctcgtggatcgattcgtggccgaacgggcaaaagtggcagtgctggacaagtcggccgagcgtctcgcacagctggaaaccgatcatggcgacaacgtgcttggcgtcaccggcgatgtccgttcactggaagatcagaagcaggcggccagccgctgcgtggccaagttcggaaaaatcgacaccctgatccccaatgcaggcatttgggattactcgacggccttgatcgacctgcccgaagagagcctcgatgccgcgttcgatgaggtctttcacatcaatgtcaagggttatatccatgcagtgaaggcctgcctgccggccctggtcgccagccgtggcaacgtgatcttcacgatctccaatgcgggcttctatcccaatggcggaggccctctctacaccgcagccaagcacgccgtggtgggtctggtgcgtgagctggcgttcgagctggcgccatacgtgcgcgtcaacggcgtggggccgggcggcatcaatagcgatctgagaggcccctcctcgctggggatgggcggcaaggcgatttcgaccgtgccgcttgccgacatgctcaagtcggtgcttccgatcggccgcatgcctgaggccgaggagtacaccggggcctatgtgttttttgccacgcgaggtgatgcggcgcctgcgaccggggccttgctgaactacgacggtggcttgggcgttcgtggattcttctcgggtgccgggggtaatgacttgctcgaaagactgaatatcaattcctga

SEQ ID NO: 3544 - protein, 277 aa, Pseudomonas putida
MKLTGEVVLITGGASGLGRALVDRFVAERAKVAVLDKSAERLAQLETDHGDNVLGVTGDVRSLEDQKQAASRCVAKFGKIDTLIPNAGIWDYSTALIDLPEESLDAAFDEVFHINVKGYIHAVKACLPALVASRGNVIFTISNAGFYPNGGGPLYTAAKHAVVGLVRELAFELAPYVRVNGVGPGGINSDLRGPSSLGMGGKAISTVPLADMLKSVLPIGRMPEAEEYTGAYVFFATRGDAAPATGALLNYDGGLGVRGFFSGAGGNDLLERLNINS

SEQ ID NO: 3545 - DNA, 831 bp, Pseudomonas sp
  CDS (1)..(831): transl_table=11
atgcaactcaacaatgaagtagccctggtcaccggcggtggctcgggcctgggccgggccatcgtggaccggttcgtggccgaaggcgcgcgcgtggccgtgctcgacaaatcggccgccaggctccaggaactccaggccgcgcacggcgccaaagtgctgggcatcgaaggtgacgtgcgcgtgctggccgaccaccagaaggccgcgcgcgaatgcgtggccgcctttggcaagatcgactgcctgatccccaacgcgggcatctgggattattcgatgccgctcgtggacatccctgacgacaggatcgacgccgccttcgacgaggtcttccacatcaacgtcaagggctatctgcttgccgtcaaggcctgcctgcccgcgctggtgcaaagccgcggcagcgtggtcttcacgatctcgaacgcgggcttctacccgaacggcggcggcccgctctatacaggggccaaacatgccgtggtgggcatggtgcgcgaactcgcctacgaacttgcgccacacgtgcgcgtcaatggcgtggcgcccggcggcatgagcactgacctgcgcggcccggcctcgctgggcatggccaaccaggccatttcgagcgtgccgctgggtgaaatgctgacctctgtgcttcccgtggggcgcatgcctgtgcgagcggaatacaccggagcctacgtgttctttgccacgcgcggcgacaccttccccacgacaggcgcgttgctcaaccacgatggtggcatgggcgtgcgcggctttttcgaggctaccgggggcaaagacctgccgcagaaactgcggctttcataa

SEQ ID NO: 3546 - protein, 276 aa, Pseudomonas sp
MQLNNEVALVTGGGSGLGRAIVDRFVAEGARVAVLDKSAARLQELQAAHGAKVLGIEGDVRVLADHQKAARECVAAFGKIDCLIPNAGIWDYSMPLVDIPDDRIDAAFDEVFHINVKGYLLAVKACLPALVQSRGSVVFTISNAGFYPNGGGPLYTGAKHAVVGMVRELAYELAPHVRVNGVAPGGMSTDLRGPASLGMANQAISSVPLGEMLTSVLPVGRMPVRAEYTGAYVFFATRGDTFPTTGALLNHDGGMGVRGFFEATGGKDLPQKLRLS

SEQ ID NO: 3547 - DNA, 843 bp, Rhodococcus globerulus
  CDS (1)..(843): transl_table=11
gtgagactccaggatgaggttgtcctcgtcaccggcggttgtgccggcctgggacgcgctatcgtagatcggttcgtctgcgagggcgccagggttgccgtgctcgaccggtctgttgcaggtctcgaggagctgcgtgccgctcatggtgacgcggtcgtggccgtcgagggagacgtccgttatctcgacagtcacaaggagaccgtcgcgaagtgcgtcgagacatttggaaagctagattgctacatcggaaacgcgggagtttgggactactcgacggcgctcgtcgaaattccagaggaccgtctcgatgaggcgttcgacgagatgtactccatcaatgtgaagggctacctcctcggcgtcaaggccgctctgggggccctctacgccagcaggggcagcgtcatcttcacggtgtccaatgctggcttctaccctgccggtggtggcgctctctacacgggcgcgaagcacgcgatcgtcggcatggtcaagcagctggcctacgagctaggcccacacatcagggtgaatggaatcgcgccaggcggcctcgggggaagcgatctgcgaggtctcaaggccctcgacctcgccgaggtctcgctctcgaaggtcccgctgggcgacatgctcaaggacatcctcccgacggggcagatggcctccgccgaggagtcgacgggcgcctatgtcttcttcgccacccggtccgaaaccgtgcctctgacagggagtgttcttaactacgacggcgggatcggggtacggggcatgtccgaggcaaatcgcggcgacctattggatcagttctactcaaagggagcgctagtatga

SEQ ID NO: 3548 - protein, 280 aa, Rhodococcus globerulus
MRLQDEVVLVTGGCAGLGRAIVDRFVCEGARVAVLDRSVAGLEELRAAHGDAVVAVEGDVRYLDSHKETVAKCVETFGKLDCYIGNAGVWDYSTALVEIPEDRLDEAFDEMYSINVKGYLLGVKAALGALYASRGSVIFTVSNAGFYPAGGGALYTGAKHAIVGMVKQLAYELGPHIRVNGIAPGGLGGSDLRGLKALDLAEVSLSKVPLGDMLKDILPTGQMASAEESTGAYVFFATRSETVPLTGSVLNYDGGIGVRGMSEANRGDLLDQFYSKGALV

SEQ ID NO: 3549 - DNA, 813 bp, Escherichia coli; identical to SEQ ID NO: 3401
  CDS (1)..(813): transl_table=11

SEQ ID NO: 3550 - protein, 270 aa, Escherichia coli; identical to SEQ ID NO: 3402

SEQ ID NO: 3551 - DNA, 780 bp, Pseudomonas putida
  CDS (1)..(780): transl_table=11
atgggcaatcaacaagtcgtttcgataaccggtgcaggctcaggaatcggtctcgaactggttcggtcctttaagtcggccggttattacgtatccgctctcgtacgaaacgaggagcaagaggcgcttctttgcaaagagttcaaggacgcactcgagattgtagtgggcgatgtccgggaccacgcaacaaatgagaagctgataaagcaaacaatcgatagattcggtcatcttgattgttttattgcaaatgccggtatctgggattacatgctgagcatcgaagagccttgggagaaaatatcgagcagttttgacgaaatattcgacattaatgtcaagagctatttcagtggcatcagtgccgccctgccggaactgaaaaagactaacggatcagtggtgatgaccgcttcggtgtcgtcccatgcggtcggtggtggtggttcttgctacatcgccagcaagcatgcggtgctcggtatggttaaggctttggcctacgaattggcccccgaagttcgcgtgaacgctgtttcgccggggggcaccgtgacgtctctgtgcggttccgcgagcgccggtttcgacaaaatgcacatgaaagacatgcccggcatcgacgatatgatcaaaggtctcacgcctcttgggtttgcagccaagcccgaagacgtggtggcaccctatttgttgctggcttcgcgaaagcaaggaaaattcatcaccggcaccgtgattagcattgatggcggtatggcgctcggtcgcaagtga

SEQ ID NO: 3552 - protein, 259 aa, Pseudomonas putida
MGNQQVVSITGAGSGIGLELVRSFKSAGYYVSALVRNEEQEALLCKEFKDALEIVVGDVRDHATNEKLIKQTIDRFGHLDCFIANAGIWDYMLSIEEPWEKISSSFDEIFDINVKSYFSGISAALPELKKTNGSVVMTASVSSHAVGGGGSCYIASKHAVLGMVKALAYELAPEVRVNAVSPGGTVTSLCGSASAGFDKMHMKDMPGIDDMIKGLTPLGFAAKPEDVVAPYLLLASRKQGKFITGTVISIDGGMALGRK

SEQ ID NO: 3553 - DNA, 780 bp, Pseudomonas sp
  CDS (1)..(780)
atgggcaatcaacaagtcgtttcgataaccggtgcaggctcaggaatcggtctcgaactggttcggtcctttaagtcggccggttattacgtatccgctctcgtacgaaacgaggagcaagaggcgcttctttgcaaagagttcaaggacgcactcgagattgtagtgggcgatgtccgggaccacgcaacaaatgagaagctgataaagcaaacaatcgatagattcggtcatcttgattgttttattgcaaatgccggtatctgggattacatgctgagcatcgaagagccttgggagaaaatatcgagcagttttgacgaaatattcgacattaatgtcaagagctatttcagtggcatcagtgccgccctgccggaactgaaaaagactaacggatcagtggtgatgaccgcttcggtgtcgtcccatgcggtcggtggtggtggttcttgctacatcgccagcaagcatgcggtgctcggtatggttaaggctttggcctacgaattggcccccgaagttcgcgtgaacgctgtttcgccggggggcaccgtgacgtctctgtgcggtcccgcgagcgccggtttcgacaaaatgcacatgaaagacatgcccggcatcgacgatatgatcaaaggtctcacgcctcttgggtttgcagccaagcccgaagacgtggtggcaccctatttgttgctggcttcgcgaaagcaaggaaaattcatcaccggcaccgtgattagcattgatggcggtatggcgctcggtcgcaagtga

SEQ ID NO: 3554 - protein, 259 aa, Pseudomonas sp
MGNQQVVSITGAGSGIGLELVRSFKSAGYYVSALVRNEEQEALLCKEFKDALEIVVGDVRDHATNEKLIKQTIDRFGHLDCFIANAGIWDYMLSIEEPWEKISSSFDEIFDINVKSYFSGISAALPELKKTNGSVVMTASVSSHAVGGGGSCYIASKHAVLGMVKALAYELAPEVRVNAVSPGGTVTSLCGPASAGFDKMHMKDMPGIDDMIKGLTPLGFAAKPEDVVAPYLLLASRKQGKFITGTVISIDGGMALGRK

SEQ ID NO: 3555 - DNA, 849 bp, Brassica napus
  CDS (1)..(849)
atgtcaactgaaaacattcaacattcttccctccctactcaaaggcttttgggcaaagtggcattgataaccggaggagccacagggataggcgaaagcatcgctcgtctcttccacaagcacggtgccaaagtctgcatcgtcgacgtccaagacgatctcggagacaaagttctcaaaactctgttagccaactcggaggagtcagcttgtttcatccacggtgacgtcacacaagaagacgacatcagtaacgctgttgacttcgccgtcaagcgtttcgggacacttgacatactcatcaacaacgcaggagtaagcgaagcaccgtgtccggacatccgcaacaacagtttaaccgagttcgagatggtcttcaacgtcaacgtgaaaggagctttcctagggatgaaacatgcggcgcgtgtgatgatccccgccaagaaaggctcgatagtctctttatgcagcgttggcggcgttgtcggaggcgttggtccgcacgcttacgtcggctccaagcacgcggttctaggtttgactaggagcgttgcggcagagctaggacagcacgggatacgcgtgaactgcgtttcgccttacgcggttttgactaacctcgcgttggctcatttgcctgaggatgagaggaaggaaggcgtggtcgctggtttcaggagtttcgccgctgcgaacgcgaatctgaaaggtgttgagttgacggttgatgacgtggcgaacgcggttttgtttctggcgagtgatgagtcgcggtatgtgagtggagataatctgatggttgatggtgggttcacttgcactaaccactcctttaaagtttttagatga

SEQ ID NO: 3556 - protein, 282 aa, Brassica napus
MSTENIQHSSLPTQRLLGKVALITGGATGIGESIARLFHKHGAKVCIVDVQDDLGDKVLKTLLANSEESACFIHGDVTQEDDISNAVDFAVKRFGTLDILINNAGVSEAPCPDIRNNSLTEFEMVFNVNVKGAFLGMKHAARVMIPAKKGSIVSLCSVGGVVGGVGPHAYVGSKHAVLGLTRSVAAELGQHGIRVNCVSPYAVLTNLALAHLPEDERKEGVVAGFRSFAAANANLKGVELTVDDVANAVLFLASDESRYVSGDNLMVDGGFTCTNHSFKVFR

SEQ ID NO: 3557 - DNA, 885 bp, Glycine max
  CDS (1)..(885)
atggcaagcaataaggagtctaagttcccagcacagagccagaaaactcagccaggaaaagaacatgtaatgaatccactcccacaagccacaaatcctgatcacaaggccgccaataaactccagggaaaggtggcgttggtgacaggaggtgactcaggaattggcagagcggtttgcctgtgtttcgcaaaagagggtgcaaccgtggcctttacatacgtaaagggccatgaggacagggataaagatgatactctgaagatgctgcttgaagctaagacaagtggtgcagacaatccattggcaatagcagcggatattggctttgatgagaactgcaaacaggtcattgaccttgttgtcaaagaatatggccgccttgatgttctggtcaacaatgcagctgagcagcatttgacaaactctgttgaggaaatcacacaacagcagcttgagagagtcttcggaaccaacatcttttctcagttctttttggtcaagcatgctctgaagcacatgaaagaagggagctgcatcataaactctacttcagttaatgcatacaatgggaatccagaagcgttggactacactgctaccaagggagcaattgtggccttcaccagaggtctttctcagcagctagcgagtaggggaattagggtgaatggtgtggcacctggcccagtttggacgccaatacaaccagcttcaaagcctgctgagatgattcagaacttggggtgtgaggtgccaatgaaccgcgtggctcagccttgtgagattgcaccatgttatttgttcttggcaacttgtcaggactcttcctactttactggccaagtcctccatccaaatggtgggatggtcgtcaacgcttaa

SEQ ID NO: 3558 - protein, 294 aa, Glycine max
MASNKESKFPAQSQKTQPGKEHVMNPLPQATNPDHKAANKLQGKVALVTGGDSGIGRAVCLCFAKEGATVAFTYVKGHEDRDKDDTLKMLLEAKTSGADNPLAIAADIGFDENCKQVIDLVVKEYGRLDVLVNNAAEQHLTNSVEEITQQQLERVFGTNIFSQFFLVKHALKHMKEGSCIINSTSVNAYNGNPEALDYTATKGAIVAFTRGLSQQLASRGIRVNGVAPGPVWTPIQPASKPAEMIQNLGCEVPMNRVAQPCEIAPCYLFLATCQDSSYFTGQVLHPNGGMVVNA

SEQ ID NO: 3559 - DNA, 768 bp, Glycine max
  CDS (1)..(768)
atggagagaaccaaatatggcaagagatttcaaggtaaggtagccattgtgacagcttccacccttggaattggctttagcatagcagagaggcttggcttggagggtgcatctgttgtcatctcttctcgcaaacagcaaaatgttgatgaggctgctggtaaactgagagctaaaggaatcgaagtattggcggttgtttgccacgtttcaaatgctcaacaaaggaagaatttgatagacaaaactttacagaagtatggaaagatagatgttgttgtgtccaatgctgccgtacatccttctgtagatcccattttgcaaacacaagaatcgatccttgacaagttgtgggagataaatgtcaaatccactatacttcttctcaaggatgcagctcctcacttgaagaagggttcttctgttgttctcattgcctcacttgttgcttataatccaccacctactatggctatgtatggagtgaccaaaacagcagttcttggacttaccaaagctatggctagtgaaatgggccctaatactcgggtgaattgtgttgttcctgggattgtgccaactcattttgttgcactttatacctcaaatgatgctacaagagaggaacttgaaagaaaggcattgcttggaaggcttggtacaactgaagacatggctgctgcgacagcgtttttggcgtctgatgatgcttcttacataacaggagaaaatctagtggtttctgggggaatgccttctaggttgtag

SEQ ID NO: 3560 - protein, 255 aa, Glycine max
MERTKYGKRFQGKVAIVTASTLGIGFSIAERLGLEGASVVISSRKQQNVDEAAGKLRAKGIEVLAVVCHVSNAQQRKNLIDKTLQKYGKIDVVVSNAAVHPSVDPILQTQESILDKLWEINVKSTILLLKDAAPHLKKGSSVVLIASLVAYNPPPTMAMYGVTKTAVLGLTKAMASEMGPNTRVNCVVPGIVPTHFVALYTSNDATREELERKALLGRLGTTEDMAAATAFLASDDASYITGENLVVSGGMPSRL

SEQ ID NO: 3561 - DNA, 804 bp, Glycine max
  CDS (1)..(804)
atgacaaaacaaagttctaggttggagggtaaggtggctcttatcactggagcagcaagtgggattggtgaagagacagtgagattgttcgctgaacatggagcacttattgttgcaacagatattcaagatgaacaaggtcaccgagttgctgcttcaatagggtcagagagagtgacttaccatcattgtgatgtgagagatgaaaaccaagttgaagaaacaatcaatttcactttggaaaaacatggtcgcatagatgttttgttcagcaacgctggagtaataggttccttatctgggatccttgaccttgatctgaatgagtttgacaacaccatggccacaaatgttcgtggtgtagctgccacaattaagcacacggcacgtgccatggttgctaaaagcacccgtggatccatcatatgcaccactagtgtggctgctactattggtggaacaggtcctcatggttataccacatcaaaacatgctcttctggggttggtgaaatcagcttgtagtgaacttggtgcttatggaataagagttaatagcatatcccctttcggagttgcaacacctcttgcatgcaaagctttcaactttgagcctgagcaagttgaagctaatagctgctcacaggctaatctgaagggtgttgtgttgaaggctaggcatatagctgaagcagctttgtttcttgcttctgatgatgctgctgtttacatcagtggtcacaacttggtggtggatggtgggttctctgtggttaatagaagttattctttcacaccagcttaa

SEQ ID NO: 3562 - protein, 267 aa, Glycine max
MTKQSSRLEGKVALITGAASGIGEETVRLFAEHGALIVATDIQDEQGHRVAASIGSERVTYHHCDVRDENQVEETINFTLEKHGRIDVLFSNAGVIGSLSGILDLDLNEFDNTMATNVRGVAATIKHTARAMVAKSTRGSIICTTSVAATIGGTGPHGYTTSKHALLGLVKSACSELGAYGIRVNSISPFGVATPLACKAFNFEPEQVEANSCSQANLKGVVLKARHIAEAALFLASDDAAVYISGHNLVVDGGFSVVNRSYSFTPA

SEQ ID NO: 3563 - DNA, 843 bp, Glycine max
  CDS (1)..(843)
atgtccactactggtactgttctggcttccactccaacacaaaggctattaggcaaagtggcattggttactggtggagcgtctggaattggagaaagcattgtgcgcctcttccatatccatggtgctaaaatatgtatagctgatgtgcaagacaaccttggaaagcaggtctgtcagtctcttggtgatgaagcaaatgttgtttttgtccattgtgatgttacagtagaggatgatgtttcccatgcagtggacttcactgtgggtaaatttggcacccttcacatcatagtcaacaatgccggaatttctggatcaccttgttccgatatccgcaatgcagacttatcagaattcgataaggtgtttagtgtaaatacgaagggagtgttccacgggatgaaacacgctgctcgaattatgatcccgaagaagaagggctcaatcatttctttatgcagtgtagcaagtgccataggtggcttaggaccgcatgcatacacagggtccaagtatgctgtattggggctcacaaagaatgttgcagctgaattggggaaacatgctataagagtgaactgtgtgtcaccttatggtgttgcaacaggtttggccttggctcatttgcctgaggatgagagaactgatgatgccttggtcagttttcgtgattttactgggagaatggccaacttgcagggggtagaattaactactcacgatgtggctaatgctgtgctcttccttgcaagtgatgatgctaaatatataagtggagagaatctcatggttgatggaggcttcacaagtgcaaatcactcactccaagtttttagatga

SEQ ID NO: 3564 - protein, 280 aa, Glycine max
MSTTGTVLASTPTQRLLGKVALVTGGASGIGESIVRLFHIHGAKICIADVQDNLGKQVCQSLGDEANVVFVHCDVTVEDDVSHAVDFTVGKFGTLHIIVNNAGISGSPCSDIRNADLSEFDKVFSVNTKGVFHGMKHAARIMIPKKKGSIISLCSVASAIGGLGPHAYTGSKYAVLGLTKNVAAELGKHAIRVNCVSPYGVATGLALAHLPEDERTDDALVSFRDFTGRMANLQGVELTTHDVANAVLFLASDDAKYISGENLMVDGGFTSANHSLQVFR

SEQ ID NO: 3565 - DNA, 822 bp, Glycine max
  CDS (1)..(822)
atgggaagtgttccattggcctccgctgctgctcttgccagaaggctagaagggaaggtggcactgataactggtggagcaagtggtataggtgagtgcacagcaagacttttctccaagcatggagccaaagtggtgattgctgatatccaagacgagttaggccactcaatttgcaaagacttggattcatcttcagctacttacattcattgtgatgtcacaaaagaagaaaacatcgaacacgccgtgaacacgaccgtttccaagtacggtaaactagacatcatgcacagcagcgcaggtatagttggcgcatggaaccccagcatattgcacaacaagaagtctcactttgagcaagttatcagtgtcaacctggtgggcacattcctgggaatcaagcacgccgcgagggtgatgatcccttctgggcgtggcagcatagttgcaatggctagcatttgtggaagaattggtggcgtggcttcgcatgcctatacgagctcgaagcacggcatcgtgggactggtgcgaaacactgccgtggagcttggaaccttagggatcagagtgaatagtgtgtctccttatgcggtccctacgcccatgagtaaaactttcctcaacactgatgatgaggggattgctgcactgtattccaatcttaaagggactgttcttaagccccaggatgtggctgaagctgttctttacttgggaagtgacgagtccaagtatgttagtggccatgaccttgttgtagatgggggtttcactgtcgtaaaccctggtttgtgtgtgtttgggcaatccgtgtag

SEQ ID NO: 3566 - protein, 273 aa, Glycine max
MGSVPLASAAALARRLEGKVALITGGASGIGECTARLFSKHGAKVVIADIQDELGHSICKDLDSSSATYIHCDVTKEENIEHAVNTTVSKYGKLDIMHSSAGIVGAWNPSILHNKKSHFEQVISVNLVGTFLGIKHAARVMIPSGRGSIVAMASICGRIGGVASHAYTSSKHGIVGLVRNTAVELGTLGIRVNSVSPYAVPTPMSKTFLNTDDEGIAALYSNLKGTVLKPQDVAEAVLYLGSDESKYVSGHDLVVDGGFTVVNPGLCVFGQSV

SEQ ID NO: 3567 - DNA, 963 bp, Glycine max
  CDS (1)..(963)
atggcttccattgccggatccaactgcgtcgctctccgaaccgccaacttcggcgcctccggtaaccggaaaatcggccagatccgccaatggtctccgattctcacgaatctccgtcccgtttccggtcttcgtcaccgatcgaatactccgtttagctcctccggtgtgagagcacaggttgctactctggaggaagcaggaaccggagcaactcagaaagtggaagcgccggttgcagtggtgaccggagcttccagaggcattggcaaagcgattgcactgtcattaggtaaagcaggttgcaaggttctggtcaactatgcaaggtcatccaaggaagctgaggaggtttccaaggagattgaggagtttggtggtcaagctcttacatttggtggagatgtttctaacgaggatgacgtggagtctatgattaaaactgcagttgatgcttggggaacagttgatgtattaataaacaatgcaggaataactagagatggtttattaatgagaatgaagaaatctcaatggcaggatgttattgatctaaatctcactggtgtttttctttgcacccaggctgctgctaagattatgatgaagaaaagaaagggaagaattgtcaatattgcatcagttgttggtttggttggcaatgttggacaagccaattatagtgctgcgaaagcaggagtaattggcctgacaaaaactgttgcaaaggaatatgctagcagaaacatcactgttaatgcagttgctccagggtttattgcatccgacatgactgccaagctaggacaagacattgagaaaaagattttggagacgatcccattaggaagatatggccaaccagaagaagttgccggactggttgaattcttggctcttaatcaagctgccagttacatcactgggcaggttttcaccattgatggaggtatggtgatgtaa

SEQ ID NO: 3568 - protein, 320 aa, Glycine max
MASIAGSNCVALRTANFGASGNRKIGQIRQWSPILTNLRPVSGLRHRSNTPFSSSGVRAQVATLEEAGTGATQKVEAPVAVVTGASRGIGKAIALSLGKAGCKVLVNYARSSKEAEEVSKEIEEFGGQALTFGGDVSNEDDVESMIKTAVDAWGTVDVLINNAGITRDGLLMRMKKSQWQDVIDLNLTGVFLCTQAAAKIMMKKRKGRIVNIASVVGLVGNVGQANYSAAKAGVIGLTKTVAKEYASRNITVNAVAPGFIASDMTAKLGQDIEKKILETIPLGRYGQPEEVAGLVEFLALNQAASYITGQVFTIDGGMVM

SEQ ID NO: 3569 - DNA, 810 bp, Glycine max
  CDS (1)..(810)
atggcaagtatttctactgtctcggttcttgatagaaggcttgaagggaaagtggctcttatcagtggtggtgctagcggtataggtgaggccactgcaagactcttctctaagcatggagcacacgttgtgatagctgatattcaagacgatttgggtctctctctttgcaaacacttggaatccgcttcctatgtccattgcgatgtcacaaacgaaaacgacgttcaaaacgccgttaacacagcgatttccaagtatggcaatctagatatcatgtttaataatgctggcataattgatgagataaaaacaagcatacttgacaacagcaagtttgattttgagagagtgataagtgtgaacttggttggtccttttctgggaacaaagcacgctgctagggttatgattcctgctaaaaggggaagcataattaacactgctagtgttgctggaacctttagtggaggggcttcacatgcctacacaagttcaaagcacgcactaattggactgatgaaaaacactgcggtggagcttggacagtttggtattagggtaaattgcttgtccccttatgtggttgccacaccattgactaagaaatgtttcaatcttgatgaagaccgaaatggtgagatttattccaacctaaaaggtgttcatcttgtgccaaacgatgtggccgaagctgctctatatttggcaggtgatgagtcaaagtatgttagtggtcacaatcttgtgttagatggagggttcaccaatctaaatgtaggattttctgtgtttgggcagtctgagtaa

SEQ ID NO: 3570 - protein, 269 aa, Glycine max
MASISTVSVLDRRLEGKVALISGGASGIGEATARLFSKHGAHVVIADIQDDLGLSLCKHLESASYVHCDVTNENDVQNAVNTAISKYGNLDIMFNNAGIIDEIKTSILDNSKFDFERVISVNLVGPFLGTKHAARVMIPAKRGSIINTASVAGTFSGGASHAYTSSKHALIGLMKNTAVELGQFGIRVNCLSPYVVATPLTKKCFNLDEDRNGEIYSNLKGVHLVPNDVAEAALYLAGDESKYVSGHNLVLDGGFTNLNVGFSVFGQSE

SEQ ID NO: 3571 - DNA, 828 bp, Glycine max
  CDS (1)..(828)
atggcaacttcaacctctgcactcaataaaaggctggaaggaaaagttgcactgatcacaggaggagctagtggcatcggcaaacgcactgcagaagtgttcgctcagcaaggagccaaagtagtgatcgctgacatccaagacgaactgggacattccgttgctcagtccatagggccatcaacatgttgttatgtccattgcgatgtcaccgatgagaaccaaataaaaaatgccgtccaaaaagccgtagatgcttatgggaagctagacatcatgttcaacaacgccggcattgttgatcccaacaagaaccgaatcattgacaacgataaggcagatttcgaacgtgtcctaagcgtcaatgtcacgggtgttttccttgggatgaagcatgcggcgcaggcgatgatcccagcacgcagtggtagcatcatctctacggccagcataagctcctacgttggtggtgcagcctcgcatgcttactgttgtgctaagcatgctgtggttggtctaactaaaaatgcagcagttgagcttggacagttcggaataagggtgaattgtttgtcaccttacgctcttgctacacctttggccaccaagtttgttggagctaatgatgaggagcttgagactatcatgaactcactggctaatctcaagggtgtcactcttaaagctgaggatgtggctaatgccgcactttattttgctagtgatgattccaggtacgtcagtgggcaaaatttgctcatagatggaggcttcagcattgttaatccttcctttcacatgtttcagtacccggactcggagtcttga

SEQ ID NO: 3572 - protein, 275 aa, Glycine max
MATSTSALNKRLEGKVALITGGASGIGKRTAEVFAQQGAKVVIADIQDELGHSVAQSIGPSTCCYVHCDVTDENQIKNAVQKAVDAYGKLDIMFNNAGIVDPNKNRIIDNDKADFERVLSVNVTGVFLGMKHAAQAMIPARSGSIISTASISSYVGGAASHAYCCAKHAVVGLTKNAAVELGQFGIRVNCLSPYALATPLATKFVGANDEELETIMNSLANLKGVTLKAEDVANAALYFASDDSRYVSGQNLLIDGGFSIVNPSFHMFQYPDSES

SEQ ID NO: 3573 - DNA, 963 bp, Glycine max
  CDS (1)..(963)
atggcttccattgccggatccaactgcgtcgctctccgaaccgccaacttcggcgcctccggtaaccggaaaatcggccagatccgccaatggtctccgattctcacgaatctccgtcccgtttccggtcttcgtcaccgatcgaatactccgtttagctcctccggtgtgagagcacaggttgctactctggaggaagcaggaaccggagcaactcagaaagtggaagcgccggttgcagtggtgaccggagcttccagaggcattggcaaagcgattgcactgtcattaggtaaagcaggttgcaaggttctggtcaactatgcaaggtcatccaaggaagctgaggaggtttccaaggagattgaggagtttggtggtcaagctcttacatttggtggagatgtttctaacgaggctgatgtggagtctatgattaaaactgcagttgatgcttggggaacagttgatgtattaataaacaatgcaggaataactagagatggtttattaatgagaatgaagaaatctcaatggcaggatgttattgatctaaatctcactggtgtttttctttgcacccaggctgctgctaagattatgatgaagaaaagaaagggaagaattgtcaatattgcatcagttgttggtttggttggcaatgttggacaagccaattatagtgctgcaaaagcaggagtaattggcctgacaaaaactgttgcgaaggaatatgctagcagaaacatcactgttaatgcagttgctccagggtttattgcatctgacatgactgccaagctaggacaagacattgagaaaaagattttggagacgatcccattaggaagatatggccaaccagaggaagttgctggactggttgaattcttggctcttaatcaagctgccagttacatcactgggcaggttttcaccattgatggaggtatggtgatgtaa

SEQ ID NO: 3574 - protein, 320 aa, Glycine max
MASIAGSNCVALRTANFGASGNRKIGQIRQWSPILTNLRPVSGLRHRSNTPFSSSGVRAQVATLEEAGTGATQKVEAPVAVVTGASRGIGKAIALSLGKAGCKVLVNYARSSKEAEEVSKEIEEFGGQALTFGGDVSNEADVESMIKTAVDAWGTVDVLINNAGITRDGLLMRMKKSQWQDVIDLNLTGVFLCTQAAAKIMMKKRKGRIVNIASVVGLVGNVGQANYSAAKAGVIGLTKTVAKEYASRNITVNAVAPGFIASDMTAKLGQDIEKKILETIPLGRYGQPEEVAGLVEFLALNQAASYITGQVFTIDGGMVM

SEQ ID NO: 3575 - DNA, 882 bp, Glycine max
  CDS (1)..(882)
atggcttccggtgaacagaaattccctcctcaacaacaacaaacacagcctgggaaggagcatgctatgactccagtaccccaattcactagccctgactacaagccttcaaataaacttcaagggaagattgcattagtcactgggggtgattctgggattggacgagcggtgtgtaacttgtttgccttagaaggtgctaccgtggccttcacgtatgtgaaggggcatgaggacaaggacgcgagggacacattggaaatgatcaagagagcaaagacttcggatgccaaggatccaatggcaataccatctgatttgggttacgatgagaactgcaagagggtggttgatgaggtcgtgagtgcttatggtcgtattgacattctggtcaacaatgcagctgagcagtacgagtgtggaaccgtggaggacatagacgagcctaggcttgagagggtctttcgtacaaatatcttctcctatttcttcatggcgaggcatgccttgaagcacatgaaggaaggaagcagcattatcaacacgacatcagtgaatgcatacaagggacatgcgaaactattggactacacgtccaccaagggggcaattgtggcctatacaaggggtcttgcccttcagctggtgagtaagggaattcgggttaatggggtggctccagggcccatttggacccctttgataccagcctctttcaaggaggaagaaacggcccaatttggagcgcaggtcccaatgaagagagctggtcaacctattgaggttgctccttcctatgtttttcttgcttccaaccaatgctcctcttacataactggacaagtccttcaccccaatggtggaaccgttgtgaatggttaa

SEQ ID NO: 3576 - protein, 293 aa, Glycine max
MASGEQKFPPQQQQTQPGKEHAMTPVPQFTSPDYKPSNKLQGKIALVTGGDSGIGRAVCNLFALEGATVAFTYVKGHEDKDARDTLEMIKRAKTSDAKDPMAIPSDLGYDENCKRVVDEVVSAYGRIDILVNNAAEQYECGTVEDIDEPRLERVFRTNIFSYFFMARHALKHMKEGSSIINTTSVNAYKGHAKLLDYTSTKGAIVAYTRGLALQLVSKGIRVNGVAPGPIWTPLIPASFKEEETAQFGAQVPMKRAGQPIEVAPSYVFLASNQCSSYITGQVLHPNGGTVVNG

SEQ ID NO: 3577 - DNA, 810 bp, Glycine max
  CDS (1)..(810)
atggctagtgtttcttcggttttagctccatttagaaggcttgatgggaaggtggcgattatcactggtggtgcgagtggtctaggtgcagccactgcaagactcttctctaagcatggagcatatgtagtcatagctgatattcaagacgacttgggtctctctgttgccaaagagttagaatctgcttcctatgtccattgcgatgtgacaaaggaagaggacgttgaaaactgcgtgaacacaacggtttccaagtatggcaaattagatatcatgtttaacaatgcaggtgtatctgatgagatcaaaacaagcattcttgacaacaacaagtctgattttgagagagtgataagtgttaacttggttggtccttttctgggaacaaagcatgctgcaagggtcatgattcctgctaaaaagggatgcataatcaacacagctagtgttgctggatgcataggtggaggtgctacacatgcctacacaagttcaaagcacgcactaattggactgacaaaaaacactgcggtggagcttggacaacatggtattagggtaaattgtttgtcaccttatcttgttgtcacaccgttaagtaagaaatatttcaatattgatgaagacaaaattcgtgagatatattcaaacctaaaaggtgctcatcttgtgcctaacgatgtggccgaagctgctctttacttggcaggtgatgagtccaagtatgttagtggtcacaatcttgtgatagatggagggtacactgatgtaaatgcaggatttaccgtgtttgggcagtctcagtaa

SEQ ID NO: 3578 - protein, 269 aa, Glycine max
MASVSSVLAPFRRLDGKVAIITGGASGLGAATARLFSKHGAYVVIADIQDDLGLSVAKELESASYVHCDVTKEEDVENCVNTTVSKYGKLDIMFNNAGVSDEIKTSILDNNKSDFERVISVNLVGPFLGTKHAARVMIPAKKGCIINTASVAGCIGGGATHAYTSSKHALIGLTKNTAVELGQHGIRVNCLSPYLVVTPLSKKYFNIDEDKIREIYSNLKGAHLVPNDVAEAALYLAGDESKYVSGHNLVIDGGYTDVNAGFTVFGQSQ

SEQ ID NO: 3579 - DNA, 1044 bp, Linum usitatissimum
  CDS (1)..(1044)
atggatctgattcacacgttcctcaactttgtagctccaccattcacattcttctccctctgcttcctccttccgccttacttcctcttcaagaccttcacctcagcggtgtcctatgtcttcagcgagaatgtctccggcaaggtcatcctcatcaccggcgcctcctctggcatcggcgagcatctggcttatgagtatgggagcagaggcgcatgtttggtactggtggcacgcagagaaaaaggacttagagaagtagttgaccttgcccttgaactcggatctcctcaagtcattatgatcgtcggagatgtccaaaaggtcgatgactgccgcagaattgtcaacgaaaccattaaccatttcggcagactggatcacttggtgaacaatgctgggatcagttcagtctgcttctttgaagatgcaaccgatgtcaccaacttccgtaccataatggacacgaacttctggggttcggcttacataacccaattcgcaattccgtacctgcgacaaacggctggcaagatcattgctctctcttcagcaggttcttggcttcctgagccaaggatgaccatctacaatgcaagcaaagcagctatggtggcattcttcgagacgctgagggtggagctaagcccagacataggtgtcctaatcgtcactcctggttacattgagtcggagctcacacaaggcaaattcatgacagctgaaggcaggatggatgtagatcaagatttgagagatgaaaaatttggtccgataccggtggcgtccgtggtaagcacggcgaagggaatcgtgaatagtgcgtgcagaggggataagtacctgacggtgccggcatgggtgagaacgacgtggttatggaagatcttctgccctgatgctgttgagttgggttaccgcttgttcttcaccagcggccgtcccggtgagccggctcccagcaagaaaatgcttgatatgactggagctcagggattgatgtacccttattccatcctcaaccctgccatcaagacagtttaa

SEQ ID NO: 3580 - protein, 347 aa, Linum usitatissimum
MDLIHTFLNFVAPPFTFFSLCFLLPPYFLFKTFTSAVSYVFSENVSGKVILITGASSGIGEHLAYEYGSRGACLVLVARREKGLREVVDLALELGSPQVIMIVGDVQKVDDCRRIVNETINHFGRLDHLVNNAGISSVCFFEDATDVTNFRTIMDTNFWGSAYITQFAIPYLRQTAGKIIALSSAGSWLPEPRMTIYNASKAAMVAFFETLRVELSPDIGVLIVTPGYIESELTQGKFMTAEGRMDVDQDLRDEKFGPIPVASVVSTAKGIVNSACRGDKYLTVPAWVRTTWLWKIFCPDAVELGYRLFFTSGRPGEPAPSKKMLDMTGAQGLMYPYSILNPAIKTV

SEQ ID NO: 3581 - DNA, 1077 bp, Zea mays
  CDS (1)..(1077)
atgcgcgcgctactgcatctgcggctcatcaatccgtgcagtcccagagcaccccgtcttcccgctactcccgcaagggcgctcgtcgcttccttctccggggcgtggcaggcaccttctggtagagcgagagcgagagcagcgccgccggcagttcgcgctatggcgtcccagcaggtgttccgggctcagcagcagcagcagcagcagttcccggctcagcagcaggagtcccagccggggaaggagcacgcgatggacccccggcccgaggccatcgtccaggactacaaggccgccaacaagctcaaggacaaggtggcgctcgtgaccggcggcgactccggcatcgggcgcgccgtgtgcctgtgcttcgcgaaggagggcgcgacggtggccttcaccttcgtgagggggcaggaggagaaggacgcggaggagacgctgcgtgcgctgcgcgacatcgggtccgagacgggcgcgcgcgagccgatggccctgcccgccgacctcgggtacgaggccaactgccgggaggtggtggagcgggtggcgtcggcgtacggcgggcgcatcgacgtggtggtgaacaacgcggcggagcagtacgagcgggagagcatcggggacgtgacggaggcggacctggagcgcgtgttccgcaccaacatcttctcctacttcctggtgtccaagcacgcggtgccgcgcatggagcccggcgcctgcatcatcaacacctcctccgtcaacgcgtacaagggcaacaagacgctgctggactacacggccaccaagggcgccatcgtggccttcacgcgcgcgctctcgctgcagctggccgacaggggcatccgcgtcaacggcgtcgcgccgggccccgtctggacgccgctcatcccggcgtccttcggcaaggagaaggtggagcagttcgggtcccaggtgcccatgaagcgcgccgcgcagccggccgagatcgcgcccagcttcgtcttcctcgccagcaaccaggattcgtcctacatgtccggccagatcctccacgtcaacggaggcgtcatcgtcaatagctag

SEQ ID NO: 3582 - protein, 358 aa, Zea mays
MRALLHLRLINPCSPRAPRLPATPARALVASFSGAWQAPSGRARARAAPPAVRAMASQQVFRAQQQQQQQFPAQQQESQPGKEHAMDPRPEAIVQDYKAANKLKDKVALVTGGDSGIGRAVCLCFAKEGATVAFTFVRGQEEKDAEETLRALRDIGSETGAREPMALPADLGYEANCREVVERVASAYGGRIDVVVNNAAEQYERESIGDVTEADLERVFRTNIFSYFLVSKHAVPRMEPGACIINTSSVNAYKGNKTLLDYTATKGAIVAFTRALSLQLADRGIRVNGVAPGPVWTPLIPASFGKEKVEQFGSQVPMKRAAQPAEIAPSFVFLASNQDSSYMSGQILHVNGGVIVNS

SEQ ID NO: 3583 - DNA, 915 bp, Zea mays
  CDS (1)..(915)
atggcgtcccagcaggtgttccgggctcagcagcagcagcagcagcagttcccggctcagcagcaggagtcccagccggggaaggagcacgcgatggacccccggcccgaggccatcgtccaggactacaaggccgccaacaagctcaaggacaaggtggcgctcgtgaccggcggcgactccggcatcgggcgcgccgtgtgcctgtgcttcgcgaaggagggcgcgacggtggccttcaccttcgtgagggggcaggaggagaaggacgcggaggagacgctgcgtgcgctgcgcgacatcgggtccgagacgggcgcgcgcgagccgatggccctgcccgccgacctcgggtacgaggccaactgccgggaggtggtggagcgggtggcgtcggcgtacggcgggcgcatcgacgtggtggtgaacaacgcggcggagcagtacgagcgggagagcatcggggacgtgacggaggcggacctggagcgcgtgttccgcaccaacatcttctcctacttcctggtgtccaagcacgcggtgccgcgcatggagcccggcgcctgcatcatcaacacctcctccgtcaacgcgtacaagggcaacaagacgctgctggactacacggccaccaagggcgccatcgtggccttcacgcgcgcgctctcgctgcagctggccgacaggggcatccgcgtcaacggcgtcgcgccgggccccgtctggacgccgctcatcccggcgtccttcggcaaggagaaggtggagcagttcgggtcccaggtgcccatgaagcgcgccgcgcagccggccgagatcgcgcccagcttcgtcttcctcgccagcaaccaggattcgtcctacatgtccggccagatcctccacgtcaacggaggcgtcatcgtcaatagctag

SEQ ID NO: 3584 - protein, 304 aa, Zea mays
MASQQVFRAQQQQQQQFPAQQQESQPGKEHAMDPRPEAIVQDYKAANKLKDKVALVTGGDSGIGRAVCLCFAKEGATVAFTFVRGQEEKDAEETLRALRDIGSETGAREPMALPADLGYEANCREVVERVASAYGGRIDVVVNNAAEQYERESIGDVTEADLERVFRTNIFSYFLVSKHAVPRMEPGACIINTSSVNAYKGNKTLLDYTATKGAIVAFTRALSLQLADRGIRVNGVAPGPVWTPLIPASFGKEKVEQFGSQVPMKRAAQPAEIAPSFVFLASNQDSSYMSGQILHVNGGVIVNS

SEQ ID NO: 3585 - DNA, 21 bp, Artificial sequence
  primer
atgagcgatctgcataacgag

SEQ ID NO: 3586 - DNA, 22 bp, Artificial sequence
  primer
ttaaagatccagcccagccgct

SEQ ID NO: 3587 - protein, 302 aa, Artificial sequence
  consensus sequence
  Variant (3)..(5): Xaa in position 3 to 5 is any amino acid
  Variant (7)..(7): Xaa in position 7 is any amino acid
  Variant (9)..(18): Xaa in position 9 to 18 is any amino acid
  Variant (21)..(21): Xaa in position 21 is any amino acid
  Variant (22)..(22): Xaa in position 22 is any or no amino acid
  Variant (24)..(48): Xaa in position 24 to 48 is any amino acid
  Variant (49)..(60): Xaa in position 49 to 60 is any or no amino acid
  Variant (62)..(79): Xaa in position 62 to 79 is any amino acid
  Variant (81)..(82): Xaa in position 81 to 82 is any amino acid
  Variant (83)..(83): Xaa in position 83 is any or no amino acid
  Variant (85)..(88): Xaa in position 85 to 88 is any amino acid
  Variant (92)..(105): Xaa in position 92 to 105 is any amino acid
  Variant (106)..(110): Xaa in position 106 to 110 is any or no amino acid
  Variant (112)..(117): Xaa in position 112 to 117 is any amino acid
  Variant (119)..(142): Xaa in position 119 to 142 is any amino acid
  Variant (143)..(147): Xaa in position 143 to 147 is any or no amino acid
  Variant (149)..(157): Xaa in position 149 to 157 is any amino acid
  Variant (159)..(160): Xaa in position 159 to 160 is any amino acid
  Variant (161)..(167): Xaa in position 161 to 167 is any or no amino acid
  Variant (169)..(171): Xaa in position 169 to 171 is any amino acid
  Variant (173)..(173): Xaa in position 173 is any amino acid
  Variant (175)..(176): Xaa in position 175 to 176 is any amino acid
  Variant (178)..(181): Xaa in position 178 to 181 is any amino acid
  Variant (184)..(184): Xaa in position 184 is any amino acid
  Variant (187)..(190): Xaa in position 187 to 190 is any amino acid
  Variant (191)..(191): Xaa in position 191 is any or no amino acid
  Variant (195)..(195): Xaa in position 195 is any amino acid
  Variant (197)..(197): Xaa in position 197 is any amino acid
  Variant (200)..(204): Xaa in position 200 to 204 is any amino acid
  Variant (205)..(205): Xaa in position 205 is any or no amino acid
  Variant (207)..(239): Xaa in position 207 to 239 is any amino acid
  Variant (240)..(283): Xaa in position 240 to 283 is any or no amino acid
  Variant (285)..(292): Xaa in position 285 to 292 is any amino acid
  Variant (293)..(293): Xaa in position 293 is any or no amino acid
  Variant (295)..(299): Xaa in position 295 to 299 is any amino acid
TGXXXGXGXXXXXXXXXXGAXXVXXXXXXXXXXXXXXXXXXXXXXXXXXXXXXXXXXXXXDXXXXXXXXXXXXXXXXXXGXXXDXXXXNAGXXXXXXXXXXXXXXXXXXXFXXXXXXNXXXXXXXXXXXXXXXXXXXXXXXXXXXXXSXXXXXXXXXGXXXXXXXXXYXXXKXAXXGXXXXLAXELXXXXXRVNXVXPGXXXXXXLXXXXXXXXXXXXXXXXXXXXXXXXXXXXXXXXXXXXXXXXXXXXXXXXXXXXXXXXXXXXXXXXXXXXXXXXXXXXXAXXXXXXXXXGXXXXXDGG

SEQ ID NO: 3588 - protein, 20 aa, Artificial sequence
  protein pattern
  Variant (2)..(2): Xaa in position 2 is any amino acid
  Variant (3)..(3): Xaa in position 3 is Ala, Gly or Ser
  Variant (4)..(4): Xaa in position 4 is Ala, Gly, Ser or Thr
  Variant (6)..(6): Xaa in position 6 is any amino acid
  Variant (7)..(7): Xaa in position 7 is Ala or Gly
  Variant (8)..(8): Xaa in position 8 is Ala, Gly, Ile, Leu or Val
  Variant (9)..(9): Xaa in position 9 is any amino acid
  Variant (10)..(10): Xaa in position 10 is Gly or Asn
  Variant (11)..(11): Xaa in position 11 is Leu, Met or Val
  Variant (12)..(13): Xaa in position 12 to 13 is any amino acid
  Variant (14)..(14): Xaa in position 14 is Ala, Glu, Gly, Asn, Gln, Ser or Thr
  Variant (15)..(15): Xaa in position 15 is any amino acid
  Variant (17)..(17): Xaa in position 17 is any amino acid
  Variant (19)..(19): Xaa in position 19 is any amino acid
  Variant (20)..(20): Xaa in position 20 is Ala, Gly, Thr or Val
YXXXKXXXXXXXXXXAXEXX

SEQ ID NO: 3589 - protein, 11 aa, Artificial sequence
  protein pattern
  Variant (2)..(2): Xaa in position 2 is any amino acid
  Variant (3)..(3): Xaa in position 3 is Ile or Leu
  Variant (5)..(5): Xaa in position 5 is any amino acid
  Variant (6)..(6): Xaa in position 6 is Phe, Leu or Met
  Variant (7)..(7): Xaa in position 7 is Phe, Ile or Val
  Variant (8)..(8): Xaa in position 8 is Ala, Gly, Asn, Pro or Ser
  Variant (9)..(9): Xaa in position 9 is Cys or Asn
  Variant (10)..(10): Xaa in position 10 is Ala or Val
  Variant (11)..(11): Xaa in position 11 is Ala or Gly
GXXDXXXXXXX

SEQ ID NO: 3590 - DNA, 537 bp, Escherichia coli K12
  CDS (1)..(537): transl_table=11
atgcgccgcgcttttataaccggagttttctttttgtctgaagtcgaatttagccacgaatactggatgcgtcacgcgctgacgctggcgaaacgtgcctgggatgagcgggaagtgccggtcggcgcggtattagtgcataacaatcgggtaatcggcgaaggctggaaccgcccgattggtcgccatgatcccaccgcacatgcagaaatcatggccctgcggcagggtggtctggtgatgcaaaattatcgtctgatcgacgccacgttgtatgtcacgcttgaaccatgtgtaatgtgtgccggagcgatgatccacagtcgcattggtcgcgtggtctttggtgcgcgtgacgcgaaaactggcgctgcgggatctttaatggatgtgctgcatcatccgggtatgaatcaccgagtggaaattacggaaggaatactggcggatgagtgcgcggcgttgctcagtgacttctttcgcatgcgccgccaggaaattaaagcgcagaaaaaagcgcaatcctcgacggattaa

SEQ ID NO: 3591 - protein, 178 aa, Escherichia coli K12
MRRAFITGVFFLSEVEFSHEYWMRHALTLAKRAWDEREVPVGAVLVHNNRVIGEGWNRPIGRHDPTAHAEIMALRQGGLVMQNYRLIDATLYVTLEPCVMCAGAMIHSRIGRVVFGARDAKTGAAGSLMDVLHHPGMNHRVEITEGILADECAALLSDFFRMRRQEIKAQKKAQSSTD

SEQ ID NO: 3592 - DNA, 820 bp, glycine max
  CDS (87)..(647)
ggtggaccgcattcactttctcctacctcgtccttctaacccaacctcaacctgtttctccgagaatcacatccaacgcttctgtcatggaggaagttaacgttgtggaaactaaggatggaactgtctcagtagctgctgcgtttgctggtcatcaggaagccgtgcaggatagagaccacaaatttttaagaaaagctgttgaagaagcatataaaggggtagattgcaaagatggaggcccttttggtgctgttatagttcataatgatgaaatagttgctagttgtcacaacatggttctgtgtaacacagacccaactgctcatgctgaggtgacagcaataagagaggcttgtaagaagcttaagcagatagaacttgcagattgtgaaatatatgcttcttgtgaaccttgccccatgtgctttggtgcaatccacctttctcgaataaagaggttggtttatggagcgaaggctgaggcagcaattgctattgggtttgatgatttcattgcagatgcactgcgaggtactggattctatcagaaagcaacactggaaattaagagagctgatggtaatgaggccatcattgctgaagaggtttttgagaaaacaaaggaaaaattccaaatgtattagatatgtcattcttttcagaattgctttcatttaaattattgaaactgttgatagtggattgaactcatttgagtacaacaaattttacgatacaagttggatttgcctcagataatgactatctcattgttaaccaattctaatatacatcctcacacaggaggatatttgat

SEQ ID NO: 3593 - protein, 186 aa, glycine max
MEEVNVVETKDGTVSVAAAFAGHQEAVQDRDHKFLRKAVEEAYKGVDCKDGGPFGAVIVHNDEIVASCHNMVLCNTDPTAHAEVTAIREACKKLKQIELADCEIYASCEPCPMCFGAIHLSRIKRLVYGAKAEAAIAIGFDDFIADALRGTGFYQKATLEIKRADGNEAIIAEEVFEKTKEKFQMY

SEQ ID NO: 3594 - DNA, 501 bp, Glycine max
  CDS (1)..(501)
atgacctcatccgagacccttgcattcatggagctcgccatacaacaggcaaagttagctttggatgttcttgaagtgcccgttggatgtgtaattgttgaggatggcaaggttatagcctcaggcaggaatcgaactaccgagacacgaaatgctaccaggcatgcagaaatggaagctatagatgtgcttctcgggcagtggcagatacatggactttcaatgtccgaagttgctgaaaaattctcaaactgcagcctttatgttacctgtgaaccatgcataatgtgtgcatctgctttatcaattttaggtataaaggaagtattttatggctgttcaaatgataaattcggaggctgtggatcgatactgtcattgcatttaagtaacactgcaccgctcaataatgaagttccatccggaaagtgcttcagatgtactggacgtataatggcatcagaagctgtccttctctttcgaacattctatgagcaatga

SEQ ID NO: 3595 - protein, 166 aa, Glycine max
MTSSETLAFMELAIQQAKLALDVLEVPVGCVIVEDGKVIASGRNRTTETRNATRHAEMEAIDVLLGQWQIHGLSMSEVAEKFSNCSLYVTCEPCIMCASALSILGIKEVFYGCSNDKFGGCGSILSLHLSNTAPLNNEVPSGKCFRCTGRIMASEAVLLFRTFYEQ

SEQ ID NO: 3596 - DNA, 811 bp, Zea mays
  CDS (161)..(811)
ctcgcctggccacgtggcagggactcggagctcttcctatattgctactgctattgctattgctatacgccaagggccgcagcggcaggccacgcatctctctcccttccttctccccgttctccgtgcaatctcggccgtttccgctcccgccatcgccatggaggaggccaaggttgtggagtccaaggacgggacgatctcagttgcttcagcatttgctggtcatcaggaagctgtgcaagacagggaccacaaatttttatcaaaggcagtggaggaagcataccgaggagttgactgcggcgatggaggaccatttggtgcagttgttgtccataatgatgaagtaatagttagctgccataacatggttttgaagaacactgatccaactgcgcatgctgaagtaactgcgataagagagatgtggaatgactcattccatctaaacattcaatttgcaaggttcaaatttagttccacagtagattgtatggaactagatgctttcaaggcttgcaaaaagcttgggaaaattgagctgtcggattgtgaaatttatgcatcttgtgagccatgcccaatgtgttttggtgctgttcatctatcccggattaagaggctggtgtatggagccaaggcagaagctgcaattgccattggatttgatgatttcattgctgatgctctcagaggaactgggtactatcagaaggccaacatggagataaagcaggcagatggaaatggagccatgattgctgaacaagtatttgagaagactaaagcgaagttccaaatgtattga

SEQ ID NO: 3597 - protein, 216 aa, Zea mays
MEEAKVVESKDGTISVASAFAGHQEAVQDRDHKFLSKAVEEAYRGVDCGDGGPFGAVVVHNDEVIVSCHNMVLKNTDPTAHAEVTAIREMWNDSFHLNIQFARFKFSSTVDCMELDAFKACKKLGKIELSDCEIYASCEPCPMCFGAVHLSRIKRLVYGAKAEAAIAIGFDDFIADALRGTGYYQKANMEIKQADGNGAMIAEQVFEKTKAKFQMY

SEQ ID NO: 3598 - DNA, 740 bp, Zea mays
  CDS (129)..(689)
atcacctctttccttccttccaattcccgttcctacggacaggcagacacgcaacagcccgacgcgcatctcgctcggggagctccgccgccgatccgcccgcccgctcgccccctcactcgcccgccatggaggaagccaaggttgtggagaccagggatggaactatcgcagttgcttcagcgtttcccggtcatcaggaagccgtacaagatagggatcacaagttcttgtcgaaagctgtagaagaggcgtacaaaggagttgactgtggccatggaggaccgtttggcgcggtcgtcgtccgcaacgacgaagtaatagttgggtgccataacatggttttgaacaacaccgatccaactgcccatgctgaagtcactgcaataagagaggcttgcaaaaagcttgggaagattgagctgtcggactgcgaaatgtacgcatcatgtgaaccttgcccaatgtgttttggggctgttcatctatcccggatcaagaggctggtgtacggagccaaggcggaagctgctattgccattggattcgacgacttcattgctgatgctcttagaggaactgggttctaccagaaggccaacatggagatcaagcgagccgatgggaatggagctctgcttgctgaacaagtctttgagaacaccaaggagaaattccgaatgtactaatgtgtagcaaagacatggtagaatttcacagcatgaaagaccctgatgctc

SEQ ID NO: 3599 - protein, 186 aa, Zea mays
MEEAKVVETRDGTIAVASAFPGHQEAVQDRDHKFLSKAVEEAYKGVDCGHGGPFGAVVVRNDEVIVGCHNMVLNNTDPTAHAEVTAIREACKKLGKIELSDCEMYASCEPCPMCFGAVHLSRIKRLVYGAKAEAAIAIGFDDFIADALRGTGFYQKANMEIKRADGNGALLAEQVFENTKEKFRMY

SEQ ID NO: 3600 - DNA, 549 bp, Glycine max
  CDS (1)..(549)
atgtcctcacccgaaacccttacattcatggagctcgccatacaacaggcaaagttagctttggatgttcttgaagtgcctgttggatgtgtaattgttgaggatggcaaggttatagcctcaggcaggaatcgaactacccagacacgaaatgctacaaggcatgcagaaatggaagctgtagatgtgcttctcgggcagtggcagaaacatggactttcaatgtctgaagtttctgaaaaattctcaaactgcagcctttatgttacctgtgaaccatgcataatgtgtgcatctgctttatcaattttaggtataaaggaagtattttatggctgttcaaatgataaatttggaggctgtggatcgatactgtcattgcatttaagtaacaccacaccgctcaataatgaagttccacccggaaagtgtttcaaatgtactggaggtataatggcatcagaagctgttcttctctttcgaacattctatgagcaaggaaatcccaatgctccaaagccacacaggcctctagcacgtcaggcatga

SEQ ID NO: 3601 - protein, 182 aa, Glycine max
MSSPETLTFMELAIQQAKLALDVLEVPVGCVIVEDGKVIASGRNRTTQTRNATRHAEMEAVDVLLGQWQKHGLSMSEVSEKFSNCSLYVTCEPCIMCASALSILGIKEVFYGCSNDKFGGCGSILSLHLSNTTPLNNEVPPGKCFKCTGGIMASEAVLLFRTFYEQGNPNAPKPHRPLARQA

SEQ ID NO: 3602 - DNA, 522 bp, Glycine max
  CDS (1)..(522)
atggagctcgccatacaacaggcaaagttagctttggatgttcttgaagtgcctgttggatgtgtaattgttgaggatggcaaggttatagcctcaggcaggaatcgaactacccagacacgaaatgctacaaggcatgcagaaatggaagctgtagatgtgcttctcgggcagtggcagaaacatggactttcaatgtctgaagtttctgaaaaattctcaaactgcagcctttatgttacctgtgaaccatgcataatgtgtgcatctgctttatcaattttaggtataaaggaagtattttatggctgttcaaatgataaatttggaggctgtggatcgatactgtcattgcatttaagtaacaccacaccgctcaataatgaagttccacccggaaagtgtttcaaatgtactggaggtataatggcatcagaagctgttcttctctttcgaacattctatgagcaaggaaatcccaatgctccaaagccacacaggcctctagcacgtcaggcatga

SEQ ID NO: 3603 - protein, 173 aa, Glycine max
MELAIQQAKLALDVLEVPVGCVIVEDGKVIASGRNRTTQTRNATRHAEMEAVDVLLGQWQKHGLSMSEVSEKFSNCSLYVTCEPCIMCASALSILGIKEVFYGCSNDKFGGCGSILSLHLSNTTPLNNEVPPGKCFKCTGGIMASEAVLLFRTFYEQGNPNAPKPHRPLARQA

SEQ ID NO: 3604 - DNA, 522 bp, Alloiococcus otitis
  CDS (43)..(522)
gccaagcatgaacaggcagtagaaatagaatggattgaattgatggaagaccagaccaaatggatgcaagaagcccttaaagaagccaggctagctaaagacaagggggaagtccccatcggtgctgtagtggtgaaagatgggacagttattggccggggccacaatcaaaaagaggggtcacaagatgccaccctccatgctgaattgatggccatccgccaggccaaccacactttaggcaattggcgcttggaagactgtgacctctatgtcaccctagagccttgtcccatgtgctctggggccattgtccagtcccggattcgccgggtttactatggcccttatgaccccaagagtggggcggcaggcagtttgatgaatttattgcaggatgaccggctcaaccaccaaacagaagttattccaggtcttctccaagcagactgccaaaaccttttgcaaagcttctttaaagacttgagggcccggaagaaaaaagaaaagaaagaccgttag

SEQ ID NO: 3605 - protein, 159 aa, Alloiococcus otitis
MEDQTKWMQEALKEARLAKDKGEVPIGAVVVKDGTVIGRGHNQKEGSQDATLHAELMAIRQANHTLGNWRLEDCDLYVTLEPCPMCSGAIVQSRIRRVYYGPYDPKSGAAGSLMNLLQDDRLNHQTEVIPGLLQADCQNLLQSFFKDLRARKKKEKKDR

SEQ ID NO: 3606 - DNA, 450 bp, Legionella pneumophila
  CDS (1)..(450)
atgggaatgattgataaattttggatgcaactggcttacgagcaagcggttatagctcgtaatgaaggagaggttcctgttggggctgtgttggttagcaaagacaatcaattattaggcgttggcagaaatgtcattgaaaaaagtcatgatccttctgatcatgctgaaatcagggcaatacgacaagcctcgagaaagctaaataatcatagattattggatacaacgctttatgttactctcgaaccctgtgtgatgtgtgcgggacttatggttcatgcacgcatcaaacggctggtatttgccacccgagattttaaagcaggggcagcgggctcaatgtttaatgttttacatgctctaaaccattcggtattaatagacgaaggcattatgcaggctgagtgttctcaattgctatcagattttttcagaaaccttcgctag

SEQ ID NO: 3607 - protein, 149 aa, Legionella pneumophila
MGMIDKFWMQLAYEQAVIARNEGEVPVGAVLVSKDNQLLGVGRNVIEKSHDPSDHAEIRAIRQASRKLNNHRLLDTTLYVTLEPCVMCAGLMVHARIKRLVFATRDFKAGAAGSMFNVLHALNHSVLIDEGIMQAECSQLLSDFFRNLR

SEQ ID NO: 3608 - DNA, 468 bp, Streptococcus pneumoniae
  CDS (1)..(468)
atgtattatacgcttgaagaaaaagaagtctttatgagggaggctttgagagaggctgagattgctcttgaacacgatgaaattccaattggttgtgtgattgtcaaagatggggaaatcattggtcgtgggcataatgcgcgtgaggaattacagcgagcggttatgcatgcggaaattatggctatagaggatgcgaacttgagtgaggagagctggcgcttgctggattgcacactttttgtgaccattgaaccttgtgtcatgtgtagtggggcgattgggcttgcccgcattccaaatgtggtctatggggctaaaaaccagaaatttggcgctgctgggagtttgtacgatatcttgacagatgagcgtctcaatcatcgtgtggaggttgaaataggaattttggaagatgaatgcgcagctatcatgcaggatttttttagaaatagacggaaaaaataa

SEQ ID NO: 3609 - protein, 155 aa, Streptococcus pneumoniae
MYYTLEEKEVFMREALREAEIALEHDEIPIGCVIVKDGEIIGRGHNAREELQRAVMHAEIMAIEDANLSEESWRLLDCTLFVTIEPCVMCSGAIGLARIPNVVYGAKNQKFGAAGSLYDILTDERLNHRVEVEIGILEDECAAIMQDFFRNRRKK

SEQ ID NO: 3610 - DNA, 582 bp, Vibrio cholerae O1 biovar eltor str. N16961
  CDS (1)..(582): transl_table=11
ttgtccgcgatctccgctagaatcaccgttttcaagaatccgtggagtgtgattttgtcagcgtctctattttctgctcaagatgaacaatttatgcgccgagccatcgtgttagcagcccaagccgaagcgcagggagaagtccctgttggagcggtattagttcgagatggcgaaatcattgcggaaggctggaatggttcgattacgaaccatgatgcgactgcgcatgcagaaattgaagtgattcgaaaagctggcaaagcactgagtaattatcgactactcgataccaccttgtatgtgacactggaaccttgcccaatgtgtgcaggcgccctgttgcatagtcgagtaaaacgtattgtgtatggcgcgccagatttgaaagcgggtgcggcaggaactgtgatggatctgtttagcagccaagctgcttatcactacgcgacggttgaaaaagggctgttggaagaggagtgtcgagctcagttacaagcgttttttcagcgccgaagaaaagaaattaaagccaaacgcgatgcagagcgaaagaatgctgagagaaagaatgagcggtga

SEQ ID NO: 3611 - protein, 193 aa, Vibrio cholerae O1 biovar eltor str. N16961
MSAISARITVFKNPWSVILSASLFSAQDEQFMRRAIVLAAQAEAQGEVPVGAVLVRDGEIIAEGWNGSITNHDATAHAEIEVIRKAGKALSNYRLLDTTLYVTLEPCPMCAGALLHSRVKRIVYGAPDLKAGAAGTVMDLFSSQAAYHYATVEKGLLEEECRAQLQAFFQRRRKEIKAKRDAERKNAERKNER

SEQ ID NO: 3612 - DNA, 501 bp, Pasteurella multocida subsp. multocida str. Pm70
  CDS (1)..(501): transl_table=11
atgcaatctgacatggatgaaaaatggatgcgtcatgcattacgcttggcggataaagcagagcaattaggcgagattccggtgggtgccgtgttagtcgatgagcagggaaatctattaggtgaagggtggaatttatccattagtgaatccgaccccactgcacatgctgaaattgtcgcattacgtcaaggcgggcaacgcttacaaaactaccgcctgctcaacaccacgttgtatgtcaccctggaaccctgcaccatgtgtgctggggcaattttacacagccgtattaaacgtctggtgtttggtgctagcgattacaaaaccggcgccgtcggttcacgttttcatttttttgatgactataaaatgaatcatgcgatagaaattaccgctggcgtattgcaagaagaatgtagccaaaaaatcagcgcctttttccaaaaacgccgagaacaacaaaaaatcgctaaacaaaaaagccaccttgaaacataa

SEQ ID NO: 3613 - protein, 166 aa, Pasteurella multocida subsp. multocida str. Pm70
MQSDMDEKWMRHALRLADKAEQLGEIPVGAVLVDEQGNLLGEGWNLSISESDPTAHAEIVALRQGGQRLQNYRLLNTTLYVTLEPCTMCAGAILHSRIKRLVFGASDYKTGAVGSRFHFFDDYKMNHAIEITAGVLQEECSQKISAFFQKRREQQKIAKQKSHLET

SEQ ID NO: 3614 - DNA, 549 bp, Pseudomonas aeruginosa PAO1
  CDS (1)..(549): transl_table=11
gtgcgggtgactaagctgatcagcaacggcaagggctacccgacggtaaaaggtgtgcgtccgatcatcgatcgcagccgggacccgcatttcatgcgcgaggccctggcagaggcggaaaaggccgcggccctcggcgaagtgccggtgggcgcggtcctggtgcgcgagggcgagatcatcgggcggggcttcaaccggccgatcagcagccacgatcccagtgcccacgccgaaatgctggcgatccgcatggcagcggcggaggcgggcaactaccggctgccaggcagcaccctgtatgtgaccctggaaccctgcagcatgtgttccggactgctggtgcacgcacgcatccagcgcctggtgtacggcacggtcgagcccaagtcgggcgcagtggaaagccgtgggcgattcttcgagcaggagcatctcaaccatagggtcatggtcgagggcggcgtgctggcggaagaatgcagccaggcgctctcggcgttcttccgcgcgcggcgcgaagcggcgaagaagcctcgcgaagactga

SEQ ID NO: 3615 - protein, 182 aa, Pseudomonas aeruginosa PAO1
MRVTKLISNGKGYPTVKGVRPIIDRSRDPHFMREALAEAEKAAALGEVPVGAVLVREGEIIGRGFNRPISSHDPSAHAEMLAIRMAAAEAGNYRLPGSTLYVTLEPCSMCSGLLVHARIQRLVYGTVEPKSGAVESRGRFFEQEHLNHRVMVEGGVLAEECSQALSAFFRARREAAKKPRED

SEQ ID NO: 3616 - DNA, 504 bp, Xylella fastidiosa 9a5c
  CDS (1)..(504): transl_table=11
atgactgccacacccccaccccccgccttgccagaacacatccactggatgcgccatgccctgaccctggcccaccgtgcagcaacagaattcgatgaaatccccgtcggcgccgtactcatcagccccgaagggaccctcctcggcgaaggatggaactacaacatcaccagccacgaccccagcgcacacgccgaaatcatggcactgcgcgccgccggccaccaactgcgcaaccatcgcatgcctggctgcaccctctacgtcaccctggaaccctgcctgatgtgcgccatggccatcatccatgcacgcatcgcacacctcatctacgccgccgcagaccccaaaacaggcgcatgcggcagcacattcgacatcctcaacgacccacgccacaaccaccatgtccacgtctacggcggcctccttgccgaagaagcctcacggcgcctgacaaactacttccgtaccaaacgcggccaaccgccactgccacaataa

SEQ ID NO: 3617 - protein, 167 aa, Xylella fastidiosa 9a5c
MTATPPPPALPEHIHWMRHALTLAHRAATEFDEIPVGAVLISPEGTLLGEGWNYNITSHDPSAHAEIMALRAAGHQLRNHRMPGCTLYVTLEPCLMCAMAIIHARIAHLIYAAADPKTGACGSTFDILNDPRHNHHVHVYGGLLAEEASRRLTNYFRTKRGQPPLPQ

SEQ ID NO: 3618 - DNA, 468 bp, Streptococcus pneumoniae TIGR4
  CDS (1)..(468): transl_table=11
atgtattatacgcttgaagaaaaagaagtctttatgagggaggctttgagagaggctgagattgctcttgaacacgatgaaattccaattggttgtgtgattgtcaaagatggggaaatcattggtcgtgggcataatgcgcgtgaggaattacagcgagcggttatgcatgcggaaattatggctatagaggatgcgaacttgagtgaggagagctggcgcttgctggattgcacactttttgtgaccattgaaccttgtgtcatgtgtagtggagcgattgggcttgcccgcattccaaatgtggtctatggggctaaaaaccagaaatttggcgctgctgggagtttgtacaatatcttgacagatgagcgtctcaatcatcgtgtggaggttgaaataggaattttggaagatgaatgcgcagctatcatgcaggatttttttagaaatagacggaaaaaataa

SEQ ID NO: 3619 - protein, 155 aa, Streptococcus pneumoniae TIGR4
MYYTLEEKEVFMREALREAEIALEHDEIPIGCVIVKDGEIIGRGHNAREELQRAVMHAEIMAIEDANLSEESWRLLDCTLFVTIEPCVMCSGAIGLARIPNVVYGAKNQKFGAAGSLYNILTDERLNHRVEVEIGILEDECAAIMQDFFRNRRKK

SEQ ID NO: 3620 - DNA, 468 bp, Streptococcus pneumoniae R6
  CDS (1)..(468): transl_table=11
atgtattatacgcttgaagaaaaagaagtctttatgagggaggctttgagagaggctgagattgctcttgaacacgatgaaattccaattggttgtgtgattgtcaaagatggggaaatcattggtcgtgggcataatgcgcgtgaggaattacagcgagcggttatgcatgcggaaattatggctatagaggatgcgaacttgagtgaggagagctggcgcttgctggattgcacactttttgtgaccattgaaccttgtgtcatgtgtagtggggcgattgggcttgcccgtattccaaatgtggtctatggggctaaaaaccagaaatttggcgctgctggaagtttgtacgatatcttgacagatgagcgtcttaaccatcgtgtagaggttgaaacgggaattttggaagatgaatgtgcagctatcatgcaggacttttttagaaatagacggaaaaaataa

SEQ ID NO: 3621 - protein, 155 aa, Streptococcus pneumoniae R6
MYYTLEEKEVFMREALREAEIALEHDEIPIGCVIVKDGEIIGRGHNAREELQRAVMHAEIMAIEDANLSEESWRLLDCTLFVTIEPCVMCSGAIGLARIPNVVYGAKNQKFGAAGSLYDILTDERLNHRVEVETGILEDECAAIMQDFFRNRRKK

SEQ ID NO: 3622 - DNA, 480 bp, Yersinia pestis CO92
  CDS (1)..(480): transl_table=11
atgcgccatgccttaacgctggcgctgcgagcgcaggaagagggtgaagttccggtgggggcagtgctggtcttggggaataaggtgattggtgaagggtggaaccggccaattcgcgataatgacccaactgctcatgcggaaattatggcgctacgccaaggtgggcaggcggtacagaattatcgcctgttggatgccaccttatatgtgacgctggaaccttgcgtgatgtgcgccggagccatggtacacagccggatccgccggttggtttatggcgcaaatgatgtaaaaactggcgccgcggggtcgctggtagatattttgcgccaccctgggatgaaccaccaaatagaggtcagtgctggcatactggcgattgcgtgttcccatcaattgagtgcgttctttcgccaacgccgtgagcagcagaaagcattgaaacaagcacagcgggcagcagaaggtaaattctga

SEQ ID NO: 3623 - protein, 159 aa, Yersinia pestis CO92
MRHALTLALRAQEEGEVPVGAVLVLGNKVIGEGWNRPIRDNDPTAHAEIMALRQGGQAVQNYRLLDATLYVTLEPCVMCAGAMVHSRIRRLVYGANDVKTGAAGSLVDILRHPGMNHQIEVSAGILAIACSHQLSAFFRQRREQQKALKQAQRAAEGKF

SEQ ID NO: 3624 - DNA, 552 bp, Ralstonia solanacearum GMI1000
  CDS (1)..(552): transl_table=11
atgacgactccccacgtgctgacgccgccgccaggcatgtccgcccacgagcgcgacggctactggatgcagcaggcgctggtgcaggcccgtctggcgtggggcgagggcgaggtgccggtgggcgcggtggtggtgcggggcaacgagatcgtcggggtcggctataacgcgccgatcggtacgcacgatccgtccgcccatgccgagatgcgcgcgctgcggcaggccgccgtcaggctgggcaattaccgcctgcccgaatgcgaagtgttcgtgacgctggagccgtgcgtgatgtgcgcgggcgccatgctgcacgcccgcgtggcgcgcgtcgtctacggcgcgcccgatcccaagaccggcgcggccggcagcgtgctggacctgtttgccgagacgcgcctgaaccaccagaccgccatcatcggcagcgtgctcgcgcaggactgcggcgacatgctgcgcgccttcttcgccgagcgccgcgccagccagcgcgccgcgcgcatggcctccgcctccgacgattccgcttccgccgcatga

SEQ ID NO: 3625 - protein, 183 aa, Ralstonia solanacearum GMI1000
MTTPHVLTPPPGMSAHERDGYWMQQALVQARLAWGEGEVPVGAVVVRGNEIVGVGYNAPIGTHDPSAHAEMRALRQAAVRLGNYRLPECEVFVTLEPCVMCAGAMLHARVARVVYGAPDPKTGAAGSVLDLFAETRLNHQTAIIGSVLAQDCGDMLRAFFAERRASQRAARMASASDDSASAA

SEQ ID NO: 3626 - DNA, 480 bp, Corynebacterium glutamicum ATCC 13032
  CDS (1)..(480): transl_table=11
gtgggcgttttacctgtgcaggcgcgcatcaaagacgatgagcgccgcatgcgccatgctttggatattgctcgccaaacccctgagggggacgttcccgttggcgccgtcatttacgcgccgaccggggagatcctggcgaccgcaacgaaccgtcgagaagcagaccgcgatcccacggcccacgccgaaattattgctttacgacgagccgcccgccgtttttccgacggctggcggctgagtgactgcaccgcggtggtcaccttggagccctgcagtatgtgcgccggcgccttggtgggtgctcgaatcggacgcatcgtattcggagcatttgagccccgaaccggcgcctgtggatctgtatttgacgtggttcgagaccccgcggtgttgcacaaagtggaagtcagtggaggaatcctcgagcctgaatgtgctgccttgatgaccgaatttttcgaacttcacaggtaa

SEQ ID NO: 3627 - protein, 159 aa, Corynebacterium glutamicum ATCC 13032
MGVLPVQARIKDDERRMRHALDIARQTPEGDVPVGAVIYAPTGEILATATNRREADRDPTAHAEIIALRRAARRFSDGWRLSDCTAVVTLEPCSMCAGALVGARIGRIVFGAFEPRTGACGSVFDVVRDPAVLHKVEVSGGILEPECAALMTEFFELHR

SEQ ID NO: 3628 - DNA, 432 bp, Streptomyces coelicolor A3(2)
  CDS (1)..(432): transl_table=11
atgcggctcgccctggccgaggccggacgggccgcggcgggcggggacgtacccgtcggcgccgtcgtcctggcgccggacggccgtaccgtgctctccgccgggcacaacgaacgcgaggccaccggggacccgacggcccacgccgaggtcctcgcgatccggcgggccgcgggggagctgggagagtggcggctgtcgggctgcacgctcgtcgtcaccctggagccctgcacgatgtgcgcgggcgcgctcgtccagtcccgggtggaccgcgtggtctacggcgcccgcgacgacaaggcgggggcggccgggtcgctgtgggacgtggtgcgcgaccggcgcctcaaccaccgtcccgaggtgatcgagggcgtgctcgcggacgactgcgcccggctgctcacagacttcttccgcgaccgctga

SEQ ID NO: 3629 - protein, 143 aa, Streptomyces coelicolor A3(2)
MRLALAEAGRAAAGGDVPVGAVVLAPDGRTVLSAGHNEREATGDPTAHAEVLAIRRAAGELGEWRLSGCTLVVTLEPCTMCAGALVQSRVDRVVYGARDDKAGAAGSLWDVVRDRRLNHRPEVIEGVLADDCARLLTDFFRDR

SEQ ID NO: 3630 - DNA, 516 bp, Xanthomonas campestris pv. campestris str. ATCC 33913
  CDS (1)..(516): transl_table=11
gtgagcgtgtcgcccgatcaccacgcgcaagacgcacacctgcaaatcgaccagcaatggatgactcacgccttgcggctggccgaacgtgccgagcgggactatgacgagattccggtcggcgcggtgctggtggatccaaccggcgcgctgctcggcgagggctggaacttcaacatcgccagccacgaccccagtgcgcatgccgagatcatggccatgcgcgaaggcggccggcggctggccaaccaccgcctgatcggctgcacgctgtacgtgacgttggagccgtgtgcaatgtgcgccatggcgatgatccatgcgcgcattgcgcgggtggtgttcgccgccagcgaccccaagaccggcgcctgcggcagcgtgttcgacctgctcgccgacccacgccacaaccatcgcgtgcaggtcagcggcggggtgctggccgccgaggccgggctgcgcctgaccaattactttcgcgccaagcgtggcaagccgccgctcgtgccctga

SEQ ID NO: 3631 - protein, 171 aa, Xanthomonas campestris pv. campestris str. ATCC 33913
MSVSPDHHAQDAHLQIDQQWMTHALRLAERAERDYDEIPVGAVLVDPTGALLGEGWNFNIASHDPSAHAEIMAMREGGRRLANHRLIGCTLYVTLEPCAMCAMAMIHARIARVVFAASDPKTGACGSVFDLLADPRHNHRVQVSGGVLAAEAGLRLTNYFRAKRGKPPLVP

SEQ ID NO: 3632 - DNA, 510 bp, Xanthomonas axonopodis pv. citri str. 306
  CDS (1)..(510): transl_table=11
atgcccaccgatgcgccgaccgatacgccgcacgcggcgatcgacgtgcactggatgcagcacgccttgcaattggccgagcgtgccgagcgcgactatgacgaaatcccggtcggcgcagtgctggtcgatgcgcaaggcaacgtgctcggcgaaggctggaacttcaatatcgccagccacgatcccagcgcgcatgccgaaatcgtggcgatgcgcgaagccgggcgccggctggccaatcaccgcctgatcggctgcacgctctacgtcaccctggagccgtgcgcgatgtgcgcgatggcgatgattcatgcgcggatcgcgcgcgtggtgttcgccgccagcgatcccaagaccggcgcctgtggcagcgtcttcgacctgctggccgacccgcgccacaatcatcgcgtgcaggtgtgcggtggcgtgctggcggcccaggcgagcttgcggctgaccaactacttcagggccaagcgcggcaagccgccacttgcgccctga

SEQ ID NO: 3633 - protein, 169 aa, Xanthomonas axonopodis pv. citri str. 306
MPTDAPTDTPHAAIDVHWMQHALQLAERAERDYDEIPVGAVLVDAQGNVLGEGWNFNIASHDPSAHAEIVAMREAGRRLANHRLIGCTLYVTLEPCAMCAMAMIHARIARVVFAASDPKTGACGSVFDLLADPRHNHRVQVCGGVLAAQASLRLTNYFRAKRGKPPLAP

SEQ ID NO: 3634 - DNA, 603 bp, Yersinia pestis KIM
  CDS (1)..(603): transl_table=11
gtgtataatgcccgccgcaaaagtgccagagaggttaatgtgtctgctgataatagtttgcctgctgataatggcttgtcttctgaatgtgattctcctgctgaatacagcgatgagtactggatgcgccatgccttaacgctggcgctgcgagcgcaggaagagggtgaagttccggtgggggcagtgctggtcttggggaataaggtgattggtgaagggtggaaccggccaattcgcgataatgacccaactgctcatgcggaaattatggcgctacgccaaggtgggcaggcggtacagaattatcgcctgttggatgccaccttatatgtgacgctggaaccttgcgtgatgtgcgccggagccatggtacacagccggatccgccggttggtttatggcgcaaatgatgtaaaaactggcgccgcggggtcgctggtagatattttgcgccaccctgggatgaaccaccaaatagaggtcagtgctggcatactggcgattgcgtgttcccatcaattgagtgcgttctttcgccaacgccgtgagcagcagaaagcattgaaacaagcacagcgggcagcagaaggtaaattctga

SEQ ID NO: 3635 - protein, 200 aa, Yersinia pestis KIM
MYNARRKSAREVNVSADNSLPADNGLSSECDSPAEYSDEYWMRHALTLALRAQEEGEVPVGAVLVLGNKVIGEGWNRPIRDNDPTAHAEIMALRQGGQAVQNYRLLDATLYVTLEPCVMCAGAMVHSRIRRLVYGANDVKTGAAGSLVDILRHPGMNHQIEVSAGILAIACSHQLSAFFRQRREQQKALKQAQRAAEGKF

SEQ ID NO: 3636 - DNA, 585 bp, Shewanella oneidensis MR-1
  CDS (1)..(585): transl_table=11
gtggagcagacaaaaccggacctaaaaaatcaggatgcgaataagcttgagaaagatgtttcaactgtagagcactccaatgttgaccaatcaaaagtcgatgagcattggatgcgagtcgcgatggcaatggctgagaaagccgaagcagagggcgaagtgccggttggggctgtcttagttaaagatgggctgcaaatcgcgactgggtataacttgtctatcagtcagcatgacccctgtgcccatgctgagatcctttgtttgcgtgccgcagggcaaaccgttgaaaattatcggctccttgatgcgaccttatatgtgacccttgagccttgtgccatgtgtgctggcgctatggtgcatagccgtattgctagagtggtatttggggctcgggatgaaaagaccggcgccgctggaacagtgcttaatctcttgcaacatcctgcttttaatcatcaagttgaggtgacatctggcgtgttagcgcaggattgtgctgaccaattgagccgtttttttaaacgtcgtcgggaggaaaagaaggttttgaaacaggctcaaaaggtgcagcagggatag

SEQ ID NO: 3637 - protein, 194 aa, Shewanella oneidensis MR-1
MEQTKPDLKNQDANKLEKDVSTVEHSNVDQSKVDEHWMRVAMAMAEKAEAEGEVPVGAVLVKDGLQIATGYNLSISQHDPCAHAEILCLRAAGQTVENYRLLDATLYVTLEPCAMCAGAMVHSRIARVVFGARDEKTGAAGTVLNLLQHPAFNHQVEVTSGVLAQDCADQLSRFFKRRREEKKVLKQAQKVQQG

SEQ ID NO: 3638 - DNA, 546 bp, Vibrio vulnificus CMCP6
  CDS (1)..(546): transl_table=11
atggcagagacacatcaacccttttcacttcaagatgaagtttttatgcgcagagcgattgagcttgccgcgattgctgaaagtgaaggggaagtgcctgttggcgcggtactggtcaaagatggcgaagtgattgctgaagggtggaatcaatcgattggtcaacatgatgcaacggcccatgcagaaatacagaccttacgccaagctgggcagagtctgggtaactatcgtctgcttgacaccacgttgtacgtcaccttagagccttgcccaatgtgtgcgggcgcactgctgcatagccgtgtgaaacgcattgtctttggtgctcctgatttgaaagcgggggcggcagggacggtactcgatctgttttctagtcaagcggcatatcactacgcaaccatcgaaaaaggattgttagagttggaatgtcgtgagcagttacaggccttttttaagcgccgtcgaaaagagatcaaggcgttgaagaaggagcagcagactcaaagtgatcatgaagatgtggacgaggaagaaaagtag

SEQ ID NO: 3639 - protein, 181 aa, Vibrio vulnificus CMCP6
MAETHQPFSLQDEVFMRRAIELAAIAESEGEVPVGAVLVKDGEVIAEGWNQSIGQHDATAHAEIQTLRQAGQSLGNYRLLDTTLYVTLEPCPMCAGALLHSRVKRIVFGAPDLKAGAAGTVLDLFSSQAAYHYATIEKGLLELECREQLQAFFKRRRKEIKALKKEQQTQSDHEDVDEEEK

SEQ ID NO: 3640 - DNA, 507 bp, Staphylococcus epidermidis ATCC 12228
  CDS (1)..(507): transl_table=11
atgaaaaaaaatcatgattacatgcgcttagcaattaatgaagcacacaaagccaaagcattaggagaagttccaatcggagcagttattgttaaagagggtcaagtcattgcacgtgcacataatttaagggaaacattgcagcaacctaccgcccacgcagagcacatagcgatagaacgggcttcagaagttgtcggcagttggagattagaagaatgtacgttgtatgttacattagagccctgtgttatgtgtgcgggcactattattatgagccgtattccaaaggttgtgtatggtgctactgatcccaagggaggttgttcgggaagtcttatgaatttattagaacaaccccagtttaatcatagggcaaccgtagaaaaaggaattttagaagaagagtgtgcagaactattgagaagtttttttaaggaaatacgtgaaaagaaaaaagcagaaaaacaggggaagatacaaaaggatataaatttgttaaaataa

SEQ ID NO: 3641 - protein, 168 aa, Staphylococcus epidermidis ATCC 12228
MKKNHDYMRLAINEAHKAKALGEVPIGAVIVKEGQVIARAHNLRETLQQPTAHAEHIAIERASEVVGSWRLEECTLYVTLEPCVMCAGTIIMSRIPKVVYGATDPKGGCSGSLMNLLEQPQFNHRATVEKGILEEECAELLRSFFKEIREKKKAEKQGKIQKDINLLK

SEQ ID NO: 3642 - DNA, 498 bp, Xylella fastidiosa Temecula1
  CDS (1)..(498): transl_table=11
atgactgcccccccccccgtcttgccagaacacacccactggatgcgccatgcactgaccctggcccaccgtgcagcaacagaattcgatgaaatccccgtcggcgctgtactaatcagccccgaagggaccctactcggcgaaggatgcaactacaacatcaccagccacgaccccagcgcacacgccgaaatcatggcactgcgcgctgcgggccaccaactgcgcaaccatcgcatgcctggctgcaccctctacgtcaccctggaaccttgcctgatgtgcgccatggccatcatccatgcacgcatcgcacacctcatctacgccgccgcagaccccaaaacaggcgcctgcggcagcacattcgacatcctcaacgacccacgccacaaccaccatgtccacgtctacggcggcctccttgccgaagaagcctcacgccgcctgacaaactacttccgtaccaaacgcggccaaccgccactgccacaataa

SEQ ID NO: 3643 - protein, 165 aa, Xylella fastidiosa Temecula1
MTAPPPVLPEHTHWMRHALTLAHRAATEFDEIPVGAVLISPEGTLLGEGCNYNITSHDPSAHAEIMALRAAGHQLRNHRMPGCTLYVTLEPCLMCAMAIIHARIAHLIYAAADPKTGACGSTFDILNDPRHNHHVHVYGGLLAEEASRRLTNYFRTKRGQPPLPQ

SEQ ID NO: 3644 - DNA, 510 bp, Pseudomonas syringae pv. tomato str. DC3000
  CDS (1)..(510): transl_table=11
atgcgccagccgctaatcatcgaccgcagcaacgatcaacacttcatgcgtgaggcgctggcgctcgccgcgcaaggcgcactgctgggcgaagtgccggtcggcgcagttgtggtgcacaacggcgagatcatcggccgtggctacaattgcccgatcagcggcagcgacccgagcgcgcacgccgaaatggtcgccattcgcgacgccgccagggcgctgggcaattaccggctgccgggcagtacgctctacgtgacgctggaaccgtgcagcatgtgcgccggtttgatcgtccattcgcgggtggcacgtgtagtttacggggcgctggagcccaaagcgggcatcgtccagagccaggggcagtttttcagccagggctttctcaatcaccgcgtactgtttgaaggtggggtgctgggcgaggagtgtggggcaatgctgagcgagtttttcaggctgcgccgggcggccagggatgcaggaaaaagcaggatcgacgtctag

SEQ ID NO: 3645 - protein, 169 aa, Pseudomonas syringae pv. tomato str. DC3000
MRQPLIIDRSNDQHFMREALALAAQGALLGEVPVGAVVVHNGEIIGRGYNCPISGSDPSAHAEMVAIRDAARALGNYRLPGSTLYVTLEPCSMCAGLIVHSRVARVVYGALEPKAGIVQSQGQFFSQGFLNHRVLFEGGVLGEECGAMLSEFFRLRRAARDAGKSRIDV

SEQ ID NO: 3646 - DNA, 486 bp, Vibrio parahaemolyticus RIMD 2210633
  CDS (1)..(486): transl_table=11
atgcgccgagcacttgcattagctgaacaagctgaattggaaggagaggtgcctgtgggagcggtattagttaaagatggagaagtgattgcagaaggctggaaccgctctatctgctctcatgatgcaacagcacatgcggagattcagactctacgtaacgcaggggctgtgttagaaaactatcgacttttagacaccactctctatgtcacactagagccttgcccgatgtgcgcaggagcactgttgcacagcagagtgaaacgcgtggtatttggcgcgccagatcttaaagctggcgcggctggtacggtattgaacttgtttgagagccaagcggcttaccattacgcaacggtcgaaaaagggctgttagaggatgagtgccgtgagcagttgcaggcctttttcaagcgtcgtcgcaaagaaattaaggctaagaaacaagagaaaaaagtattagaaggtaagcaagaagattaa

SEQ ID NO: 3647 - protein, 161 aa, Vibrio parahaemolyticus RIMD 2210633
MRRALALAEQAELEGEVPVGAVLVKDGEVIAEGWNRSICSHDATAHAEIQTLRNAGAVLENYRLLDTTLYVTLEPCPMCAGALLHSRVKRVVFGAPDLKAGAAGTVLNLFESQAAYHYATVEKGLLEDECREQLQAFFKRRRKEIKAKKQEKKVLEGKQED

SEQ ID NO: 3648 - DNA, 429 bp, Coxiella burnetii RSA 493
  CDS (1)..(429): transl_table=11
atgcacgaagctttagctttagcaaaaaaagccaatgaaaataatgaagtgccgatcggcgcggttttggtaaaagagaacgaaatcgttggccacggctttaatgaacctattaccctaaacgacccgactgcccacgccgaaattctagcccttcgcaatgccgccaaacgagtcggcaattaccgtttagtagacactacgctctacgtcaccctagaaccctgcgccatgtgcgtaggcgccatgatccaagctcgcatcaaacgcctcgttttcggcgcattcgatccccgcgccggcgcagtcgaaagcgttttccaattactgaacgaaccgcgccttaatcaccgcattgtttggacaagcggtgtgatagcagaggcctgcgcagaaccgttgaaggctttttttcgggcccgacgctag

SEQ ID NO: 3649 - protein, 142 aa, Coxiella burnetii RSA 493
MHEALALAKKANENNEVPIGAVLVKENEIVGHGFNEPITLNDPTAHAEILALRNAAKRVGNYRLVDTTLYVTLEPCAMCVGAMIQARIKRLVFGAFDPRAGAVESVFQLLNEPRLNHRIVWTSGVIAEACAEPLKAFFRARR

SEQ ID NO: 3650 - DNA, 429 bp, Streptomyces avermitilis MA-4680
  CDS (1)..(429): transl_table=11
atgcggctcgccctgacggaggccgtacgcgccgccgagagcgcggacgtccccgtcggggccgtggtgctggccccggacggttcggtgatcgcccgcgggcacaacgaacgcgaggcgaccggcgatccgacggcgcacgcggaggtactggccgtccggcgggccgccgaacggctcggccggtggcggctgtccggctgcaccctcgtggtgacgctggagccctgcacgatgtgcgcgggcgcgctcgtacagtcccgggtggaccgggtcgtctacggcgcccgcgacgagaaggccggcgcggccggttccctctgggacgtcgtacgcgaccgacgcctcaaccaccggcccgaggtgatcgagggcgtactcgccgacgagtgcgccggcctcctcacggagttcttccgcgaacgctga

SEQ ID NO: 3651 - protein, 142 aa, Streptomyces avermitilis MA-4680
MRLALTEAVRAAESADVPVGAVVLAPDGSVIARGHNEREATGDPTAHAEVLAVRRAAERLGRWRLSGCTLVVTLEPCTMCAGALVQSRVDRVVYGARDEKAGAAGSLWDVVRDRRLNHRPEVIEGVLADECAGLLTEFFRER

SEQ ID NO: 3652 - DNA, 504 bp, Nitrosomonas europaea ATCC 19718
  CDS (1)..(504): transl_table=11
atgaaaatacagggagttcgagtcccggttcaaacggaagatgagtatttcatgcgccaggcgctcgatcttgctcgtgtggcaggtgctgcgggagaagtgccggtcggtgcggtaatggtcagagagagccgaatcgtaggctgtgggcacaactgcccggttacgacagtagacccgacagcgcatgctgaaatcagagcgctgcgtgatgctgccagtagggtggggaattaccgcctgccggggtgtacattgtatgtcacactcgaaccctgcgtgatgtgcatcggagcgatgtttcatgccagaatcacgcggctggtttacgctgcgaatgaccccaagactggtgtatgtggcagcctgctcgatctgcctgccgatacccggctcaatcatcatctgatggtgagccagggagtactggccgatgaagcaggcactttgctgaaacagtttttcatcgcaaagcgtggcatcaaagagcggaatacatcatga

SEQ ID NO: 3653 - protein, 167 aa, Nitrosomonas europaea ATCC 19718
MKIQGVRVPVQTEDEYFMRQALDLARVAGAAGEVPVGAVMVRESRIVGCGHNCPVTTVDPTAHAEIRALRDAASRVGNYRLPGCTLYVTLEPCVMCIGAMFHARITRLVYAANDPKTGVCGSLLDLPADTRLNHHLMVSQGVLADEAGTLLKQFFIAKRGIKERNTS

SEQ ID NO: 3654 - DNA, 501 bp, Bacillus anthracis str. Ames
  CDS (1)..(501): transl_table=11
atggaacgtgatcaagatatttattttatgcaattagcaatagaagaggctaaaaaagcagaggcaatacaagaagtaccgattggtgcagttatagtattaaatggtgaagtaattagtgctgctcataatttaagggaaactgagcaaaggtcaatagctcacgctgagttgttagctattgatgaggcttgcaaaaaattagggacatggcgtttagaagatgcgactttatatgtaacattagagccttgtccgatgtgtgcgggtggaattgttttatcacgagtaaagcgagtcgtatatggtgcaggtgatccaaaaggtggatgtgcagggacattgatgaatctgttaacggatgaacgttttaatcatcaatgtgaagtagtagctggtgtattagaagaagaatgcggtacgctgttaacaaacttttttagagaacttcgcaaaaaaagaaaagcgatcaagaaattagagaaaagcaacgagaattaa

SEQ ID NO: 3655 - protein, 166 aa, Bacillus anthracis str. Ames
MERDQDIYFMQLAIEEAKKAEAIQEVPIGAVIVLNGEVISAAHNLRETEQRSIAHAELLAIDEACKKLGTWRLEDATLYVTLEPCPMCAGGIVLSRVKRVVYGAGDPKGGCAGTLMNLLTDERFNHQCEVVAGVLEEECGTLLTNFFRELRKKRKAIKKLEKSNEN

SEQ ID NO: 3656 - DNA, 552 bp, Haemophilus ducreyi 35000HP
  CDS (1)..(552): transl_table=11
atgcttaaatacttaacttactatactatgtttatcaaaacgcaagaacgtgattgttgtttagttgcttcagcacaagatattcaattaatgcaatatgcattgacattagctaaacgcgccgaaaccatgggtgaaattcctgttggcgcggtgttagttgattcaaagggaaatatcattggtgagggatggaatcaagtcattgcgctttctgatccatcagcacacgcagaaatactcgccattcggcaagcaagccatagactgcaaaattatcggctgttagattgtacattatatgtcacgttagagccttgtactatgtgcgcaggtgctattctgcatagccggctgagccgattagtatttggtgcatcagattataaaaccggggccattggctcacgctttcatttatttgaagattataaaatgaaccatttgctcactgtacaaggtggagtcctaaaagaagcgtgcagtaaacagattagtgaatttttccaacgccgtagaatagaaaaaaaacagcaaaaacaagcagtctaa

SEQ ID NO: 3657 - protein, 183 aa, Haemophilus ducreyi 35000HP
MLKYLTYYTMFIKTQERDCCLVASAQDIQLMQYALTLAKRAETMGEIPVGAVLVDSKGNIIGEGWNQVIALSDPSAHAEILAIRQASHRLQNYRLLDCTLYVTLEPCTMCAGAILHSRLSRLVFGASDYKTGAIGSRFHLFEDYKMNHLLTVQGGVLKEACSKQISEFFQRRRIEKKQQKQAV

SEQ ID NO: 3658 - DNA, 450 bp, Bordetella pertussis Tohama I
  CDS (1)..(450): transl_table=11
atggcgctggcgctggagcaggcgcaagaggccgcgcgtctgggcgaagtgccggtcggcgccgtggtggtcgatgcccagggcgaggtgctgggcacgggctacaaccgcaccatcatcgaccgcgaccctaccgcgcatgccgagatcgtggcgctgcgcgccgcggcgcgccggctggacaattaccgcttgcccggcgtgtcgctgtacgtcacgctggagccctgcgtgatgtgcatcggcgccatgctgcacgcgcgcctggcgcgggtcgtctacggcgcccgcgatcccaagacgggcgcctgcggcagcgtgctcgacgtgggggccgtcggccaactgaaccatcacacgaccatcaccggcggcgtgctcgccgagccctgcggcgaattgctgcgtggttttttccgcgcccgccgcgccaaggaatccccagtatga

SEQ ID NO: 3659 - protein, 149 aa, Bordetella pertussis Tohama I
MALALEQAQEAARLGEVPVGAVVVDAQGEVLGTGYNRTIIDRDPTAHAEIVALRAAARRLDNYRLPGVSLYVTLEPCVMCIGAMLHARLARVVYGARDPKTGACGSVLDVGAVGQLNHHTTITGGVLAEPCGELLRGFFRARRAKESPV

SEQ ID NO: 3660 - DNA, 507 bp, Bordetella bronchiseptica RB50
  CDS (1)..(507): transl_table=11
gtggctgatgcgctcgtgagcgaaaccgatccctgcgtcgccgacgacgcgcgcctgatggcgctggcgctggagcaggcgcaagaggccgcgcgcctgggcgaagtgccggtcggcgccgtggtggtcgatgcccagggcgaggtgctgggcgcgggctacaaccgcaccatcatcgaccgcgaccccaccgcgcatgccgagatcgtggcgctgcgcgccgcggcgcgtcggctggacaattaccggttgccaggcgtgtcgctgtacgtcacgctggagccctgcgtgatgtgcatcggcgccatgctgcacgcgcgcctggcgcgggtcgtctacggcgcccgcgatcccaagacgggcgcctgcggcagcgtgctcgacgtgggggccgtcggccaactgaaccatcacacgaccattaccggcggcgtgctcgccgagccctgcggcgaattgctgcgtggttttttccgcgcccgccgcgccaaggaatccccagtatga

SEQ ID NO: 3661 - protein, 168 aa, Bordetella bronchiseptica RB50
MADALVSETDPCVADDARLMALALEQAQEAARLGEVPVGAVVVDAQGEVLGAGYNRTIIDRDPTAHAEIVALRAAARRLDNYRLPGVSLYVTLEPCVMCIGAMLHARLARVVYGARDPKTGACGSVLDVGAVGQLNHHTTITGGVLAEPCGELLRGFFRARRAKESPV

SEQ ID NO: 3662 - DNA, 735 bp, Chromobacterium violaceum ATCC 12472
  CDS (1)..(735): transl_table=11
gtgacgctcacctcccctccgctgcctcccgccgccatcgcctggctggccgagctggacatccatacccgccagcagctgcacgcccgcggcgtagtcaccgcctttttgcaattgaaagcggccggacacaccgcaacccgccggctgctgttcgcgctggaggccgccgcccgcggcatacactggcggcagctggaggaggaggacaaggcgctgctgctgcgccggctgtccgaccaccccccggtggcgctgccgccggacgcggatgaccgcctgcgctacatgcggcaggcccgggatctggcccagcaggccgccgccgaaggcgaagtgccggtgggcgcgctggtggtgaaagacggcgagatcataggccgcggctacaaccagcccatcggccgccacgacccgtccgcccacgccgagatgcaggcgctgcgcgacgccgccgcgcggctgcgcaactatcggctggacggctgcgacctgtacgtgacgcttgagccctgcccgatgtgcagcggcgccatcctgcacgcgcgcgtcgcccgcgtgatctacggcgccgccgacgccaagaccggcgcggccggcagcacggtcgacctgttcgccgacccgcggctcaaccaccacgcggcggtattcggcggcgtggaagccgaggcgtgcgcggcgcagctgtccgcctttttccgccagcggcgccagtccgcgggggaggactga

SEQ ID NO: 3663 - protein, 244 aa, Chromobacterium violaceum ATCC 12472
MTLTSPPLPPAAIAWLAELDIHTRQQLHARGVVTAFLQLKAAGHTATRRLLFALEAAARGIHWRQLEEEDKALLLRRLSDHPPVALPPDADDRLRYMRQARDLAQQAAAEGEVPVGALVVKDGEIIGRGYNQPIGRHDPSAHAEMQALRDAAARLRNYRLDGCDLYVTLEPCPMCSGAILHARVARVIYGAADAKTGAAGSTVDLFADPRLNHHAAVFGGVEAEACAAQLSAFFRQRRQSAGED

SEQ ID NO: 3664 - DNA, 522 bp, Photorhabdus luminescens subsp. laumondii TTO1
  CDS (1)..(522): transl_table=11
gtgattgaaatctatagtgacgagtattggatgcagcaggccatcgaacgagcaataaaggcgtgggagcagggggaaatacctgttggtgctatattggttgctgataataaaatcatctcggaaggttggaatcagtctattatcgcgcatgatcccaccgctcatgctgaaattattgtgttacgcaaagggggagagcggttacgaaattatcgtttgataaataccaccttatacgtcaccctcgaaccttgcactatgtgcgctggtgctatgatacatagccgaatacagcggctggtttatggcgccagcgatatgaaaactggcgccgtaggttctttggttgatatattgcgccatcctggcatgaatcatcaaattgatattaccagtggtgtgcttgctgaggaatgttcgacgatgttgagcgcttttttcaaacaacgtcggcagcaacataaagcattaaaagccgccagaaaacagcaggaagaaaatcaagattcactcttttag

SEQ ID NO: 3665 - protein, 173 aa, Photorhabdus luminescens subsp. laumondii TTO1
MIEIYSDEYWMQQAIERAIKAWEQGEIPVGAILVADNKIISEGWNQSIIAHDPTAHAEIIVLRKGGERLRNYRLINTTLYVTLEPCTMCAGAMIHSRIQRLVYGASDMKTGAVGSLVDILRHPGMNHQIDITSGVLAEECSTMLSAFFKQRRQQHKALKAARKQQEENQDSLF

SEQ ID NO: 3666 - DNA, 546 bp, Vibrio vulnificus YJ016
  CDS (1)..(546): transl_table=11
atggcagagacacatcaacccttttcacttcaagatgaagtttttatgcgcagagcgattgagcttgccgcgattgctgaaagtgaaggggaagtgcctgttggcgcggtactggtcaaagatggcgaagtgattgctgaagggtggaatcaatcgattggtcaacatgatgcaacggcgcatgcagaaatacagaccttacgccaagctgggcagagtctgggtaactatcgtctgcttgacaccacgttgtacgtcaccttagagccttgcccaatgtgtgctggcgcactactgcatagccgtgtaaaacgcattgtctttggtgctcctgacttgaaagcaggggcggctgggacggtactcgatctgttttctagtcaagcggcgtaccactacgcaaccatcgataaaggattgttagagtcggaatgtcgtgagcagttacaggccttttttaagcgccgtcgaaaagagatcaaggcgttgaagaaggagctgcagactcaaagtgatcatgaagatgtggacgaggaagaaaagtag

SEQ ID NO: 3667 - protein, 181 aa, Vibrio vulnificus YJ016
MAETHQPFSLQDEVFMRRAIELAAIAESEGEVPVGAVLVKDGEVIAEGWNQSIGQHDATAHAEIQTLRQAGQSLGNYRLLDTTLYVTLEPCPMCAGALLHSRVKRIVFGAPDLKAGAAGTVLDLFSSQAAYHYATIDKGLLESECREQLQAFFKRRRKEIKALKKELQTQSDHEDVDEEEK

SEQ ID NO: 3668 - DNA, 540 bp, Geobacter sulfurreducens PCA
  CDS (1)..(540): transl_table=11
atgtcatctttgaaaaagacccccattcgcgacgatgcctattggatgggaaaggcgattcgagaagccgcaaaagctgcagcccgtgacgaagttcccatcggggccgttatcgtgcgtgacggtgcagtgatcgggagggggcacaacctccgcgagggtagcaatgatccctctgcccatgccgaaatgatcgccatccggcaggccgcccgcaggtcggcaaactggcgtcttacgggcgcaactctgtatgtgacgctggaaccgtgcctcatgtgcatgggggctattatcctcgcacgactggaacgggtcgttttcggctgttatgaccccaaggggggcgcagcagggtcactctacgatctctccgcggacccgcgcctgaatcatcaggtaaggttatcgcccggcgtctgtcaggaagaatgtggcacgatgctgagtgacttttttcgtgatcttcgccgcaggaaaaaggccaaggctacccccgcgcttttcatcgatgaaaggaaagtgccaccagagccttga

SEQ ID NO: 3669 - protein, 179 aa, Geobacter sulfurreducens PCA
MSSLKKTPIRDDAYWMGKAIREAAKAAARDEVPIGAVIVRDGAVIGRGHNLREGSNDPSAHAEMIAIRQAARRSANWRLTGATLYVTLEPCLMCMGAIILARLERVVFGCYDPKGGAAGSLYDLSADPRLNHQVRLSPGVCQEECGTMLSDFFRDLRRRKKAKATPALFIDERKVPPEP

SEQ ID NO: 3670 - DNA, 459 bp, Mycobacterium avium subsp. paratuberculosis K-10
  CDS (1)..(459): transl_table=11
gtgatttctgacgaagacctgatccgttccgcgctggcggttgccgcgacggcgggtccccgcgacgtgcccatcggcgcggtggtggtcggcgccgacggcaccgaactggcccgggcggtcaacgcgcgcgaggcgctgggggatccgaccgcgcacgccgaaatcctggcgctgcgggctgcggccgccgcgctcggggacgggtggcggctggaaggcgccacgctggccgtcaccgtcgaaccgtgcaccatgtgcgcgggcgcgctggtgctcgcgcgcatcgcccggctggtgttcggtgcctgggagcccaagaccggcgcggtcggatcgctgtgggatgtggtgcgcgatcggcggctcaaccaccgcccggaagtccgcggcggggtgctggagcgagagtgcgccgcgccgctggagggcttcttcgcccgccagcgattggggtga

SEQ ID NO: 3671 - protein, 152 aa, Mycobacterium avium subsp. paratuberculosis K-10
MISDEDLIRSALAVAATAGPRDVPIGAVVVGADGTELARAVNAREALGDPTAHAEILALRAAAAALGDGWRLEGATLAVTVEPCTMCAGALVLARIARLVFGAWEPKTGAVGSLWDVVRDRRLNHRPEVRGGVLERECAAPLEGFFARQRLG

SEQ ID NO: 3672 - DNA, 942 bp, Bdellovibrio bacteriovorus HD100
  CDS (1)..(942): transl_table=11
gtgaacacccctgcccacgacgaaaaatggatgcgcaaagcactggcgctggcccgcaaagcggccgagcgtgaagaggtgcctgtggccgccatcgttgtgggaccggaagggatgatctcttacgcgatcaacacccgcgaacgtcagcaatcccccttgggacacgccgagcttttggctttgcataaagcttcgcaaaagcgcggcagctggcgcttaagtgattgtactttgtatgtgactttagagccttgtgtgatgtgtgcgggcgccattcagcagtcgcgcattgcacgagtggtttatggcgcaaaagacgtcaaagccggtgcggttgaaagtctttatcatatcctgaaagacccccgcctgaatcatcaggtggaggtcagctccggcattcttgaagacgactgcagtgaacttttgcaggactttttcaaaggccgtcgcgacgaaaagaaatccgaaaaagcacagaaggtcttccgcgaccgcgccagcgttgtggttctgcacgaaggaaaagtgctggggttccacgccgtggatcccagggcgcaagtgccttatttcttcctgccgggcggagccgttgaaaaaggtgaatcccccgcaaccaccgccgcccgtgaatgcctggaagaaaccggctacaaggtccggatcttagaggattccgcctttgaacgtgtttatgattttccttgggatggcaaagttcacgcctgccgtacggtgttttatgtcggtgttctggatcaaaaatggattccggcgggcaaaattgaagatgcctcttatcacaagggcgtggactggctgccagccaaagacgccgccaaagtgtttggctacaacaaagacatcctctgggccgtgcaaaaactactcaaaaccgctcaaaagcatgcagccagatctgccaaaaaaccttag

SEQ ID NO: 3673 - protein, 313 aa, Bdellovibrio bacteriovorus HD100
MNTPAHDEKWMRKALALARKAAEREEVPVAAIVVGPEGMISYAINTRERQQSPLGHAELLALHKASQKRGSWRLSDCTLYVTLEPCVMCAGAIQQSRIARVVYGAKDVKAGAVESLYHILKDPRLNHQVEVSSGILEDDCSELLQDFFKGRRDEKKSEKAQKVFRDRASVVVLHEGKVLGFHAVDPRAQVPYFFLPGGAVEKGESPATTAARECLEETGYKVRILEDSAFERVYDFPWDGKVHACRTVFYVGVLDQKWIPAGKIEDASYHKGVDWLPAKDAAKVFGYNKDILWAVQKLLKTAQKHAARSAKKP

SEQ ID NO: 3674 - DNA, 501 bp, Bacillus cereus ATCC 10987
  CDS (1)..(501): transl_table=11
atggaacgtgatcaagatatttattttatgcagttagcaatagaagaggctaaaaaagcagaggcaatacaagaagtaccgattggtgcagttatagtattaaatggtgaagtaattagtgttgctcataatttaagggagactgagcaaagatcaatagctcacgctgagttgttagctattgatgaggcatgcaaaaaattagggacatggcgtttagaagatgcgacgttatatgtaacattagagccttgtccgatgtgtgcgggtggaattgttttatcacgagtaaagcgagttgtatatggtgcgagtgatccgaaaggtggatgtgcagggacattgatgaatctgttaacggatgaacgctttaatcatcaatgtgaagtagtggctggtgtattagaagaagagtgcggtacgctattaacgaacttttttagagcgcttcgtaaaaaaagaaaagcgattaagaaattagagaaaagtaaagagaattaa

SEQ ID NO: 3675 - protein, 166 aa, Bacillus cereus ATCC 10987
MERDQDIYFMQLAIEEAKKAEAIQEVPIGAVIVLNGEVISVAHNLRETEQRSIAHAELLAIDEACKKLGTWRLEDATLYVTLEPCPMCAGGIVLSRVKRVVYGASDPKGGCAGTLMNLLTDERFNHQCEVVAGVLEEECGTLLTNFFRALRKKRKAIKKLEKSKEN

SEQ ID NO: 3676 - DNA, 564 bp, Yersinia pestis biovar Medievalis str. 91001
  CDS (1)..(564): transl_table=11
gtgtctgctgataatagtttgcctgctgataatggcttgtcttctgaatgtgattctcctgctgaatacagcgatgagtactggatgcgccatgccttaacgctggcgctgcgagcgcaggaagagggtgaagttccggtgggggcagtgctggtcttggggaataaggtgattggtgaagggtggaaccggccaattcgcgataatgacccaactgctcatgcggaaattatggcgctacgccaaggtgggcaggcggtacagaattatcgcctgttggatgccaccttatatgtgacgctggaaccttgcgtgatgtgcgccggagccatggtacacagccggatccgccggttggtttatggcgcaaatgatgtaaaaactggcgccgcggggtcgctggtagatattttgcgccaccctgggatgaaccaccaaatagaggtcagtgctggcatactggcgattgcgtgttcccatcaattgagtgcgttctttcgccaacgccgtgagcagcagaaagcattgaaacaagcacagcgggcagcagaaggtaaattctga

SEQ ID NO: 3677 - protein, 187 aa, Yersinia pestis biovar Medievalis str. 91001
MSADNSLPADNGLSSECDSPAEYSDEYWMRHALTLALRAQEEGEVPVGAVLVLGNKVIGEGWNRPIRDNDPTAHAEIMALRQGGQAVQNYRLLDATLYVTLEPCVMCAGAMVHSRIRRLVYGANDVKTGAAGSLVDILRHPGMNHQIEVSAGILAIACSHQLSAFFRQRREQQKALKQAQRAAEGKF

SEQ ID NO: 3678 - DNA, 486 bp, Desulfovibrio vulgaris subsp. vulgaris str. Hildenborough
  CDS (1)..(486): transl_table=11
gtgggacccgtcccctatgcgcccgaaggctggacatgggaacgcctcatggacgaggcactggccgaagcacgactggcacaggccgaaggcgaagtgcctgtgggggccgtcgtcgtcgacaaggcgggacgcatcatcggtcgcgggcacaaccgctgtctgcgcgacaacgacccatcggcccatgccgagatggtcgcgctacgcatggccgcgacaacgaccgcaaactaccggctaggcgggacgtttctggtggtgacactggaaccctgcctcatgtgcgcgggtgccatcgtccatgcccgcgtcgagggcgtggtctacggtgccgaagacccgaaggcaggggccgtgacgtcgtgccttgaagccttcgaacaacccttcctcaatcaccgcccgtggcatatgggaggcctgcgccgacgcgcctgcaccgccatcctcaaggacttcttcaacggacgccgtaccgattga

SEQ ID NO: 3679 - protein, 161 aa, Desulfovibrio vulgaris subsp. vulgaris str. Hildenborough
MGPVPYAPEGWTWERLMDEALAEARLAQAEGEVPVGAVVVDKAGRIIGRGHNRCLRDNDPSAHAEMVALRMAATTTANYRLGGTFLVVTLEPCLMCAGAIVHARVEGVVYGAEDPKAGAVTSCLEAFEQPFLNHRPWHMGGLRRRACTAILKDFFNGRRTD

SEQ ID NO: 3680 - DNA, 525 bp, Acinetobacter sp. ADP1
  CDS (1)..(525): transl_table=11
atgagtctctccgacacttttaatgatgaatactggatgcagcttgcttacgagcaagctgtacgcgcagccgaacacaacgaagttcctgtaggggctgtaattgtgagtcaaaacaaagttattggttctggctataatgcgccaattaccctgaatgatcctacagctcatgcagaaattcgtgcaattcgtatggcttgtgaatctgttaagaattatcgtttacctgaagatgcaaccttatatgttaccttagagccatgtaccatgtgtgtaggtgccttggtccatgcacgcattcatcgtgttgtttttgcaacaacagagcctaaggcgggctctttagtaagcgcaaggcaattattgaatatgggatattacaatcataaatttttaattgaacacgggtgtatgcaggcacaatgttctaaacagctcagcgacttttttagaaaacgtcgtgaacaaaaacgtgagctcagacaacaatacattgcgacttctgaaaatccgcagacttga

SEQ ID NO: 3681 - protein, 174 aa, Acinetobacter sp. ADP1
MSLSDTFNDEYWMQLAYEQAVRAAEHNEVPVGAVIVSQNKVIGSGYNAPITLNDPTAHAEIRAIRMACESVKNYRLPEDATLYVTLEPCTMCVGALVHARIHRVVFATTEPKAGSLVSARQLLNMGYYNHKFLIEHGCMQAQCSKQLSDFFRKRREQKRELRQQYIATSENPQT

SEQ ID NO: 3682 - DNA, 525 bp, Erwinia carotovora subsp. atroseptica SCRI1043
  CDS (1)..(525): transl_table=11
atgattgagagaggaaacgtgagtagcctgcgtgataatgaatactggatgcgctatgcattgacgctggctcagcgtgctcaggatgaaggcgaagtgccagttggcgcagtgctggtgctggataatgaagcgattggcgaagggtggaaccggccgataggacatcatgatcctaccgcgcacgccgagattatggcgttgcggcagggagggctggtgttgcagaactatcgcctgctggagaccacgctgtatgtcacgctggagccgtgcattatgtgtgcgggcgcgatgatacacagtcgtatcggtcgtctggtttacggtgcgtcagatgagaaaacgggggctgcggggtcgttggtggacattctgcgccatcccggcatgaatcatcagatcgtgattgaatccggtgttctggctgatgaatgctcagcgacgctcagcgcgttcttccgtatgcgccgtgagcagcataaagcccgtcgtgcagccgagaaaaacgccgcgcaggagtag

SEQ ID NO: 3683 - protein, 174 aa, Erwinia carotovora subsp. atroseptica SCRI1043
MIERGNVSSLRDNEYWMRYALTLAQRAQDEGEVPVGAVLVLDNEAIGEGWNRPIGHHDPTAHAEIMALRQGGLVLQNYRLLETTLYVTLEPCIMCAGAMIHSRIGRLVYGASDEKTGAAGSLVDILRHPGMNHQIVIESGVLADECSATLSAFFRMRREQHKARRAAEKNAAQE

SEQ ID NO: 3684 - DNA, 501 bp, Desulfotalea psychrophila LSv54
  CDS (1)..(501): transl_table=11
atggaagatagagagatagaggcaagagatgccctgtggatgggctatgccctcgatgaggcggctcgggcaggagcaaatggtgaggtgccggtgggggcggtgttggtgcaggatggtgagctgattgccactggactcaatggcatgattacccataatgatcccagcgcccatgcagagattgttgccctgcgtcaggctggtcaggtccttaacaactatcgttttcccgaggcgaccctctatgtgacccttgaaccctgtattatgtgtatgggtgctatcattcaggcccggataaagcgacttgtcttcgctgccttcgataccaagacaggtgctgccggctctctctatgatataggtagagacggagccctgaatcatcgagtggagattatgggcggtgttctggcagagaccagtgctgctctcttaaaagcgttttttcgcgatcggagaaaaaagcgtaagaacggggggcttgataagggctga

SEQ ID NO: 3685 - protein, 166 aa, Desulfotalea psychrophila LSv54
MEDREIEARDALWMGYALDEAARAGANGEVPVGAVLVQDGELIATGLNGMITHNDPSAHAEIVALRQAGQVLNNYRFPEATLYVTLEPCIMCMGAIIQARIKRLVFAAFDTKTGAAGSLYDIGRDGALNHRVEIMGGVLAETSAALLKAFFRDRRKKRKNGGLDKG

SEQ ID NO: 3686 - DNA, 564 bp, Yersinia pseudotuberculosis IP 32953
  CDS (1)..(564): transl_table=11
gtgtctgctgataatagtttgcctgctgataatgtcttgtcttctgaatgtgattctcctgctgaatacagcgatgagtactggatgcgccatgccttaacgctggcgctgcgagcgcaggaagagggtgaagttccggtgggggcagtgctggtcttggggaataaggtgattggtgaagggtggaaccggccaattcgcgataatgacccaactgctcatgcggaaattatggcgctacgccaaggtgggcaggcggtacagaattatcgcctgttggatgccaccttatatgtgacgctggaaccttgcgtgatgtgcgccggagccatggtacacagccggatccgccggttggtttatggcgcaaatgatgtaaaaactggcgccgcggggtcgctggtagatattttgcgccaccctgggatgaaccaccaaatagaggtcagtgctggcatactggcgactgcgtgttcccatcaattgagtgcgttctttcgccaacgccgtgagcagcagaaagcattgaaacaagcacagcgggcagcagaaggtaaattctga

SEQ ID NO: 3687 - protein, 187 aa, Yersinia pseudotuberculosis IP 32953
MSADNSLPADNVLSSECDSPAEYSDEYWMRHALTLALRAQEEGEVPVGAVLVLGNKVIGEGWNRPIRDNDPTAHAEIMALRQGGQAVQNYRLLDATLYVTLEPCVMCAGAMVHSRIRRLVYGANDVKTGAAGSLVDILRHPGMNHQIEVSAGILATACSHQLSAFFRQRREQQKALKQAQRAAEGKF

SEQ ID NO: 3688 - DNA, 501 bp, Bacillus cereus E33L
  CDS (1)..(501): transl_table=11
atggaacgtgatcaagatatttattttatgcagttagcaatagaagaggctaaaaaagcagaggcaatacaagaagtaccgattggtgcagttatagtattaaatggggaagtaattagtgctgctcataatttaagggaaactgagcaaaggtcaatagctcacgctgagttgttagctattgatgaggcttgcaaaaaattagggacatggcgtttagaagatgcgactttatatgtaacattagagccttgtccgatgtgtgcgggtggaattgttttatcacgagtaaagcgagtcgtatacggtgcaggtgatccaaaaggtggatgtgcagggacattgatgaatctgttaacggatgaacgttttaatcatcaatgtgaagtagtagatggtgtattagaagaagaatgcggtacgctgttaacaaacttttttagagaacttcgtaaaaaaagaaaagcgatcaagaaattagaaaaaagcaacgagaattaa

SEQ ID NO: 3689 - protein, 166 aa, Bacillus cereus E33L
MERDQDIYFMQLAIEEAKKAEAIQEVPIGAVIVLNGEVISAAHNLRETEQRSIAHAELLAIDEACKKLGTWRLEDATLYVTLEPCPMCAGGIVLSRVKRVVYGAGDPKGGCAGTLMNLLTDERFNHQCEVVDGVLEEECGTLLTNFFRELRKKRKAIKKLEKSNEN

SEQ ID NO: 3690 - DNA, 531 bp, Mannheimia succiniciproducens MBEL55E
  CDS (1)..(531): transl_table=11
atggatcaacagattagctttgacgaaaaaatgatgaatcgagctcttttccttgccgacaaggcggaagctttaggggaaattcccgtaggtgccgtattggtggatgaacggggcaatatcattggtgaaggctggaatctatctattgtaaactcagatcccaccgcccatgccgaaattattgcgttacgtaacgccgcgcagaaaatccaaaattaccgcctgctcaataccactttatatgtgacgttagaaccctgcaccatgtgcgccggcgcgattttacacagccgaatcaaacgcttggtattcggggcgtccgattacaaaaccggtgcggtgggttccagatttcatttttttgaggattataaaatgaatcatggggttgagatcacaagcggtgtcttacaggatcaatgcagtcagaagttaagccgctttttccaaaagcgcagggaacagaaaaaacaacaaaaagctaccgcacttttacaacacccccggcttaactcctctgaaaaatag

SEQ ID NO: 3691 - protein, 176 aa, Mannheimia succiniciproducens MBEL55E
MDQQISFDEKMMNRALFLADKAEALGEIPVGAVLVDERGNIIGEGWNLSIVNSDPTAHAEIIALRNAAQKIQNYRLLNTTLYVTLEPCTMCAGAILHSRIKRLVFGASDYKTGAVGSRFHFFEDYKMNHGVEITSGVLQDQCSQKLSRFFQKRREQKKQQKATALLQHPRLNSSEK

SEQ ID NO: 3692 - DNA, 426 bp, Legionella pneumophila subsp. pneumophila str. Philadelphia 1
  CDS (1)..(426): transl_table=11
atgcaactggcttacgagcaagcggttatagctcgtaatgaaggagaggttcctgttggggctgtgttggttagcaaagacaatcaattattaggcgttggcagaaatgtcattgaaaaaagtcatgatccttctgatcatgctgaaatcagggcaatacgacaagcctcgagaaagttaaataatcatagattattggatacaacgctttatgttactcttgagccctgtgtgatgtgtgcgggacttatggttcacgcacgcatcaaacggctggtatttgctacccgagattttaaaacaggggcagctggctcaatgtttaatgttttacatgctctaaaccattcggtattaatagacgaaggcattatgcaggctgagtgttctcaattgctgtcagattttttcagaaaccttcgctag

SEQ ID NO: 3693 - protein, 141 aa, Legionella pneumophila subsp. pneumophila str. Philadelphia 1
MQLAYEQAVIARNEGEVPVGAVLVSKDNQLLGVGRNVIEKSHDPSDHAEIRAIRQASRKLNNHRLLDTTLYVTLEPCVMCAGLMVHARIKRLVFATRDFKTGAAGSMFNVLHALNHSVLIDEGIMQAECSQLLSDFFRNLR

SEQ ID NO: 3694 - DNA, 489 bp, Burkholderia mallei ATCC 23344
  CDS (1)..(489): transl_table=11
atgcgcctcgcgctcgccgccgccgaggaggcgcgcgcggcgggcgaggtgccggtcggcgcggtgatcgtgcgcggcgacgaagtgatcgcgcggggcttcaatcacccgatcggcggccacgatccgtccgcccacgccgagatggccgcgctgcgcgccgccgcgcgcgcgctgcgcaattaccggatgccgggctgcgaactgtacgtgacgctcgagccgtgcctgatgtgctcgggggcgatcatgcatgcgcggatcgcgcgcgtcgtgttcggcgcgcccgatccgaagacgggcgcatgcggcagcgtcgtcgatgcgttcgcggatgcgcgcctgaaccatcacacgacggtcgaaggcggcgtgctcgccgacgaatgcggcgcggtgctcaagtcgttcttcgcgcagcggcggcaggcggttcgcgaggcccgccgcgcgcagcaggcgcccggcgcgccgccgcgcgacgagtga

SEQ ID NO: 3695 - protein, 162 aa, Burkholderia mallei ATCC 23344
MRLALAAAEEARAAGEVPVGAVIVRGDEVIARGFNHPIGGHDPSAHAEMAALRAAARALRNYRMPGCELYVTLEPCLMCSGAIMHARIARVVFGAPDPKTGACGSVVDAFADARLNHHTTVEGGVLADECGAVLKSFFAQRRQAVREARRAQQAPGAPPRDE

SEQ ID NO: 3696 - DNA, 525 bp, Burkholderia pseudomallei K96243
  CDS (1)..(525): transl_table=11
ttgctttccgcggccgccgagcgcgaccgccgctacatgcgcctcgcgctcgccgccgccgaggaggcgcgcgcggcgggcgaggtgccggtcggcgcggtgatcgtgcgcggcgacgaagtgatcgcgcggggcttcaatcacccgatcggcggccacgatccgtccgcccacgccgagatggccgcgctgcgcgccgccgcgcgcgcgctgcgcaattaccggatgccgggctgcgaactgtacgtgacgctcgagccgtgcctgatgtgctcgggggcgatcatgcatgcgcggatcgcgcgcgtcgtgttcggcgcgcccgatccgaagacgggcgcatgcggcagcgtcgtcgatgcgttcgcggatgcgcgcctgaaccatcacacgacggtcgaaggcggcgtgctcgccgacgaatgcggcgcggtgctcaagtcgttcttcgcgcagcggcggcaggcggttcgcgaggcccgccgcgcgcagcaggcgcccggcgcgccgccgcgcgacgagtga

SEQ ID NO: 3697 - protein, 174 aa, Burkholderia pseudomallei K96243
MLSAAAERDRRYMRLALAAAEEARAAGEVPVGAVIVRGDEVIARGFNHPIGGHDPSAHAEMAALRAAARALRNYRMPGCELYVTLEPCLMCSGAIMHARIARVVFGAPDPKTGACGSVVDAFADARLNHHTTVEGGVLADECGAVLKSFFAQRRQAVREARRAQQAPGAPPRDE

SEQ ID NO: 3698 - DNA, 414 bp, Methylococcus capsulatus str. Bath
  CDS (1)..(414): transl_table=11
atgctggcccgcaccgccgaaacggcaggcgaagtcccgatcggggccgtgctggtcaagaacggcgaaatcttgggcgaaggccataaccaacccatttccacccacgaccccaccgcgcatgccgaaatcgtcgccttgcgcgcggccggcgcgcgcctgggcaactatcggctggtggataccacgctgtacgtcacgctcgaaccctgcgccatgtgcatgggtgcgatcctgcatgcccgcgtcggcaggctggtgttcggcgccgccgatcccaggcgcggcgcggcgataagcgcgctccggctgaacgaggccgagtttatgaaccaccgcgtcgagctgttggaaggcgtgctggccgaggaatgcagccagctcctccgcgacttcttccggaaccgccgctag

SEQ ID NO: 3699 - protein, 137 aa, Methylococcus capsulatus str. Bath
MLARTAETAGEVPIGAVLVKNGEILGEGHNQPISTHDPTAHAEIVALRAAGARLGNYRLVDTTLYVTLEPCAMCMGAILHARVGRLVFGAADPRRGAAISALRLNEAEFMNHRVELLEGVLAEECSQLLRDFFRNRR

SEQ ID NO: 3700 - DNA, 465 bp, Azoarcus sp. EbN1
  CDS (1)..(465): transl_table=11
atgagtgacgaagatttcatgcgggcggcgctggagcaggcgcgaatggcgggggcgtgtgacgaggtgccggtcggtgcagtcgtcgtgctcgacggcgagatcgtcggccgcggcttcaatcagccgatcaggcgccacgatccgagcgcgcacgccgaagtgatggcgttgcgcgacgcgggcgaacggctcggaaactaccgctttcccggctgcgagctgttcgtcacgctcgaaccgtgcgcgatgtgcagtggcgcgatcatgcatgcgcgggtggcgcgcgtcgtgttcggcgcccgcgatccgaggacaggcgttgccggcagcatcattgacctttttgccgagcggcggctcaatcatcacgcggaagtcgccggcggcgtgctcgccgacgaatgcggccgtctgctgtcggggttcttcgctgcccggcgcgggcgcaccctcatcgcgtga

SEQ ID NO: 3701 - protein, 154 aa, Azoarcus sp. EbN1
MSDEDFMRAALEQARMAGACDEVPVGAVVVLDGEIVGRGFNQPIRRHDPSAHAEVMALRDAGERLGNYRFPGCELFVTLEPCAMCSGAIMHARVARVVFGARDPRTGVAGSIIDLFAERRLNHHAEVAGGVLADECGRLLSGFFAARRGRTLIA

SEQ ID NO: 3702 - DNA, 507 bp, Staphylococcus epidermidis RP62A
  CDS (1)..(507): transl_table=11
atgaaaaaaaatcatgattacatgcgcttagcaattaatgaagcacacaaagccaaagcattaggagaagttccaatcggagcagttattgttaaagaggatcaagtcattgcacgtgcacataatttaagggaaacattgcagcaacctactgcccatgcagagcacatagcgatagaacgggcgtcagaagttgtcggcagttggagattagaagaatgtacgttgtatgttacattagagccctgtgtcatgtgtgcgggcactattattatgagccgtattccaaaggttgtgtatggtgctactgatcccaaaggaggatgttcaggaagtcttatgaatttattagaacaaccgcagtttaatcatagggcaatcgtagaaaaaggaattttagaagaagagtgtgcagaactattgagaagtttttttaaggaaatacgtgaaaagaaaaaagcagaaaaacaggggaagatacaaaaggatataaatttgttaaaatga

SEQ ID NO: 3703 - protein, 168 aa, Staphylococcus epidermidis RP62A
MKKNHDYMRLAINEAHKAKALGEVPIGAVIVKEDQVIARAHNLRETLQQPTAHAEHIAIERASEVVGSWRLEECTLYVTLEPCVMCAGTIIMSRIPKVVYGATDPKGGCSGSLMNLLEQPQFNHRAIVEKGILEEECAELLRSFFKEIREKKKAEKQGKIQKDINLLK

SEQ ID NO: 3704 - DNA, 432 bp, Corynebacterium glutamicum ATCC 13032
  CDS (1)..(432): transl_table=11
atgcgccatgctttggatattgctcgccaaacccctgagggggacgttcccgttggcgccgtcatttacgcgccgaccggggagatcctggcgaccgcaacgaaccgtcgagaagcagaccgcgatcccacggcccacgccgaaattattgctttacgacgagccgcccgccgtttttccgacggctggcggctgagtgactgcaccgcggtggtcaccttggagccctgcagtatgtgcgccggcgccttggtgggtgctcgaatcggacgcatcgtattcggagcatttgagccccgaaccggcgcctgtggatctgtatttgacgtggttcgagaccccgcggtgttgcacaaagtggaagtcagtggaggaatcctcgagcctgaatgtgctgccttgatgaccgaatttttcgaacttcacaggtaa

SEQ ID NO: 3705 - protein, 143 aa, Corynebacterium glutamicum ATCC 13032
MRHALDIARQTPEGDVPVGAVIYAPTGEILATATNRREADRDPTAHAEIIALRRAARRFSDGWRLSDCTAVVTLEPCSMCAGALVGARIGRIVFGAFEPRTGACGSVFDVVRDPAVLHKVEVSGGILEPECAALMTEFFELHR

SEQ ID NO: 3706 - DNA, 510 bp, Pseudomonas syringae pv. syringae B728a
  CDS (1)..(510): transl_table=11
atgcggcaaccgcagatcatcgaccgcagcaaggatcaggatttcatgcgcgaggcgctggcactggccgcgcaaggcgcactgctgggcgaggtgcctgtcggggcagtggtggtgcagaacggcgagatcatcggtcgtggttacaactgcccgatcagcggcagcgacccgagcgcgcatgccgaaatggtcgcgattcgtgacgccgccaaggcgctggacaattatcgcctgccgggcagcacgctctacgtgacgctggagccgtgcagcatgtgcgcggggctgatcgtgcactcacgggtggcgcgtgtggtctacggggcgctcgaacccaaggcgggcatcgtgcagagccaggggcagtttttcagtcaggcatttctcaatcaccgcgtactgttcgaaggcggggtgctgggcgaggagtgcgggacgatgctgagcgagtttttcagaatgcgccgggcagccaaggacgctgacaaaggccagggcaacgtttag

SEQ ID NO: 3707 - protein, 169 aa, Pseudomonas syringae pv. syringae B728a
MRQPQIIDRSKDQDFMREALALAAQGALLGEVPVGAVVVQNGEIIGRGYNCPISGSDPSAHAEMVAIRDAAKALDNYRLPGSTLYVTLEPCSMCAGLIVHSRVARVVYGALEPKAGIVQSQGQFFSQAFLNHRVLFEGGVLGEECGTMLSEFFRMRRAAKDADKGQGNV

SEQ ID NO: 3708 - DNA, 522 bp, Haemophilus influenzae 86-028NP
  CDS (1)..(522): transl_table=11
atggatgcagcaaaagtgcggtcagaatttgacgagaaaatgatgcgctacgcccttgagcttgccgataaagcggaagcgttaggtgagattcctgtgggggcggttttggttgatgacgctagaaatattattggagaaggttggaatctctccattgttcaaagcgatcctaccgcacatgctgaaattatcgctttgcgtaatggcgcgaaaaatattcaaaattatcgcctactgaatagcacgctttatgtgacattagagccttgcacaatgtgtgcaggggcaattttgcatagccgtattaaacgccttgtgttcggtgcatctgattataaaactggcgcgattggatcacgttttcatttttttgatgattacaagatgaatcatactttagagattacatctggcgtattggcagaagagtgtagtcaaaaattgagtacattttttcagaaaagacgcgaggagaaaaaaatagagaaagcattattaaaaagtctgagtgataattaa

SEQ ID NO: 3709 - protein, 173 aa, Haemophilus influenzae 86-028NP
MDAAKVRSEFDEKMMRYALELADKAEALGEIPVGAVLVDDARNIIGEGWNLSIVQSDPTAHAEIIALRNGAKNIQNYRLLNSTLYVTLEPCTMCAGAILHSRIKRLVFGASDYKTGAIGSRFHFFDDYKMNHTLEITSGVLAEECSQKLSTFFQKRREEKKIEKALLKSLSDN

SEQ ID NO: 3710 - DNA, 489 bp, Pseudomonas fluorescens Pf-5
  CDS (1)..(489): transl_table=11
atgcgccagatacgcccggcgccgatcatcgaccgcagccgcgaccaggacttcatgcgtgaagccctggccctggccgcgcagggcgctgccctgggcgaggtgccggttggcgcggtgctggtgctggatgggcaggttatcggccgtggctacaactgccccatcagcggcagcgatcccagcgcccacgccgagatggtggcgatccgcgaagcggcccaggcggtgagcaactatcgcctgcccggcagcaccctgtacgtgacccttgaaccttgcagcatgtgcgccgggctgatcgtccattcgcgcattgcccgggtggtgtacggcgcactggaacccaaggccggcattgtgcagagccaggggcagttcttcacccaagggtttctcaaccatcgagtgctgtacgagggcggggtgctggccgaggagtgcggcacggtgctgagcgaattcttcaaggcgcgtcgagcgcgctga

SEQ ID NO: 3711 - protein, 162 aa, Pseudomonas fluorescens Pf-5
MRQIRPAPIIDRSRDQDFMREALALAAQGAALGEVPVGAVLVLDGQVIGRGYNCPISGSDPSAHAEMVAIREAAQAVSNYRLPGSTLYVTLEPCSMCAGLIVHSRIARVVYGALEPKAGIVQSQGQFFTQGFLNHRVLYEGGVLAEECGTVLSEFFKARRAR

SEQ ID NO: 3712 - DNA, 588 bp, Psychrobacter arcticus 273-4
  CDS (1)..(588): transl_table=11
atgagacattttctaaatattaattcacagcctaaccagctaatagatagcccatttgtaaacccgttaataggtgagcagcttaaaacagctatattttggtcagttgaagatattaagtggatgacagaggcgctaaagcttgccaaacaaggcgctgagcgtgaggaggtgccagtaggagccgtattggttcataatcagcagattattggtcaaggttttaatgagccgatcgggcgttgtgatgcgacagctcatgctgaaatagttgccttaagagaggcttgtgcgcatttaaagaattatcgtttgccactacagacaactttatatgtcaccttagagccctgtaccatgtgtatcggggcgctgattcatgctcgagtggacagacttgtatattctacaaatgaaccaagagcagggatggttggcagtcaaatgaacttagctgcacagcctttttataatcatcatatgcaagtcgatacaggtttatgccgtgagcacagcagtcagatgttaaaggatttttttcgtgagcgtagaaaagcggcaaaagcgaattgcaagatgagcgattaa

SEQ ID NO: 3713 - protein, 195 aa, Psychrobacter arcticus 273-4
MRHFLNINSQPNQLIDSPFVNPLIGEQLKTAIFWSVEDIKWMTEALKLAKQGAEREEVPVGAVLVHNQQIIGQGFNEPIGRCDATAHAEIVALREACAHLKNYRLPLQTTLYVTLEPCTMCIGALIHARVDRLVYSTNEPRAGMVGSQMNLAAQPFYNHHMQVDTGLCREHSSQMLKDFFRERRKAAKANCKMSD

SEQ ID NO: 3714 - DNA, 549 bp, Colwellia psychrerythraea 34H
  CDS (1)..(549): transl_table=11
gtgacagagcaatcctcagtacactcaccattgacgcaaagtatagaagaccaagagcgacttgatttaacgtttatgcgaagggcctttgaactagcgcaacaagctgagcaacatgatgaaattcctgttggcgccgtggtagtgcatcaaggtaaaatcatcggtgaaggttttaaccaatcaatcatgcttaacgacccatcaagtcatgctgaaatgaatgccatcagacaggcaggagagtttcttaataactatcgcttgcttgactgcactttgtacgtaactctcgagccctgccctatgtgtgctggtctgttagtgcatagtcgaatcaatcgcttagtttatgcttgtagcgatctgaaaacaggtgccgcaggcagtgcttttaatttagtaaataacccacagttaaatcaccaattagaagtatgctcaaatatcctagaagaagagtgcagccagttgttatctgcattttttaaacgacgtagaaaagaaaaaaaactagccaaaaaagccgctaaagatagctcgctgtaa

SEQ ID NO: 3715 - protein, 182 aa, Colwellia psychrerythraea 34H
MTEQSSVHSPLTQSIEDQERLDLTFMRRAFELAQQAEQHDEIPVGAVVVHQGKIIGEGFNQSIMLNDPSSHAEMNAIRQAGEFLNNYRLLDCTLYVTLEPCPMCAGLLVHSRINRLVYACSDLKTGAAGSAFNLVNNPQLNHQLEVCSNILEEECSQLLSAFFKRRRKEKKLAKKAAKDSSL

SEQ ID NO: 3716 - DNA, 510 bp, Pseudomonas syringae pv. phaseolicola 1448A
  CDS (1)..(510): transl_table=11
atgcgtcagccgcaaatcatcgaccgcagcaaggatcaggacttcatgcgcgaggcactggcgctcgccgcgcaaggcgcattgctgggcgaagtgcccgtcggtgcagtcgtggtgcagaacggcgagatcattggtcgtggttacaattgcccgatcagcgcaagcgaccccagtgcgcatgccgaaatggtcgctattcgtgatgccgccagggcgctggacaattatcggctgccgggcagtacgctttacgtgacgctggaaccatgcagcatgtgcgccgggttgatcgtgcattcgcgggtggcgcgcgtggtttacggcgcgcttgagcccaaggcaggcatcgttcaaagccaggggcaattcttcagtcagggctttctcaatcaccgcgtgctgtttgaaggcggggtattgagcgaggaatgcggggcaatgctgagcgagtttttcagaatgcgccgggctgccaaggatgcagataaaaaccagggcggcgtctag

SEQ ID NO: 3717 - protein, 169 aa, Pseudomonas syringae pv. phaseolicola 1448A
MRQPQIIDRSKDQDFMREALALAAQGALLGEVPVGAVVVQNGEIIGRGYNCPISASDPSAHAEMVAIRDAARALDNYRLPGSTLYVTLEPCSMCAGLIVHSRVARVVYGALEPKAGIVQSQGQFFSQGFLNHRVLFEGGVLSEECGAMLSEFFRMRRAAKDADKNQGGV

SEQ ID NO: 3718 - DNA, 441 bp, Dechloromonas aromatica RCB
  CDS (1)..(441): transl_table=11
atgcgcgaggctatttcgctagcccgcgcagccgagtgcctcggcgaggtgccggttggtgctgtcgtcgtcctgaatggcgagattgtagggcgtggattcaattcgccgatcggtgaaagcgatccgacagctcacgccgaaattgcagcattgcgcgatgccgcgagggttttgggcaattaccgcctgccggggtgcgagttgttcgtgactctggagccctgtgccatgtgtgccggggcgatcatgcattcccggatcagccgtgtcatttacggagcgcgtgatccgaagacaggggtgcatgggagtgtcgtcgatctgttcggcgttgaacgcctgaatcatcacgccactgttgaaggcggggtgcttgcggaggagtgcagcacgttgttgtcgggcttcttcgccagtcgtcgcaaaaaatcgcaatga

SEQ ID NO: 3719 - protein, 146 aa, Dechloromonas aromatica RCB
MREAISLARAAECLGEVPVGAVVVLNGEIVGRGFNSPIGESDPTAHAEIAALRDAARVLGNYRLPGCELFVTLEPCAMCAGAIMHSRISRVIYGARDPKTGVHGSVVDLFGVERLNHHATVEGGVLAEECSTLLSGFFASRRKKSQ

SEQ ID NO: 3720 - DNA, 534 bp, Ralstonia eutropha JMP134
  CDS (1)..(534): transl_table=11
atgacggatacccgcaccgcggacgagatcgcgcgcgacgagcgctacctgcgcgccgccatggacgaggcccgtctggccgaggccgcgggcgaggtgccggtcggtgcggtggtggtgtggaacgacgccatcatcgcgcgcggccacaacctgccgatcaagtcgatggatccgtcagcccatgccgaaatgcaggcgctgcgcgccgcggcccaggtgctcggcaactaccgcatgccggagtgcgaactgtatgtgacgctggaaccttgcgcgatgtgcagcggcgcgatcctccatgcgcgcctgcgccatgtggtgttcggtgcgtcggacccgaagaccggcgccgccggtagcgtagtgaacctgttcgagcaggcacaactgaaccaccagaccaccattacgggcggagtgctcgcggacgagtgcgggcagatgctgaaggacttcttcggtgcccggcgccgcgcgcagaaggcggcgcaactcgctgcccggacgctgtccgatcccgaacaatcctga

SEQ ID NO: 3721 - protein, 177 aa, Ralstonia eutropha JMP134
MTDTRTADEIARDERYLRAAMDEARLAEAAGEVPVGAVVVWNDAIIARGHNLPIKSMDPSAHAEMQALRAAAQVLGNYRMPECELYVTLEPCAMCSGAILHARLRHVVFGASDPKTGAAGSVVNLFEQAQLNHQTTITGGVLADECGQMLKDFFGARRRAQKAAQLAARTLSDPEQS

SEQ ID NO: 3722 - DNA, 456 bp, Thiobacillus denitrificans ATCC 25259
  CDS (1)..(456): transl_table=11
atgcgcgcggcgctcgaactcgcggccgagggcgcagcggcaggcgaggtgccggtcggcgcgcttgtcgtgtgcggcggcgagatcgtcggacgcggctacaaccggccgatttcgagcttcgatccgacggcgcacgccgaggtgatggcgctgcgcgacgccgcagcgcggctgggcaactatcgactagtcggctgcacgctctacgtcacgatggaaccctgcgtcatgtgcgccggcgcgatcctgcatgcgcgcatcgcgcgcgtcgtctacggcgcgcgcgaatacaagaccggcgcgcacggcagcatcgtcgacgtcttcgccgagccgcggctcaacttccattgcgaggtcgagggcggggtgctggccgacgaatgcgcggcgacgatctcgggttttttcgaggcgcggcgattggagaagaaaaaggagacgacgcagtga

SEQ ID NO: 3723 - protein, 151 aa, Thiobacillus denitrificans ATCC 25259
MRAALELAAEGAAAGEVPVGALVVCGGEIVGRGYNRPISSFDPTAHAEVMALRDAAARLGNYRLVGCTLYVTMEPCVMCAGAILHARIARVVYGAREYKTGAHGSIVDVFAEPRLNFHCEVEGGVLADECAATISGFFEARRLEKKKETTQ

SEQ ID NO: 3724 - DNA, 498 bp, Pseudomonas fluorescens PfO-1
  CDS (1)..(498): transl_table=11
atgcgccagattcgccccgcggcgatcatcgaccgcagccgtgaccgcgacttcatgcgcgaggcgctggagttggcagcccaaggcgcggccctcggcgaagtgccggtgggcgcggtgctggtgcaggatggcgagatcattggccgtggtttcaactgcccgatcagcaccagtgatcccagcgcgcacgcagaaatggtcgcgatccgcgctgccgcgcaagcggtggataactatcgactgccgggcagtacgctctacgtgacgctcgagccgtgcagcatgtgcgccgggctgatcgtgcattcgcgggtttcgcgggtggtgttcggcgcgctggagcccaaggccgggattgtgcagagccaggggcagttcttcactcagggctttctcaaccatcgagtgttgtatgaaggtggggtgttggcggaggagtgtggggcggtgttgaccgagttcttcagggcgcggcgggcaaaacccgcagactga

SEQ ID NO: 3725 - protein, 165 aa, Pseudomonas fluorescens PfO-1
MRQIRPAAIIDRSRDRDFMREALELAAQGAALGEVPVGAVLVQDGEIIGRGFNCPISTSDPSAHAEMVAIRAAAQAVDNYRLPGSTLYVTLEPCSMCAGLIVHSRVSRVVFGALEPKAGIVQSQGQFFTQGFLNHRVLYEGGVLAEECGAVLTEFFRARRAKPAD

SEQ ID NO: 3726 - DNA, 462 bp, Carboxydothermus hydrogenoformans Z-2901
  CDS (1)..(462): transl_table=11
atggaccatgaaaagtttatggctgaagctttaaaggaagcagagaaagcggcgctccaaggggaagtcccggtgggcgccgttgtggtatataacggggaaatcattgggcgggggcacaatctccgggagaccttttctgaccctacggcccatgcggaaatagtagctttaaaagaagctgccagtaaacttaaaaactggcagttaaaggactgtaccctttatgttaccgtagaaccgtgtcctatgtgtgccggagcgatttatcaggccagaattaaaaccctggtatacggagctcctgaccttaaagcgggagcggtggatactttatttgatttagtgcgaaatcctcgcttaaaccaccgggtagaggtgatatccggggtacttgccgctgaggcgagtaaaataataacagattttttcagggaaaaaaggaacagaggaaaattttaa

SEQ ID NO: 3727 - protein, 153 aa, Carboxydothermus hydrogenoformans Z-2901
MDHEKFMAEALKEAEKAALQGEVPVGAVVVYNGEIIGRGHNLRETFSDPTAHAEIVALKEAASKLKNWQLKDCTLYVTVEPCPMCAGAIYQARIKTLVYGAPDLKAGAVDTLFDLVRNPRLNHRVEVISGVLAAEASKIITDFFREKRNRGKF

SEQ ID NO: 3728 - DNA, 480 bp, Burkholderia sp. 383
  CDS (1)..(480): transl_table=11
atgcgtcttgcgcaggctgccgccgaagaggcgcgcgcggccggcgaagtgccggtcggggcggtgctcgtgcgtggcgacgaagtgatcgcacgcggcttcaaccatccgatcggcgggcacgacccgtcggcccatgcggaaatggccgcgctgcgcatggccgcgcagcatctgcagaattaccggatgcccggctgcgagctgtacgtgacgctcgagccgtgcctgatgtgcgcgggcgcgatcatgcatgcacgcatcgcacgggtcgtctacggtgccgccgatccgaagacgggcgcgtgcggcagcgtgatcgacgcgttcgcgaatccgcaactgaaccaccataccgaagtgaccggcggcgtgctcgccgacgagtgcggcgccgcgctgaagtcgttcttcgccgagcgtcgtcgcgcgctgcgcgaagcgcggctcgcccgcgacgccgaatccggcgcgtcatag

SEQ ID NO: 3729 - protein, 159 aa, Burkholderia sp. 383
MRLAQAAAEEARAAGEVPVGAVLVRGDEVIARGFNHPIGGHDPSAHAEMAALRMAAQHLQNYRMPGCELYVTLEPCLMCAGAIMHARIARVVYGAADPKTGACGSVIDAFANPQLNHHTEVTGGVLADECGAALKSFFAERRRALREARLARDAESGAS

SEQ ID NO: 3730 - DNA, 516 bp, Geobacter metallireducens GS-15
  CDS (1)..(516): transl_table=11
atggttcgccgtaaagccgagggagtgcgggacgacagctactggatggggaaggccctgcgagaagcggaaaaggccgctgcccgggacgaggtccccattggtgctgtcgttgtcagaaatggcgcagtaatcggtcgtgggcacaacctgcgggaaaataagcaggacccctcggcccacgccgaaatgatagccatccgtcaggccgccaggcgactcgggtgctggcgccttacgggatgcgttctctatgtgacccttgagccgtgcctcatgtgcatgggggccatcatcctcgcccggttcgaccgggtggtcttcggctgccatgatcccaagggaggcgcggccggttccctctacgacctctccgatgaccgccggctcaatcaccgggttgaactcacttcccgggtgcgggaagaggaatgttccgcaatcctgagcggttttttcgccgatctccgcacacggaaaaagaaggcccgtcgcgcaccatcggccggtatctga

SEQ ID NO: 3731 - protein, 171 aa, Geobacter metallireducens GS-15
MVRRKAEGVRDDSYWMGKALREAEKAAARDEVPIGAVVVRNGAVIGRGHNLRENKQDPSAHAEMIAIRQAARRLGCWRLTGCVLYVTLEPCLMCMGAIILARFDRVVFGCHDPKGGAAGSLYDLSDDRRLNHRVELTSRVREEECSAILSGFFADLRTRKKKARRAPSAGI

SEQ ID NO: 3732 - DNA, 585 bp, Burkholderia thailandensis E264
  CDS (1)..(585): transl_table=11
gtgaggcccgccggcgcgcccgtgtccggtgacgatttcgacgacgaaccgcaatcgccgcctctgtccgccgccgccgagcgcgaccgccgctacatgcgcatcgcgctcgccgccgccgaggaggcgcgcgcggcgggcgaagtgccggtcggcgcggtgatcgtgcgcggcgacgaggtgattgcgcgcggcttcaaccacccgatcggcggccacgatccgtccgctcacgccgagatggccgcgctgcgcgctgccgcgcgcgcgctgcgcaattaccggatgcctggctgcgagctgtacgtgacgctcgagccgtgcctgatgtgctcgggcgcgatcatgcacgcgcggatcgcgcgcgtcgtgttcggcgcgcccgacccgaagacgggcgcatgcggcagcgtcgtcgacgcgttcgcggatgcgcgcctgaaccatcacacgacagtcgagggcggggtgctcgccgacgaatgcggcgcggcgctcaagtcgttcttcgcggagcggcgacaggcggttcgcgaggcgcgccgcgcgcagcaggtgcccgacgtgccgccgcgcgacgaatga

SEQ ID NO: 3733 - protein, 194 aa, Burkholderia thailandensis E264
MRPAGAPVSGDDFDDEPQSPPLSAAAERDRRYMRIALAAAEEARAAGEVPVGAVIVRGDEVIARGFNHPIGGHDPSAHAEMAALRAAARALRNYRMPGCELYVTLEPCLMCSGAIMHARIARVVFGAPDPKTGACGSVVDAFADARLNHHTTVEGGVLADECGAALKSFFAERRQAVREARRAQQVPDVPPRDE

SEQ ID NO: 3734 - DNA, 564 bp, Syntrophus aciditrophicus SB
  CDS (1)..(564): transl_table=11
gtggatacggaaaacggttctgcagagtcagacagaaatccgggtttcccatcaggggcatcggaaacggaaagagaccatgatgagcgatggatgcgccttgccctcgaagaagcccgcctggcggcgtcagagggagaggttccgatcggggcggtgattgtccgggaaaacgaggtgatcgccagaagccacaatatgccggttgaccgtcatgatcccacggcccatgcggagattctggccatccgggaagccgcggaaaaaatgaaaaattaccgcctgacgggaatgaccctctacgtgacgcttgaaccgtgcatcatgtgtgcgggggcgattcttcaggcccgcctgaaaaggctggtttatggaaccggcgacccaaagggcggtgcggtggattccctttaccggttgcttcaggacagcagactgaatcatttcgtggaggttacagggggcgttctgcaggcatcctgcgcggaaattttaagtggatttttccgggaaaagagggtaacatcccctctcttaaaatcagaaggacaggtaaagtcttga

SEQ ID NO: 3735 - protein, 187 aa, Syntrophus aciditrophicus SB
MDTENGSAESDRNPGFPSGASETERDHDERWMRLALEEARLAASEGEVPIGAVIVRENEVIARSHNMPVDRHDPTAHAEILAIREAAEKMKNYRLTGMTLYVTLEPCIMCAGAILQARLKRLVYGTGDPKGGAVDSLYRLLQDSRLNHFVEVTGGVLQASCAEILSGFFREKRVTSPLLKSEGQVKS

SEQ ID NO: 3736 - DNA, 531 bp, Frankia sp. CcI3
  CDS (1)..(531): transl_table=11
atgaccgatcccgacgagtacccccgggcgggcgctcccgcccggctgagcggtccgcccggaccggaccgcttccacgaggcgatggggctcgccctgcgcgaggcccgcctggccccggaccacgccgacgtcccggtgggtgccctggtggtgaccgaggacggcacggtgctcgggctcgggcacaacgagcgggaacgcggcgccgatcccaccgcccacgccgagatgatcgccctgcgggcggccgcgcgccggacgggttcctggcggctaccgggagccaccctcgtggtcacgctggagccctgcaccatgtgcgcgggggccctcgtgctcgcccgggtggaccgcctcgtctacggcgcggttgacgagaaggccggggcggtcggctcgctctgggacgtggtgcgggaccggcggctcaatcatcgacccgaagtggtcgccgggatccgcgccgacgagtgtggcgccctcctggcggagttcttcgccgcgcgccggcgcccggcggggcgctag

SEQ ID NO: 3737 - protein, 176 aa, Frankia sp. CcI3
MTDPDEYPRAGAPARLSGPPGPDRFHEAMGLALREARLAPDHADVPVGALVVTEDGTVLGLGHNERERGADPTAHAEMIALRAAARRTGSWRLPGATLVVTLEPCTMCAGALVLARVDRLVYGAVDEKAGAVGSLWDVVRDRRLNHRPEVVAGIRADECGALLAEFFAARRRPAGR

SEQ ID NO: 3738 - DNA, 447 bp, Desulfitobacterium hafniense Y51
  CDS (1)..(447): transl_table=11
atgaatcatcaggactatatgcgcttagctcttgaagaagctgaaattgcctttgcccagggagaagttcccatcggggcagtggtggtgcataagggagaaatcattgccagagctcataatgaaaaagagctgaggcaggaccctacagcccatgctgaagttttggctgtgcagcgggcaactcaagccttgggaatttggcgtctttctgaagccactctctatgtgactctggaaccttgcccgatgtgtgccggtagtttggttcaggcccgcttaaaaacccttgtttttggagcggctgatcttaaaggcggagcagtaggttccgtgaccaatgtactggatgtgaaccgctggaatcaccgtgtggaggttgtggcggggatattggaagaagagtgtgcccagattctgaaggatttttttcggaagctaaggtaa

SEQ ID NO: 3739 - protein, 148 aa, Desulfitobacterium hafniense Y51
MNHQDYMRLALEEAEIAFAQGEVPIGAVVVHKGEIIARAHNEKELRQDPTAHAEVLAVQRATQALGIWRLSEATLYVTLEPCPMCAGSLVQARLKTLVFGAADLKGGAVGSVTNVLDVNRWNHRVEVVAGILEEECAQILKDFFRKLR

SEQ ID NO: 3740 - DNA, 531 bp, Saccharophagus degradans 2-40
  CDS (1)..(531): transl_table=11
gtgaatgacgttatacacggcgatgagcattggatgcgcgaagcgctaaaacttgccgagctggcagcggcagaacacgaagtacccgttggcgcggtagtggtgcgcgataataaaatattgggcagtggctttaatacgcctatttctgggtgcgacccaaccgcacatgccgaaataactgcgcttaggcaagcggctaaaaacgaacacaattacaggctgccagatgcaacgctttatgtaactatcgagccgtgcactatgtgcttaggtgcaattatgcatgcgcgagtagcgcgtgtggtatacggggcaaccgagccgaaagcgggtgttatttacagtaacccggtgtggcagcagggtggtttttttaatcatcaagttgagtggtgtggcggtgtacttgccaatgaagcaacggcgttaattcaacaattttttaagcagcgtagagaagctaaaaagcagctaaagcgcttggcaaacggtgatgagaaaaacgttagtgaattgcataaagaatag

SEQ ID NO: 3741 - protein, 176 aa, Saccharophagus degradans 2-40
MNDVIHGDEHWMREALKLAELAAAEHEVPVGAVVVRDNKILGSGFNTPISGCDPTAHAEITALRQAAKNEHNYRLPDATLYVTIEPCTMCLGAIMHARVARVVYGATEPKAGVIYSNPVWQQGGFFNHQVEWCGGVLANEATALIQQFFKQRREAKKQLKRLANGDEKNVSELHKE

SEQ ID NO: 3742 - DNA, 507 bp, Methylobacillus flagellatus KT
  CDS (1)..(507): transl_table=11
atgccagcatctcaagaagaaaacaccgccgctgacgaagatttcatgcgcattgccctgcagctggcacaggaggccgctcttgcgggcgaagtacccgtgggtgctgtcgtggtgaaagacggggtggtgattggccgcggcagcaatgcgccgatcgcataccacgaccccagcgcacatgccgaaatacgtgccatgcgcgatgccgcggccaggctgggcaactaccgtctgaccggctgcgcgttgtatgtcacgctggaaccctgcgccatgtgtgcaggcgccatccagcatgcccgcattgcacgcctggtatttggcgcccatgattacaagaccggcgcttgtggaagcgtcatcgacctcatggccgaagagagactcaaccaccataccctggtaaaaagcggcgtattggtgcaggaatgcagcgccacccttacgcaattctttgccgaacggcggcggcagcaaaaggtagaaaagtctggcagcaattaa

SEQ ID NO: 3743 - protein, 168 aa, Methylobacillus flagellatus KT
MPASQEENTAADEDFMRIALQLAQEAALAGEVPVGAVVVKDGVVIGRGSNAPIAYHDPSAHAEIRAMRDAAARLGNYRLTGCALYVTLEPCAMCAGAIQHARIARLVFGAHDYKTGACGSVIDLMAEERLNHHTLVKSGVLVQECSATLTQFFAERRRQQKVEKSGSN

SEQ ID NO: 3744 - DNA, 591 bp, Burkholderia xenovorans LB400
  CDS (1)..(591): transl_table=11
atgatggaggcagcggccgggtccgtgcccggcgattcgcccgcatcatccgcggtcttggagcgcgatcgccgcttcatggcgctcgcacaagctgccgccgaagaggcgcgcgccatcggcgaagtgcccgtcggcgcggtgctcgtgcgaggcgacgaagtcatcgccaaaggtttcaatcacccaatcggggcgcacgacccgtctgcgcatgcggaaatggtcgcgttgcgcgccgcggcgcaggctgtcgaaaactaccgtttgccgggctgcgaactttacgtgacgcttgagccgtgcctgatgtgcgccggcgcgatcatgcacgcgcgcatcgcccgtgtcgtattcggggcgcgcgatccgaaaaccggtgcgtgtggcagtgtcgtcgatgcgttcgcgaatccgcaactgaatcatcacaccacggtgaccggcggcgtgctcgaaagcgaatgcggcgcggcgctcaaagcgttctttgccgaacggcggcgcgcaagccgcgaagcgcgcgtgtcggcacgtgccgaagcgggtgccgacgcaggtgccgacgcgggcccggcgaaagcgccctga

SEQ ID NO: 3745 - protein, 196 aa, Burkholderia xenovorans LB400
MMEAAAGSVPGDSPASSAVLERDRRFMALAQAAAEEARAIGEVPVGAVLVRGDEVIAKGFNHPIGAHDPSAHAEMVALRAAAQAVENYRLPGCELYVTLEPCLMCAGAIMHARIARVVFGARDPKTGACGSVVDAFANPQLNHHTTVTGGVLESECGAALKAFFAERRRASREARVSARAEAGADAGADAGPAKAP

SEQ ID NO: 3746 - DNA, 570 bp, Ralstonia metallidurans CH34
  CDS (1)..(570): transl_table=11
atggcagacgtccccgtatttgccgaccccgcggagcgcgaccgcttctacatggccgccgcgctcgacgaggcacggctggccgaagcggccggcgaggtgccggtgggcgccgtggtggtgtgggacgacaagatcatcgcgcgcggccacaatttgccgatccgttcggtcgatccgtccgctcatgcggagatgcaggcgctgcgcgcggcagccaaggtgctgggcaactaccggatgcccgagtgcgagatttacgtgacgcttgagccgtgcccgatgtgcagtggggcgattctccatgcgcggctgcgacacgtggtatttggcgcgaccgaccccaagacgggggcggccggcagcgtggtcgatctgttcgcgcaggccacgctcaatcaccagaccacactcacgcgaggcgtgatggctgatgagtgtggccagttgctgcgcgactttttcggggcgcgccgcagggcgcagaaagcggcaagagccttgcaggtctcgccagtggacgcagattcggggaaaattcaggcttcagacccgaattccgaaacatga

SEQ ID NO: 3747 - protein, 189 aa, Ralstonia metallidurans CH34
MADVPVFADPAERDRFYMAAALDEARLAEAAGEVPVGAVVVWDDKIIARGHNLPIRSVDPSAHAEMQALRAAAKVLGNYRMPECEIYVTLEPCPMCSGAILHARLRHVVFGATDPKTGAAGSVVDLFAQATLNHQTTLTRGVMADECGQLLRDFFGARRRAQKAARALQVSPVDADSGKIQASDPNSET

SEQ ID NO: 3748 - DNA, 459 bp, Acidobacteria bacterium Ellin345
  CDS (1)..(459): transl_table=11
atgtccgacgaactcttcatggaagaagcgctgcgcgaggccgcccgcgcgcaagccagcggtgaagttccgatcggcgccgttgtcgtgtaccaggacaagatcataggtcgcggttggaaccgtccggcatttgaatgcgacccaacagcacacgccgaaatcatcgccatccgtgaggccggacgcgaactcggcaactatcgcctcaccgattgcgaactgttcgtcacgctcgagccctgtgcgatgtgtgccggcgcgatcactcacgcgcgcatccgccgtctcatctatgcagccgacgatcccaaagctggcgcggtaaagtcagcgctgcaagttctgaaccatccggcgttgaaccatcaggtggaaattacgagtggagtgctggcagggagggccatggagatgctgcaggccttcttccgagacaagcgcgcacgccagacctga

SEQ ID NO: 3749 - protein, 152 aa, Acidobacteria bacterium Ellin345
MSDELFMEEALREAARAQASGEVPIGAVVVYQDKIIGRGWNRPAFECDPTAHAEIIAIREAGRELGNYRLTDCELFVTLEPCAMCAGAITHARIRRLIYAADDPKAGAVKSALQVLNHPALNHQVEITSGVLAGRAMEMLQAFFRDKRARQT

SEQ ID NO: 3750 - DNA, 465 bp, Myxococcus xanthus DK 1622
  CDS (1)..(465): transl_table=11
atgagtgacgaagctttcatgcagcaggcgctatcgctcgcgcgggaagcagcggaactcggagaggtccccgtaggtgcggtggcggtgctcaacggtgaagtcgttggcgctggattcaatcgccgcgaagtggaccgcaatccgctcgctcacgcagagatgttggcaatggacgccgcagcccggaagatcggtgcctggcggctctcgggcgtcaccctgtatgtgacacttgagccgtgtgccatgtgcgccggaggtctggtgcagtctcgcgtgacacgactcgttttcggtgccttcgatccgaaagcgggtgcggtgggttcgctgtacaacctggtcgaagagcctcgacacaatcaccggctccaagtcacgagtggtatcctggcggacgagagccgcctgcttttgaagacgtttttcgggcgcttgcgtgcgaagaaacgtgacaattga

SEQ ID NO: 3751 - protein, 154 aa, Myxococcus xanthus DK 1622
MSDEAFMQQALSLAREAAELGEVPVGAVAVLNGEVVGAGFNRREVDRNPLAHAEMLAMDAAARKIGAWRLSGVTLYVTLEPCAMCAGGLVQSRVTRLVFGAFDPKAGAVGSLYNLVEEPRHNHRLQVTSGILADESRLLLKTFFGRLRAKKRDN

SEQ ID NO: 3752 - DNA, 570 bp, Actinobacillus pleuropneumoniae serovar 1 str. 4074
  CDS (1)..(570)
ttgctattagaacaagcggttagcttttttctcttttttgcaattatgtttatcaaacctcaaatcacgcaatgttctcttaccatttcggaacaagatatccattttatgcggtatgcgttggaattagcggatcgtgccgaagcgataggtgaaattccggttggtgcggtattggttgatcaagaaggcaacattatcggcgaaggctggaatcaagtgattcaattgtccgatcctagtgcgcatgcggaaatgcttgcgatacgtcaagcgggcaaagtacaacgcaattatcgcttattagactgtacgctttatgtcactttagaaccttgtacaatgtgtgccggtgcgattttacatagccgcttacgccgtttagtgtttggcgcaagcgattataaaaccggagctatcggctctagatttcatctgtttgaagattataaaatgaatcactttcttgaaattcgaggcggtgtgttagcagaagaatgtagccaaaaaatcagtcgattttttcaacgccgtcgccaagaacaaaaacggcagaagcaagcggtctaa

SEQ ID NO: 3753 - protein, 189 aa, Actinobacillus pleuropneumoniae serovar 1 str. 4074
MLLEQAVSFFLFFAIMFIKPQITQCSLTISEQDIHFMRYALELADRAEAIGEIPVGAVLVDQEGNIIGEGWNQVIQLSDPSAHAEMLAIRQAGKVQRNYRLLDCTLYVTLEPCTMCAGAILHSRLRRLVFGASDYKTGAIGSRFHLFEDYKMNHFLEIRGGVLAEECSQKISRFFQRRRQEQKRQKQAV

SEQ ID NO: 3754 - DNA, 618 bp, Rubrivivax gelatinosus PM1
  CDS (1)..(618)
atgagcgattccgccgaacaggcgcgcaaggacgaggccgcgatgcggctcgcgctcgaccaggcgcagaacgcctggctggtgggcgaggtgccggtcggtgcggtgatcgtgcgagaggtcgacggtgtgcaccaggtcgtggcgaccggctacaaccgcccgatcaccacccacgacccgaccgcgcacgccgagatcgtcgcgctgcgccacgccgcgcagctgctcggcaattaccgcctgccggactgcgagctgtacgtgacgctggagccctgcgcgatgtgcgcgatggcgctggtgcacgcgcgcttcaagcgcgtggtgtacgccgccgccgaccccaagaccggcgcggccggttcggtgatcgacctgttcgcgcagcggcagctgaaccaccacaccgcggtgcagggcggcgtgctggccgacacctgcggccaattgctgcgcgagttcttcgccgagcggcgtgcgcaggcgcgccgcgaacgcaacgagtcgtccgccgctccggcagcgccggccgcgggcgcccctgaaaccgactacaacatcgtcgaggtgatcgagatgcaagacacgatgcctggcgacctgacggacctttga

SEQ ID NO: 3755 - protein, 205 aa, Rubrivivax gelatinosus PM1
MSDSAEQARKDEAAMRLALDQAQNAWLVGEVPVGAVIVREVDGVHQVVATGYNRPITTHDPTAHAEIVALRHAAQLLGNYRLPDCELYVTLEPCAMCAMALVHARFKRVVYAAADPKTGAAGSVIDLFAQRQLNHHTAVQGGVLADTCGQLLREFFAERRAQARRERNESSAAPAAPAAGAPETDYNIVEVIEMQDTMPGDLTDL

SEQ ID NO: 3756 - DNA, 477 bp, Haemophilus somnus 2336
  CDS (1)..(477)
atgatgcgttatgccttatctctagcggataaggcggaggcattgggagaaattcctgtcggggcggttttagtggataaacaaggcgatattcttgcagaaggatggaacctatccattattcacaacgatcctaccgcacatgcagagattattgcattacgccaagccggacaaaaattacaaaattatcgtttacttgacacaaccctctatgtcacgctggagccttgtacgatgtgtgccggtgccattttacacagccgaatcgggcgtttagtgttcggtgcttatgactataaaacaggtgcggtcggctcacgctttcatttttttaatgattacaaaatgaaccatatgctggaaattacagggggcgtgttgcaagaagaatgtagccaaaaaataagtacattttttcaaaaacgtagaaaacaaaaaaagcatttaaagcccaactttaaacctttcctttaa

SEQ ID NO: 3757 - protein, 158 aa, Haemophilus somnus 2336
MMRYALSLADKAEALGEIPVGAVLVDKQGDILAEGWNLSIIHNDPTAHAEIIALRQAGQKLQNYRLLDTTLYVTLEPCTMCAGAILHSRIGRLVFGAYDYKTGAVGSRFHFFNDYKMNHMLEITGGVLQEECSQKISTFFQKRRKQKKHLKPNFKPFL

SEQ ID NO: 3758 - DNA, 594 bp, Burkholderia vietnamiensis G4
  CDS (1)..(594): transl_table=11
gtgagcgcagacgcgctgcacgacgcggcccccgaatccgtcggcgctgccgattcccccgtatccgagcccacgatcgagcccgcgcccgcgtctgcgcgcgacctgcatttcatgcggctcgcgcaggccgcggccgaagaggcgcgcgccgcgggcgaagtgccggtcggcgcggtgctcgtgcgcggcgacgaagtgatcgcacgcggcttcaaccatccgatcggcgggcacgacccgtcggcccacgcggaaatggccgcgctgcggatggcggcccagcatctgcagaattaccggatgcccggctgcgagttgtacgtgacgctcgagccttgtctgatgtgcgcgggcgcgatcatgcacgcgcgcatcgcacgcgtggtctacggcgcggccgaccccaagacgggcgcctgcggcagcgtgatcgacgcattcgcgaatccccagctgaaccaccacaccgaagtgaccggcggcgtgctcgccgacgaatgcggcgccgcgctgaagtcgttcttcgcggagcgccgccgcgcggtgcgcgaagcgcggctcgcccgcgacgccgaatcgggcgcggcatga

SEQ ID NO: 3759 - protein, 197 aa, Burkholderia vietnamiensis G4
MSADALHDAAPESVGAADSPVSEPTIEPAPASARDLHFMRLAQAAAEEARAAGEVPVGAVLVRGDEVIARGFNHPIGGHDPSAHAEMAALRMAAQHLQNYRMPGCELYVTLEPCLMCAGAIMHARIARVVYGAADPKTGACGSVIDAFANPQLNHHTEVTGGVLADECGAALKSFFAERRRAVREARLARDAESGAA

SEQ ID NO: 3760 - DNA, 486 bp, Clostridium thermocellum ATCC 27405
  CDS (1)..(486): transl_table=11
ttggaatttgaagcagggtcacatcattggtttatgagagaggccctgaaagaggcctacaaggcatatggcaagaacgagacgcccataggggcggtgatggttaaggatggttcaataattgccaggggacataatcaaaaggaacttacgaatgaccccaccaatcatgctgagatggctgtaatcagggaagcatgtgcaaaactcggcacgtggagacttaacgactgtgatttgtatgttacattggagccttgcacaatgtgtgccggtgcaattattcaggcccgggttggaaggctttttataggctctcttgatcctaaagcaggagcggccggttcggtaatagatgtgctgaaggttgatgcttttaaccatagggttgaagtgacatatggaatattgcaggaagaatgttctgagattttgaaaaattttttcaaggaacttagaaaaagaaagtcaaatcggaagatatga

SEQ ID NO: 3761 - protein, 161 aa, Clostridium thermocellum ATCC 27405
MEFEAGSHHWFMREALKEAYKAYGKNETPIGAVMVKDGSIIARGHNQKELTNDPTNHAEMAVIREACAKLGTWRLNDCDLYVTLEPCTMCAGAIIQARVGRLFIGSLDPKAGAAGSVIDVLKVDAFNHRVEVTYGILQEECSEILKNFFKELRKRKSNRKI

SEQ ID NO: 3762 - DNA, 498 bp, Crocosphaera watsonii WH 8501
  CDS (1)..(498): transl_table=11
atgaaagattattttctggagaattacgaaacccattgttattggatgaaacaagcattaaacttaggtcaagaagcagcaaaagcaggggatgttcccgtgggtgcagtcatcattgatagtcagggaaaattgattgctcaagggttaaattgtaaagaacaaaatcacgatcccactgctcatgctgaaataatagctattcgtcaagcaactcagaaattacattcttggtacttaaataaatgtaccttatatgttactttagaaccttgtattatgtgtgctggtgctatcattcattctcgtttaggattgttggtatatggtgtagatgatcctaagtctggaaccattcgttctgtccttaatttacccgatagtgctgcctctaatcaccgtttatcggtgttatctggtatcctagaagcagaatgtcgtcaacaattacaagactggtttaaacagaaaagaaacatgaatataaaagaacaataa

SEQ ID NO: 3763 - protein, 165 aa, Crocosphaera watsonii WH 8501
MKDYFLENYETHCYWMKQALNLGQEAAKAGDVPVGAVIIDSQGKLIAQGLNCKEQNHDPTAHAEIIAIRQATQKLHSWYLNKCTLYVTLEPCIMCAGAIIHSRLGLLVYGVDDPKSGTIRSVLNLPDSAASNHRLSVLSGILEAECRQQLQDWFKQKRNMNIKEQ

SEQ ID NO: 3764 - DNA, 450 bp, Solibacter usitatus Ellin6076
  CDS (1)..(450): transl_table=11
gtgactacagacgaacaattcatgtaccaggctctcgccctggcgcgcagcggcgccgctctgggcgaggttccggtgggcgctgtgatcgccctcgccggcgaagtgatcggccgcggcagcaatgccccggtggcgcagatggaccccaccgcgcacgccgagatcctggccatccgcgaggccgcctcgcggattgccaactaccgcctaaccggcgccacactgtactgcactctcgagccctgcgtgatgtgtgccggagccctggttgcggcacgcatcgaacgcgtcgtcttcggagctcgcgacctgcgcttcggcggcgtgcgcagcaaattccaactcgccgattccgacctactcaatcaccgtgtcgaaatcgtagagggcgtcctcgcggtcgagtgcgtccaactcctccgcgaattcttcgaaaaccgccgctag

SEQ ID NO: 3765 - protein, 149 aa, Solibacter usitatus Ellin6076
MTTDEQFMYQALALARSGAALGEVPVGAVIALAGEVIGRGSNAPVAQMDPTAHAEILAIREAASRIANYRLTGATLYCTLEPCVMCAGALVAARIERVVFGARDLRFGGVRSKFQLADSDLLNHRVEIVEGVLAVECVQLLREFFENRR

SEQ ID NO: 3766 - DNA, 612 bp, Xylella fastidiosa Dixon
  CDS (1)..(612): transl_table=11
atgcaaccaccgcacgccgcgacgccgaaggcatcgaacaccacgtcagcgaaacaacattggccgcctttagagccttcctacaccgccacagcgacaccacctgaaaccaacatgactgcccccccccccgtcttgccagaacacacccactggatgcgccatgcactgaccctggcccaccgtgcagcaacggaattcgatgaaatccccgtcggcgccgtgctgatcagccccgaagggaccctcctcggcgaaggatgcaactacaacatcaccagccacgaccccagcgcacacgctgaaatcatggcactgcgcgctgccggccaccaactgcgcaaccatcgcatgcctggctgcaccctctacgtcaccctggaaccctgcctgatgtgcgccatggccatcatccatgcacgcatcgcacacctcatctacgccgccgcagaccccaaaacaggcgcatgcggcagcacattcgacatcctcaacgacccacgccacaaccaccatgtccacgtctacggcggcctccttgccgaagaagcatcacgccgcctgacaaactacttccgtaccaaacgcggccaaccgccactgccacaataa

SEQ ID NO: 3767 - protein, 203 aa, Xylella fastidiosa Dixon
MQPPHAATPKASNTTSAKQHWPPLEPSYTATATPPETNMTAPPPVLPEHTHWMRHALTLAHRAATEFDEIPVGAVLISPEGTLLGEGCNYNITSHDPSAHAEIMALRAAGHQLRNHRMPGCTLYVTLEPCLMCAMAIIHARIAHLIYAAADPKTGACGSTFDILNDPRHNHHVHVYGGLLAEEASRRLTNYFRTKRGQPPLPQ

SEQ ID NO: 3768 - DNA, 612 bp, Xylella fastidiosa Ann-1
  CDS (1)..(612): transl_table=11
atgcaaccaccgcacgccgcgacgccgaaggcatcgaacaccacgttagcgaaacaacattggccgcctttagaacattcctacaacgccacagcgacaccacctgaaaccaacatgactgcccccccccccgtcttgccagaacacacccactggatgcgccatgcactgaccctggcccaccgtgcagcaacagaattcgatgaaatccccgtcggcgctgtactaatcagccccgaagggaccctcctcggcgaaggatgcaactacaacatcaccagccacgaccccagcgcacacgccgaaatcatggcactgcgcgctgccggccaccaactgcgcaaccatcgcatgcctggctgcaccctctacgtcaccctggaaccttgcctgatgtgcgccatggccatcatccatgcacgcatcgcacacctcatctacgccgctacagaccccaaaacaggcgcctgcggcagcacattcgacatcctcaacgacccacgccacaaccaccatgtccacgtctacggcggcctccttgccgaagaagcctcacgccgcctgacaaactacttccgtaccaaacgcggccaaccgccactgccacaataa

SEQ ID NO: 3769 - protein, 203 aa, Xylella fastidiosa Ann-1
MQPPHAATPKASNTTLAKQHWPPLEHSYNATATPPETNMTAPPPVLPEHTHWMRHALTLAHRAATEFDEIPVGAVLISPEGTLLGEGCNYNITSHDPSAHAEIMALRAAGHQLRNHRMPGCTLYVTLEPCLMCAMAIIHARIAHLIYAATDPKTGACGSTFDILNDPRHNHHVHVYGGLLAEEASRRLTNYFRTKRGQPPLPQ

SEQ ID NO: 3770 - DNA, 510 bp, Vibrio sp. Ex25
  CDS (1)..(510)
atgcgcagagcgatggtgcttgctgagcaagccgaagctgaaggggaagtacctgtcggcgcagtgcttgtcaaagatggtgaaattatcgctgaggggtggaatcgctctattggtactaatgacgctaccgcacatgctgagattcaaacactgcgtaaagcaggccaaaagatagaaaattaccgccttctggatacgactttgtatgtaacacttgagccatgcccaatgtgtgcgggagccttattacatagccgcgttaagcgggtcgtttttggagcgccagatttaaaagcgggagcagcaggaacagtgcttaatttgtttgaaagccaagctgcttaccattacgccttggttgaaaaggggctactagaagatgagtgccgcactcagctacaagcgttttttaagcgtcgccgtaaggaaattaaagcgaagaaacaagcacaaaaagcattagaaaatggagagagtggacaaaattatggaaatagtgagagttag

SEQ ID NO: 3771 - protein, 169 aa, Vibrio sp. Ex25
MRRAMVLAEQAEAEGEVPVGAVLVKDGEIIAEGWNRSIGTNDATAHAEIQTLRKAGQKIENYRLLDTTLYVTLEPCPMCAGALLHSRVKRVVFGAPDLKAGAAGTVLNLFESQAAYHYALVEKGLLEDECRTQLQAFFKRRRKEIKAKKQAQKALENGESGQNYGNSES

SEQ ID NO: 3772 - DNA, 669 bp, Shewanella sp. ANA-3
  CDS (1)..(669): transl_table=11
gtggagcagacaaaactgaatccaaaaaccttgcatgcgaagacgcttagctccgatgaacttggctctgatgaacttggctctgatgaagctagtggtaatgtgctaattggcgagcaaccttgtctcaatcaagcgagtctcaatcaagcggatattgaacaagctcgagtcgatgaacattggatgcgtgtcgcgatgagtatggctgaaaaggccgaagcagcgggtgaagtaccagtgggggcggttttagtcaaaggtggtcagcaaatcgcggccggatataacttgtctatcagtgagcacgacccctgcgcccatgctgaaattcagtgcttgcgagcagcggggcaaacgattgaaaactatcgactcctcgataccactctttacgtaactcttgagccttgtgcgatgtgcgccggtgccatggtgcatagccggattgcccgcgtggtatttggggcgaaagatgagaagacgggcgccgcaggaaccgtgcttaatctcttgcagcatccagcctttaatcatcaagttgaggtcacatctggggtgttagcgcaggactgtgctgaccaattgagccgcttttttaaacgtcgcagggaggaaaagaaggctttaaaacaggctcaaaaggcgcagcaggggacgctatcctaa

SEQ ID NO: 3773 - protein, 222 aa, Shewanella sp. ANA-3
MEQTKLNPKTLHAKTLSSDELGSDELGSDEASGNVLIGEQPCLNQASLNQADIEQARVDEHWMRVAMSMAEKAEAAGEVPVGAVLVKGGQQIAAGYNLSISEHDPCAHAEIQCLRAAGQTIENYRLLDTTLYVTLEPCAMCAGAMVHSRIARVVFGAKDEKTGAAGTVLNLLQHPAFNHQVEVTSGVLAQDCADQLSRFFKRRREEKKALKQAQKAQQGTLS

SEQ ID NO: 3774 - DNA, 669 bp, Shewanella sp. MR-7
  CDS (1)..(669): transl_table=11
gtggagcagacaaaactgaacctcaaaatcctgcatgcgaagacgctcagctctgatgaacttggcgctgatgaacttggttgtgatgaagctagtggttatgtgcttgttggcgagcaaccttgtctcaatcaagcaagtctcaatcaagcggatgttgaacaagctcgagtcgatgaacattggatgcgtgtcgcgatggccatggcggaaaaggccgaggcggcgggtgaagtaccagtgggggcggttttagtcaaagagggtcagcaaatcgcggctggatataacttgtctatcagtgagcacgacccttgcgcccatgctgaaattcagtgtttgcgagcggcggggcaaacgattgaaaactatcgactcctcgataccactctttacgttactcttgagccttgtgcgatgtgcgccggagctatggtgcatagccggattgcccgcgtggtatttggggcaaaggatgagaagacgggcgccgcaggaaccgtgcttaacctcttgcagcatccagcctttaatcatcaagttgaggtggcgtctggggtgttagcgcaggactgtgctgaccaattgagccgcttttttaaacgtcgcagggaggaaaagaaggctttaaaacaggctcaaaaggcgcagcaggggacgctatcctaa

SEQ ID NO: 3775 - protein, 222 aa, Shewanella sp. MR-7
MEQTKLNLKILHAKTLSSDELGADELGCDEASGYVLVGEQPCLNQASLNQADVEQARVDEHWMRVAMAMAEKAEAAGEVPVGAVLVKEGQQIAAGYNLSISEHDPCAHAEIQCLRAAGQTIENYRLLDTTLYVTLEPCAMCAGAMVHSRIARVVFGAKDEKTGAAGTVLNLLQHPAFNHQVEVASGVLAQDCADQLSRFFKRRREEKKALKQAQKAQQGTLS

SEQ ID NO: 3776 - DNA, 495 bp, Alkalilimnicola ehrlichei MLHE-1
  CDS (1)..(495): transl_table=11
ttggtcgggaccgactgcggcgcggttgtctggcaacccgaggacatccgctggatgcggcgggcgctggccctggccgatcaggccgaggcggccggcgaggtgccggtcggggccgtgctggtgctggacgaccgggaggtggccgtcggcagcaaccagcccatcaccgcccgggaccccacggcgcatgccgaggtggtggccctgcgccgggccggcgaggtgctgggggcttaccggctgtccggtaccacgctttacgtaaccctggagccctgcaccatgtgcatcggggctattatccatgcgcgggtaaagcgggtggtcttcgcggccagtgaccccaagaccggtgcctgcggttcggtctttgcgctggccgatgcgccggagcataaccatcacccggaggtggtcggcggcttgctcgccaccgaggccggtgatcgtctgcgacggtttttccgggcccggcgccgggcccgccgttag

SEQ ID NO: 3777 - protein, 164 aa, Alkalilimnicola ehrlichei MLHE-1
MVGTDCGAVVWQPEDIRWMRRALALADQAEAAGEVPVGAVLVLDDREVAVGSNQPITARDPTAHAEVVALRRAGEVLGAYRLSGTTLYVTLEPCTMCIGAIIHARVKRVVFAASDPKTGACGSVFALADAPEHNHHPEVVGGLLATEAGDRLRRFFRARRRARR

SEQ ID NO: 3778 - DNA, 759 bp, Shewanella sp. MR-4
  CDS (1)..(759): transl_table=11
gtggagcagacaaaactgaacccaaaaaccttgcatgcgaagacgctcagctctgatgaacttggcgctgatgaacttggcgctgatgaacttggctctgttgaacttggctctgttgaacttggctctgttgaacttggctctgttgaacttggcgctgatgaacttggttgtgatgaagctagtggtaatgtgttaattggcgagcaaccttgtctcaatcaagcgagtctcaatcaagtggatgttgaacaacctcgagtcgatgaacattggatgcgtgtcgcaatggccatggctgaaaaggctgaggctgcgggtgaagtacctgtgggggcggttttagtcaaagagggtcagcaaatcgccactggatacaacttgtctatcagtgagcacgacccgtgcgcccatgctgaaattcagtgtttgcgagcagcgggacagacgattgaaaactatcgactcctcgataccactctttacgttaccctcgagccttgtgcaatgtgcgccggtgctatggtgcatagccggattgcccgcgtggtatttggggcaaaggatgagaagacgggcgctgcaggaaccgtgcttaacctcttgcagcatccagcctttaatcatcaagttgagattacatctggggtgttagcgcaggactgtgctgaccaattgagccgcttttttaaacgtcgcagggaggaaaagaaggctttaaaacaggctcaaaaggcgcagcaggggacgctatcctaa

SEQ ID NO: 3779 - protein, 252 aa, Shewanella sp. MR-4
MEQTKLNPKTLHAKTLSSDELGADELGADELGSVELGSVELGSVELGSVELGADELGCDEASGNVLIGEQPCLNQASLNQVDVEQPRVDEHWMRVAMAMAEKAEAAGEVPVGAVLVKEGQQIATGYNLSISEHDPCAHAEIQCLRAAGQTIENYRLLDTTLYVTLEPCAMCAGAMVHSRIARVVFGAKDEKTGAAGTVLNLLQHPAFNHQVEITSGVLAQDCADQLSRFFKRRREEKKALKQAQKAQQGTLS

SEQ ID NO: 3780 - DNA, 498 bp, Pseudoalteromonas tunicata D2
  CDS (1)..(498): transl_table=11
atgaaaagtgatgagtattggatgcaacaggcattgttgcgagcagataaagctgaagctgagggcgaaatcccagtaggtgccattgtagtgtatcaagatgaaattatcgctgaaggttggaatcgctcgattattagtcatgatccgtcagcccatgctgaaatgttggctattagaaatgctggtatcgcattacaaaattatcgcatgattgattgtactttgtacgtcacactcgaaccatgtgcaatgtgtgctggagccttggtgcacagccgtatgaaacgagtggtatatggtgcagacgatttaaaaacaggtgcagtaaaatcggtgatgaatatcgtacagcattcgcaatttaatcatcagctcgaagtaactgaaggcgtattagcacaagagtgtgggttacgcttatctgcttttttcaagcgcagaagacaagaaatcaaagcgttgaaacaagcaaataaactaaaagaacaagaatag

SEQ ID NO: 3781 - protein, 165 aa, Pseudoalteromonas tunicata D2
MKSDEYWMQQALLRADKAEAEGEIPVGAIVVYQDEIIAEGWNRSIISHDPSAHAEMLAIRNAGIALQNYRMIDCTLYVTLEPCAMCAGALVHSRMKRVVYGADDLKTGAVKSVMNIVQHSQFNHQLEVTEGVLAQECGLRLSAFFKRRRQEIKALKQANKLKEQE

SEQ ID NO: 3782 - DNA, 528 bp, Photobacterium sp. SKA34
  CDS (1)..(528): transl_table=11
atgatgacgatgcaagtagaacaaaacgacgaacactttatgcgccgtgcaatagagctcgcagctaaagcagaggaagaaggtgaagtgccagttggcgccgttgttgtttataacggtagagtggtgggtgaaggctggaaccgatcaattggtcaacatgatgcaacggcacatgcggaaatcatggcgttgcgacaagcgggtaaagtgctagaaaattaccgtttaattgatactacattatatgtcactttagagccttgccctatgtgtgcaggagcaatggtgcactgtcgtgttggaaaggtcgtttacggtgcagatgatctaaaaactggtgcggctggaagtacgatgaatttgcttagctatgatggcgtcaatcatcatgtagagcaaacatctggcgtattagtcgaggaatgtcgtgctcagctacaagctttttttaaacgccgacgagcagaaaaaaaagccgcaaagttattagctaaacaacagatggctaatgatccgttgctatag

SEQ ID NO: 3783 - protein, 175 aa, Photobacterium sp. SKA34
MMTMQVEQNDEHFMRRAIELAAKAEEEGEVPVGAVVVYNGRVVGEGWNRSIGQHDATAHAEIMALRQAGKVLENYRLIDTTLYVTLEPCPMCAGAMVHCRVGKVVYGADDLKTGAAGSTMNLLSYDGVNHHVEQTSGVLVEECRAQLQAFFKRRRAEKKAAKLLAKQQMANDPLL

SEQ ID NO: 3784 - DNA, 507 bp, Oceanospirillum sp. MED92
  CDS (1)..(507): transl_table=11
ttggataccagtaagacagatctgcattggatggagcgggcactagagctggccgatcgagcggagcaactgaatgaagtgccagtcggtgcgcttgtcgtgcttgatggtgaagttgtaggagaggggtggaatcatcctattagtggtaatgatcctactgcccatgcggagatgatggcgttgcgcgctgcagcccaaaaagtaggtaattatcgactggttggggctgagttatttgtcactattgagccttgcactatgtgttctggggcgatagtgcatgcacgaattaagcgggttatttatggtgcgactgaagctaaatcaggggctgtagatagtaattgtcagttgttttcgcagccctggattaaccatgatgtcgaaataacacggggtgttttggcggaaaggtgtagcaagaaaatcagtgctttcttccagcgtcgccgtgatgaaaaaaaagcagcgaaacgtgcggcaaagagtctggaatcaaattaa

SEQ ID NO: 3785 - protein, 168 aa, Oceanospirillum sp. MED92
MDTSKTDLHWMERALELADRAEQLNEVPVGALVVLDGEVVGEGWNHPISGNDPTAHAEMMALRAAAQKVGNYRLVGAELFVTIEPCTMCSGAIVHARIKRVIYGATEAKSGAVDSNCQLFSQPWINHDVEITRGVLAERCSKKISAFFQRRRDEKKAAKRAAKSLESN

SEQ ID NO: 3786 - DNA, 483 bp, marine gamma proteobacterium HTCC2207
  CDS (1)..(483): transl_table=11
gtgtctttagatgaagagtttatgggtcgtgcgatggagcttgcgcatcaggctgctgcagtgggagaagtcccagttggcgcgctggtggttaaagagggtcgagtgattggtgagggttacaaccaacctatcaccagctgcgatcccaccggtcacgctgaaattattgctatgcgcaatgccgcacaaaccctcggcaactatcgtctcagtggctgtgatctctatgtcactattgaaccctgcactatgtgtgtcggcgccatggtccacgcccgtattggcaagattgtttttggtgccaaagagcctcgcgctggtgcgctggaaagccagctgcgactgatggatgaatctcattacaaccattcaatcgaatggcaggggggtgttttggctgagcagtgcggggcaattatgagcggcttttttcgcgctaagcgagcggcagagaaagccctgaaatcccaaagctcttga

SEQ ID NO: 3787 - protein, 160 aa, marine gamma proteobacterium HTCC2207
MSLDEEFMGRAMELAHQAAAVGEVPVGALVVKEGRVIGEGYNQPITSCDPTGHAEIIAMRNAAQTLGNYRLSGCDLYVTIEPCTMCVGAMVHARIGKIVFGAKEPRAGALESQLRLMDESHYNHSIEWQGGVLAEQCGAIMSGFFRAKRAAEKALKSQSS

SEQ ID NO: 3788 - DNA, 495 bp, Oceanobacter sp. RED65
  CDS (1)..(495): transl_table=11
ttgtctcaagaattgcaagatgaacactttatggcgctcgccatacagcaggcgaaaaaagcagatgctttaaatgaggtacctgtgggtgcggtcgtggtgttagatggtgaagttataggcgaaggctataatcaacccatttctggatgtgatccaaccgctcatgctgaagttatggcattgcgccaagccgcaaaaaacgtaagcaattatcgcctggtaaatgccgatctttatgtcaccattgagccctgcaccatgtgtgcaggtgccatcgttcatagccgaatccgtcgcttggtttatggagcaactgaacccaaagccggtgtgatagaaagccagcagacgattttaacgcagtcttattttaaccatcgagtggaagtagtatctggtattttgcttgatcagtgtactgatattgtgcaggcattctttagaaggcgtcgggcagaaaaaaaacaagctaaaaggacaaaaaacggatag

SEQ ID NO: 3789 - protein, 164 aa, Oceanobacter sp. RED65
MSQELQDEHFMALAIQQAKKADALNEVPVGAVVVLDGEVIGEGYNQPISGCDPTAHAEVMALRQAAKNVSNYRLVNADLYVTIEPCTMCAGAIVHSRIRRLVYGATEPKAGVIESQQTILTQSYFNHRVEVVSGILLDQCTDIVQAFFRRRRAEKKQAKRTKNG

SEQ ID NO: 3790 - DNA, 429 bp, Desulfitobacterium hafniense DCB-2
  CDS (1)..(429): transl_table=11
atgcgcttagctcttgaagaagctgaaattgcctttgcccagggagaagttcccatcggggcagtggtggtgcataagggagaaatcattgccagagctcataatgaaaaagagctgaggcaggaccctacagcccatgctgaagttttggctgtgcagcgggcaactcaagccttgggaatttggcgtctttctgaagccactctctatgtgactctggaaccttgcccgatgtgtgccggtagtttggttcaggcccgcttaaaaacccttgtttttggagcggctgatcttaaaggcggagcagtaggttccgtgaccaatgtactggatgtgaaccgctggaatcaccgtgtggaggttgtggcggggatattggaagaagagtgtgcccagattctgaaggatttttttcggaagctaaggtaa

SEQ ID NO: 3791 - protein, 142 aa, Desulfitobacterium hafniense DCB-2
MRLALEEAEIAFAQGEVPIGAVVVHKGEIIARAHNEKELRQDPTAHAEVLAVQRATQALGIWRLSEATLYVTLEPCPMCAGSLVQARLKTLVFGAADLKGGAVGSVTNVLDVNRWNHRVEVVAGILEEECAQILKDFFRKLR

SEQ ID NO: 3792 - DNA, 477 bp, Candidatus Kuenenia stuttgartiensis
  CDS (1)..(477): transl_table=11
atgggtatggaaagcgcaagcagtaatcatgagtattttatgcggcaagcgattaaagaagcggaaaaggctgcggatattaatgaagttccggtaggcgccgtaattgtatatgataaccggattattgcccgtgcgcataaccaaagggaaatgcttaaagacccgacagcccatgcggaaatgatagcgataacccaaggggcggagtatttgcaaaattggcgactaaccgggtctactatctatgtaactctggaaccctgcgtaatgtgtgccggtgccttggtgcagtcaaggattgataagcttgtgtatggggctgttgataaaaaagcgggcgcttgcgtgtctgtcatgaatcttgtccaaaatactaagttgaatcaccgtttggaagtaatacccgatatccttgctgatgaatgcagggatatattaaagagattttttttagagaattgccgcattaagtaa

SEQ ID NO: 3793 - protein, 158 aa, Candidatus Kuenenia stuttgartiensis
MGMESASSNHEYFMRQAIKEAEKAADINEVPVGAVIVYDNRIIARAHNQREMLKDPTAHAEMIAITQGAEYLQNWRLTGSTIYVTLEPCVMCAGALVQSRIDKLVYGAVDKKAGACVSVMNLVQNTKLNHRLEVIPDILADECRDILKRFFLENCRIK

SEQ ID NO: 3794 - DNA, 465 bp, Azoarcus evansii
  CDS (1)..(465): transl_table=11
atgaatgacgaagactacatgcgtgtcgcactggagcaggcgcgcgaggcggggagttgcgacgaggtgccggttggcgccgtcgtcgtgctcgatggcgagatcgtgggccgcggattcaatcagcccatcggtcggcacgatccgaccgcccacgcggaagtgatggccctgcgtgacgccgccgcccggctcggcaactaccggcttccgggttgcgagttgtacgtgacgttggaaccctgcgcgatgtgtagcggcgcgatcatgcactcgcgcattgcgcgcgtcgtgttcggtgcgcgtgacccgaagaccggtgtcgccggcagcgtcatcgacctcttcgccgaatcgcgcctgaaccatcacgcgaccatatcgggcggggtgctcgctgaggagtgcggcggcctcctgtcgagtttcttcgcggcgcggcgcggtcgcaccctcgtcgcctga

SEQ ID NO: 3795 - protein, 154 aa, Azoarcus evansii
MNDEDYMRVALEQAREAGSCDEVPVGAVVVLDGEIVGRGFNQPIGRHDPTAHAEVMALRDAAARLGNYRLPGCELYVTLEPCAMCSGAIMHSRIARVVFGARDPKTGVAGSVIDLFAESRLNHHATISGGVLAEECGGLLSSFFAARRGRTLVA

SEQ ID NO: 3796 - DNA, 522 bp, Haemophilus influenzae
  CDS (1)..(522): transl_table=11
atggatgcagcaaaagtgcggtcagaatttgacgagaaaatgatgcgctacgcccttgagcttgccgataaagcggaagcgttaggtgagattcctgtgggggcggtgctggtggatgacgctagaaatattattggagaaggttggaatctctccattgttcaaagtgatcctactgcacatgctgaaattatcgctttgcgtaatggtgcgaaaaatattcaaaattatcgcctactgaatagcacgctttatgtgacattagagccttgcacaatgtgcgcaggggcaattttgcatagccgtattaaacgtcttgtgttcggtgcatctgattataaaactggcgcgattggatcacgttttcatttttttgatgattacaagatgaatcatactttagaggttacatctggcgtattggcagaagagtgtagtcaaaaattgagtacattttttcagaaaagacgcgaggagaaaaaaatagagaaagcattattaaaaagtctgagtgataagtaa

SEQ ID NO: 3797 - protein, 173 aa, Haemophilus influenzae
MDAAKVRSEFDEKMMRYALELADKAEALGEIPVGAVLVDDARNIIGEGWNLSIVQSDPTAHAEIIALRNGAKNIQNYRLLNSTLYVTLEPCTMCAGAILHSRIKRLVFGASDYKTGAIGSRFHFFDDYKMNHTLEVTSGVLAEECSQKLSTFFQKRREEKKIEKALLKSLSDK

SEQ ID NO: 3798 - DNA, 552 bp, Salmonella typhi
  CDS (1)..(552): transl_table=11
atgccgcccgctttcattaccggagttacctctttgtctgatgtcgaattagatcacgaatactggatgcgccacgcgctgacgctggcgaaacgcgcctgggacgaacgcgaggttccggttggcgcggtattggtgcataaccatcgcgtcattggcgaaggctggaatcgacccattggccgccacgatcctactgcgcatgctgaaataatggcgctgcgtcagggcggtctggtattgcagaattatcggttactggataccacgctgtatgtcacgctggaaccctgtgtgatgtgcgcaggcgctatggtgcatagccgcattggacgcgttgtctttggcgcgcgcgatgcaaaaactggcgcggccggatcgctaattgacgtgctgcaccatccgggaatgaatcaccgggtcgagattattgaaggggtgttgcgcgatgaatgtgcgacgctgctcagtgattttttccgtatgcgtcgtcaggaaattaaagctctgaagaaagccgaccgtgcggaaggcgcggggccggcagtatag

SEQ ID NO: 3799 - protein, 183 aa, Salmonella typhi
MPPAFITGVTSLSDVELDHEYWMRHALTLAKRAWDEREVPVGAVLVHNHRVIGEGWNRPIGRHDPTAHAEIMALRQGGLVLQNYRLLDTTLYVTLEPCVMCAGAMVHSRIGRVVFGARDAKTGAAGSLIDVLHHPGMNHRVEIIEGVLRDECATLLSDFFRMRRQEIKALKKADRAEGAGPAV

SEQ ID NO: 3800 - DNA, 489 bp, Buchnera aphidicola subsp
  CDS (1)..(489): transl_table=11
atgcatgatagtgacaaatattttatgaaatgcgctatatttttagctaagatttctgaaatgataggagaagttcctgttggtgcagtattagtttttaataatactattattggaaaggggttaaatagttctattttaaatcatgatcctactgctcatgctgaaataaaagcattacgtaatggagcaaaatttttaaaaaattatcgtttattgcatacaactttatatgtaacgttagaaccatgtattatgtgttatggtgccattattcatagcagaatttctcgtttagtgtttggtgctaaatataaaaatttacaaaaatatatttgttgcaaaaatcatttttttataaataagaattttcgaaaaatatcaattacacaagaagtacttgaatctgaatgttcaaatttattaagttctttttttaaacgtaaaagaaagatagcaacgaaatattttaataacaatattatttaa

SEQ ID NO: 3801 - protein, 162 aa, Buchnera aphidicola subsp
MHDSDKYFMKCAIFLAKISEMIGEVPVGAVLVFNNTIIGKGLNSSILNHDPTAHAEIKALRNGAKFLKNYRLLHTTLYVTLEPCIMCYGAIIHSRISRLVFGAKYKNLQKYICCKNHFFINKNFRKISITQEVLESECSNLLSSFFKRKRKIATKYFNNNII

SEQ ID NO: 3802 - DNA, 558 bp, Brassica napus
  CDS (1)..(558)
atggaagaagctaaggtggaagcaaaagacggaaccatctccgttgctactgcttttgccggtcaccaacaagctgtgcaagacagtgaccacaagttcctgacccaagctgttgaagaagcttacaagggtgttgactgtggtgatggtggcccttttggtgccgttattgttcacaagaacgaggtcgtcgctagctgccacaacatggtcttgaagtacaccgaccctactgcacacgccgaagtcactgccattcgagaggcatgcaagaaacttaaccagatcgagctatcagaatgcgagatctacgcttcctgtgagccctgccccatgtgcttcggagccatccatctctctagactcaagagattggtatacggagccaaagctgaagcagccattgccatcgggtttgatgacttcatagctgatgcgctgagaggaaccggtgtttaccagaagtctaacctggagataaagaaagcagacgggaatggagctgcgattgctgaacaagtgttccagaacaccaaggagaagttccgtttatactga

SEQ ID NO: 3803 - protein, 185 aa, Brassica napus
MEEAKVEAKDGTISVATAFAGHQQAVQDSDHKFLTQAVEEAYKGVDCGDGGPFGAVIVHKNEVVASCHNMVLKYTDPTAHAEVTAIREACKKLNQIELSECEIYASCEPCPMCFGAIHLSRLKRLVYGAKAEAAIAIGFDDFIADALRGTGVYQKSNLEIKKADGNGAAIAEQVFQNTKEKFRLY

SEQ ID NO: 3804 - DNA, 558 bp, Brassica napus
  CDS (1)..(558)
atggaagaagctaaggtggaagcaaaagacggaaccatctccgttgctactgcttttgccggtcaccaacaagctgtgcaagacagtgaccacaagttcctgacccaagctgttgaagaagcttacaagggtgttgactgtggtgatggtggcccttttggtgccgttattgttcacaagaacgaggtcgtcgctagctgccacaacatggtcttgaagtacaccgaccctactgcacacgccgaagtcactgccattcgagaggcatgcaagaaacttaaccagatcgagctatcagaatgcgagatctacgcgtcctgtgagccctgccccatgtgcttcggagccatccatctctctagactcaagagattggtatacggagccaaagctgaagcagccattgccatcgggtttgatgacttcatagctgatgcgctgagaggaaccggtgtttaccagaagtctaacctggagataaagaaagcagacgggaatggagctgcgattgctgaacaagtgttccagaacaccaaggagaagttccgtttatactga

SEQ ID NO: 3805 - protein, 185 aa, Brassica napus; identical to SEQ ID NO: 3803

SEQ ID NO: 3806 - DNA, 558 bp, Brassica napus
  CDS (1)..(558)
atggaagaagctaaagtggaagcaaaagacggaaccatctccgttgctactgcatttgccggtcaccaacaagctgtgcaagacagtgaccacaagttcctaacccaagctgttgaagaagcttacaagggtgttgactgtggtgatggtggcccttttggtgccgtcattgttcacaagaacgaggtcgtcgctagctgccacaacatggtcttgaagtacaccgacccaaccgcgcacgccgaagtcactgccattcgagaggcgtgcaagaaactcaaccagatcgagctatcagaatgcgagatttacgcttcctgtgagccgtgtcccatgtgcttcggagccatccatctctctagactcaagagattggtatacggagccaaagctgaagcagccattgccatcgggtttgatgacttcatagctgatgcgctgagaggaaccggtgtttaccagaagtctaacctggagataaagaaagcagacgggaatggagctgcgattgctgaacaagtgttccagaacaccaaggagaagttccgtttatactga

SEQ ID NO: 3807 - protein, 185 aa, Brassica napus; identical to SEQ ID NO: 3803

SEQ ID NO: 3808 - DNA, 561 bp, Glycine max
  CDS (1)..(561)
atggaggaagttaatgtggttcaaaccaagaatggaactgtttcagtagcttctgcgtttgctggccataaggaagctatacagcaaagggaccacaaatttttaagaattgctgttgaagaagcgtataaaggggtagactgtgaagatgggggtccctttggtgctattatagtttgtaatgatgaaattgttgctagatgtcacaacatggttctgaggaacacagaccccactgctcatgcagaagtcactgtaataagaaaggcttgtgaaaagctaaaccagatagaactttcagactgtgaaatatatgcttcttgtgaaccttgcccaatgtgctttggagcaatccacctctcacgagttaagaggttggtttatggagcaaaggcagaggcagcaattgctattgggttcgatgacttcatttcagatgcattgcgaggtactggattctatcagaaggcacaattggagattaaaagggctgatggcaaagaagctaacattgctgaagaagtttttgagagaacaaaggaaaaattccgaatgtattaa

SEQ ID NO: 3809 - protein, 186 aa, Glycine max
MEEVNVVQTKNGTVSVASAFAGHKEAIQQRDHKFLRIAVEEAYKGVDCEDGGPFGAIIVCNDEIVARCHNMVLRNTDPTAHAEVTVIRKACEKLNQIELSDCEIYASCEPCPMCFGAIHLSRVKRLVYGAKAEAAIAIGFDDFISDALRGTGFYQKAQLEIKRADGKEANIAEEVFERTKEKFRMY

SEQ ID NO: 3810 - DNA, 549 bp, Glycine max
  CDS (1)..(549)
atgacctcatccgagacccttgcattcatggagctcgccatacaacaggcaaagttagctttggatgttcttgaagtgcccgttggatgtgtaattgttgaggatggcaaggttatagcctcaggcaggaatcgaactaccgagacacgaaatgctacaaggcatgcagaaatggaagctatagatgtgcttctcgggcagtggcagaaacatggactttcaatgtccgaagttgctgaaaaattctcaaactgcagcctttatgttacctgtgaaccatgcataatgtgtgcatctgctttatcaattttaggtataaaggaagtattttatggctgttcaaatgataaattcggaggctgtggatcgatactgtcattgcatttaagtaacactgcaccgctcaataatgaagttccatccggaaagtgtttcaaatgtactggacgtataatggcatcagaagctgtccttctctttcgaacattctatgagcaaggaaatcccaacgctccaaagccacacaggcctctagcacgtcaggaatga

SEQ ID NO: 3811 - protein, 182 aa, Glycine max
MTSSETLAFMELAIQQAKLALDVLEVPVGCVIVEDGKVIASGRNRTTETRNATRHAEMEAIDVLLGQWQKHGLSMSEVAEKFSNCSLYVTCEPCIMCASALSILGIKEVFYGCSNDKFGGCGSILSLHLSNTAPLNNEVPSGKCFKCTGRIMASEAVLLFRTFYEQGNPNAPKPHRPLARQE

SEQ ID NO: 3812 - DNA, 561 bp, Glycine max
  CDS (1)..(561)
atggaagaagttaatgtcgtggaaactaaggatggaactgtctcagtagctgctgcgtttgctggtcatcaggaagccgtgcaggatagagaccacaaatttttaagaaaagctgttgaagaagcatataaaggggtagattgtaaagatggaggcccttttggtgccgttatagttcataatgatgaaatagttgctagttgtcacaacatggttctgtgtaacacagacccaactgctcatgctgaggtgacagcaataagagaggcttgcaagaagcttaagcagatagaacttgctgattgtgaaatatatgcttcttgtgaaccttgccccatgtgctttggtgcaatccacctttctcgaattaagaggttggtttatggagcgaaggccgaggcagcaattgctattgggtttgatgatttcattgccgatgcactgcgaggtactggattctatcagaaagcaacattggaaattaagagagctgatggtaatgaggccatcattgctgaagaggtttttgagaaaacaaaggaaaaattccaaatgtattag

SEQ ID NO: 3813 - protein, 186 aa, Glycine max; identical to SEQ ID NO: 3593

SEQ ID NO: 3814 - DNA, 561 bp, Glycine max
  CDS (1)..(561)
atggaggaagttaatgtggttcaaaccaagaatggaactgttgcagtagcttctgcgtttgctggacataaggaagctatacagcaaagggaccacaaatttttaagaattgctgttgaagaagcctataaaggggtagactgtgaagatgggggtccctttggtgctattatagtatgtaatgatgaaatagttgctcgatgtcacaacatggttctgaggaacacagaccctactgctcatgcagaagtcactgttataagaaaggcttgtgaaaagttaaaccagatagaactttcagactgtgaaatatatgcttcttgtgaaccttgccctatgtgctttggagcaattcacctctcacgagttaagaggttggtttatggagcaaaggcagaggcagcaattgctattggattcgatgacttcatttcagatgcattgcgaggcactggattctaccagaaagcacaattggagattaaaagggctgatggcaaagcggcaaacattgctgaagaagtttttgagagaaccaaggaaaaattccgaatgtattaa

SEQ ID NO: 3815 - protein, 186 aa, Glycine max
MEEVNVVQTKNGTVAVASAFAGHKEAIQQRDHKFLRIAVEEAYKGVDCEDGGPFGAIIVCNDEIVARCHNMVLRNTDPTAHAEVTVIRKACEKLNQIELSDCEIYASCEPCPMCFGAIHLSRVKRLVYGAKAEAAIAIGFDDFISDALRGTGFYQKAQLEIKRADGKAANIAEEVFERTKEKFRMY

SEQ ID NO: 3816 - DNA, 561 bp, Glycine max
  CDS (1)..(561)
atggaggaagttaacgttgtggaaactaaggatggaactgtctcagtagctgctgcgtttgctggtcatcaggaagccgtgcaggatagagaccacaaatttttaagaaaagctgttgaagaagcatataaaggggtagattgcaaagatggaggcccttttggtgctgttatagttcataatgatgaaatagttgctagttgtcacaacatggttctgtgtaacacagacccaactgctcatgctgaggtgacagcaataagagaggcttgtaagaagcttaagcagatagaacttgcagattgtgaaatatatgcttcttgtgaaccttgccccatgtgctttggtgcaatccacctttctcgaattaagaggttggtttatggagcgaaggccgaggcagcaattgctattgggtttgatgatttcattgccgatgcactgcgaggtactggattctatcagaaagcaacattggaaattaagagagctgatggtaatgaggccatcattgctgaagaggtttttgagaaaacaaaggaaaaattccaaatgtattag

SEQ ID NO: 3817 - protein, 186 aa, Glycine max; identical to SEQ ID NO: 3593

SEQ ID NO: 3818 - DNA, 561 bp, Hordeum vulgare
  CDS (1)..(561)
atggaggaagccaaggttgtggagaccagggatgggactatctcagttgcctccgcgtttcccggtcatcaggaagccgtacaagatagggatcacaagttcttgtcgaaagcggtagaagaggcttacaaaggagttgactgtggacatggaggcccatttggtgcggtcgtcgtccgtaatgacgaagtaatagtcggttgccataacatggttctgaacaacaccgatccaactgcacatgctgaagtcactgcaataagagaggcttgcaaaaagcttggaaagattgagctgtcggattgcgaaatgtacgcatcatgtgaaccttgcccaatgtgttttggggctgttcatctatcccggatcaagaggctggtgtatggagccaaggcagaagctgctattgccattggattcgacgacttcattgctgatgctctgagaggaactgggttctaccagaaggccaacatggagattaagcgagccgatgggaatggagccctgcttgctgaacaagtctttgagaacaccaaagagaagtttcgaatgtactaa

SEQ ID NO: 3819 - protein, 186 aa, Hordeum vulgare
MEEAKVVETRDGTISVASAFPGHQEAVQDRDHKFLSKAVEEAYKGVDCGHGGPFGAVVVRNDEVIVGCHNMVLNNTDPTAHAEVTAIREACKKLGKIELSDCEMYASCEPCPMCFGAVHLSRIKRLVYGAKAEAAIAIGFDDFIADALRGTGFYQKANMEIKRADGNGALLAEQVFENTKEKFRMY

SEQ ID NO: 3820 - DNA, 570 bp, Hordeum vulgare
  CDS (1)..(570)
atggaggaagccaaggttgtggagaccagggatgggactatctcagttgcctccgcgtttcccggtcatcaggaagccgtacaagatagggatcacaagttcttgtcgaaagcggtagaagaggcttacaaaggagttgactgtggacatggtggcccatttggtgcggtcgtcgtccgtaatgacgaagtaatagttggttgccataacatggttctgaacaacaccgatccaactgcacatgctgaagtcactgcaataagagaggcttgcaaaaagcttggaaagattgagctgtccgattgcgaaatgtacgcatcatgtgaaccttgcccaatgtgttttggggctgttcatctatcccggatcaagaggctggtatatggagccaaggcagaagctgctattgccattggattcgacgacttcattgctgatgctctgagaggaactgggttctaccagaaggccaacatggagattaagcgagccgatgggaatggagccctgcttgctgaacaagtctttgaaaaacaccaaaagagaagtttcgaatgtactaatatgtag

SEQ ID NO: 3821 - protein, 189 aa, Hordeum vulgare
MEEAKVVETRDGTISVASAFPGHQEAVQDRDHKFLSKAVEEAYKGVDCGHGGPFGAVVVRNDEVIVGCHNMVLNNTDPTAHAEVTAIREACKKLGKIELSDCEMYASCEPCPMCFGAVHLSRIKRLVYGAKAEAAIAIGFDDFIADALRGTGFYQKANMEIKRADGNGALLAEQVFEKHQKRSFECTNM

SEQ ID NO: 3822 - DNA, 561 bp, Zea mays
  CDS (1)..(561)
atggaggaggccaaggttgtggagtccaaggacggaacgatctcagttgcttcagcatttgctggtcatcaggaagctgtgcaagacagggaccacaaatttttatcaaaggcagtggaggaagcataccgaggagttgactgcggcgatggaggaccatttggtgcagttgttgtccataatgatgaagtaatagttagctgccataacatggttttgaagaacactgatccaactgcgcatgctgaagtaactgcgataagagaggcttgcaaaaagcttgggaaaattgagctgtcggattgtgaaatttatgcatcctgtgagccatgcccaatgtgttttggtgctgttcatctatcccggattaagaggctggtgtatggagccaaggcagaagctgcaattgccattggatttgatgatttcattgctgatgctctcagaggaactgggtactatcagaaggccaacatggagataaagcaggcagatggaaatggagccatgattgctgaacaagtatttgagaagactaaagagaagttccaaatgtattga

SEQ ID NO: 3823 - protein, 186 aa, Zea mays
MEEAKVVESKDGTISVASAFAGHQEAVQDRDHKFLSKAVEEAYRGVDCGDGGPFGAVVVHNDEVIVSCHNMVLKNTDPTAHAEVTAIREACKKLGKIELSDCEIYASCEPCPMCFGAVHLSRIKRLVYGAKAEAAIAIGFDDFIADALRGTGYYQKANMEIKQADGNGAMIAEQVFEKTKEKFQMY

SEQ ID NO: 3824 - DNA, 561 bp, Zea mays
  CDS (1)..(561)
atggaggaggccaaggttgtggagtccaaggacggaacgatctcagttgcttcagcatttgctggtcatcaggaagctgtgcaagacagggaccacaaatttttatcaaaggcagtggaggaagcataccgacgagttgactgcggcgatggaggaccatttggtgcagttgttgtccataatgatgaagtaatagttagctgccataacatggttttgaagaacactgatccaactgcgcacgctgaagtaactgcgataagagaggcttgcaaaaagcttgggaaaattgagctgtcggattgtgaaatttatgcatcctgtgagccatgcccaatgtgttttggtgctgttcatttattccggattaagaggctggtgtatggagccaaggcagaagctgcaattgccattggatttgatgatttcattgctgatgctctcagaggaactgggtactatcagaaggccaacatggagataaagcaggcagatggaaatggagccatgattgctgaacaagtatttgagaagactaaagagaagttccaaatgtattga

SEQ ID NO: 3825 - protein, 186 aa, Zea mays
MEEAKVVESKDGTISVASAFAGHQEAVQDRDHKFLSKAVEEAYRRVDCGDGGPFGAVVVHNDEVIVSCHNMVLKNTDPTAHAEVTAIREACKKLGKIELSDCEIYASCEPCPMCFGAVHLFRIKRLVYGAKAEAAIAIGFDDFIADALRGTGYYQKANMEIKQADGNGAMIAEQVFEKTKEKFQMY

SEQ ID NO: 3826 - DNA, 22 bp, Artificial sequence
  primer
atgcgccgcgcttttataaccg

SEQ ID NO: 3827 - DNA, 23 bp, Artificial sequence
  primer
ttaatccgtcgaggattgcgctt

SEQ ID NO: 3828 - protein, 197 aa, Artificial sequence
  consensus sequence
  Variant (2)..(3): Xaa in position 2 to 3 is any amino acid
  Variant (5)..(6): Xaa in position 5 to 6 is any amino acid
  Variant (7)..(7): Xaa in position 7 is any or no amino acid
  Variant (9)..(14): Xaa in position 9 to 14 is any amino acid
  Variant (15)..(16): Xaa in position 15 to 16 is any or no amino acid
  Variant (18)..(18): Xaa in position 18 is any amino acid
  Variant (20)..(20): Xaa in position 20 is any amino acid
  Variant (24)..(24): Xaa in position 24 is any amino acid
  Variant (26)..(35): Xaa in position 26 to 35 is any amino acid
  Variant (36)..(39): Xaa in position 36 to 39 is any or no amino acid
  Variant (41)..(46): Xaa in position 41 to 46 is any amino acid
  Variant (49)..(49): Xaa in position 49 is any amino acid
  Variant (54)..(55): Xaa in position 54 to 55 is any amino acid
  Variant (57)..(57): Xaa in position 57 is any amino acid
  Variant (59)..(59): Xaa in position 59 is any amino acid
  Variant (60)..(89): Xaa in position 60 to 89 is any or no amino acid
  Variant (91)..(97): Xaa in position 91 to 97 is any amino acid
  Variant (98)..(98): Xaa in position 98 is any or no amino acid
  Variant (100)..(103): Xaa in position 100 to 103 is any amino acid
  Variant (104)..(112): Xaa in position 104 to 112 is any or no amino acid
  Variant (117)..(117): Xaa in position 117 is any amino acid
  Variant (121)..(121): Xaa in position 121 is any amino acid
  Variant (124)..(124): Xaa in position 124 is any amino acid
  Variant (127)..(130): Xaa in position 127 to 130 is any amino acid
  Variant (132)..(133): Xaa in position 132 to 133 is any amino acid
  Variant (135)..(135): Xaa in position 135 is any amino acid
  Variant (137)..(137): Xaa in position 137 is any amino acid
  Variant (140)..(142): Xaa in position 140 to 142 is any amino acid
  Variant (143)..(145): Xaa in position 143 to 145 is any or no amino acid
  Variant (147)..(147): Xaa in position 147 is any amino acid
  Variant (149)..(161): Xaa in position 149 to 161 is any amino acid
  Variant (162)..(163): Xaa in position 162 to 163 is any or no amino acid
  Variant (165)..(170): Xaa in position 165 to 170 is any amino acid
  Variant (172)..(183): Xaa in position 172 to 183 is any amino acid
  Variant (184)..(191): Xaa in position 184 to 191 is any or no amino acid
  Variant (194)..(196): Xaa in position 194 to 196 is any amino acid
MXXAXXXAXXXXXXXXEXPXGAVXVXXXXXXXXXXXXXXNXXXXXXDPXAHAEXXAXRXXXXXXXXXXXXXXXXXXXXXXXXXXXXXXXAXXXXXXXXLXXXXXXXXXXXXXLYVTXEPCXMCXGAXXXXRXXRXVXGAXXXXXXKXGXXXXXXXXXXXXXXXHXXXXXXGXXXXXXXXXXXXXXXXXXXXFFXXXR

SEQ ID NO: 3829 - protein, 34 aa, Artificial sequence
  protein pattern
  Variant (2)..(4): Xaa in position 2 to 4 is any or no amino acid
  Variant (6)..(6): Xaa in position 6 is Ile or Leu
  Variant (10)..(10): Xaa in position 10 is any amino acid
  Variant (13)..(15): Xaa in position 13 to 15 is any amino acid
  Variant (16)..(16): Xaa in position 16 is Ile, Leu or Met
  Variant (17)..(18): Xaa in position 17 to 18 is any amino acid
  Variant (19)..(19): Xaa in position 19 is Ala, Cys or Ser
  Variant (21)..(21): Xaa in position 21 is Phe, Ile, Leu, Met or Val
  Variant (22)..(23): Xaa in position 22 to 23 is any amino acid
  Variant (24)..(24): Xaa in position 24 is Ile, Leu or Val
  Variant (25)..(26): Xaa in position 25 to 26 is any amino acid
  Variant (27)..(27): Xaa in position 27 is Ala, Gly or Ser
  Variant (28)..(29): Xaa in position 28 to 29 is any amino acid
  Variant (30)..(30): Xaa in position 30 is Asp, Glu or Asn
  Variant (31)..(31): Xaa in position 31 is any amino acid
  Variant (32)..(32): Xaa in position 32 is Lys or Arg
  Variant (33)..(33): Xaa in position 33 is any amino acid
VXXXTXEPCXMCXXXXXXXRXXXXXXXXXXXXXG

SEQ ID NO: 3830 - protein, 13 aa, Artificial sequence
  protein pattern
  Variant (2)..(3): Xaa in position 2 to 3 is any or no amino acid
  Variant (7)..(7): Xaa in position 7 is Ile, Leu, Met or Val
  Variant (8)..(8): Xaa in position 8 is any amino acid
  Variant (10)..(10): Xaa in position 10 is Ile, Leu, Met or Val
  Variant (11)..(11): Xaa in position 11 is Asp, Glu, Gln or Arg
  Variant (12)..(12): Xaa in position 12 is any amino acid
  Variant (13)..(13): Xaa in position 13 is Ala, Gly or Leu
AXXHAEXXAXXXX

SEQ ID NO: 3831 - DNA, 483 bp, Escherichia coli K12
  CDS (1)..(483): transl_table=11
atgataaagcacctggtagcacccctggttttcacctcactaatactgactggctgccagtcccctcagggaaagtttactcctgagcaagtcgccgctatgcaatcttatggatttactgaatccgccggcgactggtcgctgggcttatcagatgccattctgttcgcaaaaaatgactacaaattgctcccggaaagccagcaacagatccaaaccatggcagctaaattggcctcgacagggctaacacatgcccgtatggatggacacaccgataactatggtgaagacagttacaacgaaggcttatcattgaaacgggcgaatgtcgtggccgatgcatgggctatgggtggacaaattccacgcagcaatctcaccacacagggtttaggaaaaaaatatcccatagccagtaacaagaccgcccagggccgcgccgagaaccgccgcgtcgcagtggtgattactaccccttaa

SEQ ID NO: 3832 - protein, 160 aa, Escherichia coli K12
MIKHLVAPLVFTSLILTGCQSPQGKFTPEQVAAMQSYGFTESAGDWSLGLSDAILFAKNDYKLLPESQQQIQTMAAKLASTGLTHARMDGHTDNYGEDSYNEGLSLKRANVVADAWAMGGQIPRSNLTTQGLGKKYPIASNKTAQGRAENRRVAVVITTP

SEQ ID NO: 3833 - DNA, 507 bp, Pseudomonas aeruginosa PAO1
  CDS (1)..(507): transl_table=11
gtgctaccccagaggctccacccaagtagattgctcgccctcgccctgttcagccttgtgctgggcctggccggttgccagaccaagccgccgcagaccggcctgagcgccgagcagatcgccgtgctccaggagcagggcttcgaactccgcgacgaaggctgggagttcggcatgtcgagcaaggtgctgttcggcaacaatctcgaccgtctcaatcccgacagccgcaacaccctgaccaagatcgcccgcgccctgctcgcggtagacatcgacaaggtccgcctggaaggccacaccgacaactacggcgacgaaggctacaatcaaaagctctccgaacggcgcgccgaatcggtggccgcggtattccgcgaagccggcatgccggcggccaacatcgaggtccgcggccttggcatgagcaagcccgtggccgataacaagacccgcgccggccgcagcgagaaccgccgcgtcgccatcatcgttcccgccgagtaa

SEQ ID NO: 3834 - protein, 168 aa, Pseudomonas aeruginosa PAO1
MLPQRLHPSRLLALALFSLVLGLAGCQTKPPQTGLSAEQIAVLQEQGFELRDEGWEFGMSSKVLFGNNLDRLNPDSRNTLTKIARALLAVDIDKVRLEGHTDNYGDEGYNQKLSERRAESVAAVFREAGMPAANIEVRGLGMSKPVADNKTRAGRSENRRVAIIVPAE

SEQ ID NO: 3835 - DNA, 507 bp, Yersinia pestis KIM
  CDS (1)..(507): transl_table=11
atgcagaaaatgcaaaacaagcgtttaatacaacgtatttgggtcagtttcctggcaatgggtttgatgctattagtggggtgtcaggctaaaccacaagggctaacacctgatcaaatcgccgcattgcaagagcaggggtttaaattaaccgataatggctgggaatttggcctggcaaataaagtgctattcgacagtgatgtgaaaaaattaaattctgagggtatgcaaaccgtacaaaagattggccggatattgtcagatgtggggattaagcatatgcgggttgatggtcataccgactccgtcgggaaggatgactataatcaacaattatcctaccagcgcgccttagccgtagccgatactctcgctaccgtcggtattccaaagagtaatattgatgttcgtggccgtggcaagttagagcccgtcgcggataaccgcaccagtaaaggccgagccgaaaaccgccgcgtcgccattattatcaccgcgtcctaa

SEQ ID NO: 3836 - protein, 168 aa, Yersinia pestis KIM
MQKMQNKRLIQRIWVSFLAMGLMLLVGCQAKPQGLTPDQIAALQEQGFKLTDNGWEFGLANKVLFDSDVKKLNSEGMQTVQKIGRILSDVGIKHMRVDGHTDSVGKDDYNQQLSYQRALAVADTLATVGIPKSNIDVRGRGKLEPVADNRTSKGRAENRRVAIIITAS

SEQ ID NO: 3837 - DNA, 519 bp, Pseudomonas putida KT2440
  CDS (1)..(519): transl_table=11
atgaaatcaggaacaggagttgaacccgtgatgcacgctttacgttttccgctttgggccttgttgttcgccatgctggcgctgacggggtgccagagcgccccccaaaagggccttaccccagaacagattgccgtgctcaagcgcgaaggtttcaccccgaccgatgaaggttgggcctacgacttgtctggcaaagtgctgttcggcagcgatctggacagcctcaacggccagagccaggcgattgtcgagcgcatcggcaaggcgctgctcggcgtgggtatccagggcgtgcgggtggacgggcatgccgactcgtcgggcaaggcggcgtataaccagcagctgtccgagcgccgcgcgcaaagcgtgaccaaggcgctggtggggattggcatgcaggcacagaacattcagagccgtggcctgggcagcagccagccggtggcggacaaccgcaccagcgccgggcgtaccgagaaccgtcgggtgtccatcgtggtagcgtcctactga

SEQ ID NO: 3838 - protein, 172 aa, Pseudomonas putida KT2440
MKSGTGVEPVMHALRFPLWALLFAMLALTGCQSAPQKGLTPEQIAVLKREGFTPTDEGWAYDLSGKVLFGSDLDSLNGQSQAIVERIGKALLGVGIQGVRVDGHADSSGKAAYNQQLSERRAQSVTKALVGIGMQAQNIQSRGLGSSQPVADNRTSAGRTENRRVSIVVASY

SEQ ID NO: 3839 - DNA, 480 bp, Acinetobacter sp. ADP1
  CDS (1)..(480): transl_table=11
atgtataacaactcaatcaaaatatctattcttggggtcatttgccttattctggcaggatgtctaagctttggaccactcaaatataagcaggtcaaaatgctccaaaaagaaggttttgtacagacagatgaaggatggacactcggtttaccagaacgcttactttttgaatttgataaatctgaagtaaatcctgcgcaccaacaagagattattcgtttggctaatcaactgaataaatatggattacataagttaaaggtggtgggttataccgataatattggtaatcgtgattataatttaaagctatctcaagccagagcgcaaagcgtggcagcaattttcataaataatagttttacacctaatcatattcagattattggacgtggatcaaatcaacctctactgcctaacaccacagaagagaatcgtgcagcgaatcgccgcgttgcaattgtaatcgttccataa

SEQ ID NO: 3840 - protein, 159 aa, Acinetobacter sp. ADP1
MYNNSIKISILGVICLILAGCLSFGPLKYKQVKMLQKEGFVQTDEGWTLGLPERLLFEFDKSEVNPAHQQEIIRLANQLNKYGLHKLKVVGYTDNIGNRDYNLKLSQARAQSVAAIFINNSFTPNHIQIIGRGSNQPLLPNTTEENRAANRRVAIVIVP

SEQ ID NO: 3841 - DNA, 507 bp, Yersinia pseudotuberculosis IP 32953
  CDS (1)..(507): transl_table=11
atgcagaaaatgcaaaacaagcgtttaatacaacgtatttgggtcagtttcctggcaatgggttttatgctattagtggggtgtcaggctaaaccacaagggctaacacctgatcaaatcaccgcattgcaagagcaggggtttaaattaaccgataatggctgggaatttggcctggcaaataaagtgctattcgacagtgatgtgaaaaaattaaattctgagggtatgcaaaccgtacaaaagattggccggatattgtcagatgtggggattaagcatatgcgggttgatggtcataccgactccgtcgggaaggatgactataatcaacaattatcctaccagcgcgccttagccgtagccgatactctcgctaccgtcggtattccaaagagtaatattgatgttcgtggccgtggcaagttagagcccgtcgcggataaccgcaccagtaaaggccgagccgaaaaccgccgcgtcgccattattatcaccgcgtcctaa

SEQ ID NO: 3842 - protein, 168 aa, Yersinia pseudotuberculosis IP 32953
MQKMQNKRLIQRIWVSFLAMGFMLLVGCQAKPQGLTPDQITALQEQGFKLTDNGWEFGLANKVLFDSDVKKLNSEGMQTVQKIGRILSDVGIKHMRVDGHTDSVGKDDYNQQLSYQRALAVADTLATVGIPKSNIDVRGRGKLEPVADNRTSKGRAENRRVAIIITAS

SEQ ID NO: 3843 - DNA, 495 bp, Pseudomonas fluorescens Pf-5
  CDS (1)..(495): transl_table=11
atgacgcaacgttcggttcgactgttcagcactctggtgttcatggccctgctggccctggccggctgtcagagcgtgccgcccaaaggtctgaccccgaaacagatcgcggtactgaaacaggagggcttcgaactgacggatgaaggctgggcctttggcctgtcgggcaaggtgctgtttggcagcgatgtggaaaccctgaaccaggccagcaccgagatcgtccagcgcatcggcaaggcgctgctcagcgtcgatatccagaaggtccgggtcgacggtcacaccgacgcgtcgggcaaggaggcctacaacgtgcaactgtccgtgcgccgggccaagagcgtggtcaaggtgttgacccaggttggcatgcgtgaagaaaacatccagctgcgcggcctgggcagcagcgagccggtggcctccaacagcaccgtggccgggcgtaccgagaaccgtcgggtgtcgatcgtggtgatcgccgactga

SEQ ID NO: 3844 - protein, 164 aa, Pseudomonas fluorescens Pf-5
MTQRSVRLFSTLVFMALLALAGCQSVPPKGLTPKQIAVLKQEGFELTDEGWAFGLSGKVLFGSDVETLNQASTEIVQRIGKALLSVDIQKVRVDGHTDASGKEAYNVQLSVRRAKSVVKVLTQVGMREENIQLRGLGSSEPVASNSTVAGRTENRRVSIVVIAD

SEQ ID NO: 3845 - DNA, 561 bp, Ralstonia eutropha JMP134
  CDS (1)..(561): transl_table=11
atgacgcctgcctaccgttccgctgcggcaagccagttgccgcataccggcccgcgggatacccgcgggctggcggcgggcgcactgctggcggctctggcagcgatggttctggctttgtcgggctgcaagaccgcccctccggcccagggcggcctgacaccggcacaggtagccgtgctgcagcaggaaggctttacggagacagacgtcggctgggaactcggccgtccgctcaaagtcctgtttggcttcgacgaagatgccatccctcccgatcggattgccgacatccggcgcctcggcggcgtgctgctaggcgtgggcatcgaccatgtacgcgtggatggccacaccgatcacaccggcagcaccgaatacaacctgcggctttcgctgcggcgcgcggaagccgtagccagggtactggtcactgccggtttcgaaccggcgaacattgaactgcgcggcatgggcaagggccggccggtggcagacaaccgcaccgccgccggtcgcgcggagaatcggcgcgcctccatcgtggtgacggtggagtaa

SEQ ID NO: 3846 - protein, 186 aa, Ralstonia eutropha JMP134
MTPAYRSAAASQLPHTGPRDTRGLAAGALLAALAAMVLALSGCKTAPPAQGGLTPAQVAVLQQEGFTETDVGWELGRPLKVLFGFDEDAIPPDRIADIRRLGGVLLGVGIDHVRVDGHTDHTGSTEYNLRLSLRRAEAVARVLVTAGFEPANIELRGMGKGRPVADNRTAAGRAENRRASIVVTVE

SEQ ID NO: 3847 - DNA, 501 bp, Pseudomonas fluorescens PfO-1
  CDS (1)..(501): transl_table=11
atgcccgtgttctcactttcctttcgactgttttccaccctgttgctgacggccatgctggccctgaccggttgccagaccgccccgcaaaaaggcctgacgccggcccaggtcgcggtcctcaagcagcaaggcttcgagctgaccgatgacggctgggagttcggcctgtcgggcaaagtgttgtttggcagcgatgtcgaaagcctgaataaacaaagtaccgaaatcgtcgagcgtatcggcaaagcgttgctgggtgtcggcatcgagcgggtacgggtggatggccacaccgacgcctcgggcaaggaaacctacaaccagcagctgtccctgcgccgcgcgaaaagcgtcagcaacgtgctgacctcggtcggcatgaaacaagagaacattcagctgcagggcctcggcagtcgcgaaccggtcgcctccaacgacaccgccgccggccgcaccgaaaaccgccgagtgtcgattgtggtcagcgccgattaa

SEQ ID NO: 3848 - protein, 166 aa, Pseudomonas fluorescens PfO-1
MPVFSLSFRLFSTLLLTAMLALTGCQTAPQKGLTPAQVAVLKQQGFELTDDGWEFGLSGKVLFGSDVESLNKQSTEIVERIGKALLGVGIERVRVDGHTDASGKETYNQQLSLRRAKSVSNVLTSVGMKQENIQLQGLGSREPVASNDTAAGRTENRRVSIVVSAD

SEQ ID NO: 3849 - DNA, 504 bp, Ralstonia metallidurans CH34
  CDS (1)..(504): transl_table=11
atgagagcgcccagcagaccccgccgcgctttcctgctgaccacactggccggtctgggcgcgctggcgctgtccggctgcgccagccccgcccacaagctgacacccgcgcaaattgccgtgctcaagaaccaggggttcatgctgactggcaacggctgggaacttgtcatgccggacaaggtgctgttcggcttcgacgacgacacggtctcggccgagcaacagaacgccctcgcccgggtcgcgcgcacgctgcgggatgccggcatcgacgccttgcgcgtggacggccacaccgacaacgtcggcacgatcgagtacaaccagcaactctccatgcgccgtgccgaggctgtggcgcgcgtgctgctcacctgcggtttcgcacgcgatcatctcgatgtgcgcggattcggcaagacccgccccatcgccgacaacggcacggcgctggggcgcgcggagaaccgccgcgtggcgatcattgtcacggtcgaatag

SEQ ID NO: 3850 - protein, 167 aa, Ralstonia metallidurans CH34
MRAPSRPRRAFLLTTLAGLGALALSGCASPAHKLTPAQIAVLKNQGFMLTGNGWELVMPDKVLFGFDDDTVSAEQQNALARVARTLRDAGIDALRVDGHTDNVGTIEYNQQLSMRRAEAVARVLLTCGFARDHLDVRGFGKTRPIADNGTALGRAENRRVAIIVTVE

SEQ ID NO: 3851 - DNA, 477 bp, Pseudomonas aeruginosa UCBPP-PA14
  CDS (1)..(477)
ttgctcgccctcgccctgttcagccttgtgctgggcctggccggttgccagaccaaaccgccgcagaccggcctgagcgccgagcagatcgccgtgctccaggagcagggcttcgaactccgcgacgaaggctgggagttcggcatgtccagcaaggtgctgttcggcaacaatctcgaccgtctcaatcccgacagccgcaacaccctgacgaagatcgcccacgccttgctcgcggtagacatcgacaaggtccgcctggaaggccacaccgacaactacggcgacgaaggctacaaccagaagctctccgaacggcgcgccgaatcggtagccgcggtgttccgcgaagccggcatgccggcggccaacatcgaggtccgcggcctgggcatgagcaagccggtggccgataacaagacccgcgccggccgcagcgagaaccgccgcgtcgccatcatcgttcccgccgagtaa

SEQ ID NO: 3852 - protein, 158 aa, Pseudomonas aeruginosa UCBPP-PA14
MLALALFSLVLGLAGCQTKPPQTGLSAEQIAVLQEQGFELRDEGWEFGMSSKVLFGNNLDRLNPDSRNTLTKIAHALLAVDIDKVRLEGHTDNYGDEGYNQKLSERRAESVAAVFREAGMPAANIEVRGLGMSKPVADNKTRAGRSENRRVAIIVPAE

SEQ ID NO: 3853 - DNA, 23 bp, Artificial sequence
  primer
atgataaagcacctggtagcacc

SEQ ID NO: 3854 - DNA, 24 bp, Artificial sequence
  primer
ttaaggggtagtaatcaccactgc

SEQ ID NO: 3855 - protein, 145 aa, Artificial sequence
  consensus sequence
  Variant (2)..(2): Xaa in position 2 is any amino acid
  Variant (4)..(4): Xaa in position 4 is any amino acid
  Variant (7)..(8): Xaa in position 7 to 8 is any amino acid
  Variant (9)..(10): Xaa in position 9 to 10 is any or no amino acid
  Variant (12)..(13): Xaa in position 12 to 13 is any amino acid
  Variant (14)..(15): Xaa in position 14 to 15 is any or no amino acid
  Variant (17)..(19): Xaa in position 17 to 19 is any amino acid
  Variant (21)..(21): Xaa in position 21 is any amino acid
  Variant (23)..(23): Xaa in position 23 is any amino acid
  Variant (25)..(27): Xaa in position 25 to 27 is any amino acid
  Variant (30)..(32): Xaa in position 30 to 32 is any amino acid
  Variant (34)..(34): Xaa in position 34 is any amino acid
  Variant (37)..(38): Xaa in position 37 to 38 is any amino acid
  Variant (40)..(42): Xaa in position 40 to 42 is any amino acid
  Variant (47)..(67): Xaa in position 47 to 67 is any amino acid
  Variant (69)..(72): Xaa in position 69 to 72 is any amino acid
  Variant (74)..(76): Xaa in position 74 to 76 is any amino acid
  Variant (78)..(79): Xaa in position 78 to 79 is any amino acid
  Variant (84)..(85): Xaa in position 84 to 85 is any amino acid
  Variant (87)..(89): Xaa in position 87 to 89 is any amino acid
  Variant (92)..(93): Xaa in position 92 to 93 is any amino acid
  Variant (96)..(97): Xaa in position 96 to 97 is any amino acid
  Variant (100)..(101): Xaa in position 100 to 101 is any amino acid
  Variant (103)..(109): Xaa in position 103 to 109 is any amino acid
  Variant (111)..(114): Xaa in position 111 to 114 is any amino acid
  Variant (115)..(115): Xaa in position 115 is any or no amino acid
  Variant (118)..(120): Xaa in position 118 to 120 is any amino acid
  Variant (122)..(122): Xaa in position 122 is any amino acid
  Variant (124)..(126): Xaa in position 124 to 126 is any amino acid
  Variant (128)..(128): Xaa in position 128 is any amino acid
  Variant (130)..(130): Xaa in position 130 is any amino acid
  Variant (132)..(132): Xaa in position 132 is any amino acid
  Variant (134)..(135): Xaa in position 134 to 135 is any amino acid
  Variant (138)..(138): Xaa in position 138 is any amino acid
  Variant (144)..(144): Xaa in position 144 is any amino acid
LXLXGCXXXXPXXXXLXXXQXAXLXXXGFXXXDXGWXXGXXXKVLFXXXXXXXXXXXXXXXXXXXXXLXXXXIXXXRXXGHTDXXGXXXYNXXLSXXRAXXVXXXXXXXGXXXXXNIXXXGXGXXXPXAXNXTXXGRXENRRVXI

SEQ ID NO: 3856 - protein, 13 aa, Artificial sequence
  protein pattern
  Variant (2)..(5): Xaa in position 2 to 5 is any amino acid
  Variant (6)..(6): Xaa in position 6 is Leu or Met
  Variant (7)..(7): Xaa in position 7 is Ala, Gly, Ile or Leu
  Variant (9)..(9): Xaa in position 9 is Ala, Ser, Thr or Val
  Variant (12)..(12): Xaa in position 12 is any amino acid
  Variant (13)..(13): Xaa in position 13 is Ala, Ser or Thr
LXXXXXXLXGCXX

SEQ ID NO: 3857 - DNA, 1074 bp, Escherichia coli K12
  CDS (1)..(1074): transl_table=11
atgacaatcaggagttacaaaaacttaaatctggtcagggcaaatatcgagactgaatccagacaattcattgaaaataaaaactattcaatccaatcaattggtcctatgccagggtcaagggctgggcttcgggtcgtatttaccagaccaggggttaacttggcaactgtggacattttttataacggggacggttcgactacaattcaatatctcactggagccaatcgttctctgggccaagagttagcggatcatctttttgaaaccatcaatcctgctgaatttgagcaggtaaatatggtactgcaaggatttgtagagacaagcgttctacctgtacttgagctatcagcagatgaatcgcatatagagttcagagaacactctcgtaacgctcataccgtagtgtggaaaattatttccaccagctatcaggacgaattgactgtgagcctgcatatcacaacaggtaagctccagattcagggccgaccgctgtcatgttacagagttttcacgtttaacttggcagccctgcttgatttacagggtttggagaaagtgctaatccgccaggaggatggtaaagctaatattgttcaacaggaggttgcccgcacttacttgcagactgtaatggccgatgcttacccgcatctccacgtgactgccgaaaaattgctcgtttcagggctatgtgttaaactcgccgcccctgatttgcctgactactgtatgttactttatcctgaactacgcaccattgaaggtgtcttaaaaagtaagatgagtgggttaggcatgccagtacagcagccggcaggttttggaacttactttgataaacctgctgctcattacattctgaaaccgcaatttgcagctactcttagaccggaacagattaacatcatcagcacagcctatactttttttaatgtggaacgtcattctctgttccacatggaaactgtggtcgatgccagccgtatgatttctgatatggcccggttgatgggtaaagccactagagcgtggggaataatcaaggacttatatattgtttga

SEQ ID NO: 3858 - protein, 357 aa, Escherichia coli K12
MTIRSYKNLNLVRANIETESRQFIENKNYSIQSIGPMPGSRAGLRVVFTRPGVNLATVDIFYNGDGSTTIQYLTGANRSLGQELADHLFETINPAEFEQVNMVLQGFVETSVLPVLELSADESHIEFREHSRNAHTVVWKIISTSYQDELTVSLHITTGKLQIQGRPLSCYRVFTFNLAALLDLQGLEKVLIRQEDGKANIVQQEVARTYLQTVMADAYPHLHVTAEKLLVSGLCVKLAAPDLPDYCMLLYPELRTIEGVLKSKMSGLGMPVQQPAGFGTYFDKPAAHYILKPQFAATLRPEQINIISTAYTFFNVERHSLFHMETVVDASRMISDMARLMGKATRAWGIIKDLYIV

SEQ ID NO: 3859 - DNA, 26 bp, Artificial sequence
  primer
atgacaatcaggagttacaaaaactt

SEQ ID NO: 3860 - DNA, 28 bp, Artificial sequence
  primer
ttaaacaatatataagtccttgattatt

SEQ ID NO: 3861 - DNA, 1065 bp, Escherichia coli K12
  CDS (1)..(1065): transl_table=11
atggctgatcaaaataatccgtgggataccacgccagcggcggacagtgccgcgcaatccgcagacgcctggggtacaccgacgactgcaccgactgacggcggtggtgctgactggctgaccagtacgcctgcgccaaacgtcgagcattttaatattctcgatccgttccataaaacgctgatcccgctcgacagttgggtcactgaagggatcgactgggtcgttacccatttccgtcccgtcttccagggcgtgcgcgttccggttgattatatcctcaacggtttccagcaattgctgctgggtatgcccgcaccggtggcgattatcgttttcgctctcatcgcctggcagatttccggggtcggaatgggtgtggcgacgctggtttcgctgattgccatcggcgcaatcggtgcctggtcgcaggcaatggtgactctggcgctggtgttaaccgccctgctgttctgtatcgtcatcggtttgccgttggggatatggctggcgagaagtccgcgagcggcgaaaattattcgtccactgcttgatgccatgcagaccacgccagcgtttgtttatctggtgccaatcgtcatgctatttggtatcggtaacgtgccgggcgtggtggtgacgatcatctttgctctgccgccgattatccgtctgaccattctggggattaaccaggttccggcggatctgattgaagcctcgcgctcattcggtgccagcccgcgccagatgctgttcaaagttcagttaccgctggcgatgccgaccattatggcgggcgttaaccagacgctgatgctggccctttctatggtggtcatcgcctcgatgattgccgtcggcgggttgggtcagatggtacttcgcggtatcggtcgtctggatatggggcttgccaccgttggcggcgtcgggattgtgatcctcgccattatcctcgatcgtctgacgcaggccgttgggcgcgactcacgcagtcgcggcaaccgtcgctggtacaccactggccctgttggtctgctgacccgcccattcattaagtaa

SEQ ID NO: 3862 - protein, 354 aa, Escherichia coli K12
MADQNNPWDTTPAADSAAQSADAWGTPTTAPTDGGGADWLTSTPAPNVEHFNILDPFHKTLIPLDSWVTEGIDWVVTHFRPVFQGVRVPVDYILNGFQQLLLGMPAPVAIIVFALIAWQISGVGMGVATLVSLIAIGAIGAWSQAMVTLALVLTALLFCIVIGLPLGIWLARSPRAAKIIRPLLDAMQTTPAFVYLVPIVMLFGIGNVPGVVVTIIFALPPIIRLTILGINQVPADLIEASRSFGASPRQMLFKVQLPLAMPTIMAGVNQTLMLALSMVVIASMIAVGGLGQMVLRGIGRLDMGLATVGGVGIVILAIILDRLTQAVGRDSRSRGNRRWYTTGPVGLLTRPFIK

SEQ ID NO: 3863 - DNA, 864 bp, Alloiococcus otitis
  CDS (7)..(864)
aagacaatggataataccttgtttattgacttaattccagagataccttttactcaatggtttgccgacatcatttcttggttaaccgacaacttatcagccttctttaaccttataagtgatggggctgagtggctcatggatgccatgacagccatcttgctgattattcccccagaaatctttatcatcttaattggggtcttggcctactttgcagctaagaaaaccttctccctgccaactttttccgttgtagcacttttttacatctacaaccaaggtttgtgggaagaattgatgtttacaaccacccttgtcatcctatccagcttgatatccattgtgattgggataccagttgggatctggatgtccaagagccaaacagtgaacaatgtggttcagcccattttggactttatgcagaccatgccggccttcgtttacttgattccggcagtggccttcttcggaattgggatggtgccaggggtcttctcctctgttatctacgctgcaccacctgttatccgctttaccaacttggggatccgggaagttgacgatgagatgattgaagctgcagaatcctttgggtcaacctcccgccagcgtctatttaaagttgagttacctttagctaaatctacaatcatggctggtattaaccagactgttatgttagccttgtccatggtcgtcatcgcttcaatgatcggggcaccaggcttaggtgaccaagtcgtccgagccctccaacaagctcgttcaggcccaggtttcgtagccggctttgcccttgttggtctagctattgtgatggaccggatcttacaaggctttggccaggaccaagactag

SEQ ID NO: 3864 - protein, 285 aa, Alloiococcus otitis
MDNTLFIDLIPEIPFTQWFADIISWLTDNLSAFFNLISDGAEWLMDAMTAILLIIPPEIFIILIGVLAYFAAKKTFSLPTFSVVALFYIYNQGLWEELMFTTTLVILSSLISIVIGIPVGIWMSKSQTVNNVVQPILDFMQTMPAFVYLIPAVAFFGIGMVPGVFSSVIYAAPPVIRFTNLGIREVDDEMIEAAESFGSTSRQRLFKVELPLAKSTIMAGINQTVMLALSMVVIASMIGAPGLGDQVVRALQQARSGPGFVAGFALVGLAIVMDRILQGFGQDQD

SEQ ID NO: 3865 - DNA, 1728 bp, Streptococcus agalactiae
  CDS (1)..(1728)
ttggaaaatttattacaacataagttaccggtcgcaccatttgtagagtcaacgaccaattggattacgaaaactttttctggtttatttgactttatccagacaatcggtaatgcattgatggattggatgacaaaaacattactattcattaatcctttactttttattgtactaattacagttgctgtatttttcttagctaagaaaaaatggcaattaccgacatttactttcattggtttgctatttatctataaccaagggctgtgggagcagttgattaatacttttaacttggttttagtagcaagtttaatttctattattattggtgtaccactaggtatttggatggcaaaaagtgataaagttaaacaagttgttaatccaattcttgactttatgcaaactatgccagcattcgtttaccttattcctgcagtagccttctttggtatcggtatggtaccaggtgtctttgcctctgttgtatttgctttgcctccaacagtgcgctttactaacttggctattcgtgaaatcccacttgaattaatagaagcatctgattcatttggttcaacagctaagcaaaaattattcaaagttgaactaccacttgctaagaacactattatggcaggaatcaatcaaactatgatgttggctctttctatggtggttacaggatctatgatcggtgcacctggacttggtcgtgaggtgttatcggcgcttcaacatgctgatattggtacaggatttgttagtggtctatcgctagttattttagcaatcgtgttagaccgtgttagtcaattctttaattccaaaccgggtgagaagcaagctaaaacatcaaaagttaaaaaatgggtaggtttaggggccttggttctcttcattctagcagctcttggtcgcattgttgtcaatatgacttcaggaaatgaagccaaaggtcaaaaagtgaaaatagcttatgtccaatgggattcagaagttgcttcaaccaacgttattgctgaagttttaaaatctaaaggatatgatgttgaattgacaccacttgataatgcggtcatgtggcaaacagtcgccaatgggaatgctgattttacaacaagtgcttggttgccaaagacccacgggcaatattttaataaatacaaaaatagtttagatgacttaggtcctcacgttgagaacgtcaaaataggtttagttgttcctaaatacatgaacgtaaatagtattgaagaattatcaaatcaagcagataaacaaattacaggtatcgaaccaggtgcaggtattatgaagtctgctaaacaatcccttaaagattatccaaacctttcaagttggaagttgttatcagcatcaacaggagctatgacaacaaccttagggaaggctatcaaaaacaaagatcaagtagtcattacaggttggtcacctcactggatgtttgctaagtatgatttaaaataccttaaagatcctaagaaatcatttggtggtgaagaacatatcaatacaatagcacgcaagaatttgaaaaaagatatgccaaaagtatataaaattatcgataagttcaagtggactaaagaagatatggaatctatcatgttagatatggataaaggtatggagcctgctaaagcagctcaaaaatggattaaaaaccacaaaaaagaagtttcagagtggactaaatag

SEQ ID NO: 3866 - protein, 575 aa, Streptococcus agalactiae
LENLLQHKLPVAPFVESTTNWITKTFSGLFDFIQTIGNALMDWMTKTLLFINPLLFIVLITVAVFFLAKKKWQLPTFTFIGLLFIYNQGLWEQLINTFNLVLVASLISIIIGVPLGIWMAKSDKVKQVVNPILDFMQTMPAFVYLIPAVAFFGIGMVPGVFASVVFALPPTVRFTNLAIREIPLELIEASDSFGSTAKQKLFKVELPLAKNTIMAGINQTMMLALSMVVTGSMIGAPGLGREVLSALQHADIGTGFVSGLSLVILAIVLDRVSQFFNSKPGEKQAKTSKVKKWVGLGALVLFILAALGRIVVNMTSGNEAKGQKVKIAYVQWDSEVASTNVIAEVLKSKGYDVELTPLDNAVMWQTVANGNADFTTSAWLPKTHGQYFNKYKNSLDDLGPHVENVKIGLVVPKYMNVNSIEELSNQADKQITGIEPGAGIMKSAKQSLKDYPNLSSWKLLSASTGAMTTTLGKAIKNKDQVVITGWSPHWMFAKYDLKYLKDPKKSFGGEEHINTIARKNLKKDMPKVYKIIDKFKWTKEDMESIMLDMDKGMEPAKAAQKWIKNHKKEVSEWTK

SEQ ID NO: 3867 - DNA, 852 bp, Pseudomonas aeruginosa PAO1
  CDS (1)..(852): transl_table=11
atgtttcccgaacgcctgacattttccatcgccaactgggtcaacgcttgggtcgacgccctggtgaccaactacggcgacctgttccgcaagatctccgacaccctgctgtgggccatcgtcaacctcgaagggctgctccgcgccacgccctggtggctattgctggcgatcgtcgcggcgatcgcctggcacgccacccggcgcctgctgccgaccctggtgatcaccggcctgctgttcctggtcggcgccgtcggcctctgggacaagctgatgcagaccctcgcgctgatgctggtggcgaccttcatctcggtgctgatcggcatccccctgggcatcctcgccgcgcgcagcaaccgcctgcgcgcggtgctgatgccactgctggacatcatgcagaccatgcccagcttcgtgtacctgatcccggtgctgatgttgttcggcctgggcaaggtgccggcgatcttcgccaccgtgatctatgccgcgccgccgctgatccgcctcaccgacctgggcatccgccaggtcgacagcgaggtgatggaggcggtcaacgccttcggcgccaaccgctggcagcagctgttcggcgtgcagttgccgctggccctgccgagcatcatggcggggatcaaccagaccaccatgatggccctgtcgatggtggtgatcgcttcgatgatcggcgcccgcggcctcggcgaagacgtactggtgggcatccagacgctgaacgtgggcaagggcctggaagccggcctggcgatcgtcatcctcgcggtggtgatcgaccgcatcacccaggcctatggccgttcccggcacgagacgagcaaatga

SEQ ID NO: 3868 - protein, 283 aa, Pseudomonas aeruginosa PAO1
MFPERLTFSIANWVNAWVDALVTNYGDLFRKISDTLLWAIVNLEGLLRATPWWLLLAIVAAIAWHATRRLLPTLVITGLLFLVGAVGLWDKLMQTLALMLVATFISVLIGIPLGILAARSNRLRAVLMPLLDIMQTMPSFVYLIPVLMLFGLGKVPAIFATVIYAAPPLIRLTDLGIRQVDSEVMEAVNAFGANRWQQLFGVQLPLALPSIMAGINQTTMMALSMVVIASMIGARGLGEDVLVGIQTLNVGKGLEAGLAIVILAVVIDRITQAYGRSRHETSK

SEQ ID NO: 3869 - DNA, 1722 bp, Lactococcus lactis subsp. lactis Il1403
  CDS (1)..(1722): transl_table=11
atgattgatttagctattggacaagtacccatagcaaactgggtgtcatcggcaacagattggattactagtacttttagttcaggatttgatgtgattcaaaaatcaggaacggtattgatgaacggtattacaggtgctttaactgctgttccattctggttgatgattgctgttgttactatccttgccattttggtttcaggtaaaaaaattgcctttcctttattcactttcatcggtctttctttaattgctaaccagggcttatggtcagatttgatgagtacaatcacacttgtcttactttcaagtttattgtcaatcatcattggagttcctttagggatttggatggccaaatctgatttagtggctaagatcgttcaaccgattttggactttatgcaaacgatgcctggtttcgtttatttgattccagcggttgcattctttggaataggagttgttcctggggtatttgcatctgttatctttgcactcccaccaacagtcagaatgactaacttgggaattcgtcaagtttcaacggaattagttgaagcggcagattcatttggttcaactgcccgtcaaaagctttttaaattggaatttcctttggctaaaggaacaattatggctggtgttaaccaaacgattatgttagctctttctatggttgttatcgcttctatgattggggcgcctggcttaggtcgtggtgtacttgcagctgttcaatcggctgatattggtaaagggtttgtaagtgggatttcattagttattttggctattattattgaccgctttacacaaaaacttaatgtttctcctcttgaaaaacagggaaatcctacagttaaaaaatggaaacgtggaattgccttagtttcattgttagctttaattattggtgccttttcaggaatgtcttttgggaaaacagcctctgataaaaaagttgacttagtttatatgaactgggattcagaagttgcatcaatcaatgttttgactcaagcgatgaaagaacacggctttgatgttaaaacgacagctttagataatgcggtggcttggcaaacagtagccaatggtcaagcagatggaatggtttctgcttggttaccaaacacgcataaaacacaatggcaaaaatatggtaaatctgttgatttgttaggtcctaaccttaaaggggctaaagttgggtttgttgttccaagttatatgaatgttaattcaattgaagatttaacaaatcaagcgaataaaacaatcacaggtattgaaccaggtgcaggtgtaatggctgctagtgaaaaaacgcttaatagctatgataatcttaaagattggaaacttgttccttcatcatcaggtgcaatgactgtagctcttggtgaagcaatcaaacaacataaagatattgtcattactggttggtctcctcattggatgtttaacaaatatgatttgaaatatttggctgatccaaaaggaacaatgggaacttcagaaaatattaataccattgttcgtaaaggtttgaagaaagaaaatccagaagcttataaagttttagataaatttaattggacaactaaggatatggaagctgtcatgcttgatattcaaaatggtaaaacaccagaagaagctgccaaaaattggattaaagatcatcaaaaagaagttgataaatggtttaaataa

SEQ ID NO: 3870 - protein, 573 aa, Lactococcus lactis subsp. lactis Il1403
MIDLAIGQVPIANWVSSATDWITSTFSSGFDVIQKSGTVLMNGITGALTAVPFWLMIAVVTILAILVSGKKIAFPLFTFIGLSLIANQGLWSDLMSTITLVLLSSLLSIIIGVPLGIWMAKSDLVAKIVQPILDFMQTMPGFVYLIPAVAFFGIGVVPGVFASVIFALPPTVRMTNLGIRQVSTELVEAADSFGSTARQKLFKLEFPLAKGTIMAGVNQTIMLALSMVVIASMIGAPGLGRGVLAAVQSADIGKGFVSGISLVILAIIIDRFTQKLNVSPLEKQGNPTVKKWKRGIALVSLLALIIGAFSGMSFGKTASDKKVDLVYMNWDSEVASINVLTQAMKEHGFDVKTTALDNAVAWQTVANGQADGMVSAWLPNTHKTQWQKYGKSVDLLGPNLKGAKVGFVVPSYMNVNSIEDLTNQANKTITGIEPGAGVMAASEKTLNSYDNLKDWKLVPSSSGAMTVALGEAIKQHKDIVITGWSPHWMFNKYDLKYLADPKGTMGTSENINTIVRKGLKKENPEAYKVLDKFNWTTKDMEAVMLDIQNGKTPEEAAKNWIKDHQKEVDKWFK

SEQ ID NO: 3871 - DNA, 1065 bp, Agrobacterium tumefaciens str. C58
  CDS (1)..(1065): transl_table=11
gtggcgacgccgcgccgcatcggctccggaatgcctgacggcttccgggcgatgatgcgccggttcaacagagtgttccgccctgtatcctcaaggacgcgcggcgctctggcgattttactcccggagtgcggaggatatagatccccgcctccggttcttcatggagaacaggatatggaatggcttttcaaatttccgaccatgaatgacgatgctctgcgtgcgctgaaaaaagtcatcgacgagggattccggggcttcacccgaacctatggcggcgcgattgaggggctgttcacccccctgcagagctttctcatctgggcggaaaggcttttgatcggcgcaccctggccggtcgttattcttattgtcggcgcgctcgcctggtttgccagccgcagcgctaccatcgtttcactgtgttgcggcattctcttcgccatcggctggttcggcatgtgggaagacacgatgaagacggtctcgatgatcttcgtctgcgcggtcatgtccatcgtcatcggattgccgatcggcatcgccatggcgcgatcgaaccgcctgcagaacgtggttaatcccgtcctcgacgtgatgcagacgatgccgagcttcgtttatctcattcccgtcgtcatgcttttgggcatcggccgcgtgcctggcgtcatcgccgtcatcatctacgccattccgcccatgatccggctgaccaatctcggtatccgcatggtcgaccacgacgtgctggaggcggccgacgctttcggatcctcgaagcgccagaaactgttcaaggtgcagctgccgctcgcactccccaccatcatggccggtatcaaccagaccatcatgatggcgctcgccatggtcgtcatcgcctccatgatcggcgtgcagggtcttggccagccggtgctgaaggccatcgccaaccagtatttcacgctgggcgtgttcaacgggcttgccatcgtcggcatcgccatcatcttcgaccgcatcagccaggcctatggccttcgtctgcaaaaacaccgggaagtggcgcatggctag

SEQ ID NO: 3872 - protein, 354 aa, Agrobacterium tumefaciens str. C58
MATPRRIGSGMPDGFRAMMRRFNRVFRPVSSRTRGALAILLPECGGYRSPPPVLHGEQDMEWLFKFPTMNDDALRALKKVIDEGFRGFTRTYGGAIEGLFTPLQSFLIWAERLLIGAPWPVVILIVGALAWFASRSATIVSLCCGILFAIGWFGMWEDTMKTVSMIFVCAVMSIVIGLPIGIAMARSNRLQNVVNPVLDVMQTMPSFVYLIPVVMLLGIGRVPGVIAVIIYAIPPMIRLTNLGIRMVDHDVLEAADAFGSSKRQKLFKVQLPLALPTIMAGINQTIMMALAMVVIASMIGVQGLGQPVLKAIANQYFTLGVFNGLAIVGIAIIFDRISQAYGLRLQKHREVAHG

SEQ ID NO: 3873 - DNA, 954 bp, Agrobacterium tumefaciens str. C58
  CDS (1)..(954): transl_table=11
atgttggcaggcgcgccgggcttccggcgcgcattttcccgtcaggacaggggccagttccgggaacagggaccggcatgcgcgaggactacaccgatgtttcctgaagttttccatatttccatccgcggcccgatcaatgaaatcgtgcgctcgctggtggtgaactacggctatgttttcaaggcgatctcgcagacgatcctgcaggcgatcctcttcgtggaatgggctctgcgcggactgccgtggtgggccatttttctggtctttctggtgctcgcctggttcgccgcgaaaaagatttcgctggtcatcatggtcgccgtcatgctgttcatcgtcggcgcgctcggtctctgggacctgacgatgcagacactggcgctgatgctgattgccagcctcatctccatcgtcatcggcgtgcccatcggcatcctgcttgcgaaaagcgaatgggcgcggcgcatcaccctgccgatcctcgatgtcatgcagaccatgccgagcttcgtctatctcatccccgctatcatgctgttcggcctcggcaaggtcccggccgtgctggccaccatcgtttatgccgcgccgccactgatccgcctcaccgatcttggtattcggcaggtggaccgggaagtggtggaggccgcgaccgcctttggcggtagcccgagacagatccttttcggtgtcgaattgccgcttgccacaccgaccatcatggccggtctcaaccagacgatcatgatggcgctctccatggtcgtcgtcgcctcgatgatcggcgcgcgcggtctcggtgagcaggtgctgaacggtatccagacgctcgatgtcggcaagggcctcgaagcaggtctcggcatcgttattctcgcaatcgtgctcgatcgcatcacgcagggttttggccaatccagccggaaggaaatgggcaatgactga

SEQ ID NO: 3874 - protein, 317 aa, Agrobacterium tumefaciens str. C58
MLAGAPGFRRAFSRQDRGQFREQGPACARTTPMFPEVFHISIRGPINEIVRSLVVNYGYVFKAISQTILQAILFVEWALRGLPWWAIFLVFLVLAWFAAKKISLVIMVAVMLFIVGALGLWDLTMQTLALMLIASLISIVIGVPIGILLAKSEWARRITLPILDVMQTMPSFVYLIPAIMLFGLGKVPAVLATIVYAAPPLIRLTDLGIRQVDREVVEAATAFGGSPRQILFGVELPLATPTIMAGLNQTIMMALSMVVVASMIGARGLGEQVLNGIQTLDVGKGLEAGLGIVILAIVLDRITQGFGQSSRKEMGND

SEQ ID NO: 3875 - DNA, 858 bp, Sinorhizobium meliloti 1021
  CDS (1)..(858): transl_table=11
atgtttccggactctctcaatctctcgatccgcgcgccggtgaacgacttcatccaggccctcgtcaccaattatggctgggtcttcaaggcgatcagcggcgtcatcctgaaggccgttctgttcatcgaatggatcctgcgcggcctgccctggtggctcgtcattctcgccttcatggcgcttgcctggcggagttcgcggcgctggtcgctgacgctggccgtaggcgcgttgctggttaccgtcggcgtcctcggactctgggatctgacgatgcagacgctcgccctgatgctgatggcgaccatcgtctcggtggtgatcggcgtgcccatggggattctcgtcgcgaagagccgcgtcgtccgcaacatcactctgccggtgctcgatgtcatgcagaccatgccgagcttcgtctatctcatcccggcgctgatgctcttcgggctcggcaaggtcccggcaattctcgcgaccattatctacgccgtcccgccgctgatccggctcaccgatctcggcatccgccaggtcgatgcggaagtcgtcgaagctgcgacggcgttcggcggcagcccgggacagattctcttcggcgtcgaactgccccttgcgacgccgacgatcatggccggcctcaaccagacgatcatgatggcgctgtcgatggtcgtcgtcgcctcgatgatcggcgcacgcggcctcggcgaacaggtgctgaacggcattcagacgctcgacgtcggcaagggcctcgaggccggcatcggcatcgtcattctcgcggtcgtgctcgaccgcatcacgcaaggcttcggcaagccccggacggaggacgcccgcaatggctga

SEQ ID NO: 3876 - protein, 285 aa, Sinorhizobium meliloti 1021
MFPDSLNLSIRAPVNDFIQALVTNYGWVFKAISGVILKAVLFIEWILRGLPWWLVILAFMALAWRSSRRWSLTLAVGALLVTVGVLGLWDLTMQTLALMLMATIVSVVIGVPMGILVAKSRVVRNITLPVLDVMQTMPSFVYLIPALMLFGLGKVPAILATIIYAVPPLIRLTDLGIRQVDAEVVEAATAFGGSPGQILFGVELPLATPTIMAGLNQTIMMALSMVVVASMIGARGLGEQVLNGIQTLDVGKGLEAGIGIVILAVVLDRITQGFGKPRTEDARNG

SEQ ID NO: 3877 - DNA, 1008 bp, Agrobacterium tumefaciens str. C58
  CDS (1)..(1008): transl_table=11
ttgtcggcctgctcgagtctgaccagatcctcgcctgtatcgcttcttcttcctccccggccgcgtcagcgcatggtgaaaaaaatgtttgatgccaacgatcttgccgtctttccgatcgatgcctggattgccgatggcgtccagtggatcgctcttaatcttcgccctttgtttgttgccatcaagtggccgatcgaaaacctgttggcgttcaacgaccacattctgcatgccatcccgttcccgatcttcctggtcctgtcgtttttgatcgcctatcgcctagcctcgctcggcatcgccatttttaccgcgatctctttcgtcgtcatcgcgtcgcttggggtttgggatgaatcgatgacaacgctgtcgctgataagcaccgcaatcgtcatatcgacagtgatcggcattccggtcggcatatggtgcgcgatcaacaacagcgtatggcaggtcgtccggccagtcttggatatcatgcagaccacgccaaccttcgtttatctcgtgcctgttgtcatgctgttcggtgttggtacggtgcccggcgaagtggccgtcgtgattgccgctgcgccgccgctcatccggttcaccaatctcggtattcgcatggtggagacggaaatggttgaagcaggtctcgccttcggtgccgaccggcgccaactcctctgggaaatccagtttccgctggctatcccgacgattcttggtggccttaaccagacggttctgacggcgatggtcatgtctgtcgtggtggcgatgatcggagccgaagggctcgggcttgtcgtgttgcaggggcttgggcgtcttgatgtgggtcgagcggctgttggcggtatcgcaattattcttcttgccatgatcctcgaccggatcacgcaaaagctcgccatgcccgcgacgtcaaaggcgaagcgttcgtttcggacgacgctcagcacggttctgatgggagcccgctcgaaaccttcggccggaactgcctga

SEQ ID NO: 3878 - protein, 335 aa, Agrobacterium tumefaciens str. C58
MSACSSLTRSSPVSLLLPPRPRQRMVKKMFDANDLAVFPIDAWIADGVQWIALNLRPLFVAIKWPIENLLAFNDHILHAIPFPIFLVLSFLIAYRLASLGIAIFTAISFVVIASLGVWDESMTTLSLISTAIVISTVIGIPVGIWCAINNSVWQVVRPVLDIMQTTPTFVYLVPVVMLFGVGTVPGEVAVVIAAAPPLIRFTNLGIRMVETEMVEAGLAFGADRRQLLWEIQFPLAIPTILGGLNQTVLTAMVMSVVVAMIGAEGLGLVVLQGLGRLDVGRAAVGGIAIILLAMILDRITQKLAMPATSKAKRSFRTTLSTVLMGARSKPSAGTA

SEQ ID NO: 3879 - DNA, 1065 bp, Salmonella enterica subsp. enterica serovar Typhi str. CT18
  CDS (1)..(1065): transl_table=11
atggctgatcaaacgaatccgtgggataccgcacaggtggccgatacgacgacgcaaacggctgatgcctggggaacaccggcaggcgtagccacggacggcggcagtaccgactggttgaacagcgcgcccgcgccagcccctgaacacttttctcttctggacccgttccataagacgcttatcccgctggatagctgggtcacagagggaatcgactgggtcgtcacccatttccgtcccctttttcaggggattcgtgtgccggtggattacatccttaacggctttcagcaactgctgctgggaatgcccgcccctgtggcgattattctctttgcgctgattgcctggcaggtttccggtgtgggcatggggatcgcggcgctgatatcgctgatcgccatcggcgcgatcggcgcctggtcgcaggcgatgattaccctggcgctggtgctgaccgccctgttgttctgcgtcgtgatcggattaccgatgggaatctggctggcgcgcagcccgcgcgcggccaaaatagttcgtccgctgctggatgcgatgcagaccacgcccgcgtttgtctatctggtgccgattgtcatgttattcggcatcggtaacgtgccgggcgtggtggtgacgattatttttgctctaccgccgattatacgcctgacgatcctgggcattaaccaggtgcctgccgacttaattgaagcgtcgcgctcgttcggcgccagcccgcgccaaatgttgttcaaagtgcaactaccgctggcgatgcccaccattatggcaggcgttaatcagacgctgatgctggctctctcaatggtcgtcatcgcctcgatgattgcggtcggtgggcttggccagatggtactacgcggcattggtcgtcttgatatggggctggcaaccgtcggcggcgtcggcattgtgattctcgccatcattctggaccgtctgacgcaggccgtcgggcgcgactcgcgtagccgcggtaaccgtcgctggtataccaccggtcctgttgggctaatcacccgccctttcgttaagtaa

SEQ ID NO: 3880 - protein, 354 aa, Salmonella enterica subsp. enterica serovar Typhi str. CT18
MADQTNPWDTAQVADTTTQTADAWGTPAGVATDGGSTDWLNSAPAPAPEHFSLLDPFHKTLIPLDSWVTEGIDWVVTHFRPLFQGIRVPVDYILNGFQQLLLGMPAPVAIILFALIAWQVSGVGMGIAALISLIAIGAIGAWSQAMITLALVLTALLFCVVIGLPMGIWLARSPRAAKIVRPLLDAMQTTPAFVYLVPIVMLFGIGNVPGVVVTIIFALPPIIRLTILGINQVPADLIEASRSFGASPRQMLFKVQLPLAMPTIMAGVNQTLMLALSMVVIASMIAVGGLGQMVLRGIGRLDMGLATVGGVGIVILAIILDRLTQAVGRDSRSRGNRRWYTTGPVGLITRPFVK

SEQ ID NO: 3881 - DNA, 849 bp, Listeria monocytogenes EGD-e
  CDS (1)..(849): transl_table=11
atgcctaatattccaacgattccattagctagttggattgacaaattagttgatggcttaacgcaatttgaaggattttttaatgtaattacgaatatcattggcgggattgttgacgcattccaatgggtgttcgatttagttccaccatggttatttattattttacttgtatttggcacattttgggtgaaccgtaaaggcaaaaaatggggtttaattatctttgaagttgtcggtttacttttaatttggaacttggacttctggcgcgacatgacacaaacattaacgcttgtgctgacaagtagtttaattgcacttgttattggagttccacttggtatttggatggcgaaaagcaatattgttgaaagtatcttcaaaccggtactcgattttatgcaaactatgccagccttcgtttacttaattcctgccgtagcatttttcggaattggaatggttccaggggttgtggcttctgttattttcgcaatgcctccaactgttcgtatgactaatctaggtattcgccaagtttcaacagagcttgtagaagcagccgattcgttcggttcaacaccttggcaaaaactttggaaagtacagctaccaatggcgaaatcgaccatgatggctgggattaaccaaagtatcatgttagcactttccatggttgtaattgcttccatgattggtgcaatgggacttggaacacgtgtttacttcgcagtaggacgtaacgacgctggtggtggatttgtagctgggattgctattgttattgtagcaatcatcctagaccgtctgacacaagctttcaataaaaaagcgaaatcagaataa

SEQ ID NO: 3882 - protein, 282 aa, Listeria monocytogenes EGD-e
MPNIPTIPLASWIDKLVDGLTQFEGFFNVITNIIGGIVDAFQWVFDLVPPWLFIILLVFGTFWVNRKGKKWGLIIFEVVGLLLIWNLDFWRDMTQTLTLVLTSSLIALVIGVPLGIWMAKSNIVESIFKPVLDFMQTMPAFVYLIPAVAFFGIGMVPGVVASVIFAMPPTVRMTNLGIRQVSTELVEAADSFGSTPWQKLWKVQLPMAKSTMMAGINQSIMLALSMVVIASMIGAMGLGTRVYFAVGRNDAGGGFVAGIAIVIVAIILDRLTQAFNKKAKSE

SEQ ID NO: 3883 - DNA, 849 bp, Listeria innocua Clip11262
  CDS (1)..(849): transl_table=11
atgcctaatattccaacgattccattagctagttggattgataaattagttgatggcttaacgcaatttgaaggattttttaatgtaattacaaatatcattggcggaattgttgatgcattccaatgggtattcgacttagttccaccatggttatttattattttactagtatttgggactttctgggttaaccgcaaaggaaaaaaatggggattaattatttttgaagttgtcggtttactattaatttggaacttagatttctggcgtgatatgactcaaacgctgactcttgttcttacgagtagtttaattgcacttgttataggtgttccacttggtatttggatggcgaaaagcggtatcgttgaaagcatctttaaaccggtgcttgactttatgcaaacaatgcctgcctttgtatatttaattccagccgtagcatttttcggaattgggatggttccaggggtagttgcttctgttattttcgcaatgcctccaactgttcgtatgactaacctaggtattcgccaagtttcgactgagcttgttgaagcagcagattcatttggttcaacaccttggcaaaaactttggaaagtacagctaccaatggcgaaatcgaccatgatggctgggattaaccaaagtatcatgttagcactttccatggttgtaattgcttcgatgattggtgcaatgggacttggaacacgtgtttactttgcagtaggacgtaatgacgctggtggcggatttgtagctgggattgcgattgttatcgtagcaattatcctagaccgtctaacacaagctttcaataaaaaagcgaaatcagaataa

SEQ ID NO: 3884 - protein, 282 aa, Listeria innocua Clip11262
MPNIPTIPLASWIDKLVDGLTQFEGFFNVITNIIGGIVDAFQWVFDLVPPWLFIILLVFGTFWVNRKGKKWGLIIFEVVGLLLIWNLDFWRDMTQTLTLVLTSSLIALVIGVPLGIWMAKSGIVESIFKPVLDFMQTMPAFVYLIPAVAFFGIGMVPGVVASVIFAMPPTVRMTNLGIRQVSTELVEAADSFGSTPWQKLWKVQLPMAKSTMMAGINQSIMLALSMVVIASMIGAMGLGTRVYFAVGRNDAGGGFVAGIAIVIVAIILDRLTQAFNKKAKSE

SEQ ID NO: 3885 - DNA, 897 bp, Ralstonia solanacearum GMI1000
  CDS (1)..(897): transl_table=11
atgtctgacacccttccgatcggccattgggtcgaccaggcagtccactaccttctcgatcacgacgcggcagcgttcgacacggtaggccgcgccatcgatgggcttgcagcgctggtcgaacgcagcctgcaggccgtgccgatgtggatgatgatggcgttcttcatcggcatcgggctctggcgcgtcggctggcgcttcgcgctctttaccgctgcgtcgcttttccttatttccgccaccgggttctgggaccagacgatcgtcacactgggcctgaccttatcgtcgaccatcatcagcctcgcgctcggtgttccgcttggcatctgggcggccaggagcagggtcgtttcggccgtcgtgcggccgatcctcgatctgatgcagacgatgcccgcattcgtctatctgattccggctgccatgctgttcggcctgggccgcgtgccgggcattctctcgaccgtgatctttgctatgccgccggcagtccgcctgaccagcctcggcatccgccaggtcaacatggagctggttgaagccggtctggcgttcggctgcacgccacggcaactgctgtacaaagtgcagattccgaacgcgctgccgtcgatcatgcaaggcgtgaaccagaccatcatgatggcgctgtcgatggtcatcatcgcgtcgatggtgggcgctggtggcctgggcaatgaagtgctcgccagcattcagcggctggatatcgggctcgggttcgaaagcggtttgtccgtggtgctgctggccatcatcctggaccgcatcaccgagagcttcggccgtgcgcccggcacacagaaggccgcaatgttctccggactgcgacacctcttcaacgccaaagcagcgcccgtacaaacctga

SEQ ID NO: 3886 - protein, 298 aa, Ralstonia solanacearum GMI1000
MSDTLPIGHWVDQAVHYLLDHDAAAFDTVGRAIDGLAALVERSLQAVPMWMMMAFFIGIGLWRVGWRFALFTAASLFLISATGFWDQTIVTLGLTLSSTIISLALGVPLGIWAARSRVVSAVVRPILDLMQTMPAFVYLIPAAMLFGLGRVPGILSTVIFAMPPAVRLTSLGIRQVNMELVEAGLAFGCTPRQLLYKVQIPNALPSIMQGVNQTIMMALSMVIIASMVGAGGLGNEVLASIQRLDIGLGFESGLSVVLLAIILDRITESFGRAPGTQKAAMFSGLRHLFNAKAAPVQT

SEQ ID NO: 3887 - DNA, 858 bp, Agrobacterium tumefaciens str. C58
  CDS (1)..(858): transl_table=11
atgtttcctgaagttttccatatttccatccgcggcccgatcaatgaaatcgtgcgctcgctggtggtgaactacggctatgttttcaaggcgatctcgcagacgatcctgcaggcgatcctcttcgtggaatgggctctgcgcggactgccgtggtgggccatttttctggtctttctggtgctcgcctggttcgccgcgaaaaagatttcgctggtcatcatggtcgccgtcatgctgttcatcgtcggcgcgctcggtctctgggacctgacgatgcagacactggcgctgatgctgattgccagcctcatctccatcgtcatcggcgtgcccatcggcatcctgcttgcgaaaagcgaatgggcgcggcgcatcaccctgccgatcctcgatgtcatgcagaccatgccgagcttcgtctatctcatccccgctatcatgctgttcggcctcggcaaggtcccggccgtgctggccaccatcgtttatgccgcgccgccactgatccgcctcaccgatcttggtattcggcaggtggaccgggaagtggtggaggccgcgaccgcctttggcggtagcccgagacagatccttttcggtgtcgaattgccgcttgccacaccgaccatcatggccggtctcaaccagacgatcatgatggcgctctccatggtcgtcgtcgcctcgatgatcggcgcgcgcggtctcggtgagcaggtgctgaacggtatccagacgctcgatgtcggcaagggcctcgaagcaggtctcggcatcgttattctcgcaatcgtgctcgatcgcatcacgcagggttttggccaatccagccggaaggaaatgggcaatgactga

SEQ ID NO: 3888 - protein, 285 aa, Agrobacterium tumefaciens str. C58
MFPEVFHISIRGPINEIVRSLVVNYGYVFKAISQTILQAILFVEWALRGLPWWAIFLVFLVLAWFAAKKISLVIMVAVMLFIVGALGLWDLTMQTLALMLIASLISIVIGVPIGILLAKSEWARRITLPILDVMQTMPSFVYLIPAIMLFGLGKVPAVLATIVYAAPPLIRLTDLGIRQVDREVVEAATAFGGSPRQILFGVELPLATPTIMAGLNQTIMMALSMVVVASMIGARGLGEQVLNGIQTLDVGKGLEAGLGIVILAIVLDRITQGFGQSSRKEMGND

SEQ ID NO: 3889 - DNA, 888 bp, Agrobacterium tumefaciens str. C58
  CDS (1)..(888): transl_table=11
atggaatggcttttcaaatttccgaccatgaatgacgatgctctgcgtgcgctgaaaaaagtcatcgacgagggattccggggcttcacccgaacctatggcggcgcgattgaggggctgttcacccccctgcagagctttctcatctgggcggaaaggcttttgatcggcgcaccctggccggtcgttattcttattgtcggcgcgctcgcctggtttgccagccgcagcgctaccatcgtttcactgtgttgcggcattctcttcgccatcggctggttcggcatgtgggaagacacgatgaagacggtctcgatgatcttcgtctgcgcggtcatgtccatcgtcatcggattgccgatcggcatcgccatggcgcgatcgaaccgcctgcagaacgtggttaatcccgtcctcgacgtgatgcagacgatgccgagcttcgtttatctcattcccgtcgtcatgcttttgggcatcggccgcgtgcctggcgtcatcgccgtcatcatctacgccattccgcccatgatccggctgaccaatctcggtatccgcatggtcgaccacgacgtgctggaggcggccgacgctttcggatcctcgaagcgccagaaactgttcaaggtgcagctgccgctcgcactccccaccatcatggccggtatcaaccagaccatcatgatggcgctcgccatggtcgtcatcgcctccatgatcggcgtgcagggtcttggccagccggtgctgaaggccatcgccaaccagtatttcacgctgggcgtgttcaacgggcttgccatcgtcggcatcgccatcatcttcgaccgcatcagccaggcctatggccttcgtctgcaaaaacaccgggaagtggcgcatggctag

SEQ ID NO: 3890 - protein, 295 aa, Agrobacterium tumefaciens str. C58
MEWLFKFPTMNDDALRALKKVIDEGFRGFTRTYGGAIEGLFTPLQSFLIWAERLLIGAPWPVVILIVGALAWFASRSATIVSLCCGILFAIGWFGMWEDTMKTVSMIFVCAVMSIVIGLPIGIAMARSNRLQNVVNPVLDVMQTMPSFVYLIPVVMLLGIGRVPGVIAVIIYAIPPMIRLTNLGIRMVDHDVLEAADAFGSSKRQKLFKVQLPLALPTIMAGINQTIMMALAMVVIASMIGVQGLGQPVLKAIANQYFTLGVFNGLAIVGIAIIFDRISQAYGLRLQKHREVAHG

SEQ ID NO: 3891 - DNA, 924 bp, Agrobacterium tumefaciens str. C58
  CDS (1)..(924): transl_table=11
atgtttgatgccaacgatcttgccgtctttccgatcgatgcctggattgccgatggcgtccagtggatcgctcttaatcttcgccctttgtttgttgccatcaagtggccgatcgaaaacctgttggcgttcaacgaccacattctgcatgccatcccgttcccgatcttcctggtcctgtcgtttttgatcgcctatcgcctagcctcgctcggcatcgccatttttaccgcgatctctttcgtcgtcatcgcgtcgcttggggtttgggatgaatcgatgacaacgctgtcgctgataagcaccgcaatcgtcatatcgacagtgatcggcattccggtcggcatatggtgcgcgatcaacaacagcgtatggcaggtcgtccggccagtcttggatatcatgcagaccacgccaaccttcgtttatctcgtgcctgttgtcatgctgttcggtgttggtacggtgcccggcgaagtggccgtcgtgattgccgctgcgccgccgctcatccggttcaccaatctcggtattcgcatggtggagacggaaatggttgaagcaggtctcgccttcggtgccgaccggcgccaactcctctgggaaatccagtttccgctggctatcccgacgattcttggtggccttaaccagacggttctgacggcgatggtcatgtctgtcgtggtggcgatgatcggagccgaagggctcgggcttgtcgtgttgcaggggcttgggcgtcttgatgtgggtcgagcggctgttggcggtatcgcaattattcttcttgccatgatcctcgaccggatcacgcaaaagctcgccatgcccgcgacgtcaaaggcgaagcgttcgtttcggacgacgctcagcacggttctgatgggagcccgctcgaaaccttcggccggaactgcctga

SEQ ID NO: 3892 - protein, 307 aa, Agrobacterium tumefaciens str. C58
MFDANDLAVFPIDAWIADGVQWIALNLRPLFVAIKWPIENLLAFNDHILHAIPFPIFLVLSFLIAYRLASLGIAIFTAISFVVIASLGVWDESMTTLSLISTAIVISTVIGIPVGIWCAINNSVWQVVRPVLDIMQTTPTFVYLVPVVMLFGVGTVPGEVAVVIAAAPPLIRFTNLGIRMVETEMVEAGLAFGADRRQLLWEIQFPLAIPTILGGLNQTVLTAMVMSVVVAMIGAEGLGLVVLQGLGRLDVGRAAVGGIAIILLAMILDRITQKLAMPATSKAKRSFRTTLSTVLMGARSKPSAGTA

SEQ ID NO: 3893 - DNA, 906 bp, Brucella melitensis 16M
  CDS (1)..(906): transl_table=11
atggatttgaatttcagtgtcggcggatgggcggatgtggcggtcaattacatactcgaccacttcacgcccgcgctcgatatgattgcggctgcgatcggctttgtaacggatggcatccagaatgctctcatcgccgttccgccctttgcgggcgttgctatcctcagcttgctggcgctttggcgcgtcggctggaaatttgcggttttcacgcttctggcgctcgccctcatcatccacatggatctgtggagcggcacgatggaaagcttgtcgctggtgctggcatcaaccgtcattgcggtggtgatcggcattccgcttggtatcgccatggcgcgcagtgacgctgttgcctcaatcgtaaggccgatcctcgacctcatacagacgatgccggctttcgtctatcttattccggcggcaatgtttttcggtcttggcgcggtgccgggcacaattgccaccgtgatcttcgccatgccgcccgtggtgcgtctcaccaatctcggcatccggcaggttcatgcggaatttgtggaggcgggcctcgctttcggctgcaccgcgcggcagcttctgttcaaggtccagcttcctaacgccatgccgtccatcatggcaggtgtcaaccagacgatcatgctgtcgctttccatggtggtcatcgcctcgatgatcggcgcgggcggccttggcaacacggtgctgaccggcatccagcgactcaatgtgggccttggcttcgagggcggtctggcggttgtcattctggcggtcattctcgatcgcatcacgcaaagcttcggcaagggcggcacgggcctgctcaagcggctcgcattcttgaaaagggcggcaggcgaacagcctgcctcatcctttcgcaagcaggaagcatga

SEQ ID NO: 3894 - protein, 301 aa, Brucella melitensis 16M
MDLNFSVGGWADVAVNYILDHFTPALDMIAAAIGFVTDGIQNALIAVPPFAGVAILSLLALWRVGWKFAVFTLLALALIIHMDLWSGTMESLSLVLASTVIAVVIGIPLGIAMARSDAVASIVRPILDLIQTMPAFVYLIPAAMFFGLGAVPGTIATVIFAMPPVVRLTNLGIRQVHAEFVEAGLAFGCTARQLLFKVQLPNAMPSIMAGVNQTIMLSLSMVVIASMIGAGGLGNTVLTGIQRLNVGLGFEGGLAVVILAVILDRITQSFGKGGTGLLKRLAFLKRAAGEQPASSFRKQEA

SEQ ID NO: 3895 - DNA, 1167 bp, Yersinia pestis KIM
  CDS (1)..(1167): transl_table=11
atgagtgatcaaattcaggtgaacgaacaaacagtcaataatccgtgggcaactgatacggcaacatcagtcgctcccacggttaccgatagtgcacctcagagcctgtcagccgctgctgacccatggggagcaagcatggccgagggaagcaatagcgtagggtctgcaacgcatgaggcggcgtctcaggccgcacaaaataccgattggttgaacagcgcacctaccccagcaccagagcatttcagcctgatggacccgttccagaatacgtggatcccactggactcgtgggttacccaaggtattgattgggtcgttctgcactttcgtccgctgtttcaggggatccgcgtaccggttgattttatcctcagcggctttcagacattgttactggggatgcccgcacccgtagcgattttagttttcgccctgatagcctggcagttttccacgctcagtatgggcgcggcaaccttgatatcactgattgccatcggtgctatcggcgcatggtcgcaggccatggtgaccttggcactggttctgacctccctgttcttctgtattctgattgggctccccctcggaatctggctggcgcgcagcaataatgccgcccggattattcggcccttactggatgcaatgcagaccacacccgcgttcgtctatctggtccccatcgttatgctgttcggtatcggtaacgtccccggtgtcgtggtgacgattatttttgccctgccccctattgtccgcctgaccattctcggcatcaaacaagtaccggaagatctgattgaagcagcggagtcctttggtgccaacccgcgtcagttgctgttcaaagtacagctaccgctggcgatgccaaccattatggctggggtgaaccaaacgttgatgctggcattgtccatggtggttatcgcttcaatgattgcagtgggtggtttaggtcagatggtcctgcgcggtattggccgtctggatatggggctggctgccgtaggcggcgtcggtattgtgatcctcgccattattttggatcgcttaacccaatcattaggtcgtgatcgccgcagtaaaggcactggtcgctggtataccacagggcctgttgggttgctcaccaaacccttctgtaacagcaaataa

SEQ ID NO: 3896 - protein, 388 aa, Yersinia pestis KIM
MSDQIQVNEQTVNNPWATDTATSVAPTVTDSAPQSLSAAADPWGASMAEGSNSVGSATHEAASQAAQNTDWLNSAPTPAPEHFSLMDPFQNTWIPLDSWVTQGIDWVVLHFRPLFQGIRVPVDFILSGFQTLLLGMPAPVAILVFALIAWQFSTLSMGAATLISLIAIGAIGAWSQAMVTLALVLTSLFFCILIGLPLGIWLARSNNAARIIRPLLDAMQTTPAFVYLVPIVMLFGIGNVPGVVVTIIFALPPIVRLTILGIKQVPEDLIEAAESFGANPRQLLFKVQLPLAMPTIMAGVNQTLMLALSMVVIASMIAVGGLGQMVLRGIGRLDMGLAAVGGVGIVILAIILDRLTQSLGRDRRSKGTGRWYTTGPVGLLTKPFCNSK

SEQ ID NO: 3897 - DNA, 831 bp, Oceanobacillus iheyensis HTE831
  CDS (1)..(831): transl_table=11
atggattatttttatttaccactagaacagtggatgaatgaattcgttaatggatggtttctaccaacgtttagtggtatattcaacgtcattagtgaagtttttaacatatttatcggtggagttacagatttattattattgatcccagcagaactatttactattattctagcattaatagcttggaaggtatctggcattggtttagctgtttttactataataggatttttatttattggttctgtggatatgtgggaaggagctatgcagacacttgcaattattattgtagcaacccttgtctctctcgttataggtatacctgtgggaatattaagcgccatgaatgatggagtacaacgaatcgtgcgaccaatcctagatttcatgcaaactttaccgagttttgtgtacctaattcctgcagtcttattatttggtctaggcggtgtcccagcagtgatggctacatttatatttgctgctcctccagctgttcgcatgactaatttaggtattcgaagtgtaccaaaagagattgttgaagcttctcgagcatttggttctacaaataagcaactattatataaagttcaaattccattagcgataccaagtatcatggcaggagtaaatcaaacaattatgctttccctgtcaatggctgttgtggcttctatgatcggagcaccaggattaggtgcatctgtattaacagctatttctcaagtgaatattggattaggtttggtagctggtttgggaattgttgtcttagcaattgttcttgatcggattacacaaggaattggtaaaggaaaataa

SEQ ID NO: 3898 - protein, 276 aa, Oceanobacillus iheyensis HTE831
MDYFYLPLEQWMNEFVNGWFLPTFSGIFNVISEVFNIFIGGVTDLLLLIPAELFTIILALIAWKVSGIGLAVFTIIGFLFIGSVDMWEGAMQTLAIIIVATLVSLVIGIPVGILSAMNDGVQRIVRPILDFMQTLPSFVYLIPAVLLFGLGGVPAVMATFIFAAPPAVRMTNLGIRSVPKEIVEASRAFGSTNKQLLYKVQIPLAIPSIMAGVNQTIMLSLSMAVVASMIGAPGLGASVLTAISQVNIGLGLVAGLGIVVLAIVLDRITQGIGKGK

SEQ ID NO: 3899 - DNA, 861 bp, Oceanobacillus iheyensis HTE831
  CDS (1)..(861): transl_table=11
atgagtaatgaaagcatgcttgatattgtaccagaaataccattatcacaatggacagaaacaacaacagaatggattcaagagaaatttgcatttattttcgaaccattgaagacatattttggcgattttatggattatgtatcagaggaattacttgtaggaattccacccgtactatttatcctcattgttgccgtaattgcattttttgtatcgggtaagaaatttggattagcggccttttcgattgttggtctttggtttgtatataaccaaggtttatgggatgcgctaatgtctaccgttacccttgtattattagcaagtttattatccgttatcgttggtgttccgattggaatactgatgtcaaagagtaagatagcgaataccatattcacaccaattctagactttatgcagacgatgccagcattcgtatacttaattcctgctgtagcattcttcggaattggtatggttccaggtgtgtttgcatcactaatctttgcaacaccaccaaccgttcgttttacgaatttaggtattcgtcaagtatcgaaggatcttgtagaagcatcagattcatttggtagtacaggaactcaaaaactatttaaggttgaattaccaatggcgagatcgacgattatggctgggattaaccagactgtaatgttagcactatccatggttgtaattgcatcgatgattggtgcacctggattaggaagtcaggtactttcttctctacaacgtgcttctgtaggacctggtttcgtagcaggtattggaattgttatcttagcgattattattgatcgtattacgcaaaatatgaacaaagaaaaagaataa

SEQ ID NO: 3900 - protein, 286 aa, Oceanobacillus iheyensis HTE831
MSNESMLDIVPEIPLSQWTETTTEWIQEKFAFIFEPLKTYFGDFMDYVSEELLVGIPPVLFILIVAVIAFFVSGKKFGLAAFSIVGLWFVYNQGLWDALMSTVTLVLLASLLSVIVGVPIGILMSKSKIANTIFTPILDFMQTMPAFVYLIPAVAFFGIGMVPGVFASLIFATPPTVRFTNLGIRQVSKDLVEASDSFGSTGTQKLFKVELPMARSTIMAGINQTVMLALSMVVIASMIGAPGLGSQVLSSLQRASVGPGFVAGIGIVILAIIIDRITQNMNKEKE

SEQ ID NO: 3901 - DNA, 906 bp, Brucella suis 1330
  CDS (1)..(906): transl_table=11
atggatttgaatttcagtgtcggcggatgggcggatgtggcggtcaattacatactcgaccacttcacgcccgcgctcgatatgattgcggctgcgatcggctttgtaacggatggcatccagaatgctctcatcgccgttccgccctttgcgggcgttgctatcctcagcttgctggcgctttggcgcgtcggctggaaatttgcggttttcacgcttctggcgctcgccctcatcatccacatggatctgtggagcggcacgatggaaagcttgtcgctggtgctggcatcaaccgtcattgcggtggtgatcggcattccgcttggtatcgccatggcgcgcagtgacgctgttgcctcaatcgtaaggccgatcctcgacctcatgcagacgatgccggctttcgtctatcttattccggcggcaatgtttttcggtcttggcgcggtgccgggcacaattgccaccgtgatcttcgccatgccgcccgtggtgcgtctcaccaatctcggcatccggcaggttcatgcggaatttgtggaggcgggcctcgctttcggctgcaccgcgcggcagcttctgttcaaggtccagcttcctaacgccatgccgtccatcatggcaggtgtcaaccagacgatcatgctgtcgctttccatggtggtcatcgcctcgatgatcggcgcgggcggccttggcaacacggtgctgaccggcatccagcgactcaatgtgggccttggcttcgagggcggtctggcggttgtcattctggcggtcattctcgatcgcatcacgcaaagcttcggcaagggcggcacgggcctgctcaagcggctcgcattcttgaaaagggcggcaggcgaacagcctgcctcatcctttcgcaagcaggaagcatga

SEQ ID NO: 3902 - protein, 301 aa, Brucella suis 1330
MDLNFSVGGWADVAVNYILDHFTPALDMIAAAIGFVTDGIQNALIAVPPFAGVAILSLLALWRVGWKFAVFTLLALALIIHMDLWSGTMESLSLVLASTVIAVVIGIPLGIAMARSDAVASIVRPILDLMQTMPAFVYLIPAAMFFGLGAVPGTIATVIFAMPPVVRLTNLGIRQVHAEFVEAGLAFGCTARQLLFKVQLPNAMPSIMAGVNQTIMLSLSMVVIASMIGAGGLGNTVLTGIQRLNVGLGFEGGLAVVILAVILDRITQSFGKGGTGLLKRLAFLKRAAGEQPASSFRKQEA

SEQ ID NO: 3903 - DNA, 828 bp, Clostridium tetani E88
  CDS (1)..(828): transl_table=11
atgttttttaaatttcatgtaggacctttttttgaatttattgtagaatggctaaaaactaatatagaaccattttttaatcttataaaagttattcatgaagcacttattaatggattagaagatatattaatgtttccacctagcatagtggtaattatattatttgcactattggcatataaattagcagataaaagggtagctatttttacctttgtaggactgttttttatagattctatgcaattatggaatcagacaatgcagacattagctttagttttagtttcagctttaatagcgttattaataggtgtgccttttggtattatgtctgcaagaaatgaaaaagctaataaaatattaagacctattttagattttatgcagacaatgccagcctttgtatatttaataccagcagtactgttttttggaatgggaaaagtaccaggagcaatagcaactgttatattttcaatgccacctgctgtaagattaactaatttaggaataaggcaagttccagatgaggtagtggaagctgcaaaatcttttggatctactcctaaacaaatgttatataaagtacagttaccaatagctctacctactatattagcaggagtaaatcagactataatgcttgcactatcaatggttgttgtctcagctatgataggagcaggaggattaggtagggaagtttatcaaggtataactcaattaaaaatagggcaaggttttgaaagcgggcttgcagtagttatattagctatgatactagatagaatgactcaatcacttgcaaataataaagaatga

SEQ ID NO: 3904 - protein, 275 aa, Clostridium tetani E88
MFFKFHVGPFFEFIVEWLKTNIEPFFNLIKVIHEALINGLEDILMFPPSIVVIILFALLAYKLADKRVAIFTFVGLFFIDSMQLWNQTMQTLALVLVSALIALLIGVPFGIMSARNEKANKILRPILDFMQTMPAFVYLIPAVLFFGMGKVPGAIATVIFSMPPAVRLTNLGIRQVPDEVVEAAKSFGSTPKQMLYKVQLPIALPTILAGVNQTIMLALSMVVVSAMIGAGGLGREVYQGITQLKIGQGFESGLAVVILAMILDRMTQSLANNKE

SEQ ID NO: 3905 - DNA, 966 bp, Pseudomonas syringae pv. tomato str. DC3000
  CDS (1)..(966): transl_table=11
atgtccgatttcagctttcttgatccgttccaatccctgactatccccctcggccaatgggtcgaggtagtgctcaattatatggtccataactttcgcgaggtcttccgctccatacgctggccggttgatcagatcctgaatggtatccagggtggcctgttgtcggtgccgccgacgatattcattatttttgccacgctcttgggctggcaggtgggcgggaaaaaagtcggcgttatgtgttttgtcaccctcacgctgctggggctgatcggcgtctgggccgatgcaatgacaaccctgtcgctggtgctcacttcactggtgttctgcgtggtgatcggggtgccattgggtgtgctctgtgcacgcagtgaccgactggaaagagtgctccggccaggactggatgccatgcagaccttgccagcgtttgtttatctggtgccggtggtgatgttgtttggtatcggcaacgttcccggtgtgctggtcaccattatcttttcagtcgcgccgttggtacgcctgaccaatctgggcatccggcaagtgccggaagacaaggtcgaagctgcccgagcattcggctgtacccgtcggcaaatgctgttcaaggtgcaacttccgctggcggcacccacgatcatggcgggcctgaaccaggcgctgatgttgtcactgtccatggtggtgatcgcctcgatgatttccgtgggcggtctggggctgatggtccttcgcggtatcggtcgactggatatgggcctggcaacggtcggcggtgtggggctggtcttgctggctatctttcttgaccggttaacccaggccatgggcgaacgcagtaataaagcggttaatggagaacattggtaccagacagggccagtcggaatagtgttcaaacttaaaaagaagacggcttcaacacctgccggcgcaccgctcaacgacaattga

SEQ ID NO: 3906 - protein, 321 aa, Pseudomonas syringae pv. tomato str. DC3000
MSDFSFLDPFQSLTIPLGQWVEVVLNYMVHNFREVFRSIRWPVDQILNGIQGGLLSVPPTIFIIFATLLGWQVGGKKVGVMCFVTLTLLGLIGVWADAMTTLSLVLTSLVFCVVIGVPLGVLCARSDRLERVLRPGLDAMQTLPAFVYLVPVVMLFGIGNVPGVLVTIIFSVAPLVRLTNLGIRQVPEDKVEAARAFGCTRRQMLFKVQLPLAAPTIMAGLNQALMLSLSMVVIASMISVGGLGLMVLRGIGRLDMGLATVGGVGLVLLAIFLDRLTQAMGERSNKAVNGEHWYQTGPVGIVFKLKKKTASTPAGAPLNDN

SEQ ID NO: 3907 - DNA, 852 bp, Pseudomonas syringae pv. tomato str. DC3000
  CDS (1)..(852): transl_table=11
atgtttcctgaaagcttcactttctcgatcgccaactgggtcaacgacggggtcgactcgctggtgactcagtatggcgacgtgttccggcacatctccgagaccctgctgtgggctatcgtcaacctcgaaggcctgctgcgcatggccccgtggtggctgatgctgatcatcgtcggcggtatcgcctggcacgcgacgcgcaaaatcatcacgacgctggtgatcgtcggcctgctgtttctggtcggcgcggtcgggttgtgggacaagctgatgcagacactggcgctgatgctggtcgccacgatcattgcggtgctgatcggcattccactgggcattctctcggcgcgcagtaatcgcctgcgctcggtgctgatgccgctgctggacatcatgcagaccatgcccagcttcgtttatctgattccggtgctgatgctgttcggtttgggcaaggtcccggccatcttcgccaccgtgatctatgccgcgccgccgctgattcgcctgactgatctgggcattcgtcaggtcgatggcgaagtgatggaagcgatcaacgccttcggcgccaatcgctggcagcaactgttcggcgtgcaactgccgctggccatgccgagcatcatggctggcatcaaccagaccaccatgatggcgctgtcgatggtggtcatcgcctcgatgatcggcgcacgcgggctgggcgaggatgtgctggtaggcattcagaccctcaacgtcggacgcgggctggaagccggccttgccatcgtcattctggcggtcgtcatcgaccgaatcacgcaggcctatggccgcccacggcatgaggcgcacaaatga

SEQ ID NO: 3908 - protein, 283 aa, Pseudomonas syringae pv. tomato str. DC3000
MFPESFTFSIANWVNDGVDSLVTQYGDVFRHISETLLWAIVNLEGLLRMAPWWLMLIIVGGIAWHATRKIITTLVIVGLLFLVGAVGLWDKLMQTLALMLVATIIAVLIGIPLGILSARSNRLRSVLMPLLDIMQTMPSFVYLIPVLMLFGLGKVPAIFATVIYAAPPLIRLTDLGIRQVDGEVMEAINAFGANRWQQLFGVQLPLAMPSIMAGINQTTMMALSMVVIASMIGARGLGEDVLVGIQTLNVGRGLEAGLAIVILAVVIDRITQAYGRPRHEAHK

SEQ ID NO: 3909 - DNA, 1086 bp, Vibrio parahaemolyticus RIMD 2210633
  CDS (1)..(1086): transl_table=11
atgtctacagagcaaacaaataacgatccttggtcgcaagccgcaccaacacaagaagacccgtggtcacaaggtagtgaggccgcaactaacaacgattggttgaacagcgaagccgtgcaagagacacctttcgatatcatgaacccatttcaagatgccgttctcccactcgataattgggtagaatctgggttgaattggctcgttgaacatggtcgccctgtttttcaagccatacgagttccgatcgattttatcttgtcctcattcgaaaccgcgttagtctctacgccgtcaccgattatggtgctgatcctatttttactcgcgtggcagttttctaacttcaaacttggtttatcaacactagtatcgttagtgttcattggcttgatcggcgcttggtctcaagccatgaccacgctcgccttggtgctcacatcggtgtttttctgcttgttgattggcttacccatggggatctggctagccagaagccaaaccgccgccaaatttgtaagaccaatattggatgcgatgcagaccaccccggcgttcgtctaccttgttccgatagtgatgctgtttggtattggtaacgtaccgggcgttgtcgtgacgatcattttcgcgctaccaccagtggttcgattgaccattcttgggattcaacaagtaccggaagagcttatcgaagcgggtcactcttttggcgcaaacaaaaagcaaatgctgtatcgcattcaattgccacttgcgctgccaacgatcatggcgggcgtcaaccaaaccttgatgctttctctgtcgatggtggttatcgcctcgatgatcgccgtgggcggtttgggtcagatggtgttacgaggcatcggacgactggacatgggtctggccgctgtcggcggtttaggcattgtgatcctcgctattttgttggatcgcattacgcaagagcttggcgtcaacgccggcaataccaaacttcgctggtaccatgccggccctatctcttatctgctcaaatttaaaaccaacaagaaccaaaacgacctaaaacttaggagaaatacgaatgaataa

SEQ ID NO: 3910 - protein, 361 aa, Vibrio parahaemolyticus RIMD 2210633
MSTEQTNNDPWSQAAPTQEDPWSQGSEAATNNDWLNSEAVQETPFDIMNPFQDAVLPLDNWVESGLNWLVEHGRPVFQAIRVPIDFILSSFETALVSTPSPIMVLILFLLAWQFSNFKLGLSTLVSLVFIGLIGAWSQAMTTLALVLTSVFFCLLIGLPMGIWLARSQTAAKFVRPILDAMQTTPAFVYLVPIVMLFGIGNVPGVVVTIIFALPPVVRLTILGIQQVPEELIEAGHSFGANKKQMLYRIQLPLALPTIMAGVNQTLMLSLSMVVIASMIAVGGLGQMVLRGIGRLDMGLAAVGGLGIVILAILLDRITQELGVNAGNTKLRWYHAGPISYLLKFKTNKNQNDLKLRRNTNE

SEQ ID NO: 3911 - DNA, 831 bp, Bacteroides thetaiotaomicron VPI-5482
  CDS (1)..(831): transl_table=11
atgataaatatcggacaatatatagagactgccattaattggctcacagaacattttgcttccttttttgatgctctcagcatggggatcggaggattcatagacggttttcagcacgtactgtttggaatacctttttatatcacaattgcagtgctggctgcgctcgcctggtttaagtcgggtaaggggacagccgtatttaccctcttgggtttattgcttatttacggcatgggcttttgggaagaaacgatgcagacattggcattggtactttcttccacttgtctggcattgcttttaggcgttccgttgggaatctggactgccaacagtgatcgttgtaacaagataatgcgccctgtcctcgactttatgcagacaatgcctgcctttgtctatctgattcctgccgttctattcttcggattgggaactgtgccgggagcttttgccaccatcatctttgcaatgcctcctgtggttcgtctgaccggtctgggcattcgtcaggttcctaaaaacgtagtagaagcctcccgctcttttggagctactccctggcagcttctttataaggtgcaattgcctttggcgttgcctactattctgacgggaatcaaccagacgatcatgatgtcactttcgatggtagtgattgctgccatgatttctgccggaggattgggagaaatcgtgctgaaaggtatcacccaaatgaaaatcggactcggatttgaaggcggtatcgcagtcgtgatattggcgatcgtgctggaccgcatcactcagggtatggcagataacagaaaaagtaaaaagaaataa

SEQ ID NO: 3912 - protein, 276 aa, Bacteroides thetaiotaomicron VPI-5482
MINIGQYIETAINWLTEHFASFFDALSMGIGGFIDGFQHVLFGIPFYITIAVLAALAWFKSGKGTAVFTLLGLLLIYGMGFWEETMQTLALVLSSTCLALLLGVPLGIWTANSDRCNKIMRPVLDFMQTMPAFVYLIPAVLFFGLGTVPGAFATIIFAMPPVVRLTGLGIRQVPKNVVEASRSFGATPWQLLYKVQLPLALPTILTGINQTIMMSLSMVVIAAMISAGGLGEIVLKGITQMKIGLGFEGGIAVVILAIVLDRITQGMADNRKSKKK

SEQ ID NO: 3913 - DNA, 1710 bp, Enterococcus faecalis V583
  CDS (1)..(1710): transl_table=11
atgaataagtatcaattacctgtcgcgtcttgggttgaaagttttactgattggttaacttcaacatttgctggattattcagctttttacaaacaattggtcaaagtgtaatggacaacattactgccttactaacagccgtaccaccacttgtgctgatcgtgctattaacgattgctgctttctttatttctaataaaaaaattggcttaagtttattcacgtttattggcttaatgtttatctataatcaaaacttatggaacgatttaatgagtaccgttacgttagttttactttctagtgttatttccattatcattggtgtgccactagggattttaatggcgaaaagcgaaaaagccaagagtatcattacaccgattttggacttcatgcaaacaatgcctggtttcgtttacttgattccagccgttgcattcttcggaattggtatggttcctggggtcttcgcctctgttatcttcgctttaccaccaaccgtacgctttacgaacttaggaattcgacaagtgccaaatgaacttgttgaagcagctgattcttacggtagtactggctggcaaaaattattcaaattagaattacctttagccaaaaacacgattatggctggtgttaaccaaacaaccatgctagccctatcaatggtagttattgcttcaatgattggtgcgcctggattaggacgtggcgtcctttccgctttacaacgtgcacaagtcgggaacggtttcgtaaatggtgtggctttagttattttagcgattatcattgaccgttttactcaacatttaaataataaaaaagcagctcctaaagcagctggtgccacctctaaaaagaaaaaatacgggattattgcagcggttgttgtaattgtcgctggcttagttggtgcttcaatttttacaacaacaaatgataagcaaatttccctttcttatgtggaatgggataccgaagtagcctccacacatgtggttgccgaagtcttaaaagatatggggtatgatgttaaaacgacccctttagataacgcaatcatgtgggaatctgtagctaaaggtgaaacagatgccatggttggtgcgtggctgccaggaactcacgcagagcaatataaacaatataaagataaattagacgaccttggtgaaaaccttaaaggcgcgaagttaggaattgttgtcccttcttatatggatgttgattctatcgaagatttatctgatcaagctgggaaaaagattactggaattgaacctggggctggtgttgttgcagcagcagagaaaactaaagaagcttatcctaatttgaaagattggtctgttgaaacttcttcatcaggtgccatgactgtcgccttaggacaagcaattaaaaacaacgaagacatcgttattactggctggtctcctcactggatgtttgcaaaatatgatttaaaatatttagctgatccaaaaggcactatgggcggcgaagaagcgattcacacaatggctcgccaaggcctaaaagaagatcaaccagaagcttacaaagtgttagataatttccattggaccactaaggatatggaatctgtcatgttagaaattaacgaaggcaaagacccacaagaagctgcacgtgattgggttgattcacataaagaccaagtagcagaatggaaaaaataa

SEQ ID NO: 3914 - protein, 569 aa, Enterococcus faecalis V583
MNKYQLPVASWVESFTDWLTSTFAGLFSFLQTIGQSVMDNITALLTAVPPLVLIVLLTIAAFFISNKKIGLSLFTFIGLMFIYNQNLWNDLMSTVTLVLLSSVISIIIGVPLGILMAKSEKAKSIITPILDFMQTMPGFVYLIPAVAFFGIGMVPGVFASVIFALPPTVRFTNLGIRQVPNELVEAADSYGSTGWQKLFKLELPLAKNTIMAGVNQTTMLALSMVVIASMIGAPGLGRGVLSALQRAQVGNGFVNGVALVILAIIIDRFTQHLNNKKAAPKAAGATSKKKKYGIIAAVVVIVAGLVGASIFTTTNDKQISLSYVEWDTEVASTHVVAEVLKDMGYDVKTTPLDNAIMWESVAKGETDAMVGAWLPGTHAEQYKQYKDKLDDLGENLKGAKLGIVVPSYMDVDSIEDLSDQAGKKITGIEPGAGVVAAAEKTKEAYPNLKDWSVETSSSGAMTVALGQAIKNNEDIVITGWSPHWMFAKYDLKYLADPKGTMGGEEAIHTMARQGLKEDQPEAYKVLDNFHWTTKDMESVMLEINEGKDPQEAARDWVDSHKDQVAEWKK

SEQ ID NO: 3915 - DNA, 2616 bp, Streptomyces avermitilis MA-4680
  CDS (1)..(2616): transl_table=11
atgcctaggatccccttcggcgactgggtcaacgacaccgtcgactggctgctgaaccacatgtcgtggctcttcgacttcttcaagacggtcttcctgggtgccttcgacggcatcgacgcggtcctccaggctccgcagccgctcctcctcgccggaatcctcgcggtgatcgcgttctggctgcgcggcacgtcagcgggtgtcctcaccttcgtgggattcgcgttcatcgactccctcgaactgtgggaggacgcgatggtgaccctgtcgctcgtcctcgtggccacggtcatcgcgctcgtggtctccgtgcccgtgggtatctgggcggcgcgttcggaccgggtcagcagcatcgtgcgccccgtgctcgacttcatgcagacgctgcccgcgatgatctacctcatcccggcgatcctgttcttcggcaccggcgcccccgcgggcatcgtggcgaccctgatcttcgcgctggcacccggcgtccggatgaccgagctgggcatccgtcaggtcgacaaggaactggtcgaggccgccgacgcgttcggcaccaccccccgcaacatcctgctgcgcgtccagctcccgctggcgctgccgacggtcatggccggtgtcaaccaggtcatcatgctgggtctgtccatggccgccatcgcgggcatggtcggcaccggcggcctcggcggcgacgtcaacgaggccatcggccagctcaacgtcggcctcggctcggaggccggtgtcgccatcgtcatcctggccatctacctggaccgcatgaccagtgccctgggcacccaggtctcgccgctcggccgccgcgccgccgccaagctgcgcgccgcgcagggcctgaagatctggtcctaccgcccccgggccgccgtggccgtggtcggtgtggtcgtcctcgcgctggtcgcgggcggcatgggcatcttcggcggtacgacgtcgtcgaccgccgcgtccgacgccgagaacgtcggccagggcaagaaggtcaccatcggctacatcccgtgggacgagggcgtcgcctccaccttcctgtggcaggaggtgctggaacagcgcggcttccaggtcgacaccaagcagttcgacgcgggcccgctctacacctcgctcgggcagggagacatcgacttccagaccgactcctggctgccgaccacgcacgcgcagtactggaagaagtacggcaagcaactcgacgacctgggttcctggtacggcccgacgtcgctggagctgagcgtgccctcgtacatgaagggcgtcgactccctggcggacctcaagggccaggcctcgaagttcggcggcaagatcaccggcatcgagtccagcgccggcatgatgggcctgctcaagaccaaggtcctgaaggagtacgggctcgacaaggagtacaaggtcgtcgacagctccacgcccgccatgctggccgagctgaagcgcgcgtacgccaagaaggaccccgtcgtcgtcacgctctggtcgccgcactgggcgtacagcgactacgacctgaagaagctcaaggaccccaagggcgcctggggcaagggcgacggggtgcacaccctcgcccgcaagggcttcgcccaggacaacccggtcgtcggccggtggctcaagaacttcaagatgaccgagaagcagctcaccggtctcgaggcggagatcaacaaggcgggcaagggcaagcagcaggacgccgtgcgctcctggctgaagcggaacccgggtgtcgtcgacaagctggcgccggtcaagagcgccacgtccggcgccgccggcgagacgaagcgtccgctggacgtagcctggttcccctgggacgaggacgtcgccgtcacctacctgtggaagaacgtcctggcgcggcgcggctacacgctgaatctcaagcagatggacgtcggccccgtctacacgggcctggcctccggagatctcgacctcaacttcgacgcgtggctgccgtacgcccagaagaactactgggaccagcacaagaacgacctgagagacctgggcacctggtacaaacccacgtcactcgaaatcgccgtgccctcctacgtgaaggacgtcaagtccctcgcggacctcaagggcaagggcggcaccttcgacgggaagatcatcggaatcgagccgggcaccggcgagatgaacctgctcaagacgaaggtgcttccggggtacggcctggacaaggagtacaaggtcgtcgacggctccacgcccgcgatgctcgccgagctgaagcgcgcgtacgccaagaaggagccggtcgccgtcgtcctctggtcgccgcactgggcctacagcgagtacaagctcaccaagctggcggacgacaagaagctgttcggcgagggcaacacgatccggaccatctccagcaagcagttcccggagcggtatccgcagctcaccaagtggatcaaggacttccggatgagcgaggccgaactcggcagcctggagagcgagatcaagaagcgtgggcaggggcatgagcaggacgccgtcgccgcgtggctgaaggagcacccggacatggtgggccggatgactccgcagtag

SEQ ID NO: 3916 - protein, 871 aa, Streptomyces avermitilis MA-4680
MPRIPFGDWVNDTVDWLLNHMSWLFDFFKTVFLGAFDGIDAVLQAPQPLLLAGILAVIAFWLRGTSAGVLTFVGFAFIDSLELWEDAMVTLSLVLVATVIALVVSVPVGIWAARSDRVSSIVRPVLDFMQTLPAMIYLIPAILFFGTGAPAGIVATLIFALAPGVRMTELGIRQVDKELVEAADAFGTTPRNILLRVQLPLALPTVMAGVNQVIMLGLSMAAIAGMVGTGGLGGDVNEAIGQLNVGLGSEAGVAIVILAIYLDRMTSALGTQVSPLGRRAAAKLRAAQGLKIWSYRPRAAVAVVGVVVLALVAGGMGIFGGTTSSTAASDAENVGQGKKVTIGYIPWDEGVASTFLWQEVLEQRGFQVDTKQFDAGPLYTSLGQGDIDFQTDSWLPTTHAQYWKKYGKQLDDLGSWYGPTSLELSVPSYMKGVDSLADLKGQASKFGGKITGIESSAGMMGLLKTKVLKEYGLDKEYKVVDSSTPAMLAELKRAYAKKDPVVVTLWSPHWAYSDYDLKKLKDPKGAWGKGDGVHTLARKGFAQDNPVVGRWLKNFKMTEKQLTGLEAEINKAGKGKQQDAVRSWLKRNPGVVDKLAPVKSATSGAAGETKRPLDVAWFPWDEDVAVTYLWKNVLARRGYTLNLKQMDVGPVYTGLASGDLDLNFDAWLPYAQKNYWDQHKNDLRDLGTWYKPTSLEIAVPSYVKDVKSLADLKGKGGTFDGKIIGIEPGTGEMNLLKTKVLPGYGLDKEYKVVDGSTPAMLAELKRAYAKKEPVAVVLWSPHWAYSEYKLTKLADDKKLFGEGNTIRTISSKQFPERYPQLTKWIKDFRMSEAELGSLESEIKKRGQGHEQDAVAAWLKEHPDMVGRMTPQ

SEQ ID NO: 3917 - DNA, 837 bp, Bacillus anthracis str. Ames
  CDS (1)..(837): transl_table=11
atgaatagtattccgcgtattccattaggggaatgggttgattcatttgttgcaagtttatatgagcactttgaaggcttattccgaggattctcttatattattggaggattcgttgatttactcactaattttttaataataataccggccatattgatgattattttactgtgtttcctaatttggtacacaacgagaaaagtatctttagttatttttacactgatcggattattatttattttaaatattaactactgggcacagacgatgcaaacattagcactcgtacttacttccgttattatttcaattattgttggaattccaattgggatattagcatctcaaaatgagcgtttctcaaaatttttaaaaccgacattagattttatgcagacaatgccggctttcgtatatctgattcctgcgattacatttttcggagtaggagtagtacctgggattattgcatcagtaatctttgcaatgccaccgacaattcgttttactgatttaggaattagacaagttccagaagatttaatagaagcagcgaatgcatttggttcaaccgcatcacaaaaactatttaaagtacaattaccactcgcaactggaacgattatggctggtgtgaatcaaagcattatgctttcgttatcaatggtagtaacagcatctcttgtaggagcaccaggtctcggcgttgatgtataccgttcagtaacacaagttaatatcggaatgggatttgaagccggactagctattgttgtcattgcgattatattagaccgcattacacaaggatttcatcaaaaaagaagataa

SEQ ID NO: 3918 - protein, 278 aa, Bacillus anthracis str. Ames
MNSIPRIPLGEWVDSFVASLYEHFEGLFRGFSYIIGGFVDLLTNFLIIIPAILMIILLCFLIWYTTRKVSLVIFTLIGLLFILNINYWAQTMQTLALVLTSVIISIIVGIPIGILASQNERFSKFLKPTLDFMQTMPAFVYLIPAITFFGVGVVPGIIASVIFAMPPTIRFTDLGIRQVPEDLIEAANAFGSTASQKLFKVQLPLATGTIMAGVNQSIMLSLSMVVTASLVGAPGLGVDVYRSVTQVNIGMGFEAGLAIVVIAIILDRITQGFHQKRR

SEQ ID NO: 3919 - DNA, 858 bp, Bordetella parapertussis 12822
  CDS (1)..(858): transl_table=11
atgttccctgaagtcattcccgcgcgcgcagtgcgcggggccatcgacggattcgtcgatcatctcgttaccaactacgccgacacgctggaagcgatgtcgcaacctttcctgagcgtgctggtctggctggagcaggtgctgcgccagtcgtcgtggtgggcggtggtggcggtcaccatcgccatcgcgtggctggtcagccgccgcatcggcctgagcctggccatgggcgcgctgctgtgcgtcatcggcgtgctgggcctgtgggacgccggcatgcagacgctggcgctcatgatcatggccgccggcctttcggtggtgatcggcatcccgctgggcgtgctgatggcgcgggtggactggctgcgcgccggcatgctgccggtgctggacgtgatgcagaccatgcccagcttcgtgtacctgatcccggtcgtgatgctgttcgggctgggcaagatcccggccatcatcgcgaccgtgatctacgccgtgccgccgctgatccgcctgaccgacctgggtatccgcctggtcgaccgcgaagtcctggaggcggcgcgcgccttcggcgccaatccgcgccagcagctgttcggcgtgcagttgccgctggccctgcccaacatcatggccgggatcaaccagaccaccatgatggcgctgtcgatggtggtcatcgcttcgatgatcggtgcgcgcggcctgggctatgaagtgctgctgggcatcaaccgcctggaggtcggccgcggactgctggccgggctgggcatcgtcgtgctggcggtgctgttcgaccgcatcacgcaatcgtacgggcaacgcgtacgcacgggaggccagcgatga

SEQ ID NO: 3920 - protein, 285 aa, Bordetella parapertussis 12822
MFPEVIPARAVRGAIDGFVDHLVTNYADTLEAMSQPFLSVLVWLEQVLRQSSWWAVVAVTIAIAWLVSRRIGLSLAMGALLCVIGVLGLWDAGMQTLALMIMAAGLSVVIGIPLGVLMARVDWLRAGMLPVLDVMQTMPSFVYLIPVVMLFGLGKIPAIIATVIYAVPPLIRLTDLGIRLVDREVLEAARAFGANPRQQLFGVQLPLALPNIMAGINQTTMMALSMVVIASMIGARGLGYEVLLGINRLEVGRGLLAGLGIVVLAVLFDRITQSYGQRVRTGGQR

SEQ ID NO: 3921 - DNA, 858 bp, Bordetella bronchiseptica RB50
  CDS (1)..(858): transl_table=11
atgttccctgaagtcattcctgcgcgcgcagtgcgcggggccatcgacggattcgtcgatcatctcgttaccaactacgccgacacgctggaagcgatgtcgcaacctttcctgagcgtgctggtctggctggagcaggtgctgcgccagtcgccgtggtgggcggtggtggcggtcaccatcgccatcgcgtggctggtcagccgccgcatcggcctgagcctggccatgggcgcgctgctgtgcgtcatcggcgtgctgggcctgtgggacgccggcatgcagacgctggcgctcatgatcatggccgccggcctttcggtggtgatcggcatcccgctgggcgtgctgatggcgcgggtggactggctgcgcgccggcatgctgccggtgctggacgtgatgcagaccatgcccagcttcgtgtacctgatcccggtcgtgatgctgttcgggctgggcaagatcccggccatcatcgcgaccgtgatctacgccgtgccgccgctgatccgcctgaccgacctgggtatccgcctggtcgaccgcgaagtcctggaggcggcgcgcgccttcggcgccaatccgcgccagcagctgttcggcgtgcagttgccgctggccctgcccaacatcatggccgggatcaaccagaccaccatgatggcgctgtcgatggtggtcatcgcttcgatgatcggtgcgcgcggcctgggctatgaagtgctgctgggcatcaaccgcctggaggtcggccgcggactgctggccgggctgggcatcgtcgtgctggcggtgctgttcgaccgcatcacgcaatcgtacgggcaacgcgtacgcacgggaggccagcgatga

SEQ ID NO: 3922 - protein, 285 aa, Bordetella bronchiseptica RB50
MFPEVIPARAVRGAIDGFVDHLVTNYADTLEAMSQPFLSVLVWLEQVLRQSPWWAVVAVTIAIAWLVSRRIGLSLAMGALLCVIGVLGLWDAGMQTLALMIMAAGLSVVIGIPLGVLMARVDWLRAGMLPVLDVMQTMPSFVYLIPVVMLFGLGKIPAIIATVIYAVPPLIRLTDLGIRLVDREVLEAARAFGANPRQQLFGVQLPLALPNIMAGINQTTMMALSMVVIASMIGARGLGYEVLLGINRLEVGRGLLAGLGIVVLAVLFDRITQSYGQRVRTGGQR

SEQ ID NO: 3923 - DNA, 915 bp, Prochlorococcus marinus str. MIT 9313
  CDS (1)..(915): transl_table=11
atgatggatgtgaacgaccaagtttttgcaaccgtcagtaccggccctgtcggcgagggcatgagcagattcgtggactggttgctcaatcatgcgcaaccaattttcctagtaattgattctgcaattaatgggttagccggagccatcgaacagatcctctccgtaccagcgccctggctgctagctccccttatcgccatactcgcagcttggcgagtgagttttagcttcgccattctcagccttcttggtctgaacctcgttttgttcatggggctttggccgccaatgatctcaaccctggccctagttattgcagcctcattactggcactaatcattggcatcccgatcggcattttttctgcccgtcgccaacacatctgggcgattacccgcccagtattggatctgatgcaaaccatgccggcattcgtttatctcattccggcagtgatgtttttcggcacagggcttgtcccatccactatcgcaacgctgatcttctcgatgccacccgtagtacgcctgacgtacctgggcatacgacaagtccctgttgatctaatcgaagccgggcgcgccttcggttgctcagaacgacaattgctctggaaagtgcaacttccaaacgccttaccaaccttgatggctggtgttaatcaaaccatcatgctcgcgctatcgatggttgtgatcgcatcaatgattggtgggggcggcctaggtgatgtggtgctcagaggcatccaacaacttgatgtaggccttggcttcgagggagggctcgccgtggtaattctggctgtaatcctggatcgactcacacaaagcctggctgcctcaaacttttcgagaaagtcattgccgcagcgctttaaagcctttattaacctctggacttcctcatga

SEQ ID NO: 3924 - protein, 304 aa, Prochlorococcus marinus str. MIT 9313
MMDVNDQVFATVSTGPVGEGMSRFVDWLLNHAQPIFLVIDSAINGLAGAIEQILSVPAPWLLAPLIAILAAWRVSFSFAILSLLGLNLVLFMGLWPPMISTLALVIAASLLALIIGIPIGIFSARRQHIWAITRPVLDLMQTMPAFVYLIPAVMFFGTGLVPSTIATLIFSMPPVVRLTYLGIRQVPVDLIEAGRAFGCSERQLLWKVQLPNALPTLMAGVNQTIMLALSMVVIASMIGGGGLGDVVLRGIQQLDVGLGFEGGLAVVILAVILDRLTQSLAASNFSRKSLPQRFKAFINLWTSS

SEQ ID NO: 3925 - DNA, 915 bp, Synechococcus sp. WH 8102
  CDS (1)..(915): transl_table=11
atgagtcatctcttgagtgagctgtggctggcacaggccagcgaagccggggcggtaggcgcgacagccgacagcattgtcaactggctgcttggcaatggcggtgccctgttcagcctgatcaacaccgtcatccttgtgctgacggcgatcgtcgaacagctgctgaacgcacccgccccctggctgctcgcactggtggtggccctgcttgggctctggcgcgtcagtgccgcgttcggtcttctcagtcttctcggactgaatctggtgcaggccatgggcctgtgggagctgatggtcagcagcctggcccttgtgctgactgcctccttgctggccctcgcgatcggtcttcctttgggtgtgttggctgcccggcaacggagcatctggcagctcacccgtccgctgctggatctgatgcagaccatgccggcctttgtgtacctgattcccgcagtgatgctgttcagcaccggcgccgttccttcggtgatcgccacattgatcttcgcgatgccaccggtggtacggctcaccgttctgggcatccgccaagtaccggcggatctgatcgaagccgggcgatccttcggctgctccgagtggcagttgctcaccaaggtgcaactgcctaatgccttacccacgctgatgaccggcgtgaatcagacgatcatgctggcgctgtcaatggtggtgatcgcctcaatgatcggtggtggagggctgggtgatgtggtgttgcggggcatccagcaactgaacatcggcctgggctttgagggaggcctggccgtggtgatcctggcggtcatcctggaccggctcagccagagcctcagcacaccccccagccgatccgtgcgggatcgggtccgcagccttgccatgctttggaggattcgatga

SEQ ID NO: 3926 - protein, 304 aa, Synechococcus sp. WH 8102
MSHLLSELWLAQASEAGAVGATADSIVNWLLGNGGALFSLINTVILVLTAIVEQLLNAPAPWLLALVVALLGLWRVSAAFGLLSLLGLNLVQAMGLWELMVSSLALVLTASLLALAIGLPLGVLAARQRSIWQLTRPLLDLMQTMPAFVYLIPAVMLFSTGAVPSVIATLIFAMPPVVRLTVLGIRQVPADLIEAGRSFGCSEWQLLTKVQLPNALPTLMTGVNQTIMLALSMVVIASMIGGGGLGDVVLRGIQQLNIGLGFEGGLAVVILAVILDRLSQSLSTPPSRSVRDRVRSLAMLWRIR

SEQ ID NO: 3927 - DNA, 1086 bp, Photorhabdus luminescens subsp. laumondii TTO1
  CDS (1)..(1086): transl_table=11
atgagtaatcaaaacgaacatcaaactcagcctgtacagaattcagaggataccccgtccatcgctgccgataataccgacccctggagcagtggaaccagtgctgacaatgcaacgggttctgactggctggatgcccccgcaactgcggtacagcctgaacattttaatatcatggacccattccagcacccacttatccctttagactcatgggtaacccaggctattgattggattgtgctaaattttcgtcctgcatttcagggaatccgcgtccccattgattttgttctcagtggctttgaacaatgtctgacgtcaatacctgctcccattgccatcctattttttgccctgattgcctggcagttatcaggcattggtatgggtattactgctctaatttctctggtaattattggtgaaattggtgcgtggcacgaatcgatggtcactttatcactggctctgacatcgctattgttctgcattatcgttgggttaccactcggtatatggctggcacacagcaagagagccgcgaaaattatccaacctctgcttgatgccatgcaaaccacaccagcattcgtctatctggttccgattgtcatgctgtttggcatcggtaacgtgcctggagttatcgtcaccattatctttgctctacccccaattgtccgtctgacaattttaggcatcaaacaggttccagcagatctgatagaagcagccgaatctttcggcgccagccctcgtcagatgctgtttaaagttcaattaccactggctatgccaaccattatggccggtgtcaaccaaaccctgatgctggccctatcaatggtcgttattgcatcaatgattgccgttggtggtttaggccaaatggttttgcgaggtattgggcgtctcgatatggggcttgctacagtaggtggggtcgggattgttattcttgcgattctccttgaccgcctaacacagtcttttggctacagcaaccgggctaaaggcgtaaatcgctggtatgccactggcccaattggattagttacccgtttatttagccaaaaagcataa

SEQ ID NO: 3928 - protein, 361 aa, Photorhabdus luminescens subsp. laumondii TTO1
MSNQNEHQTQPVQNSEDTPSIAADNTDPWSSGTSADNATGSDWLDAPATAVQPEHFNIMDPFQHPLIPLDSWVTQAIDWIVLNFRPAFQGIRVPIDFVLSGFEQCLTSIPAPIAILFFALIAWQLSGIGMGITALISLVIIGEIGAWHESMVTLSLALTSLLFCIIVGLPLGIWLAHSKRAAKIIQPLLDAMQTTPAFVYLVPIVMLFGIGNVPGVIVTIIFALPPIVRLTILGIKQVPADLIEAAESFGASPRQMLFKVQLPLAMPTIMAGVNQTLMLALSMVVIASMIAVGGLGQMVLRGIGRLDMGLATVGGVGIVILAILLDRLTQSFGYSNRAKGVNRWYATGPIGLVTRLFSQKA

SEQ ID NO: 3929 - DNA, 837 bp, Bacillus cereus ATCC 10987
  CDS (1)..(837): transl_table=11
atgaataatataccacgtattcctttaggggaatgggtcgattcatttgttgcaagtttatatgagcactttgaaggcttattccgaggattctcttatattatcggcggattcgttgatttactcactaattttttaacaataataccggctatattgatgattattattttgtgtttcctcatttggtacacaacgagaaaagtatctttagttatttttacactcatcgggttattatttattttaaatataaactactgggcacaaacgatgcagacattagctcttgtacttacatctgttattatttcaatcattgtaggtatcccaattggtattttagcttcgcaaaatgaacggttttcaaaatttttaaaaccgacattagattttatgcaaacaatgccggctttcgtatatcttattcccgcgattacattttttggagtaggtgtagtacctgggattattgcatcagtaatctttgcaatgccaccgacaattcgttttactgacttaggaattagacaagttccagaagatttaatagaagcagcgaatgcgtttggctctaccgcatcacaaaaattatttaaagtacaattaccactcgcaactggaacgatcatggctggtgtgaaccaaagtattatgctctctttatcaatggtagtaacagcatcgcttgtaggagctccaggtcttggagttgatgtataccgttctgtaacacaagttaatatcggaatgggatttgaagccggactagccattgttgtcattgcgattatattagaccgcattacacaaggatttcatcaaaaaagaagataa

SEQ ID NO: 3930 - protein, 278 aa, Bacillus cereus ATCC 10987
MNNIPRIPLGEWVDSFVASLYEHFEGLFRGFSYIIGGFVDLLTNFLTIIPAILMIIILCFLIWYTTRKVSLVIFTLIGLLFILNINYWAQTMQTLALVLTSVIISIIVGIPIGILASQNERFSKFLKPTLDFMQTMPAFVYLIPAITFFGVGVVPGIIASVIFAMPPTIRFTDLGIRQVPEDLIEAANAFGSTASQKLFKVQLPLATGTIMAGVNQSIMLSLSMVVTASLVGAPGLGVDVYRSVTQVNIGMGFEAGLAIVVIAIILDRITQGFHQKRR

SEQ ID NO: 3931 - DNA, 849 bp, Listeria monocytogenes str. 4b F2365
  CDS (1)..(849): transl_table=11
atgcctaatattccaacgattccattagctagttggattgacaaattagtggatggcttaacgcaatttgaaggattttttaatgtaattacaaatatcattggcgggattgttgatgcattccaatgggtgttcgacttagttcccccgtggttatttattattttactagtacttggaactttctgggttaaccgtaaaggcaaaaaatggggtttaattatctttgaagttgtcggtttactgttaatttggaacttagatttctggcgtgatatgacacaaacattaacgctcgttctgacaagtagtttaattgcgcttgttattggggttccacttggtatttggatggcgaaaagcaatattgttgaaagtatcttcaaaccggtactcgattttatgcaaactatgccagccttcgtttacttaattcctgccgtagcatttttcggaattggaatggttccaggggttgtggcttctgttattttcgcaatgcctccaactgttcgtatgactaatctaggtattcgccaagtttcaacagagcttgtagaagcagccgattcgttcggttcaacaccttggcaaaaactttggaaagtacagctaccaatggcgaaatcaaccatgatggcgggtattaaccaaagtatcatgttagcactttccatggtcgtaattgcttcaatgatcggtgcaatgggacttggaacacgtgtttacttcgcagtaggacgtaacgacgctggtggcggatttgtagctgggattgcgattgttatcgtagcaatcatcctagaccgtctgacacaagctttcaataaaaaagcgaaatcagaatga

SEQ ID NO: 3932 - protein, 282 aa, Listeria monocytogenes str. 4b F2365
MPNIPTIPLASWIDKLVDGLTQFEGFFNVITNIIGGIVDAFQWVFDLVPPWLFIILLVLGTFWVNRKGKKWGLIIFEVVGLLLIWNLDFWRDMTQTLTLVLTSSLIALVIGVPLGIWMAKSNIVESIFKPVLDFMQTMPAFVYLIPAVAFFGIGMVPGVVASVIFAMPPTVRMTNLGIRQVSTELVEAADSFGSTPWQKLWKVQLPMAKSTMMAGINQSIMLALSMVVIASMIGAMGLGTRVYFAVGRNDAGGGFVAGIAIVIVAIILDRLTQAFNKKAKSE

SEQ ID NO: 3933 - DNA, 837 bp, Bacillus thuringiensis serovar konkukian str. 97-27
  CDS (1)..(837): transl_table=11
atgaatagtattccgcgtattccattaggggaatgggttgattcatttgttgcaagtttatatgagcactttgaaggcttgttccgagtattctcttatattattggaggattcgttgatttactcactaattttttaataataataccggccatattgatgattattttactgtgtttcctcatttggtacacaacgagaaaagtatctttagttatttttacactgatcggattattatttattttaaatattaactactgggcacagacgatgcaaacattagcacttgtacttacttccgttattatttcaattattgttggaattccaattgggatattagcatctcaaaatgagcgtttctcaaaatttttaaaaccgacattagattttatgcagacaatgccggctttcgtatatctgattcctgcgattacatttttcggagtaggagtagtacctgggattattgcatcagtaatctttgcaatgccaccgacaattcgttttactgatttaggaattagacaagttccagaagatttaatagaagcagcgaatgcatttggttcaaccgcatcacaaaaactatttaaagtacaattaccacttgcaactggaacgattatggctggtgtgaatcaaagcattatgctttctttatctatggtagtaacagcatctcttgtaggagcaccaggtcttggggttgatgtataccgctctgtaacacaagttaatatcggaatgggatttgaagccggactagctattgttgtcattgcgattatattagaccgcattacacaaggatttcatcaaaaaagaagataa

SEQ ID NO: 3934 - protein, 278 aa, Bacillus thuringiensis serovar konkukian str. 97-27
MNSIPRIPLGEWVDSFVASLYEHFEGLFRVFSYIIGGFVDLLTNFLIIIPAILMIILLCFLIWYTTRKVSLVIFTLIGLLFILNINYWAQTMQTLALVLTSVIISIIVGIPIGILASQNERFSKFLKPTLDFMQTMPAFVYLIPAITFFGVGVVPGIIASVIFAMPPTIRFTDLGIRQVPEDLIEAANAFGSTASQKLFKVQLPLATGTIMAGVNQSIMLSLSMVVTASLVGAPGLGVDVYRSVTQVNIGMGFEAGLAIVVIAIILDRITQGFHQKRR

SEQ ID NO: 3935 - DNA, 1182 bp, Erwinia carotovora subsp. atroseptica SCRI1043
  CDS (1)..(1182): transl_table=11
atgagtaaatcaacatcaaatccgtgggacaacaccacggcacaaaatcagcctgccgaccaaaacgcaacgcctgagcagggtaatagcgccgcgcaaagcgatccgtggtctaccggcgcacccactcaggatgcaccggctaacggcagcgatgcttggagcagcacgccagctcccgatggctccaccgatgccgctcatcaagctgcgcaatccggcagtgactggttaaacagcgcggctcctgcgacacccgagcatttcaatctgctcgatccgtttaaggatacgctgattccgctggacagctgggtcacccacggtatcgactgggttgtgctgcacttcagaccgatcttccagggcattcgcgtgccggtcgattttattctgggcggcttccaacagtttctgctgggaatgcctgcgccgattgccattctggtgttttcactgattgcttggcagatgtccagcctcggcatgggcgtagcaaccctactgtctctgattgcgattggtgcaattggtgcctggtcacaggccatgattacgttagcgctggtgctgaccgcgctgttcttctgcgtgctcatcgggctccccatggggatctggctggcgcgtagcgaacgagccgcgaagtttatccggccactgctcgatgccatgcagaccacgccggcgttcgtctatctggtgcctatcgtcatgctgttcggtataggtaacgtgccgggtgtcgtggtaacgattatcttcgccctgccgccgattattcgcttaacgattctgggtattcgtcaggtgcccgccgatctggttgaagccgctgaatcattcggtgccagcccgcgccaaatgctgtttaaggttcagctcccgctggccatgccgaccatcatggccggtgttaaccagacgctgatgttggcgctgtcgatggtggttatcgcctcgatgatcgccgtgggcggtctgggtcagatggtgctgcgcgggattggccgtctggatatgggtctggctgccgtcggtggcgtcgggattgttattctggccattattcttgaccgtcttacccagtctctggggcgcgatcgtcgcagcaagggcaataaaagctggtatgccagcggcccaatcggcctgctgacccgtcctttcatcaagcagtaa

SEQ ID NO: 3936 - protein, 393 aa, Erwinia carotovora subsp. atroseptica SCRI1043
MSKSTSNPWDNTTAQNQPADQNATPEQGNSAAQSDPWSTGAPTQDAPANGSDAWSSTPAPDGSTDAAHQAAQSGSDWLNSAAPATPEHFNLLDPFKDTLIPLDSWVTHGIDWVVLHFRPIFQGIRVPVDFILGGFQQFLLGMPAPIAILVFSLIAWQMSSLGMGVATLLSLIAIGAIGAWSQAMITLALVLTALFFCVLIGLPMGIWLARSERAAKFIRPLLDAMQTTPAFVYLVPIVMLFGIGNVPGVVVTIIFALPPIIRLTILGIRQVPADLVEAAESFGASPRQMLFKVQLPLAMPTIMAGVNQTLMLALSMVVIASMIAVGGLGQMVLRGIGRLDMGLAAVGGVGIVILAIILDRLTQSLGRDRRSKGNKSWYASGPIGLLTRPFIKQ

SEQ ID NO: 3937 - DNA, 1716 bp, Leifsonia xyli subsp. xyli str. CTCB07
  CDS (1)..(1716): transl_table=11
atgagcttccgtctcccgctcggcgacgtggcctcccacgccgtcgatgtcgtgaccgtcgccctcggcggcttgggggagttcgacgcggtccgtgccgtcttcggcggcctctacgccggggtggactgggtgctccagaccccgcctttctggggcgtcatcctcctcttcgcgatccttggcgtgtggctgcgtggctcggtcttcggtgcggggacgacggccaggttgctcctcatcgccagtgtcggccagtgggcgaacgcgatggacaccctcgcactcgtcctcgtctccgccgcggccgccatcgctctgagcctgccgctcggtatcctggcggcccggtcgaaaaccgcttcggcgatcatccggccggtgctcgacctcatgcagacgatgtccgcgttcgtgtatctgatccccgcgctcatcctgtttcgcatcggcgtggttcccggcatggtcgcgacgatcgtgttcgcgatggcgccgggcgtgcggctcaccgaactcggcatccgcggtgtggaccacgaactcgtggaggccgggcgcgccttcggctcctcgcccagccgcatcctgcggcagattcagctgccgctggctctgccgtccatcctggccggtgtgaaccaggtcatcatgctctcgctctcgatggtggtcatcgccggtatggtcggcgccggcggtctcggccgcgatatcgtccaggcgctcagccgggtggatgtcgggctgggattcgaggccggggtggccgtggtcatcctcgcgatcgtcctcgaccggctcaccgccgccatgggcaacgcgcggcggcgtatgccgaagcgggcactcgccgtgctcggcgccgctcttctcgtcgtgatcgccggcaccgcggtgaccgcggcctccacggcgggcggcggcaaaggcaccgtgaaggtcgccgtcttcaacggctggccggagggtgaggccgcctcctatctctggaagcatgtgctccagcggaagggctacgacgtcgacttcgagtacgctgacgccggtccggccttcgccggcctcagcaccggcgactacgatgtggccttcgatggctggctgccgacgacgcacgcgcagtatctgacgaagtacggagcgtcgctgaccgatctcggttcctggaacgacgaggccaagctgaccatcgcggtcaacaaggacgcgcccatcgactccctcgaccagctcgctgcccacgcgagcgacttcggcggccggctcgtcggcgtcgagccgggggcgggcctcaccgatctgaccgagaacaccgtcatcccggcctacgggctgcagaagctggactttgtgacctcgtcgacgccggccatgctcgccgagctgacggcggccatgaagagcggcgatgacatcgccgtcaccctgtggcggccccactggacctacgacgagttcgacctcaaagacctcaaggatccgcgcggcgcgctcgggacggccgagtccatccactcgatcgcctcgaagggcttcgtcgaggagttccccgaggtcgccggttgggtcaggggattccggctgaactccgaactgctctactccctggagaatgcgctcttcaacagcggctccggctctcaggactacgaccggattgtggagaaatggatgtccaagcacacggactatgtggagtcgctgaccggctga

SEQ ID NO: 3938 - protein, 571 aa, Leifsonia xyli subsp. xyli str. CTCB07
MSFRLPLGDVASHAVDVVTVALGGLGEFDAVRAVFGGLYAGVDWVLQTPPFWGVILLFAILGVWLRGSVFGAGTTARLLLIASVGQWANAMDTLALVLVSAAAAIALSLPLGILAARSKTASAIIRPVLDLMQTMSAFVYLIPALILFRIGVVPGMVATIVFAMAPGVRLTELGIRGVDHELVEAGRAFGSSPSRILRQIQLPLALPSILAGVNQVIMLSLSMVVIAGMVGAGGLGRDIVQALSRVDVGLGFEAGVAVVILAIVLDRLTAAMGNARRRMPKRALAVLGAALLVVIAGTAVTAASTAGGGKGTVKVAVFNGWPEGEAASYLWKHVLQRKGYDVDFEYADAGPAFAGLSTGDYDVAFDGWLPTTHAQYLTKYGASLTDLGSWNDEAKLTIAVNKDAPIDSLDQLAAHASDFGGRLVGVEPGAGLTDLTENTVIPAYGLQKLDFVTSSTPAMLAELTAAMKSGDDIAVTLWRPHWTYDEFDLKDLKDPRGALGTAESIHSIASKGFVEEFPEVAGWVRGFRLNSELLYSLENALFNSGSGSQDYDRIVEKWMSKHTDYVESLTG

SEQ ID NO: 3939 - DNA, 843 bp, Desulfotalea psychrophila LSv54
  CDS (1)..(843): transl_table=11
atgctaaactttgaagatcaggtgatcccccttgatacatggatcaatacatttgtagactggttagttgaaggctatcgttggttttttcaggccataaaatggcccatagagcagacactttccggagcagagaatggcctacttgccctgccaccgattattgttattgcagtggtatgtcttattgcctggcgagtttcaggcaaaaggctcgccttcggcagcttgctggccatggtctttattggccttctcggcctgtgggaagagaccatgatcaccctggccatggttctctcctccgttgttttttgcatgattgctggtatccccctcggcattttggccgggcgtagcaatcgctttaatacgtttttgcggcctgttcttgatgcaatgcagacgactccagcctttgtctatctggtgcccattgttatgctcttttccattggtaatgtggccggagttatcgctaccattgtctttgccctacctccacttgttcgcctgaccagtcttggtattcgccaggtccatcctgagctggtagaagccgccctggcctttggggcgacgggatggcaggtcctattcaaagtacaaatccctcttgccctacccaccatcatggccggcattaaccaaaccattatgatggcgctttccatggtagttattgccgcccttatcggagcaggtggtcttggcgctcctgttgtacttggcctcaatactcttgatatcggcggggcaacggtgggtggccttggcattgttcttatggcaataattctcgaccgaataacccaggccatgggcaaaaaaaaaggtaaataa

SEQ ID NO: 3940 - protein, 280 aa, Desulfotalea psychrophila LSv54
MLNFEDQVIPLDTWINTFVDWLVEGYRWFFQAIKWPIEQTLSGAENGLLALPPIIVIAVVCLIAWRVSGKRLAFGSLLAMVFIGLLGLWEETMITLAMVLSSVVFCMIAGIPLGILAGRSNRFNTFLRPVLDAMQTTPAFVYLVPIVMLFSIGNVAGVIATIVFALPPLVRLTSLGIRQVHPELVEAALAFGATGWQVLFKVQIPLALPTIMAGINQTIMMALSMVVIAALIGAGGLGAPVVLGLNTLDIGGATVGGLGIVLMAIILDRITQAMGKKKGK

SEQ ID NO: 3941 - DNA, 855 bp, Bacillus licheniformis ATCC 14580
  CDS (1)..(855): transl_table=11
atgtttactttatcatcgcttccccgcattcctttagccgattggatcgatcagtttgttgactggctgacggtgtcgttcggcggtgtatttaacggaattgccagcggagtggaatcgtttgttgatgagattgtccaagggctgggttttgttccgccggttatgttgaccgttatttttgccgcgctcgtctggctgatcagcaaaagaggcattgcgctgtttactttaatcggattttttatcattgattatttaggatattgggacgccatgctccagacattggcgcttgtcgtcacatccgttctgatttctgtcattatcggcattccggtcggaatctggggctcccaaaagaaaacggttcggagagtcgttacgcccatccttgacttaatgcagacaatgccggcattcgtttatttacttccggccatcttctttttcaatatcggggttgtgccgggtgttgtcgcttccgttatctttgcgatgcctccgacaatccggatgacgatcttagggatccagcaggtgcctgaagatctgattgaagctacagaagcatttggttcaacgacaagccagcggctctttaaagtgcagctgccgctcgcgacgaaaaccattctggccggtatcaatcaaagcatcatgcttgctttgtcaatggtcgttattgcatcaatggtaggcgcgcccggactcggagaagaagtttaccgggctgtgacccagctgcaaacgggtaccggtgtagaaaccggacttgcgattgttattattgcgatcgtacttgaccgggttacacaaaatataaaattgaaaaagagcagggggaatgcataa

SEQ ID NO: 3942 - protein, 284 aa, Bacillus licheniformis ATCC 14580
MFTLSSLPRIPLADWIDQFVDWLTVSFGGVFNGIASGVESFVDEIVQGLGFVPPVMLTVIFAALVWLISKRGIALFTLIGFFIIDYLGYWDAMLQTLALVVTSVLISVIIGIPVGIWGSQKKTVRRVVTPILDLMQTMPAFVYLLPAIFFFNIGVVPGVVASVIFAMPPTIRMTILGIQQVPEDLIEATEAFGSTTSQRLFKVQLPLATKTILAGINQSIMLALSMVVIASMVGAPGLGEEVYRAVTQLQTGTGVETGLAIVIIAIVLDRVTQNIKLKKSRGNA

SEQ ID NO: 3943 - DNA, 1017 bp, Mannheimia succiniciproducens MBEL55E
  CDS (1)..(1017): transl_table=11
atgacgacagaaaatataaggacagcggacccctgggaagccaccctacaggcggcgcagcaggataacgcttatgcctggttacagggctcggaacagtcgcaggactttaattggatgtatccgtttgatcatacgctggtccccttcggagattgggttgaaagcctgatcaactggttagtgactcatttaagaagcttttttcagtttatcagcgcacccattgattatatcctcagtctgtttcagacatcgcttaatgtgttgccgccgacggtaatgattatcctgttcacattgctggtttggcagtttacccatttcagactggcgctggctaccttgttatcgattacacttatcggtgccgtgggggcctggaacgaaatgatgatcacgcttgccttagtgttgacctcagtgtctttttgtctgctgatcggactgccgctcggtatatggatggcacgttcgacacgcgcctcggccatcgttaaacctgttctggacgccatgcagaccacgccggcctttgtttatttggtcccgattgtcatgctgttcggtatcggcaacgttccgggggtggtggtgaccattattttcgccctgccgcccattgtccggttaaccattttgggcattcagcaggttcccgaagcgctgattgaagcggcgcaggccttcggcgcaagtaaaaaacagttgttgtataaggttcagttgccgttggccatgccgtctattatggcgggggttaaccaaaccctgatgttgtctttatccatggtcgttatcgcctctatgatcgcggtgggcggtttgggccagatggttctgcgcggcatcggccggttggatatgggggaagccgcgaccggcggattgggtatcgtactgatggcgattgtattggaccgcctgacccagaaaattgcggaaaatatgcatagccagcataaggttcgctggtatgaacgcggtattaccgggctgtttatccgcaaaaaataa

SEQ ID NO: 3944 - protein, 338 aa, Mannheimia succiniciproducens MBEL55E
MTTENIRTADPWEATLQAAQQDNAYAWLQGSEQSQDFNWMYPFDHTLVPFGDWVESLINWLVTHLRSFFQFISAPIDYILSLFQTSLNVLPPTVMIILFTLLVWQFTHFRLALATLLSITLIGAVGAWNEMMITLALVLTSVSFCLLIGLPLGIWMARSTRASAIVKPVLDAMQTTPAFVYLVPIVMLFGIGNVPGVVVTIIFALPPIVRLTILGIQQVPEALIEAAQAFGASKKQLLYKVQLPLAMPSIMAGVNQTLMLSLSMVVIASMIAVGGLGQMVLRGIGRLDMGEAATGGLGIVLMAIVLDRLTQKIAENMHSQHKVRWYERGITGLFIRKK

SEQ ID NO: 3945 - DNA, 903 bp, Burkholderia mallei ATCC 23344
  CDS (1)..(903): transl_table=11
atgtctgaactcattccgctcggtagctgggtcgaccagtcggttcactatctgctcgaccacgacgcgaagacgttcgacgcgatcggccgcgccatcgaggggctcgccgcgctcgtcgagcacggcctgcaggccgtgccgatgtggctgatgatggcgtgcttcatcggcgtcggcctctggcgcgtgggctggcgcttcgcgttcttcaccgccgcgtcgctgttcctgatcttcgcgacgggcttctgggatcagacagtcgtcacgctcggcctcacgctgtcgtcgacgatcgtgagcctcgtgctcggcattccgctcggcatctgggccgcgaagagcaagtgggtcgcggcgatcgtgcggccgatcctcgacctgatgcagacgatgcccgcgttcgtctacctgattccggccgcgatgctgttcggcctcggccgcgtgccggggattctgtcgacggtgatcttcgcgatgccgcccgccgtgcgcctgacgagcctcggcatccgccacgtgaaccgcgagatcgtcgaggcggggcaggcgttcggctgcacgccgtggcaactgctgtacaaggtgcagttcccgaatgcgctgccgtcgatcatgcagggcgtgaaccagacgatcatgatggcgctgtcgatggtgatcatcgcgtcgatggtcggcgcgggcggcctcggcaacgacgtgctcgcgagcatccagcgcctggacatcggcttgggcttcgagagcggcctgtcggtcgtgctgctcgcgatcatcctcgaccgcatcaccgagagcttcggccgcgcgccgggcacggcgagagcgccgctcttctcggggctgcggcaactgttcggcccgcgctcgcgctcgccggtcgtgcaggcctga

SEQ ID NO: 3946 - protein, 300 aa, Burkholderia mallei ATCC 23344
MSELIPLGSWVDQSVHYLLDHDAKTFDAIGRAIEGLAALVEHGLQAVPMWLMMACFIGVGLWRVGWRFAFFTAASLFLIFATGFWDQTVVTLGLTLSSTIVSLVLGIPLGIWAAKSKWVAAIVRPILDLMQTMPAFVYLIPAAMLFGLGRVPGILSTVIFAMPPAVRLTSLGIRHVNREIVEAGQAFGCTPWQLLYKVQFPNALPSIMQGVNQTIMMALSMVIIASMVGAGGLGNDVLASIQRLDIGLGFESGLSVVLLAIILDRITESFGRAPGTARAPLFSGLRQLFGPRSRSPVVQA

SEQ ID NO: 3947 - DNA, 837 bp, Bacillus clausii KSM-K16
  CDS (1)..(837): transl_table=11
atggattttctaccccgtctggaactaggtagttgggttgaagcgtttgtagaatggctgcagcatgctgcttggttttttaatggtattgattttacgattgaaaaggtcatggacgggatttactggatcatcgccttgccgccaagctggttgtttgttctcattattgcggcgctcacgtattggacgaaccgcaaatggggcttgaccgtttttgtaatcctcggcctgttgttaattgacagccttggtttttggaacggcatgcttgatacgttggcactcgtcttgacggcttgtctgatttcagtcgtcatcggtgttccagttggcattttaatggcgaaaaacgaccgtacagaagccattatcaaacctgtacttgattttatgcaaacgatgcctgcatttgtttatttgattccagctgttgctttcttcggcatcggcatggttcctggcgttgtcgcttctgtcatatttgccatgccgccgacggtccgcatgacaaacctcggtattcgccaagtttcaacggaattaatagaagcagcagacgcattcggttcaacaggcacgcaaaaactatttaaagtgcaactgccaatggctcggggaacgatcatggctgggattaaccaaagtaccatgcttgccctttctatggttgtgatcgcggccatgatcggggcaactggaattggccaggttgtttacagtgcagttggacaaaataacattggcaatggctttgaaggtggtattgcgattgtcatattggcgattattctcgaccgtttaacgcaaagttttaacaaaaaacaaagcgaataa

SEQ ID NO: 3948 - protein, 278 aa, Bacillus clausii KSM-K16
MDFLPRLELGSWVEAFVEWLQHAAWFFNGIDFTIEKVMDGIYWIIALPPSWLFVLIIAALTYWTNRKWGLTVFVILGLLLIDSLGFWNGMLDTLALVLTACLISVVIGVPVGILMAKNDRTEAIIKPVLDFMQTMPAFVYLIPAVAFFGIGMVPGVVASVIFAMPPTVRMTNLGIRQVSTELIEAADAFGSTGTQKLFKVQLPMARGTIMAGINQSTMLALSMVVIAAMIGATGIGQVVYSAVGQNNIGNGFEGGIAIVILAIILDRLTQSFNKKQSE

SEQ ID NO: 3949 - DNA, 825 bp, Bacteroides fragilis NCTC 9343
  CDS (1)..(825): transl_table=11
atgatcaacataggacaatatattgagatgctcatcaactggatgatgatacacttctccacttttttcgatgcactcaacttaggcatcggtagttttattaatggattccagcacatactgttcggcattcctttctatctgaccattgcggcaatggtgctgctggcatgggcgaaagccggacgcggggttgcagttttcacccttttaggcttgttgcttatttatggtatgggattctgggaagccactatgcagacattggcactggttctgtcatccacctgcctggcccttatcgtaggggttcccatcggagtatggacggcaaacagcaatcgtgccgagaaggtgatacatcccattctcgacctgatgcagaccatgccagccttcgtctatctgattcctgctgttttgtttttcggcctgggagtggttccgggagtatttgctacaatcatctttgcgatgcctccggtgattcgccttacagggcttggcatccgtcaggtgccaaagaatgtggtagaggcttcacgctcgttcggagctacccgatggcagttgctttataaagtacagttgccccttgctttgcccaccatcctgaccggagtgaaccagacgattatgatgtctctttccatggttgtcattgcggctatgattgctgccggcggtttaggagaaatcgttttgaaaggtatcacccagatgaaaatcgggctgggctttgaaggaggtatagccgttgtcatattggcaattattttagaccggattactcagggaatggtccgtcggaaggacaaaaaatag

SEQ ID NO: 3950 - protein, 274 aa, Bacteroides fragilis NCTC 9343
MINIGQYIEMLINWMMIHFSTFFDALNLGIGSFINGFQHILFGIPFYLTIAAMVLLAWAKAGRGVAVFTLLGLLLIYGMGFWEATMQTLALVLSSTCLALIVGVPIGVWTANSNRAEKVIHPILDLMQTMPAFVYLIPAVLFFGLGVVPGVFATIIFAMPPVIRLTGLGIRQVPKNVVEASRSFGATRWQLLYKVQLPLALPTILTGVNQTIMMSLSMVVIAAMIAAGGLGEIVLKGITQMKIGLGFEGGIAVVILAIILDRITQGMVRRKDKK

SEQ ID NO: 3951 - DNA, 852 bp, Pseudomonas syringae pv. syringae B728a
  CDS (1)..(852): transl_table=11
atgtttcctgaaagcttcactttctcgatcgccaactgggtcaacgatggcgtcgactcactggtcacgcagtacggcgatgtgttccggcacatctccgacaccctgctatgggccatcgtcaacctcgaaggcctgctgcgcatggcgccgtggtggctgatgctgatgatcgtcggcggcattgcctggcacgcgacacgcaagatcgtcacgacgctggtcatcgtcggcctgctgtttctggtcggtgcggtcgggttgtgggacaagctgatgcagaccctggcgctgatgctggtcgccacgatcatcgcggtgctgatcggcattccgctgggcattctttcggcacgcagcaatcgtctgcgctcggtgctgatgccgctgctcgacatcatgcagaccatgcccagcttcgtttacctgatcccggtgctgatgctgttcggtctgggcaaggttccggcgatcttcgccacggtgatttacgccgcgccgccgctgattcgtctgaccgatctgggcattcgtcaggtggatggtgaagtgatggaagccatcaacgcgttcggcgccaaccgctggcagcaactgttcggtgtgcaactgccgctggcgatgccgagcatcatggccgggatcaaccagaccaccatgatggcgctgtcgatggtggtgattgcctcgatgatcggcgcacgcgggcttggcgaagacgtgctggtgggcattcagaccctcaacgtcgggcgcgggctggaagcgggcctggccattgtcattctggcggtcgtcatcgaccgtatcacgcaggcctatggccgcccacggcatgaggcgcacaaatga

SEQ ID NO: 3952 - protein, 283 aa, Pseudomonas syringae pv. syringae B728a
MFPESFTFSIANWVNDGVDSLVTQYGDVFRHISDTLLWAIVNLEGLLRMAPWWLMLMIVGGIAWHATRKIVTTLVIVGLLFLVGAVGLWDKLMQTLALMLVATIIAVLIGIPLGILSARSNRLRSVLMPLLDIMQTMPSFVYLIPVLMLFGLGKVPAIFATVIYAAPPLIRLTDLGIRQVDGEVMEAINAFGANRWQQLFGVQLPLAMPSIMAGINQTTMMALSMVVIASMIGARGLGEDVLVGIQTLNVGRGLEAGLAIVILAVVIDRITQAYGRPRHEAHK

SEQ ID NO: 3953 - DNA, 852 bp, Pseudomonas fluorescens Pf-5
  CDS (1)..(852): transl_table=11
atgtttccagaaagcttcacgttttccatcgccgattgggtcaatggctgggtcgacgccctggtgacccattatggcgatgtgttccggcacatttccgacaccctgctgtgggccatcgtcaacctcgaaggcctgctgcgcatggcgccctggtggctgatgctggcgattgtcggcggtatcgcctggcacgccacccgcaagctgctgaccaccgcggtgatcgtcggcctgctgttcctggtgggcgcggtgggtctgtgggacaagctgatgcagaccctggcgctgatgctggtggcgaccctgatctcggtgctgatcggcatccccctggggattctctcggcccgcagcaaccgcctgcgctcagtgctgatgccgctcttggacatcatgcagaccatgcccagcttcgtgtacctgatcccggtgctgatgctgttcggcctgggcaaggtgccggcgatcttcgctacggtgatctacgccgcgccgcccttgatccgcctcaccgacctggggatccgccaggtggacggcgaggtgatggaggcgatcaacgccttcggcgccaaccgctggcagcagctgttcggtgtgcaactgcccctggccctgccgagcatcatggccgggatcaaccagaccacgatgatggccctgtcgatggtggtgatcgcctcgatgatcggtgcccgtggcctgggcgaggatgtgctggtggggatccagaccctcaacgtcgggcgcggcctggaagcggggctggcgatcgtgattctggcggtggtgatcgaccgcattacccaggcctacggtcgtccgcgccatgaggtgagcaaatga

SEQ ID NO: 3954 - protein, 283 aa, Pseudomonas fluorescens Pf-5
MFPESFTFSIADWVNGWVDALVTHYGDVFRHISDTLLWAIVNLEGLLRMAPWWLMLAIVGGIAWHATRKLLTTAVIVGLLFLVGAVGLWDKLMQTLALMLVATLISVLIGIPLGILSARSNRLRSVLMPLLDIMQTMPSFVYLIPVLMLFGLGKVPAIFATVIYAAPPLIRLTDLGIRQVDGEVMEAINAFGANRWQQLFGVQLPLALPSIMAGINQTTMMALSMVVIASMIGARGLGEDVLVGIQTLNVGRGLEAGLAIVILAVVIDRITQAYGRPRHEVSK

SEQ ID NO: 3955 - DNA, 852 bp, Pseudomonas syringae pv. phaseolicola 1448A
  CDS (1)..(852): transl_table=11
atgtttcctgaaagcttcactttctcgatcgccaattgggtcaacgacggggtcgactcgctggtgactcagtatggcgatgtgttccggcacatttccgacaccctgctatgggccatcgtcaacctcgaaggcctgctgcgcattgcgccgtggtggctgatgctgataatcgttggcggcattgcctggcacgcgacacgcaagatcgtcacgacgctggtcatcgtcggcctgctgtttctggtcggtgcggtcgggttgtgggacaagctgatgcagacattggcgctgatgctggtcgccacgatcattgcggtactgatcggcattccactgggcattctctccgcgcgcagcaatcgcctgcgctcggtgctgatgccgttgctggacatcatgcagaccatgcccagcttcgtttacctgattccggtgctgatgctgttcggcctgggcaaggtcccggccatcttcgccacggtgatctatgccgcgccgccattgattcgtctgaccgacctgggcattcgtcaggttgacggtgaagtgatggaagccatcaacgccttcggtgccaaccgctggcagcagctgtttggtgtgcaactgccactggccatgccgagcatcatggccgggatcaaccagaccaccatgatggcgctgtcgatggttgtcatcgcctcgatgatcggcgcacgcgggctgggtgaagacgtgctggtgggcattcagacgctcaacctcggacgcgggctggaagcgggtctggccatcgtcattctggcggtcgtcatcgaccgtatcacgcaggcctatggccgcccacggcatgaggcgcacaaatga

SEQ ID NO: 3956 - protein, 283 aa, Pseudomonas syringae pv. phaseolicola 1448A
MFPESFTFSIANWVNDGVDSLVTQYGDVFRHISDTLLWAIVNLEGLLRIAPWWLMLIIVGGIAWHATRKIVTTLVIVGLLFLVGAVGLWDKLMQTLALMLVATIIAVLIGIPLGILSARSNRLRSVLMPLLDIMQTMPSFVYLIPVLMLFGLGKVPAIFATVIYAAPPLIRLTDLGIRQVDGEVMEAINAFGANRWQQLFGVQLPLAMPSIMAGINQTTMMALSMVVIASMIGARGLGEDVLVGIQTLNLGRGLEAGLAIVILAVVIDRITQAYGRPRHEAHK

SEQ ID NO: 3957 - DNA, 942 bp, Rhodobacter sphaeroides 2.4.1
  CDS (1)..(942): transl_table=11
atggccgaggagcgcaccttcagcctgctcgatccgttccgcagcatcgatctcgacatcgacgggcgcaccgacggcatcaagcaatgggccatcgccaaccgcacggcgctgcagccgatcaagtccttcttcgacgggctgatcggctggatcgagaacctgatgcagtcgatcccgcccaccgtcatgctgctgctgatcgtgctggtggcctggcaggcggcggggggacgggtggccctcgtcgtggccgcggcgctggtggcgctggggcttctgtcgcccgacgcctggtcgctcgccatgaccacgctcgccatcgtcaatgcggccgtggcgctctgcgtcatcatcggcctgccgctcggcgtgctcgcgggcaagagcgaccggttcgaggcggcggtccggccgttcctcgacacgatgcagaccatcccggccttcgtctatctggtgcccgtggtgatgctgctcgggatcggcaatgtctcgggcgtgatcgtcaccatcatcttcgcgctgccgcccttggtgcgcctcacctcgctcggcatccgcagcgtgaatcccggcgtcgtcgaggccgcgcgcgccttcggcgccacgccgcgccagatcctgttcaaggtcgagctgccgctcgccacgcccacgatcctcgcggggctgaaccagacgatcatgctgtcgctgtccatggtggtgatcgcctcgatgatctcggtcaagggcctcggaaacgaggtgctgcgcgccatgggccggctcgatgcgggcaaggccatcgtgggcggtctcggcatcgtcatcctcgccatcgttctcgaccgcgtgacgcagggtctcggccgctcgggccgcgcccgcaaccaccgccactggtggcaggaggggccggtgggcctcgtcatgcgcctgtttcacaagagcgtctga

SEQ ID NO: 3958 - protein, 313 aa, Rhodobacter sphaeroides 2.4.1
MAEERTFSLLDPFRSIDLDIDGRTDGIKQWAIANRTALQPIKSFFDGLIGWIENLMQSIPPTVMLLLIVLVAWQAAGGRVALVVAAALVALGLLSPDAWSLAMTTLAIVNAAVALCVIIGLPLGVLAGKSDRFEAAVRPFLDTMQTIPAFVYLVPVVMLLGIGNVSGVIVTIIFALPPLVRLTSLGIRSVNPGVVEAARAFGATPRQILFKVELPLATPTILAGLNQTIMLSLSMVVIASMISVKGLGNEVLRAMGRLDAGKAIVGGLGIVILAIVLDRVTQGLGRSGRARNHRHWWQEGPVGLVMRLFHKSV

SEQ ID NO: 3959 - DNA, 852 bp, Pseudomonas fluorescens PfO-1
  CDS (1)..(852): transl_table=11
atgtttcccgaaagctttaccttttccatcgccgactgggtcaacggttgggtcgatgcgctggtcaccaactacggcgatgtgttccgtcatatctctgacaccctgctgtgggccatcgtcaatcttgaaggcctgctgcgcgccgcgccgtggtggttgatgctggccatcgtcggtgtcgtggcctggcacgcaacgcgcaaagtcgtgaccaccgccgtgatcgtcggtctgttgttcctggtcggcgccgtcggtctgtgggacaagttgatgcagaccctcgcgctgatgatggtggcgacggtcatttcggtactgatcggcgtaccgctggggattctctcggcgcgcagcaatcgcctgcgttcggtgctgatgccgctgctcgacatcatgcagaccatgccgagcttcgtgtacctgattccggtgctgatgctgttcggcttgggcaaggtgccggcgattttcgccaccgtgatctacgccgcgccgccgctgatccgtctgaccgatctgggcatccgccaggtcgatggcgaagtgatggaagcgatcaacgccttcggcgccaaccgctggcagcaactgttcggcgtgcaactgccgctggccctgccgagcatcatggccgggatcaaccagaccaccatgatggccctgtcgatggtggtgatcgcctcgatgatcggcgcccgtggcctgggtgaagatgtgctggtgggcattcagaccctcaacgtcggacgcggtctcgaggccggtctggcgatcgtgattctcgcagtggtcatcgaccgcattacccaggcgtatggtcggccacggcatgaggtgagcaaatga

SEQ ID NO: 3960 - protein, 283 aa, Pseudomonas fluorescens PfO-1
MFPESFTFSIADWVNGWVDALVTNYGDVFRHISDTLLWAIVNLEGLLRAAPWWLMLAIVGVVAWHATRKVVTTAVIVGLLFLVGAVGLWDKLMQTLALMMVATVISVLIGVPLGILSARSNRLRSVLMPLLDIMQTMPSFVYLIPVLMLFGLGKVPAIFATVIYAAPPLIRLTDLGIRQVDGEVMEAINAFGANRWQQLFGVQLPLALPSIMAGINQTTMMALSMVVIASMIGARGLGEDVLVGIQTLNVGRGLEAGLAIVILAVVIDRITQAYGRPRHEVSK

SEQ ID NO: 3961 - DNA, 897 bp, Burkholderia sp. 383
  CDS (1)..(897): transl_table=11
atgtctgaaatgattccgctcggtacctgggtcgaccagtccgttcactacctgctcgaccacgacgcaaaaacgttcgacgcgatcggccaggcgatcgaggggctcgcggcattcgtcgagcatggcctgcaggcgatcccgatgtggatgatgatggccatcttcatcggcatcgggctgtggcgggtgggctggcgcttcgcgctgttcaccaccgcgtcgctgctgctgatcttcgcgacgggcttctgggaccagacggtcatcacgctcggcctcacgctgtcgtcgacgatcatcagcctcgtgctcggcatcccgctcggcatctgggccgcgaagagcaagtgggtcgccgcgatcgtgcgcccgatcctcgacctgatgcagacgatgcccgcattcgtctacctgattccggctgcgatgctgttcggtctcggccgcgtgccggggatcctgtcgacggtgatcttcgcgatgccgcccgcggtgcgcctgacgagcctcggtatccgccacgtgaaccgcgagatcgtcgaggccggccaggctttcggctgcacgccgtggcagctgctgtacaaggtgcagttcccgaatgcgctgccgtcgatcatgcagggcgtgaaccagacgatcatgatggcgctgtcgatggtgatcatcgcgtcgatggtcggcgcgggcggcctcggcaacgacgtgctcgccagtatccagcgcctcgacatcggcctcggtttcgaaagcggtctgtcggtcgtgctgctcgcgatcattctcgaccgcatcaccgaaagcttcggccgtgcgccgggcaccgtgaaggcgccgctgttctcgggtctcaagcagctgtttcgcgtgaaggctgcgcccgcacaggcctga

SEQ ID NO: 3962 - protein, 298 aa, Burkholderia sp. 383
MSEMIPLGTWVDQSVHYLLDHDAKTFDAIGQAIEGLAAFVEHGLQAIPMWMMMAIFIGIGLWRVGWRFALFTTASLLLIFATGFWDQTVITLGLTLSSTIISLVLGIPLGIWAAKSKWVAAIVRPILDLMQTMPAFVYLIPAAMLFGLGRVPGILSTVIFAMPPAVRLTSLGIRHVNREIVEAGQAFGCTPWQLLYKVQFPNALPSIMQGVNQTIMMALSMVIIASMVGAGGLGNDVLASIQRLDIGLGFESGLSVVLLAIILDRITESFGRAPGTVKAPLFSGLKQLFRVKAAPAQA

SEQ ID NO: 3963 - DNA, 966 bp, Burkholderia sp. 383
  CDS (1)..(966): transl_table=11
atgaacggcttctttctgcacctgtcgatcgccgactgggtgaacagcgcgctcgagacgttcgtcgcgcaatacggcgacggcttccatcacttcagcgtgctggtgctgcgctacctgctcgtgccgctcgaaggcgcgctgcgcgtggcgccgccgtggctcgtgctgctggtcgtcggcgcgatcgcgtggaatgcgacgcgccgcatcggcctcggcgtgctcttcatgctgctgctgtacgcgatcggctgtttcggcctgtgggacaagctgatgcagacgctcgcgctgatgctcgtctcgacggtgctgtcggtcgcgatcggcgtgccggtcggcatcctcgcgtcgcgcagcgcctggctgcgccggatgctgctgcccgtgctcgacgtgatgcagacattgccgagcttcgtgtacctgattccggtgctgatgctgttcggcctcggcaaggtgcccgcgatcctcgcgacgatcatctacgcgctgccgccgctgatccgcctgaccgatctcggcatccgccaggtcgatccggacgtgacggaagccgcgcgtgcgttcggcacgacgcgctggcaactgctcgtcaacgtgcagttgccgctcgcgcggccgagcatcatggccggcatcaaccagacgacgatgatggcgctgtcgatggtcgtgattgcgtcgatgatcggctcgcgcgggctcggcgaggatgtgctcgcgggcatccagacgctcgacgtcggcaagggcacgcaggccggcctcgcgatcgtgattctcgcgatcgtgattgaccggatcagccagggcttcggccaggagcgtcgcgcccggcggcggctcgcgcagcagcgccggcagaagggcgcgtcgcgcgtgccgtaccggctgccgcgcaaggcgcagtcggcgggcgtcgattcgaatcaggcgacgcagtcgtcgcgtgcatag

SEQ ID NO: 3964 - protein, 321 aa, Burkholderia sp. 383
MNGFFLHLSIADWVNSALETFVAQYGDGFHHFSVLVLRYLLVPLEGALRVAPPWLVLLVVGAIAWNATRRIGLGVLFMLLLYAIGCFGLWDKLMQTLALMLVSTVLSVAIGVPVGILASRSAWLRRMLLPVLDVMQTLPSFVYLIPVLMLFGLGKVPAILATIIYALPPLIRLTDLGIRQVDPDVTEAARAFGTTRWQLLVNVQLPLARPSIMAGINQTTMMALSMVVIASMIGSRGLGEDVLAGIQTLDVGKGTQAGLAIVILAIVIDRISQGFGQERRARRRLAQQRRQKGASRVPYRLPRKAQSAGVDSNQATQSSRA

SEQ ID NO: 3965 - DNA, 840 bp, Desulfovibrio desulfuricans G20
  CDS (1)..(840): transl_table=11
atgattgattatcgcattcccgttggcgctacgcttgaaagcgtcattgattttctggtcgtgcactgctccggcgcaacccgtgcgttttccgcggttaccgatgccgctctttccgtgctggaacacggtcttgccttcataccgtggtggctgttcattcctgccgtcgccctgctgacctggcgcggcaccggcagcagagggctggggctttttgccctgctggggctgggacttgtgtataacatggggctgtggcccgccacggtcagcaccattgctctggtgcttgtggccacgctgcttgcggtgcttatcggtctgccgctgggtgtttttgccgctatcaataaagtggcataccgtgctatcatgccggtactcgatgtaatgcagaccatgcccgcctttgtttatcttattcccgccattccgtttttcgggctgggcaaggttgcggccattttttccactgtggtgttcgccatgccgccggtcatcaggcttacctgccttggtatccggcaggttccggtagagctggtggagtgcgccgaagctttcggcaccaaccgctggcagcggctgcgcaagctcgaactgcctctggcggcgcccaccatcatggcgggtgtcaaccagactgtcatgctggcgctgtccatggtggtcattgcagccatgatcggtgcaaagggtcttggcggcgaagtatggaaagccattcagcgccttgagatgggccgcggttttgaagccggtatcggcattgtcatcgttgccatctgccttgaccggctgctgcagaaaatcggctcgcgctcagccagacgctag

SEQ ID NO: 3966 - protein, 279 aa, Desulfovibrio desulfuricans G20
MIDYRIPVGATLESVIDFLVVHCSGATRAFSAVTDAALSVLEHGLAFIPWWLFIPAVALLTWRGTGSRGLGLFALLGLGLVYNMGLWPATVSTIALVLVATLLAVLIGLPLGVFAAINKVAYRAIMPVLDVMQTMPAFVYLIPAIPFFGLGKVAAIFSTVVFAMPPVIRLTCLGIRQVPVELVECAEAFGTNRWQRLRKLELPLAAPTIMAGVNQTVMLALSMVVIAAMIGAKGLGGEVWKAIQRLEMGRGFEAGIGIVIVAICLDRLLQKIGSRSARR

SEQ ID NO: 3967 - DNA, 1074 bp, Rhodospirillum rubrum ATCC 11170
  CDS (1)..(1074): transl_table=11
atggctgaccccgcgagcgacccctggggcgcggccccgccctcccccgccgaaacgccggccggcgattggctggggggcgcctccgctccgccgccggccttcgattgggccgaccccttcgcccggccgctgattccgctcgacgactggaccaatcaggggctcgactggctggtcttgtccttccgcccgctcttccaggcgatccgctggcccatcgacgccgtgctgacggcgctcaacggcacgctcgtcggtgtgccgccccccgtcatgctggcgatcatcgccctcctcgcttggcaaatcgccgggcgcaagatggcgatcggctctttgatctcgatgactctcatcggtctgatcggcgcctggagcgaagcgatgctgaccttgtcgctggtcttgacctcggtgatgttctgcatcgccctcggcctgccctcgggcatcctgatggcgcgcagcgaccggctggccaaactctcgcggcctttgctcgatgccatgcagacgaccccggccttcgtctatctggtgcccatcgtcatgctgtttggcatcggcaatgtgcccggggtggtggtgacgatcatcttcgccctgccgcccttgatccgcctgaccaatctggggattaggcaggttcccgaagatctggtcgaagccgcgcgcagtttcggcgcctcgaaaacccagttgctgaccaaggtgcaactgccgctggccctgccgacgatcatggcgggcatcaaccaaacgctgatgctggcgctgtcgatggtggtgatcgcctcgatgatcgccgttggcgggctggggcaaatggttctgcgcggcatcggccggcttgatatggggctggccaccgttggcggcgtcgccatcgtcttgctggccattctgatcgatcgcctgacccagtcgatgggcgtcgccagcgccgcccaggccaaggcaccctggtacaccagcggtcccgtcggactggtcgtgcgtctggtgtccctgcgcaagggcaccgcccaccccgctcgcgaaagcctgccaaaaggagaaccgatctcatga

SEQ ID NO: 3968 - protein, 357 aa, Rhodospirillum rubrum ATCC 11170
MADPASDPWGAAPPSPAETPAGDWLGGASAPPPAFDWADPFARPLIPLDDWTNQGLDWLVLSFRPLFQAIRWPIDAVLTALNGTLVGVPPPVMLAIIALLAWQIAGRKMAIGSLISMTLIGLIGAWSEAMLTLSLVLTSVMFCIALGLPSGILMARSDRLAKLSRPLLDAMQTTPAFVYLVPIVMLFGIGNVPGVVVTIIFALPPLIRLTNLGIRQVPEDLVEAARSFGASKTQLLTKVQLPLALPTIMAGINQTLMLALSMVVIASMIAVGGLGQMVLRGIGRLDMGLATVGGVAIVLLAILIDRLTQSMGVASAAQAKAPWYTSGPVGLVVRLVSLRKGTAHPARESLPKGEPIS

SEQ ID NO: 3969 - DNA, 903 bp, Burkholderia thailandensis E264
  CDS (1)..(903): transl_table=11
atgtctgaactcattccgctcggtagctgggtcgaccagtcggttcactatctgctcgaccacgacgcgaagacgttcgatgcgatcgggcgcgccatcgaagggctcgcggcgctcgtcgagcacagtctgcaagccgtgccgatgtggctgatgatggcgatcttcatcggcgtcgggctctggcgcgtcggctggcgtttcgcgatcttcaccgccgcgtcgctgttcctgatcttcgcgacgggcttctgggatcagacggtcgtcacgctcggccttacgctgtcgtcgacgatcgtgagcctcgtgctcggcattccgctcggcatctgggccgcgaagagcaagtgggtcgcggcgatcgtgcggccgatcctcgacctgatgcagacgatgcccgcgttcgtctacctgattccggccgcgatgctgttcggcctcggccgcgtgccgggcatcctgtcgacggtgatcttcgcgatgccgcccgccgtgcgcctgacgagcctcggcatccgccacgtgaaccgcgagatcgtcgaggcggggcaggcgttcggctgcacgccgtggcaactgctgtacaaggtgcagtttccgaatgcgctgccgtcgatcatgcagggcgtgaaccagacgatcatgatggcgctgtcgatggtgatcatcgcgtcgatggtcggcgcgggcggcctcggcaacgacgtgctcgcgagcatccagcgcctcgacatcggcctcggcttcgaaagcggcctgtcggtcgtgctgctcgcgatcatcctcgatcgcatcaccgagagtttcggccgcgcgccgggcacggcgaaggcgccgctcttctcggggttccggcaactgttcggcccgcgctcgcgctcgtcggtcgcgcaggcctga

SEQ ID NO: 3970 - protein, 300 aa, Burkholderia thailandensis E264
MSELIPLGSWVDQSVHYLLDHDAKTFDAIGRAIEGLAALVEHSLQAVPMWLMMAIFIGVGLWRVGWRFAIFTAASLFLIFATGFWDQTVVTLGLTLSSTIVSLVLGIPLGIWAAKSKWVAAIVRPILDLMQTMPAFVYLIPAAMLFGLGRVPGILSTVIFAMPPAVRLTSLGIRHVNREIVEAGQAFGCTPWQLLYKVQFPNALPSIMQGVNQTIMMALSMVIIASMVGAGGLGNDVLASIQRLDIGLGFESGLSVVLLAIILDRITESFGRAPGTAKAPLFSGFRQLFGPRSRSSVAQA

SEQ ID NO: 3971 - DNA, 840 bp, Desulfitobacterium hafniense Y51
  CDS (1)..(840): transl_table=11
atgacgaaaattcctttgggggagtgggttaatcagggtgtcgataccctgctcttctattttggaagtgccttcgatgcctttaccgattcggtaacctcaatgaccgatgcaatgagggaggggcttgacgtcgtcccctggtttatcctcgtccttctcttcgcagcgttggcatggcgggccaaaggctggcgcctggctctgggcaccaccgtaggcctctgtctgatctataatttagagttatggccggcttttctcgatactctcatcctggtcctgctcgcctcccttgtctccttagtgatcggaattcccttagggatactgggagcacggcataatggttttcatagagtcctttcccctattctggatttcatgcaaaccatgccttccttcgtttacctcattcctgctttgatgttcttcagcttaggaacggtatcggcgatttttgccaccgttatctttgccatgccgcctgtcattcgcttaacggctctgggaattcgtcaggttcccgccgatctggtggaagtgggagaggcctttggctccaattcccggcaaatgctgtggaagattcaattacccctagctttgccgaccatcatggccggaatcaatcaaaccatgatgctctccttatccatggtggttatctccgccatgatcggagctcagggcctgggagccggggtactggcagggatttccgggatggatatcggcaaagggttcgaatatggcttagcggtggttatcctggccatgatccttgaccgtctcagccagggagccttacgaaactcccgggtagctaaaaagatctag

SEQ ID NO: 3972 - protein, 279 aa, Desulfitobacterium hafniense Y51
MTKIPLGEWVNQGVDTLLFYFGSAFDAFTDSVTSMTDAMREGLDVVPWFILVLLFAALAWRAKGWRLALGTTVGLCLIYNLELWPAFLDTLILVLLASLVSLVIGIPLGILGARHNGFHRVLSPILDFMQTMPSFVYLIPALMFFSLGTVSAIFATVIFAMPPVIRLTALGIRQVPADLVEVGEAFGSNSRQMLWKIQLPLALPTIMAGINQTMMLSLSMVVISAMIGAQGLGAGVLAGISGMDIGKGFEYGLAVVILAMILDRLSQGALRNSRVAKKI

SEQ ID NO: 3973 - DNA, 831 bp, Methanococcoides burtonii DSM 6242
  CDS (1)..(831): transl_table=11
atggctataccaaaattaccaattggagaaggtatagaaaaagtggtcaattggatcgaagatgattttggaatattgctggatatatttagcgatgtaacagattacataatatccggctttaatgataccctgctcttatttcatcccattgtatttgcattgataattggtatcgctgcatatttcatcggcaggaaggatttaaaacttgctataggaagtacagttggcctgcttctgatagataatatgggactatgggtactatccatggagaccatttcccttgtcatcacatcggcatcccttgcattgcttatcgcaataccattgggaatcgtttcagcaaagaatgaatttgcataccacatcatcaaacctctgcttgacctgatgcaaacaatgccatcgtttgtttaccttatacctgcagtcatattctttgggcttgggaatgttccgggacttgttgcaacgattgtttttgcaatgcctcctgcgatcagacttaccaccctgggaattcagcaggtgcctaaggaacttactgaggtcgcagacgcatttggatcaacaccctggcaaaaactaaccaaggtggaactgccaactgctctgccaagtataatggccggtgtaaaccagtgcatcatgctttccctttcaatggtggtaatagctgccatgatcggtgcaagaggtctgggatatcaggtactcatcggaattcagagggtagatataggccagggatttgaagcaggacttggaattgtgatcatagcgatcatacttgacaggttcacgcagcatcttacaccaaaatga

SEQ ID NO: 3974 - protein, 276 aa, Methanococcoides burtonii DSM 6242
MAIPKLPIGEGIEKVVNWIEDDFGILLDIFSDVTDYIISGFNDTLLLFHPIVFALIIGIAAYFIGRKDLKLAIGSTVGLLLIDNMGLWVLSMETISLVITSASLALLIAIPLGIVSAKNEFAYHIIKPLLDLMQTMPSFVYLIPAVIFFGLGNVPGLVATIVFAMPPAIRLTTLGIQQVPKELTEVADAFGSTPWQKLTKVELPTALPSIMAGVNQCIMLSLSMVVIAAMIGARGLGYQVLIGIQRVDIGQGFEAGLGIVIIAIILDRFTQHLTPK

SEQ ID NO: 3975 - DNA, 834 bp, Myxococcus xanthus DK 1622
  CDS (1)..(834): transl_table=11
atgagcacactgagaatcggcgaaggcttcgaggagctgattgactggatgggcacgcgcggcgcgccggtgttcgacgccatccgttcggggctcacggcctgcatcaacggcctggagagcgcgctgctcctgccgcccagctacgccatcatcacggtgttgatggtgctcgcctggcgcctgtccggcctgggcacggccgtcttcacggcgctgggcatgctgctcatccaggacatgggcctgtggaaggcgaccatggagacgctggcgctggtcctcagctcggcgatggtggcgctggtactgggcatccccctgggcatctgggccgcgtacagccgcgtcgtggagcgggtgctgcggcccgccctggacctgatgcagacgatgcccgccttcgtctacctcatccccgcggtgctcttcttccggctggggaaggtgcccggcgtggtggccaccgtcatcttcgccatgccgcccgcggtgcgcctcaccaacctgggcatccggcaggtgcccactgaagtcgtggaggccgccatcgcgtttggcgcgacgccgcgtcagacgctgctcaacgtccagctccccatcgccgtccccacgctgctggccggagtgaaccagaccatcatgctgtcgctgtccatggtggtcatctccgccatgattggcgcggggggactgggcgagcaggtcctgaagggcatcacccagctccgcatcgggctgggcttcgagagcggcatcgcggtggtcatcctggccatcgtgttggaccgcctgactcatgcgctgggcaagccccggacgcgctcatcatga

SEQ ID NO: 3976 - protein, 277 aa, Myxococcus xanthus DK 1622
MSTLRIGEGFEELIDWMGTRGAPVFDAIRSGLTACINGLESALLLPPSYAIITVLMVLAWRLSGLGTAVFTALGMLLIQDMGLWKATMETLALVLSSAMVALVLGIPLGIWAAYSRVVERVLRPALDLMQTMPAFVYLIPAVLFFRLGKVPGVVATVIFAMPPAVRLTNLGIRQVPTEVVEAAIAFGATPRQTLLNVQLPIAVPTLLAGVNQTIMLSLSMVVISAMIGAGGLGEQVLKGITQLRIGLGFESGIAVVILAIVLDRLTHALGKPRTRSS

SEQ ID NO: 3977 - DNA, 1722 bp, Leuconostoc mesenteroides subsp. mesenteroides ATCC 8293
  CDS (1)..(1722)
atgacaatgaataatttagtaagtattccaaaaattccacttgaagattgggtcagttcagcggtttcatggttaactactaatttatccggattttttgatgccattcaatctggcggtcaatacataatggatgctttaacaaatggtttaactgctgtacccatggcactaatgattattggtatcacagtaattgccattgttacgacaccgaaaaagattggctttccgttattcacacttttgggacttttgttaattgccaatcaaggactttggtctgacttaatgaataccgttacattggtaatcatggcgtctattgtttcgttgattattggtataccccttggaattttaacagcaaagtcacaaaagactgcggtagttgttcaaccaatcttagactttatgcagactatgccaggatttgtttatttaattcctgctgttgccttctttggaatcggtgtggttcctggtgtgtttgcttcgataatctttgccctaccaccgatggttcgtatgactagtttaggtattcgtcaagttccagttgatttggttgaagcagctgattcatttggatcaactacttggcaaaagttgtttaaattagaacttcctagtgcaaaaaatactattttagcaggcgctaaccaaacaatcatgttggcattgtcgatggttgtcacagcttctatgattggtgcaccaggtcttgggcgtggcgtcttgtctgcggttcaacacgctgatgttggttctggatttgttaacgggcttggattggtgatcttagctattgttattgatcgttttacacaaaagtttaacacccaacccggacaaaaagcggtgacaaagccatggcgtcgttggacagtacttgcggctttgttggttatgattggtggaggtgttgtcaacactttgacttccgataaaacaacaggtcaaaaagttactattggctatgttgagtgggattcagaagttgcctcttcgaatgtgctggctgaatcattacgtcaacatggatacgatgtcacgttaacgccattagataatgctgttttgtggcagtcgctatctaataatcaaattgatatttcagtttcagcatggttgccagatacacacaaagctttgtatgataagtacaaaaatgatgtaacattgcttggccctaacttgaaaggtgttaaaactggattagttgttcctgattatatggatgtaaattccattagtgatttaacaactcaagcaaataagacaatcacaggtattgagccgggggccggtgaaatggccacagctgctaatgctttgaagtcgtattcaaacttatcgggttggaacttatcatcctcatcttctggtgctatggtatcagcattggataaagcttacaaaaataagcaagatgttgtggtgaccggttggtcaccacactggatgtttagtaagtaccacttgaagttcttgtctgatccaaaaaacgtgtttggatctggagaaaccattaatacgattgtgaataagaagtttaaaacttctaaccccaaggcctataaggttgctgataattttaattggacgaaagatgacatggaatcagtcatgctcgatattcaaaatggtcaaacaccaaagcaggctgctgctaaatggattaagtcacatcaaaagttagttgatagttggtataaataa

SEQ ID NO: 3978 - protein, 573 aa, Leuconostoc mesenteroides subsp. mesenteroides ATCC 8293
MTMNNLVSIPKIPLEDWVSSAVSWLTTNLSGFFDAIQSGGQYIMDALTNGLTAVPMALMIIGITVIAIVTTPKKIGFPLFTLLGLLLIANQGLWSDLMNTVTLVIMASIVSLIIGIPLGILTAKSQKTAVVVQPILDFMQTMPGFVYLIPAVAFFGIGVVPGVFASIIFALPPMVRMTSLGIRQVPVDLVEAADSFGSTTWQKLFKLELPSAKNTILAGANQTIMLALSMVVTASMIGAPGLGRGVLSAVQHADVGSGFVNGLGLVILAIVIDRFTQKFNTQPGQKAVTKPWRRWTVLAALLVMIGGGVVNTLTSDKTTGQKVTIGYVEWDSEVASSNVLAESLRQHGYDVTLTPLDNAVLWQSLSNNQIDISVSAWLPDTHKALYDKYKNDVTLLGPNLKGVKTGLVVPDYMDVNSISDLTTQANKTITGIEPGAGEMATAANALKSYSNLSGWNLSSSSSGAMVSALDKAYKNKQDVVVTGWSPHWMFSKYHLKFLSDPKNVFGSGETINTIVNKKFKTSNPKAYKVADNFNWTKDDMESVMLDIQNGQTPKQAAAKWIKSHQKLVDSWYK

SEQ ID NO: 3979 - DNA, 837 bp, Bacillus cereus G9241
  CDS (1)..(837): transl_table=11
atgaatagtataccgcgtattccgttaggggaatgggtcgactcatttgttgcaagtttatatgagcactttgaaggcttattccgagggttctcttatattatcggcggattcgttgatttactcactaattttttaacaataataccagccatattgatgattatcatcctttgtttcctcatttggtacacaacgagaaaagtatctttagtcatttttacactgatcgggttattatttattttaaatattaactactgggcacaaacgatgcaaacattatcactcgtacttacttccgttattatttcaattattgtcggaattccaattgggatattagcatctcaaaatgagcgtttctcaaaatttttaaaaccaacgttagattttatgcaaacaatgccggctttcgtatatcttattcccgcgattacatttttcggagtaggtgtagtacccgggattattgcatcagtaatctttgcaatgccaccgacaattcgttttactgatttaggaattagacaagttccagaagatttaattgaagcagcgaatgcatttggctcaaccgcatcacaaaaattatttaaagtacaattaccactcgcaactggaacaatcatggctggtgtgaatcaaagcattatgctttctttatctatggtagtaacagcatctcttgtaggagcaccaggtcttggggttgatgtataccgctctgtaacacaagttaatatcggaatgggatttgaagccggactagctattgttgtcattgcgattatattagaccgcattacacaaggatttcatcaaaaaagaagataa

SEQ ID NO: 3980 - protein, 278 aa, Bacillus cereus G9241
MNSIPRIPLGEWVDSFVASLYEHFEGLFRGFSYIIGGFVDLLTNFLTIIPAILMIIILCFLIWYTTRKVSLVIFTLIGLLFILNINYWAQTMQTLSLVLTSVIISIIVGIPIGILASQNERFSKFLKPTLDFMQTMPAFVYLIPAITFFGVGVVPGIIASVIFAMPPTIRFTDLGIRQVPEDLIEAANAFGSTASQKLFKVQLPLATGTIMAGVNQSIMLSLSMVVTASLVGAPGLGVDVYRSVTQVNIGMGFEAGLAIVVIAIILDRITQGFHQKRR

SEQ ID NO: 3981 - DNA, 852 bp, Pseudomonas aeruginosa UCBPP-PA14
  CDS (1)..(852)
atgtttcccgaacgcctgacattttccatcgccgactgggtcaacgcttgggtcgacgccctggtgaccaactacggcgacctgttccgcaagatctccgacaccctgctgtgggctatcgtcaacctcgaagggctgctccgcgccacgccctggtggctattgctggcgatcgtcgcggcgatcgcctggcacgccacccggcgcctgctgccgaccctggtgatcaccggcctgctgttcctggtcggcgccgtcggcctctgggacaagctgatgcagaccctcgcgctgatgctggtggcgaccttcatctcggtgctgatcggcatccccctgggcatcctcgccgcgcgcagcaaccgcctgcgcgcggtactgatgccgctgctggacatcatgcagaccatgcccagcttcgtgtacctgatcccggtgctgatgctgttcggcctgggcaaggtgccggcgatcttcgccaccgtgatctatgccgcgccgccgctgatccgcctcaccgacctgggcatccgccaggtcgacagcgaggtgatggaggcggtcaacgccttcggcgccaaccgctggcagcagctgttcggcgtgcagttgccgctggccctgccgagcatcatggcggggatcaaccagaccaccatgatggccctgtcgatggtggtgatcgcttcgatgatcggcgcccgcggcctcggcgaagacgtactggtgggcatccagacgctgaacgtgggcaagggcctggaagccggcctggcgatcgtcatcctcgcggtggtgatcgaccgcatcacccaggcctacggccgttcccggcacgagacgagcaaatga

SEQ ID NO: 3982 - protein, 283 aa, Pseudomonas aeruginosa UCBPP-PA14
MFPERLTFSIADWVNAWVDALVTNYGDLFRKISDTLLWAIVNLEGLLRATPWWLLLAIVAAIAWHATRRLLPTLVITGLLFLVGAVGLWDKLMQTLALMLVATFISVLIGIPLGILAARSNRLRAVLMPLLDIMQTMPSFVYLIPVLMLFGLGKVPAIFATVIYAAPPLIRLTDLGIRQVDSEVMEAVNAFGANRWQQLFGVQLPLALPSIMAGINQTTMMALSMVVIASMIGARGLGEDVLVGIQTLNVGKGLEAGLAIVILAVVIDRITQAYGRSRHETSK

SEQ ID NO: 3983 - DNA, 894 bp, Crocosphaera watsonii WH 8501
  CDS (1)..(894): transl_table=11
atggatgaactattatttacttatcttctagcaactgaaaaaccagaagggataaatgttctactaaatcccttccaactttataccattccccttgatgattggattagccaaagtatcgaatttattgttaagaattttcgtccctttttccagaccattagcctacctattggttggggattgaagagaatagaatggggctttagtgccattcctcccctcatttttatcataattattggtatcctcgcttggaaattagcagggaaaaaaatcgccatttatagcattatttccctaaccttaattggttttgtgggtgcctgggaacaagcaatggtatctttggctttagttgtaacagcggtgttattttgcctgatggtgggcattcctgtgggggttatcagtgccaaaaatgatcccctagaaagagtcattcgtccactattggatgtgatgcaaaccctaccatcatttgtttatctggttcctgtggtgatgctgtttggtattggggaagttcctggggtcattgccacaattatttttgctattcctcctctcattcggctgactaatttaggtattagacaggtttccccagaagtaactgaagcggcgatcgcttttggttcaaccccttggcaagttttatgggaggcacaaattcccttagctatgcctacaattttagcaggggtcaatcaagctattctcatggccttatctatgtccgttgtaacctctatgattgccgttccagggttaggacaaatggtgttacagggtgtgggtcgtttagatgtgggtttagctgctgtaggaggtttaggcattgttctcttggctattatgctcgatcgcatgacccaagctatcagtcagtga

SEQ ID NO: 3984 - protein, 297 aa, Crocosphaera watsonii WH 8501
MDELLFTYLLATEKPEGINVLLNPFQLYTIPLDDWISQSIEFIVKNFRPFFQTISLPIGWGLKRIEWGFSAIPPLIFIIIIGILAWKLAGKKIAIYSIISLTLIGFVGAWEQAMVSLALVVTAVLFCLMVGIPVGVISAKNDPLERVIRPLLDVMQTLPSFVYLVPVVMLFGIGEVPGVIATIIFAIPPLIRLTNLGIRQVSPEVTEAAIAFGSTPWQVLWEAQIPLAMPTILAGVNQAILMALSMSVVTSMIAVPGLGQMVLQGVGRLDVGLAAVGGLGIVLLAIMLDRMTQAISQ

SEQ ID NO: 3985 - DNA, 945 bp, Mesorhizobium sp. BNC1
  CDS (1)..(945): transl_table=11
atgcttaatgccgacgatcttgctgtctttccggtggatgtctggatcagcgatgcggtccagtgggtcgcgctcaacctgcgtccgcttttcctggccatcaagtggccgatcgaaagccttctgacgttaatcgacggcgccatgcacgatgcccccttcccgctcgtggtgatcctattcacggcactggcctatatgctcgccagccgcaagattgcgatcttcaccgccatagtactggtccttgttgcggcgatgggagtgtgggatccggcgatgaccacgttgtcgctgatcacgacggcgatcttcttctgcgcgttgatcggcctgccggtcggtatctggtgtgcgcgcagcgacagggcctggagcatagtccggccgatactcgacattatgcagacgacaccaaccttcgtctatctcgtgccggtggtgatgctgttcggcgtgggcactgtgccgggccaggtggccgtggtcgtggctgcggtgccgccgcttatacgctttaccaatctcggcatccgcatggtcgatcgtgagatcgtcgaagcgggtattgcctttggcgcgagcagccggcaattgctgtgggaaatccaaatccccatggcgatcccgacgatcctgggcggtcttaaccagacggtgctgaccgccatggtcatgtccgtggtcgtcgccatgattggcgccgaagggctggggctggtcgtgctgcagggcataggacggctcgatgtcggccgtgccgttatcggcgggattgccattgttctgctggccatgatgctcgacaggatcacccagaagatggctgaacccaagcgcgcgacggcgcggtcgcgctggcttgccgccctcaacctcgaccggcttctgtcgcgcaacggcagcagcgagacggtcgcatcccaatccggcaccaacgcctga

SEQ ID NO: 3986 - protein, 314 aa, Mesorhizobium sp. BNC1
MLNADDLAVFPVDVWISDAVQWVALNLRPLFLAIKWPIESLLTLIDGAMHDAPFPLVVILFTALAYMLASRKIAIFTAIVLVLVAAMGVWDPAMTTLSLITTAIFFCALIGLPVGIWCARSDRAWSIVRPILDIMQTTPTFVYLVPVVMLFGVGTVPGQVAVVVAAVPPLIRFTNLGIRMVDREIVEAGIAFGASSRQLLWEIQIPMAIPTILGGLNQTVLTAMVMSVVVAMIGAEGLGLVVLQGIGRLDVGRAVIGGIAIVLLAMMLDRITQKMAEPKRATARSRWLAALNLDRLLSRNGSSETVASQSGTNA

SEQ ID NO: 3987 - DNA, 1989 bp, Trichodesmium erythraeum IMS101
  CDS (1)..(1989): transl_table=11
gtgtttattttgaattatttatcttattacttgatcactgaaactcaaggaggattaaacaatttattgaaccctttcgagtcttatactttacccctggaggaatgggttaacaatttagttgattttctggttgacaactttcggtttatattccaagctatcagcttacctattagcggaactctaagaatagtagaattgacttttctagcaattccgcctttaatttttctcattatcactggtttgctggtctggcaattagcaggtagaaaaatagctatatacagttttatttctctttgtattattggtttttgtggtgcttgggaacaatcaatggtttccctatctttaatacttactgctgtaatattctgtatgcttattggtatacctctaggtattgcttgtgccctgagcgatcgctttaataaaatcttgcgacctctcctagatgggatgcaaactcttccaacttttgtttatctggtacctgtagtaatgctatttggtattggcgaagtttctggtataatagcgacttttgtttttgcagttcctcctctaattcgcctgaccaacctgggcattagacaggtgtccccagaagcggtagaggctgcacttgcgtttggttcaactcgccaacaagttttgttggaagtgcaaatacctctagctttacctactatacttgctggtacgaaccaagccattttattagccttatcgatgtcagttgtcacctcaatgattggagtagagggattaggacaaatggtattacaaggtttaggacgtttgaatgtgggactagcggcaatagggggcttaggtattgtattaattgctataatgttagaccgtattactcaaggtgttagtcaaggtaatattcagtcttggcaagaccgtggtcctatcggttggtggcggtctcgtaagtttttcaaacatcataaaacaactttagggataagtattctgcttgccttgttagttggtgtgacaggttggcaattaatgtctcaaaaaaatatcaagtcaactgagcatctactgccaggggaaggagtagtggtgcgtccaacttctggcttagaaacctacggtatattcaccacagaaattgtgaatattggactggaaaaattaggatatgagataagaggtgaaaagcaactgaatgttccagcaatgcatctggctgttagcaatggagatttagattttgctggaacccattgggaagctagccatcaagaattttttgacaataatggtggggaagaaaaattagaacggctaggaactctgatttctaattctactatggggtatcagatagataaaaaaacagcagataagtacaatattactaatatatcacaacttaaagaaccaaaaattgctaaactttttgactctgatggtgatggtaaggcaaatttaattggttgtactgctggttggtcgtgcgaaagagtcataaatcatcatttagaggtttatggacttgaagatactgttgagcaaattcaaggaaattattcttctttgttggcagatattttagttcgttatcgtcaaggaaaaccaattttattttttgcttggaaaccccattggttttcttctattttaagagaaggagaaaatgtagaatggttgagtgttccttttacatctttggtaggaactatggaaaacttcacggaaaaagatactttatttaatgataaaaatatcggttttcctattgataatgtcaggatattagctaataagaaattcttgaaggctaacccagttgctaaacgtttatttgaacagattgagattcctttagaggatgttagtattgaacaggaaaaagtaaaaaatggagaaaataaacctattgatattcgccatcatgctgaggaatggatagttaatcatcaagggttatttgatagttggttagaaatagcaaaaagttaa

SEQ ID NO: 3988 - protein, 662 aa, Trichodesmium erythraeum IMS101
MFILNYLSYYLITETQGGLNNLLNPFESYTLPLEEWVNNLVDFLVDNFRFIFQAISLPISGTLRIVELTFLAIPPLIFLIITGLLVWQLAGRKIAIYSFISLCIIGFCGAWEQSMVSLSLILTAVIFCMLIGIPLGIACALSDRFNKILRPLLDGMQTLPTFVYLVPVVMLFGIGEVSGIIATFVFAVPPLIRLTNLGIRQVSPEAVEAALAFGSTRQQVLLEVQIPLALPTILAGTNQAILLALSMSVVTSMIGVEGLGQMVLQGLGRLNVGLAAIGGLGIVLIAIMLDRITQGVSQGNIQSWQDRGPIGWWRSRKFFKHHKTTLGISILLALLVGVTGWQLMSQKNIKSTEHLLPGEGVVVRPTSGLETYGIFTTEIVNIGLEKLGYEIRGEKQLNVPAMHLAVSNGDLDFAGTHWEASHQEFFDNNGGEEKLERLGTLISNSTMGYQIDKKTADKYNITNISQLKEPKIAKLFDSDGDGKANLIGCTAGWSCERVINHHLEVYGLEDTVEQIQGNYSSLLADILVRYRQGKPILFFAWKPHWFSSILREGENVEWLSVPFTSLVGTMENFTEKDTLFNDKNIGFPIDNVRILANKKFLKANPVAKRLFEQIEIPLEDVSIEQEKVKNGENKPIDIRHHAEEWIVNHQGLFDSWLEIAKS

SEQ ID NO: 3989 - DNA, 1092 bp, Vibrio sp. Ex25
  CDS (1)..(1092)
atgtcttcagagcaaactaacaatgatccctggtcgaataccgctcctgcacaagatgatccttggtcacaaggtgtaggtgctgacgctgccccaagtaatgactggttaagctcagaaactgtagagcaagcgccattcgacattatgaacccattccaagatgcggttctaccacttgatagctgggtagaatcgggattgaactggttggtggaacatggtcgtcctgttttccaagcaattcgagttccaatcgactttattcttacctcgtttgaaactgctttggtgtctacacctgcgcctatcatggtgctcattttatttttgctggcgtggcagttttccaatgtaaaactcggtttttcaacacttgtatcccttgtttttatcggcctaattggtgcgtggtcacaggcgatgacaacgctcgcactggttttaaccgccgtcttcttctgtttgcttatcgggctaccgatggggatatggttggcgagaagccaaaccgcagccaaatttgttagaccaatactcgatgcaatgcaaacgacccccgcgttcgtttatctagtgccaatcgttatgctattcggtattggtaacgttcctggcgttgtagtaaccatcattttcgcactgcctcccgttgtgcgcctgactattttagggattcagcaagtacctgaagagctgatcgaagcgggccactctttcggggcaaacaaaaaacagatgctttaccgcatccaattgccattggcgttaccaacgattatggcaggggtaaaccaaaccttgatgctttcgctttctatggtagtgatcgcttcaatgattgcggttggcggcttgggccaaatggtacttcgtggtatcggccgacttgatatgggtcttgctgctgtcggtggcttaggcatcgtaattcttgccattttattagaccgtattacccaagtattaggggttaatgcgggtaacaccaagcttcgctggtatcacacaggtcctgtttcatacctattaaaactgaaaacaaagacgaaccaagacgatctaaaacttaggagaaacatcaatgaataa

SEQ ID NO: 3990 - protein, 363 aa, Vibrio sp. Ex25
MSSEQTNNDPWSNTAPAQDDPWSQGVGADAAPSNDWLSSETVEQAPFDIMNPFQDAVLPLDSWVESGLNWLVEHGRPVFQAIRVPIDFILTSFETALVSTPAPIMVLILFLLAWQFSNVKLGFSTLVSLVFIGLIGAWSQAMTTLALVLTAVFFCLLIGLPMGIWLARSQTAAKFVRPILDAMQTTPAFVYLVPIVMLFGIGNVPGVVVTIIFALPPVVRLTILGIQQVPEELIEAGHSFGANKKQMLYRIQLPLALPTIMAGVNQTLMLSLSMVVIASMIAVGGLGQMVLRGIGRLDMGLAAVGGLGIVILAILLDRITQVLGVNAGNTKLRWYHTGPVSYLLKLKTKTNQDDLKLRRNINE

SEQ ID NO: 3991 - DNA, 849 bp, Alkalilimnicola ehrlichei MLHE-1
  CDS (1)..(849): transl_table=11
gtgagtcaggagtttcccttcatcggcaagatcccgctggccgattggatcgacagcggtctggactggttgaccgacaagttcgccctggtcacccgtgccatcagtcgcttcatgggcgatggcgtggagctggtggtcggtgcgctcacctaccccccgccctgggtggtcatcctcggcttcatggcgctggcgtggtggctagccgggcggcgggtggccatcggcaccggcctgggcctggcgctgctgtggaacctgcagctctgggtggcgaccatggagacgctcaccctggtcctgttcgccaccgcggtggcggtcactatcgccctgcccatcggcatctggggcggcttgtccgggcgggcccaccgggtgatgacgccggtactggacttcatgcagaccatgccggcgttcgtctacctgattcccgccgtgcccttttttgggctgggaccggtggcggccatgttcgccacggtgatcttctccatgccgccggcgatccgactgactacactgggaatacgtcaggtgcctgccgaactggtggaggccgccgatgccttcggtgccacccggcggcagaagctgttcaaggtgcagctgccgctggccgtacccaccatcatggccggcatcaaccagaccattatgctcgccctgtccatggtggtcatcgccgccatgattggcgccggtgggctgggtagcgaggtgtggcgcgccatacagcgcctccagtccgggaacggcttcgaagcgggcatcgccatcgtgatcctggcgatgatcctggatcgggtgacgcaaaagatcggaaagggaaagcaatcctga

SEQ ID NO: 3992 - protein, 282 aa, Alkalilimnicola ehrlichei MLHE-1
MSQEFPFIGKIPLADWIDSGLDWLTDKFALVTRAISRFMGDGVELVVGALTYPPPWVVILGFMALAWWLAGRRVAIGTGLGLALLWNLQLWVATMETLTLVLFATAVAVTIALPIGIWGGLSGRAHRVMTPVLDFMQTMPAFVYLIPAVPFFGLGPVAAMFATVIFSMPPAIRLTTLGIRQVPAELVEAADAFGATRRQKLFKVQLPLAVPTIMAGINQTIMLALSMVVIAAMIGAGGLGSEVWRAIQRLQSGNGFEAGIAIVILAMILDRVTQKIGKGKQS

SEQ ID NO: 3993 - DNA, 897 bp, Synechococcus sp. RS9917
  CDS (1)..(897): transl_table=11
atgctgttgttcgctgctgcccatcaggccggttggctcggcaaggcggtggatgcggcggtcgcctggctgctcacccatgcccaggtgctctttcaggcgatcaatggggtggtgctggcgatcgtggcggccaccgaagcggtgctccagtggccatcggcctggttcttcgccttgctggtggccttgctggggctctggcgcgtcaatggcggcttcgccctgttcgtgctgctcggcctcaatcttgttttgtcgatggatctctgggcaccgatgatcaccactctgtcgctggtgttggcggcatcgctgctcgccctgatcgtcgggctgcctctcggcatcctgtcggcgcgtcacgccatggtctggcgcctggtgcgtcctggcctcgatctgatgcagacgatgccggccttcgtgtatctgattccagctgtgatgcttttcagcaccggcgcggttccctcgatcatcgccacgctgatctttgccatgcctccggtggtgcgactcacccagctgggtctgtcccaggtgcccgccgatctgctcgaggctggccgatccttcggttgcagtgagcgtcagctgctctggaaagtgcagatgcccagtgccctgcccacggtgatgaccggggtgaatcaaacgatcatgctgtcgctctcgatggtggtgatcgcctcgatgatcggtggcggcggtctcggcgatgtggtgctgcgcggaattcagcagctcgatgtgggccttggctttgaaggcgggattgccgtggtgatcctcgcggtgattctcgatcggctcagtcagagcctggccagtgatgccacaccgtccttgccggagcggctccgcacctggcggttgctctggaggtcggcatga

SEQ ID NO: 3994 - protein, 298 aa, Synechococcus sp. RS9917
MLLFAAAHQAGWLGKAVDAAVAWLLTHAQVLFQAINGVVLAIVAATEAVLQWPSAWFFALLVALLGLWRVNGGFALFVLLGLNLVLSMDLWAPMITTLSLVLAASLLALIVGLPLGILSARHAMVWRLVRPGLDLMQTMPAFVYLIPAVMLFSTGAVPSIIATLIFAMPPVVRLTQLGLSQVPADLLEAGRSFGCSERQLLWKVQMPSALPTVMTGVNQTIMLSLSMVVIASMIGGGGLGDVVLRGIQQLDVGLGFEGGIAVVILAVILDRLSQSLASDATPSLPERLRTWRLLWRSA

SEQ ID NO: 3995 - DNA, 897 bp, Synechococcus sp. WH 7805
  CDS (1)..(897): transl_table=11
atgactctcctcgcagcggcacatcaggctggatggctgggtcaaggtgtcgacgtcatcgttgcctggctgctcgccaatgctcagggtgcttttgatgtgatcaaggtctcggttctcgccgtggtttccttcaccgagatgcttctagacagtcctccggcttggttgctcgcctggagcgtggccgcgatcggtctctggagagtgagtggaggcttcgcgctcttcgtgcttctcggcctcaaccttgtgctttccctccagctctggaacgagatgatcgccactctggctctggtgatcacggcctcgctattggccctcgtgatcggcttgcccttgggaatcctctcggcccgataccgctcggtttggcgtctggtgaggccctgcctcgacttgatgcagaccatgccggcctttgtttatctgattcctgctgtgatgctgttcagcaccggtgcggtgccttcgatcctggccaccctgatcttttccatgcctcctgtcgtccgattgacgcagctcggattgtcacaggtccctgctgatctgatcgaagcaggacgctccttcggatgcagtgaacgccagcttctctggaaagttcagatgccgagtgcactacccacggtgatgacgggcgtcaatcagacgatcatgctggctctgtccatggtggtgatcgcttccatgattggcggaggcggtttaggcgatgtggtgttgcgtggcattcagcagctcgacgtgggtctgggtttcgagggtggaattgctgtagtgatccttgccgtgatccttgaccgtctcagtcagagcttcacagcccgcgaagtgcaaccccttcgtcagcgctggcgcgcgtggatgtctccctggaggtcgtcatga

SEQ ID NO: 3996 - protein, 298 aa, Synechococcus sp. WH 7805
MTLLAAAHQAGWLGQGVDVIVAWLLANAQGAFDVIKVSVLAVVSFTEMLLDSPPAWLLAWSVAAIGLWRVSGGFALFVLLGLNLVLSLQLWNEMIATLALVITASLLALVIGLPLGILSARYRSVWRLVRPCLDLMQTMPAFVYLIPAVMLFSTGAVPSILATLIFSMPPVVRLTQLGLSQVPADLIEAGRSFGCSERQLLWKVQMPSALPTVMTGVNQTIMLALSMVVIASMIGGGGLGDVVLRGIQQLDVGLGFEGGIAVVILAVILDRLSQSFTAREVQPLRQRWRAWMSPWRSS

SEQ ID NO: 3997 - DNA, 834 bp, delta proteobacterium MLMS-1
  CDS (1)..(834): transl_table=11
atgaaagagcgcatagatattccggtgggcgactggattgagctgggggttgactggattctcgacaacctggaaccgctgctggatggcatcgcctgggtgctgggcctgctgaccaactcttttgcctcgggtctgcaggcaatcccggtctggctgctctttctgatcctggtgggtttgtgctggtggcgggtaagctggcgtttcgccatttttgccatactcgccctggggctgatcatggggatggatctctggacggagaccaccaacaccctctccctggtgctggcttccgccctggcggccctgatcatcgggctgccggtgggggtggcgatgtcccgcagcgataccgtggaggccattatccggcccctgctggacctgatgcagaccatgccgccctttgtctacctgatcccggcggcgatctttttcggcctggggacggtgcccggggccattgccaccgtggtcttctgcatgccgccggtggtgcggctgaccaatctcggcatccgccaggtcaaccgcgagcagatcgaagccggcctggcctttggttgcaatcgtcgccagttgctgaccaagatccaactgcccctggccctgccgtcgatcatggccggggtcaaccagaccatcatgctggccctgtcgatggtggtaatcgcctccatgatcggggccggcggcctgggcaacaccgtactcaccggtatccagcgccttgatgtggggctgggttttgaaggcggcctgggggtggtgatcctggccatcctgctggaccggatcacccagagcctgggtatacgacggcgctga

SEQ ID NO: 3998 - protein, 277 aa, delta proteobacterium MLMS-1
MKERIDIPVGDWIELGVDWILDNLEPLLDGIAWVLGLLTNSFASGLQAIPVWLLFLILVGLCWWRVSWRFAIFAILALGLIMGMDLWTETTNTLSLVLASALAALIIGLPVGVAMSRSDTVEAIIRPLLDLMQTMPPFVYLIPAAIFFGLGTVPGAIATVVFCMPPVVRLTNLGIRQVNREQIEAGLAFGCNRRQLLTKIQLPLALPSIMAGVNQTIMLALSMVVIASMIGAGGLGNTVLTGIQRLDVGLGFEGGLGVVILAILLDRITQSLGIRRR

SEQ ID NO: 3999 - DNA, 834 bp, delta proteobacterium MLMS-1
  CDS (1)..(834): transl_table=11
atgaaagagcgcatagatattccggtgggcgactggattgagctgggggttgactggattctcgacaacctggaaccgctgctggatggcatcgcctgggtgctgggcctgctgaccaactcttttgcctcgggtctgcaggcaatcccggtctggctgctctttctgatcctggtgggtttgtgctggtggcgggtaagctggcgtttcgccatttttgccatactcgccctggggctgatcatggggatggatctctggaccgagaccaccaacaccctctccctggtgctggcttccgccctggcggccctgatcatcgggctgccggtgggggtggcgatgtcccgcagcgataccgtggaggccattatccggcccctgctggacctgatgcagaccatgccgccctttgtctacctgatcccggcggcgatctttttcggcctggggacggtgcccggggccattgccaccgtggtcttctgcatgccgccggtggtgcggctgaccaatctcggcatccgccaggtcaaccgcgagcagatcgaagccggcctggcctttggttgcaatcgtcgccagttgctgaccaagatccaactgcccctggccctgccgtcgatcatggccggggtcaaccagaccatcatgctggccctgtcgatggtggtaatcgcctccatgatcggggccggcggcctgggcaacaccgtactcaccggtatccagcgccttgatgtggggctgggttttgaaggcggcctgggggtggtgatcctggccatcctgctggaccggatcacccagagcctgggtatgcgacggcgctga

SEQ ID NO: 4000 - protein, 277 aa, delta proteobacterium MLMS-1
MKERIDIPVGDWIELGVDWILDNLEPLLDGIAWVLGLLTNSFASGLQAIPVWLLFLILVGLCWWRVSWRFAIFAILALGLIMGMDLWTETTNTLSLVLASALAALIIGLPVGVAMSRSDTVEAIIRPLLDLMQTMPPFVYLIPAAIFFGLGTVPGAIATVVFCMPPVVRLTNLGIRQVNREQIEAGLAFGCNRRQLLTKIQLPLALPSIMAGVNQTIMLALSMVVIASMIGAGGLGNTVLTGIQRLDVGLGFEGGLGVVILAILLDRITQSLGMRRR

SEQ ID NO: 4001 - DNA, 942 bp, Oceanobacter sp. RED65
  CDS (1)..(942): transl_table=11
atgagtgatggcagtgcatggggaaccagctcccaagaagataccagttatttagcgcaaaaagataccaaccaagtgaaagagttcgattggatggaaccctttgatgttgatggtggaatcgtgcctttagatagcatggtagacaccgcgatcaatgccattgttccggtcttgcgtcctgtctttcaagtgattgcacaacctattacatggtttttaaacgcaatcgaatccttgttattagttattcccgccccacttattatcattgctttagcagcgttggcatggaagctatcgaatcgccgtattggtatcgccactctgtttggcttgctggcgattggtttaattggtgcatgggatcaagcaatgactacactatcattggtcattacgtcgttatttttctgtattctaattggattgcctatggggatatggttatcccgaagtgataaagccgtgtccattgtccggccgattcttgatgctatgcaaaccacgccagcatttgtctatctcattcctattgtcatgctatttagtcccggcaaagttgccggtgtcatcgtcaccatcatcttcgccgtaccaccaatgattcgcttaactaatttaggtattcgccaagtaccagaagacttaatcgaagctgcacgagcatttggtactagtcccaagcaactgctcttcaaagtacaacttcccctagcattacctacgattatggctggggtaaatcaaacgttaatgttagggctatccatggtggtcattgcgtccatgattgccgtacccggtttaggccttatggttttacaaggtattggccgcaacgatatcggtatcgccactgtaggcggattaggcattgtaattttagctataattttagatcggatcacacaacatattggcggcagtcgccagtcttga

SEQ ID NO: 4002 - protein, 313 aa, Oceanobacter sp. RED65
MSDGSAWGTSSQEDTSYLAQKDTNQVKEFDWMEPFDVDGGIVPLDSMVDTAINAIVPVLRPVFQVIAQPITWFLNAIESLLLVIPAPLIIIALAALAWKLSNRRIGIATLFGLLAIGLIGAWDQAMTTLSLVITSLFFCILIGLPMGIWLSRSDKAVSIVRPILDAMQTTPAFVYLIPIVMLFSPGKVAGVIVTIIFAVPPMIRLTNLGIRQVPEDLIEAARAFGTSPKQLLFKVQLPLALPTIMAGVNQTLMLGLSMVVIASMIAVPGLGLMVLQGIGRNDIGIATVGGLGIVILAIILDRITQHIGGSRQS

SEQ ID NO: 4003 - DNA, 846 bp, Halobacillus trueperi
  CDS (1)..(846): transl_table=11
atgggtttgattcctaaactgcctgtagctgagtggattgatacagcgacagagtggacaacagatacatttgaattcttatttgattttataaaggaagactttggtgactttattgaaatcgtagcagaagattggctgatgggcatccccatttggctattcattattgttgtaggtgttttagccttctttgcttcaggcaaaaagttgggcttaatggctttttcagtcatcggcctgtggtttattgccaaccaggagttatgggaagagttgatgaacacatttacgctcgttatttttgcaagtttgatttccgttattattggagttccatttggaatttggatggccaaaagcaaattggcagagaaaattcttacacctgtccttgacttcatgcagacgatgcccgctttcgtctatctgattccggcagtggctttcttcagtatcggtatggtgccaggggtgtttgcctctgtcattttcgcaacaccaccgaccgttcgttttacgaaccttggaatacgacaggtgtcccatgaattgattgaggcatctgatgcattcggtacgaccggtactcagaaattatttaaagtccaattgccaatggctaaaaagacgatcatggctgggatcaaccaaacagttatgcttgcattatccatggtggttattgcatccatgattggtgcgaagggacttggacaaacggttattaccggacttcagcgtgctgaagtcggaactggtttcgttgcaggtctgggtatcgttattcttgcgatcatcattgatcgtttcacacaaaacttgaacacccagcgtggtgactag

SEQ ID NO: 4004 - protein, 281 aa, Halobacillus trueperi
MGLIPKLPVAEWIDTATEWTTDTFEFLFDFIKEDFGDFIEIVAEDWLMGIPIWLFIIVVGVLAFFASGKKLGLMAFSVIGLWFIANQELWEELMNTFTLVIFASLISVIIGVPFGIWMAKSKLAEKILTPVLDFMQTMPAFVYLIPAVAFFSIGMVPGVFASVIFATPPTVRFTNLGIRQVSHELIEASDAFGTTGTQKLFKVQLPMAKKTIMAGINQTVMLALSMVVIASMIGAKGLGQTVITGLQRAEVGTGFVAGLGIVILAIIIDRFTQNLNTQRGD

SEQ ID NO: 4005 - DNA, 1221 bp, Erwinia chrysanthemi
  CDS (1)..(1221): transl_table=11
  misc_feature (200)..(200): n is a, g, c or t
  misc_feature (223)..(223): n is a, g, c or t
  misc_feature (226)..(226): n is a, g, c or t
  misc_feature (233)..(233): n is a, g, c or t
  misc_feature (249)..(249): n is a, g, c or t
  misc_feature (256)..(256): n is a, g, c or t
  misc_feature (257)..(257): n is a, g, c or t
  misc_feature (282)..(282): n is a, g, c or t
  misc_feature (729)..(729): s is g or c
atgactgataccacacaaaacccctgggaagaggatcaagcgccggatcaggccgcggccgctaaccacagccacgccgccgccacatcgggcgaacatgccgccgccgcaggctcatccggcaccccggcgcagaccgacccctgggcggcgtcatcatcagcgccggccggcaacacgccggcgcctgacaacgccgncgacgcctggagcaatgcgccgncgnccgccgncagcgacgtacaccanagcgcanncgactggctgaacagcacgccgacnccgacacaagagcatttcaacctgatggatccgttccgccatacgctggtgcctctcgaccgttgggtgaccgaaggcatcgactggctggtgctgcactttcgcccgctgtttcagggcattcgcgtaccggtcgatatgattcttaccagttttcagcaactgctgaccggcctgcccgcgccggtcgccattctggtgttctcgctgctggcctggcaggtgtccagcttcggcatgggcgtagcgacgctgctgtcgctcgtggctatcggcgccatcggcgcctggtcgcaggccatggtgacgctggcgctggtgctgaccgcgctgtccttctgcgtgatcatcggcctgccgctggggatctggctggcgcacagcgatcgcgccgcccgtattgtgcgtccgctgctggacgccatgcagactacaccggccttcgtstatctgataccgatcgtgatgctgttcggtatcggtaacgtgccgggcgtggtggtaaccattattttcgccctgccgccgattattcgcctgaccatcctcggtatccgtcaggtaccggcggatctggtggaagcggcgcaatcctttggcgccagcccgcgccagatgctgttcaaagtgcagttaccgctggcgatgcccaccatcatggccggcatcaaccagacgctgatgctggcgctatcgatggtggtgatcgcctcgatgatcgccgtcggcgggctgggacagatggtgctgcgcggtatcggccgtctcgacatggggctggcgtccatcggcggggtcggcatcgtgattctggcgatcattctggaccgtctgacccagtcgctcgggcgtgacgcccgcagccgcggtaaccgccattggtaccaccacggtccgttggggctgctggctcgccccttcatcaaatcccgggcctaa

SEQ ID NO: 4006 - protein, 406 aa, Erwinia chrysanthemi
  misc_feature (67)..(67): The Xaa at location 67 stands for Ala, Asp, Gly, or Val.
  misc_feature (75)..(75): The Xaa at location 75 stands for Ala, Pro, Ser, or Thr.
  misc_feature (76)..(76): The Xaa at location 76 stands for Ala, Pro, Ser, or Thr.
  misc_feature (78)..(78): The Xaa at location 78 stands for Ala, Asp, Gly, or Val.
  misc_feature (83)..(83): The Xaa at location 83 stands for Gln, or His.
  misc_feature (86)..(86): The Xaa at location 86 stands for Ala, Arg, Asn, Asp, Cys, Gly, His, Ile, Leu, Phe, Pro, Ser, Thr, Ty r, or Val.
MTDTTQNPWEEDQAPDQAAAANHSHAAATSGEHAAAAGSSGTPAQTDPWAASSSAPAGNTPAPDNAXDAWSNAPXXAXSDVHXSAXDWLNSTPTPTQEHFNLMDPFRHTLVPLDRWVTEGIDWLVLHFRPLFQGIRVPVDMILTSFQQLLTGLPAPVAILVFSLLAWQVSSFGMGVATLLSLVAIGAIGAWSQAMVTLALVLTALSFCVIIGLPLGIWLAHSDRAARIVRPLLDAMQTTPAFVYLIPIVMLFGIGNVPGVVVTIIFALPPIIRLTILGIRQVPADLVEAAQSFGASPRQMLFKVQLPLAMPTIMAGINQTLMLALSMVVIASMIAVGGLGQMVLRGIGRLDMGLASIGGVGIVILAIILDRLTQSLGRDARSRGNRHWYHHGPLGLLARPFIKSRA

SEQ ID NO: 4007 - DNA, 858 bp, Rhizobium meliloti
  CDS (1)..(858): transl_table=11
atgtttccggactctctcaatctctcgatccgcgcgccggtgaacgacttcatccaggccctcgtcaccaattatggctgggtcttcaaggcgatcagcggcgtcatcctgaaggccgttctgttcatcgaatggatcctgcgcggcctgccctggtggctcgtcattctcgccttcatggcgcttgcctgtcggagttcgcggcgctggtcgctgacgctggccgtatgcgcgttgctggaaaccgtcggcgtcctcggaatctgggatctgacgatgcagacgctcgccctgatgctgatggcgaccatcgtctcggtggtgatcggcgtgcccatggggattctcgtcgcgaagagccgcgtcgtccgcaacatcactctgccggtgctcgatgtcatgcagaccatgccgagcttcgtctatctcatcccggcgctgatgctcttcgggctcggcaaggtcccggcaattctcgcgaccattatctacgccgtcccgccgctgatccggctcaccgatctcggcatccgccaggtcgatgcggaagtcgtcgaagctgcgacggcgttcggcggcagcccgggacagattctcttcggcgtcgaactgccccttgcgacgccgacgatcatggccggcctcaaccagacgatcatgatggcgctgtcgatggtcgtcgtcgcctcgatgatcggcgcacgcggcctcggcgaacaggtgctgaacggcattcagacgctcgacgtcggcaagggcctcgaggccggcatcggcatcgtcattctcgcggtcgtgctcgaccgcatcacgcaaggcttcggcaagccccggacggaggacgcccgcaatggctga

SEQ ID NO: 4008 - protein, 285 aa, Rhizobium meliloti
MFPDSLNLSIRAPVNDFIQALVTNYGWVFKAISGVILKAVLFIEWILRGLPWWLVILAFMALACRSSRRWSLTLAVCALLETVGVLGIWDLTMQTLALMLMATIVSVVIGVPMGILVAKSRVVRNITLPVLDVMQTMPSFVYLIPALMLFGLGKVPAILATIIYAVPPLIRLTDLGIRQVDAEVVEAATAFGGSPGQILFGVELPLATPTIMAGLNQTIMMALSMVVVASMIGARGLGEQVLNGIQTLDVGKGLEAGIGIVILAVVLDRITQGFGKPRTEDARNG

SEQ ID NO: 4009 - DNA, 1722 bp, Lactococcus lactis
  CDS (1)..(1722): transl_table=11
atgattgatttagtgattggaaaaataccattagccaactgggtatcgtcagcaacagattggattacaagtacatttagttcgggttttgatgtgattcaaaaatcaggaacagtgttgatgaacggaataacaggtgctttaactgcagttccattctggctgatgattgctgttgttactatcctagcaattttggtttcaggtaaaaagtttgccttcccattgtttgcttttattggtctttgtttaattgccaatcaaggcttatggtcagatttgatgagtacgattacccttgtcttactttcaagtttgttatcaattatcataggggtccctctaggaatttggatggcaaaatctgaactagtagctaagattgttcaacctatattggacttcatgcaaaccatgcctggttttgtttatttgattccagcagttgccttctttggtattggggttgttcctggggtatttgcctcagtaatctttgctttgccaccgactgtcagaatgactaacttaggtattcgccaagtttcaactgaattagttgaagcagcagattcatttggttcgactgcccgtcagaagttatttaaattggaatttcctttagctaaaggaacaattatggctggtgttaaccaaacaattatgttggctctttctatggtcgttattgcctctatgattggagcacctggtttaggtcgtggagtactagctgctgttcaatcagctgatattggtaagggatttgtaagtgggatttcattagttattttggctattattattgaccgctttacgcaaaaacttaatgtttctcctttagaaaaacaaggaaatcctaagctcaaaaaatggaaacgttggattgctatcgtttcattgttagccttaattgttggtgctttttcgggaatgtcttttgggaaaaaatcttctgataaaaaagtggatttagtttatatgaactgggactcagaagttgcgtcaatcaatgttttgacccaagcaatggaagaacatagttttgatgttacaacgactgcacttgataacgcagttgcttggcaaactgtggctaatagtcaagctgatggaatggtttctgcttggttgccaaacactcataagacccaatggaaaaaatatggtaagtctgttgagttattaggtccaaatcttaaaggcgctaaagtaggatttgttgtgccaagttatatgaatgtgaattcaattgaagatttgactaatcaggccaataaaacaatcacaggaattgagcctggtgcaggtgtcatggctgccagtgaaaatacacttaagagctatagtaatcttaaagattggaagcttgttccttcatcatctggtgcaatgactgttgctcttggtgaagccattaaacaacataaagacattgtaatcactggttggtctcctcattggattttcaataaatatgatttgaaatacttagctgatccaaaaggaacaatggggacttcagaaaatattaatacaattgtgcgcaaaggattgaaaaaagaaaatcctgaagcttataaggttttgaataattttaattggaccactaaagatatggaatctgttatgcttgatattcaaaatggtaagacaccagaagcagctgcaaaagcttggattaaagaccatcaaaaacaagttgataaatggtttaaataa

SEQ ID NO: 4010 - protein, 573 aa, Lactococcus lactis
MIDLVIGKIPLANWVSSATDWITSTFSSGFDVIQKSGTVLMNGITGALTAVPFWLMIAVVTILAILVSGKKFAFPLFAFIGLCLIANQGLWSDLMSTITLVLLSSLLSIIIGVPLGIWMAKSELVAKIVQPILDFMQTMPGFVYLIPAVAFFGIGVVPGVFASVIFALPPTVRMTNLGIRQVSTELVEAADSFGSTARQKLFKLEFPLAKGTIMAGVNQTIMLALSMVVIASMIGAPGLGRGVLAAVQSADIGKGFVSGISLVILAIIIDRFTQKLNVSPLEKQGNPKLKKWKRWIAIVSLLALIVGAFSGMSFGKKSSDKKVDLVYMNWDSEVASINVLTQAMEEHSFDVTTTALDNAVAWQTVANSQADGMVSAWLPNTHKTQWKKYGKSVELLGPNLKGAKVGFVVPSYMNVNSIEDLTNQANKTITGIEPGAGVMAASENTLKSYSNLKDWKLVPSSSGAMTVALGEAIKQHKDIVITGWSPHWIFNKYDLKYLADPKGTMGTSENINTIVRKGLKKENPEAYKVLNNFNWTTKDMESVMLDIQNGKTPEAAAKAWIKDHQKQVDKWFK

SEQ ID NO: 4011 - DNA, 849 bp, Bacillus subtilis
  CDS (1)..(849): transl_table=11
atggatagactgcctagaatacctttagcagatattattgaccgttttgttgactggattacgatgacgtttggcggattcttcgacggaatcgctaacggattggccgcttttgtaaatggaattgtcaccggtcttggatttattccatctattttgttaacgattattttcgccgcacttgcgtggtggatcagtacaaggggaattgcgttatttacgttgattggattcctcctgatcgattatttaggatattgggacccaatgctgcaaacattggcgcttgttttgacatctgtgattatttcgattgtggtcggggttccgatcggaatttgggcgtctcagaaagaaacggttcgccgtattgtaacgccaattcttgatttaatgcagacaatgcctgctttcgtatatctattgccggcgattttcttctttaacatcggtgttgtgccgggtgttgttgcatctgttatcttcgcgatgccgccgacaatccgcatgactgtcctcggtattaaacaagtgccggcggatttgattgaagcgactgaggcattcggttctacaacagctcagcgtttgtttaaagttcagctcccgcttgcgacaaaaacgattttggccgggatcaaccagagcatcatgcttgcgttatcaatggttgttatcgccgcaatggtcggtgcaccgggacttggttctgaagtatacagtgccgttacacagctgaaaaccggggtcggagtagaggccggtatcgccatcgttatcgttgccattaccctggaccgtattactcaaaatattaaagtgaagaagaaaagcagggggaatgcctga

SEQ ID NO: 4012 - protein, 282 aa, Bacillus subtilis
MDRLPRIPLADIIDRFVDWITMTFGGFFDGIANGLAAFVNGIVTGLGFIPSILLTIIFAALAWWISTRGIALFTLIGFLLIDYLGYWDPMLQTLALVLTSVIISIVVGVPIGIWASQKETVRRIVTPILDLMQTMPAFVYLLPAIFFFNIGVVPGVVASVIFAMPPTIRMTVLGIKQVPADLIEATEAFGSTTAQRLFKVQLPLATKTILAGINQSIMLALSMVVIAAMVGAPGLGSEVYSAVTQLKTGVGVEAGIAIVIVAITLDRITQNIKVKKKSRGNA

SEQ ID NO: 4013 - DNA, 1065 bp, Salmonella typhimurium
  CDS (1)..(1065): transl_table=11
atggctgatcaaacgaatccgtgggataccgcacaggtggccgatactacgacgcaaacggctgatgcctggggaacaccggcaggcgtagccacggacggcggcagtaccgactggttgaacagcgcgcccgcgccagcccctgaacacttttctcttctggacccgttccataagacgctgatcccgctggatagctgggtcacagagggaatcgactgggtcgtcacccatttccgtcccctttttcaggggattcgtgtgccggtggattacatcctcaacggctttcagcaactgctgctgggaatgcccgcccctgtggcgattattctctttgcgctgattgcctggcaggtttccggcgtgggcatggggatcgcgacgctgatatcgctgatcgccatcggcgcgatcggcgcctggtcgcaggcgatgattaccctggcgctggtattgaccgccctgttgttctgcgtcgtgatcggattaccgatgggaatctggctggcgcgcagcccgcgcgcagccaaaatagttcgtccgctgctggatgcgatgcagaccacgcccgcgtttgtctatctggtgccgattgtcatgttattcggcatcggtaacgtgccgggcgtggtggtgacgattatttttgctctaccgccgattgtacgcctgacgatcctgggcattaaccaggtgcctgccgacttaattgaagcgtcgcgctcgttcggcgccagcccgcgccaaatgttgttcaaagtgcaactaccgctggcgatgcccaccattatggcaggcgttaatcagacgctgatgctggctctctcgatggtcgtcatcgcctcgatgattgcggtcggcggacttggccagatggtactacgcggcattggtcgtcttgatatggggctggcaaccgtcggcggcgtcggcattgtgattcttgccatcattctggaccgtctgacgcaggccgtcgggcgcgactcgcgtagccgcggtaaccgtcgctggtataccaccggtcctgttgggctaatcacccgccctttcgttaagtaa

SEQ ID NO: 4014 - protein, 354 aa, Salmonella typhimurium
MADQTNPWDTAQVADTTTQTADAWGTPAGVATDGGSTDWLNSAPAPAPEHFSLLDPFHKTLIPLDSWVTEGIDWVVTHFRPLFQGIRVPVDYILNGFQQLLLGMPAPVAIILFALIAWQVSGVGMGIATLISLIAIGAIGAWSQAMITLALVLTALLFCVVIGLPMGIWLARSPRAAKIVRPLLDAMQTTPAFVYLVPIVMLFGIGNVPGVVVTIIFALPPIVRLTILGINQVPADLIEASRSFGASPRQMLFKVQLPLAMPTIMAGVNQTLMLALSMVVIASMIAVGGLGQMVLRGIGRLDMGLATVGGVGIVILAIILDRLTQAVGRDSRSRGNRRWYTTGPVGLITRPFVK

SEQ ID NO: 4015 - DNA, 24 bp, Artificial sequence
  primer
atggctgatcaaaataatccgtgg

SEQ ID NO: 4016 - DNA, 22 bp, Artificial sequence
  primer
ttacttaatgaatgggcgggtc

SEQ ID NO: 4017 - protein, 250 aa, Artificial sequence
  consensus sequence
  Variant (2)..(18): Xaa in position 2 to 18 is any amino acid
  Variant (19)..(19): Xaa in position 19 is any or no amino acid
  Variant (21)..(23): Xaa in position 21 to 23 is any amino acid
  Variant (25)..(51): Xaa in position 25 to 51 is any amino acid
  Variant (52)..(55): Xaa in position 52 to 55 is any or no amino acid
  Variant (57)..(64): Xaa in position 57 to 64 is any amino acid
  Variant (65)..(66): Xaa in position 65 to 66 is any or no amino acid
  Variant (68)..(72): Xaa in position 68 to 72 is any amino acid
  Variant (75)..(75): Xaa in position 75 is any amino acid
  Variant (77)..(87): Xaa in position 77 to 87 is any amino acid
  Variant (89)..(89): Xaa in position 89 is any amino acid
  Variant (91)..(91): Xaa in position 91 is any amino acid
  Variant (94)..(95): Xaa in position 94 to 95 is any amino acid
  Variant (97)..(106): Xaa in position 97 to 106 is any amino acid
  Variant (108)..(108): Xaa in position 108 is any amino acid
  Variant (111)..(111): Xaa in position 111 is any amino acid
  Variant (115)..(115): Xaa in position 115 is any amino acid
  Variant (117)..(117): Xaa in position 117 is any amino acid
  Variant (122)..(122): Xaa in position 122 is any amino acid
  Variant (124)..(127): Xaa in position 124 to 127 is any amino acid
  Variant (130)..(130): Xaa in position 130 is any amino acid
  Variant (132)..(132): Xaa in position 132 is any amino acid
  Variant (135)..(140): Xaa in position 135 to 140 is any amino acid
  Variant (142)..(142): Xaa in position 142 is any amino acid
  Variant (144)..(144): Xaa in position 144 is any amino acid
  Variant (147)..(148): Xaa in position 147 to 148 is any amino acid
  Variant (150)..(150): Xaa in position 150 is any amino acid
  Variant (152)..(152): Xaa in position 152 is any amino acid
  Variant (159)..(163): Xaa in position 159 to 163 is any amino acid
  Variant (166)..(168): Xaa in position 166 to 168 is any amino acid
  Variant (171)..(174): Xaa in position 171 to 174 is any amino acid
  Variant (176)..(176): Xaa in position 176 is any amino acid
  Variant (178)..(179): Xaa in position 178 to 179 is any amino acid
  Variant (184)..(184): Xaa in position 184 is any amino acid
  Variant (186)..(188): Xaa in position 186 to 188 is any amino acid
  Variant (193)..(193): Xaa in position 193 is any amino acid
  Variant (196)..(197): Xaa in position 196 to 197 is any amino acid
  Variant (199)..(200): Xaa in position 199 to 200 is any amino acid
  Variant (206)..(206): Xaa in position 206 is any amino acid
  Variant (208)..(208): Xaa in position 208 is any amino acid
  Variant (211)..(213): Xaa in position 211 to 213 is any amino acid
  Variant (217)..(218): Xaa in position 217 to 218 is any amino acid
  Variant (220)..(228): Xaa in position 220 to 228 is any amino acid
  Variant (230)..(234): Xaa in position 230 to 234 is any amino acid
  Variant (236)..(238): Xaa in position 236 to 238 is any amino acid
  Variant (240)..(241): Xaa in position 240 to 241 is any amino acid
  Variant (243)..(245): Xaa in position 243 to 245 is any amino acid
  Variant (248)..(248): Xaa in position 248 is any amino acid
FXXXXXXXXXXXXXXXXXXLXXXPXXXXXXXXXXXXXXXXXXXXXXXXXXXXXXXLXXXXXXXXXXWXXXXXTLXLXXXXXXXXXXXGXPXGIXXAXXXXXXXXXXPXLDXMQTXPXFVYLXPXXXXFGXGXVPXXXXXXIXAXPPXXRXTXLGIRQVXXXXXEAXXXFGXXXXQXLXXVQLPXAXXXIMAGXNQXXMXXLSMVVXAXMIXXXGLGXXVXXXXXXXXXGXXXXXGXXXVXXAXXXDRXTQ

SEQ ID NO: 4018 - protein, 60 aa, Artificial sequence
  protein pattern
  Variant (3)..(3): Xaa in position 3 is any amino acid
  Variant (4)..(4): Xaa in position 4 is Ile or Val
  Variant (6)..(6): Xaa in position 6 is Phe, Leu or Met
  Variant (8)..(8): Xaa in position 8 is any amino acid
  Variant (12)..(13): Xaa in position 12 to 13 is any amino acid
  Variant (15)..(16): Xaa in position 15 to 16 is any amino acid
  Variant (17)..(17): Xaa in position 17 is Ala, Asp, Glu, Gly or Asn
  Variant (18)..(19): Xaa in position 18 to 19 is any amino acid
  Variant (22)..(23): Xaa in position 22 to 23 is any amino acid
  Variant (24)..(24): Xaa in position 24 is Ala or Ser
  Variant (27)..(27): Xaa in position 27 is Ala, Cys, Gly, Ser or Thr
  Variant (28)..(28): Xaa in position 28 is Asn, Ser or Thr
  Variant (29)..(30): Xaa in position 29 to 30 is any amino acid
  Variant (32)..(32): Xaa in position 32 is any amino acid
  Variant (34)..(35): Xaa in position 34 to 35 is any amino acid
  Variant (36)..(36): Xaa in position 36 is Ile, Leu or Val
  Variant (37)..(37): Xaa in position 37 is Glu or Gln
  Variant (38)..(38): Xaa in position 38 is Phe, Ile or Leu
  Variant (40)..(40): Xaa in position 40 is any amino acid
  Variant (42)..(43): Xaa in position 42 to 43 is any amino acid
  Variant (44)..(44): Xaa in position 44 is Asn, Ser or Thr
  Variant (45)..(45): Xaa in position 45 is Ile, Leu or Met
  Variant (46)..(46): Xaa in position 46 is Leu or Met
  Variant (47)..(47): Xaa in position 47 is Ala, Gln or Thr
  Variant (49)..(49): Xaa in position 49 is Ala, Ile, Leu or Val
  Variant (52)..(52): Xaa in position 52 is Ser or Thr
  Variant (53)..(53): Xaa in position 53 is any amino acid
  Variant (55)..(55): Xaa in position 55 is Leu or Met
  Variant (56)..(56): Xaa in position 56 is Ala, Gly or Ser
  Variant (58)..(58): Xaa in position 58 is Ala or Ser
  Variant (60)..(60): Xaa in position 60 is Ala or Val
PPXXRXTXLGIXXVXXXXXEAXXXFGXXXXQXLXXXXXPXAXXXXXXGXNQXXMXXLXMX

SEQ ID NO: 4019 - protein, 38 aa, Artificial sequence
  protein pattern
  Variant (2)..(2): Xaa in position 2 is any or no amino acid
  Variant (4)..(4): Xaa in position 4 is any or no amino acid
  Variant (6)..(6): Xaa in position 6 is any amino acid
  Variant (10)..(10): Xaa in position 10 is any amino acid
  Variant (12)..(12): Xaa in position 12 is Ala, Gly, Pro, Ser or Thr
  Variant (17)..(17): Xaa in position 17 is Ile, Leu or Val
  Variant (19)..(19): Xaa in position 19 is Ala, Ile or Val
  Variant (20)..(20): Xaa in position 20 is Ala, Ile, Leu or Val
  Variant (21)..(21): Xaa in position 21 is any amino acid
  Variant (22)..(22): Xaa in position 22 is Phe or Leu
  Variant (24)..(24): Xaa in position 24 is Gly, Asn or Ser
  Variant (25)..(25): Xaa in position 25 is any amino acid
  Variant (27)..(27): Xaa in position 27 is any amino acid
  Variant (30)..(30): Xaa in position 30 is Ala, Gly or Ser
  Variant (31)..(31): Xaa in position 31 is any amino acid
  Variant (32)..(32): Xaa in position 32 is Phe, Ile, Leu, Met or Val
  Variant (33)..(33): Xaa in position 33 is Ala, Ser or Val
  Variant (34)..(34): Xaa in position 34 is Ser, Thr or Val
  Variant (35)..(35): Xaa in position 35 is Phe, Ile, Leu or Val
  Variant (36)..(36): Xaa in position 36 is Ile or Val
  Variant (37)..(37): Xaa in position 37 is any amino acid
  Variant (38)..(38): Xaa in position 38 is Ala, Cys or Ser
PXLXDXMQTXPXFVYLXPXXXXFXXGXVPXXXXXXXXX

SEQ ID NO: 4020 - protein, 41 aa, Artificial sequence
  protein pattern
  Variant (2)..(2): Xaa in position 2 is any or no amino acid
  Variant (4)..(4): Xaa in position 4 is Ile or Val
  Variant (5)..(5): Xaa in position 5 is Ala, Gly or Ser
  Variant (6)..(6): Xaa in position 6 is Ala, Gly, Thr or Val
  Variant (7)..(7): Xaa in position 7 is any amino acid
  Variant (11)..(12): Xaa in position 11 to 12 is any amino acid
  Variant (14)..(15): Xaa in position 14 to 15 is any amino acid
  Variant (16)..(16): Xaa in position 16 is Ala, Gly or Ser
  Variant (17)..(17): Xaa in position 17 is Ile, Leu, Met or Val
  Variant (18)..(18): Xaa in position 18 is Gly, Asn, Gln, Ser or Thr
  Variant (19)..(22): Xaa in position 19 to 22 is any amino acid
  Variant (24)..(24): Xaa in position 24 is any amino acid
  Variant (25)..(25): Xaa in position 25 is Ala or Gly
  Variant (26)..(28): Xaa in position 26 to 28 is any amino acid
  Variant (30)..(30): Xaa in position 30 is Phe, Ile, Leu or Val
  Variant (31)..(31): Xaa in position 31 is Ala, Gly or Ser
  Variant (32)..(32): Xaa in position 32 is Ile, Leu or Val
  Variant (34)..(34): Xaa in position 34 is Gly, Ile, Leu or Val
  Variant (35)..(35): Xaa in position 35 is Ile, Leu, Met or Val
  Variant (37)..(37): Xaa in position 37 is Ile, Met or Val
  Variant (38)..(38): Xaa in position 38 is any amino acid
  Variant (39)..(39): Xaa in position 39 is Phe, Ile, Leu or Met
AXMXXXXGLGXXVXXXXXXXXXGXXXXXGXXXVXXAXXXDR

SEQ ID NO: 4021 - protein, 30 aa, Artificial sequence
  protein pattern
  Variant (2)..(6): Xaa in position 2 to 6 is any amino acid
  Variant (7)..(7): Xaa in position 7 is Ser or Thr
  Variant (8)..(8): Xaa in position 8 is Phe, Ile, Leu or Val
  Variant (9)..(9): Xaa in position 9 is any amino acid
  Variant (10)..(10): Xaa in position 10 is Ile, Leu or Met
  Variant (11)..(13): Xaa in position 11 to 13 is any amino acid
  Variant (14)..(14): Xaa in position 14 is Ala, Cys or Ser
  Variant (15)..(16): Xaa in position 15 to 16 is any amino acid
  Variant (17)..(17): Xaa in position 17 is Phe, Ile, Leu, Met or Val
  Variant (18)..(18): Xaa in position 18 is Ala, Cys or Ser
  Variant (19)..(19): Xaa in position 19 is any amino acid
  Variant (20)..(21): Xaa in position 20 to 21 is Ala, Ile, Leu or Val
  Variant (23)..(23): Xaa in position 23 is Ile, Leu or Val
  Variant (25)..(25): Xaa in position 25 is any amino acid
  Variant (28)..(29): Xaa in position 28 to 29 is any amino acid
  Variant (30)..(30): Xaa in position 30 is Ala, Gly or Ser
WXXXXXXXXXXXXXXXXXXXXGXPXGIXXX

SEQ ID NO: 4022 - DNA, 1458 bp, Escherichia coli K12
  CDS (1)..(1458): transl_table=11
atggccaaaaattatgcggcgctggcacgctcggtgatagcggcactgggcggcgttgataacatctcggcggtcacgcactgtatgacgcggttgcgctttgttatcaaagatgatgcacttatcgacagcccgacgttaaaaaccatccccggcgtgctcggcgtggtacgtagtgacaaccagtgtcaggtgattatcggcaataccgtttcacaagcctttcaggaagtcgtcagcctgctgccgggagatatgcagcccgcacagcccgtgggtaaacccaaactcacgctacgtcgcattggtgcggggatcctcgatgcgctgatcggcaccatgtcaccgctgatcccggcgattatcggcggatcgatggtcaaactgctggcaatgatcctcgagatgagcggcgtgctgacaaaaggatcgccgaccttaaccattctgaatgtgattggtgacggtgctttcttcttcctgccgctgatggtcgcggcatctgccgccatcaaatttaaaaccaatatgtcgctggcgattgccatcgcgggtgtgctggtacatccgagttttattgaactgatggcgaaagcggcccagggtgaacatgtcgaatttgccctgattccggtcaccgcggtgaaatacacctacacggtgatcccggcgctggtgatgacctggtgcctgtcatatatcgaacgctgggtggacagcattacaccggcggtgaccaaaaacttcctcaaaccaatgctgattgtgttgattgccgcaccgctggcaatcctgctgattggcccgattggtatctggatcggtagcgccatttcggcgctggtttacaccattcatggttatctgggctggctttcagtcgccattatgggcgcgctgtggcctctgctggtaatgaccgggatgcaccgcgtctttacgccaaccatcattcagaccattgccgaaaccggcaaagaagggatggtcatgccgtcagagatcggcgctaacctgtcgctgggcggttcatcactggcagtggcgtggaaaacgaaaaacccggaactgcgtcagacggcgctggctgcggcggcatcagccattatggcggggatttccgaaccggcgttatatggcgtggcgatccgcctgaaacgtccgcttatcgccagtcttatcagcggttttatttgcggcgcggttgccggtatggcggggcttgccagccactcaatggcagcgccggggctatttaccagcgtgcagttcttcgatccggcgaatccaatgagcatcgtctgggtgttcgcggtcatggcgctggcggtggtgctgtcgtttatcctcacactgttgctcggctttgaggatattcctgttgaggaagcggctgcccaggcgcgaaagtatcagagcgtacaaccgaccgtcgccaaagaagtaagtcttaattga

SEQ ID NO: 4023 - protein, 485 aa, Escherichia coli K12
MAKNYAALARSVIAALGGVDNISAVTHCMTRLRFVIKDDALIDSPTLKTIPGVLGVVRSDNQCQVIIGNTVSQAFQEVVSLLPGDMQPAQPVGKPKLTLRRIGAGILDALIGTMSPLIPAIIGGSMVKLLAMILEMSGVLTKGSPTLTILNVIGDGAFFFLPLMVAASAAIKFKTNMSLAIAIAGVLVHPSFIELMAKAAQGEHVEFALIPVTAVKYTYTVIPALVMTWCLSYIERWVDSITPAVTKNFLKPMLIVLIAAPLAILLIGPIGIWIGSAISALVYTIHGYLGWLSVAIMGALWPLLVMTGMHRVFTPTIIQTIAETGKEGMVMPSEIGANLSLGGSSLAVAWKTKNPELRQTALAAAASAIMAGISEPALYGVAIRLKRPLIASLISGFICGAVAGMAGLASHSMAAPGLFTSVQFFDPANPMSIVWVFAVMALAVVLSFILTLLLGFEDIPVEEAAAQARKYQSVQPTVAKEVSLN

SEQ ID NO: 4024 - DNA, 1839 bp, Streptococcus pneumoniae
  CDS (1)..(1839)
atgagttataaagatacggtacaaaaaatcctcgatgtaattggaggtgaaaaaaatgtcaatagagttacccattgtgtaacacgtttaagattagaattaaaagatgaaaatttagtcaatgatgatgatgtgaagaagataccaggtgtaataggtattatgaaaaagaatggacaatatcaaattatacttggtaatgatgtagctaattattataaagaattcgttaaacttggcaattttgaatccgattcagttgttcaagggcacaaagggaatattttagaaagaatcattgagtatatcgctggttccatgactccaatcattccagcaatgttagggggaggtatgctgaaagtcttggtaattattttaccaatgcttggtatattgcaatcagattctcagactattgcttttttgacattttttggggatgctccatattatttcttaccgctgttattagcttattctgcatcacaaaaattaaaagtaacatctacattagctatgtctgtagcaggtgtacttctccatccaaattttgttcaaatggtgcaatcagggaatcctcttagtttatttggtgcacctgtgacaccagctagttatggttcgtcagtcgttccaattcttattatggtttggttgatgaaatatattgaaaaaatgattgctaaattaacaccagctgttactaagagttttttgcaacctacgctagtattattagtatcaagctgtattgccttagttgtagtcggacctattggagtaattgttggtgaaggattatcaaatctagttgggcaaatgtatggtgtagctggatggcttacattagctattcttggtgctattatgccatttattgttatgactggaatgcattgggcttttgcacctatttttttggcggcatctattgctactccagacgtattaattcttccagcaatgttagggtcaaacttagctcaaggggctgcttcgatggctgttgcattaaagagtaaaaataataatacaaaacaaattgcttttgcagcaggtttctcagccttacttgcagggattaccgaacctgcattatatggtgtgactttaaaatataaaaaaccgctttatgcagctatgattggtggtggattagcgggattatttgcaggtcttactagtgttaaagcatatctatttgctgtcccatctttgatagcgttgcctcaatttatttattctgatgtgccatcaaatattgtaaatgctttaattgtggcggtcatttcggttgttattacctttgtattagcttatatatttggaatcgatgaagaagagagttctagcaatttagaagttaaagctggagtttcaaataaaaaaatgatattttctcctatatcaggagaaatcattccgttaagcgatgtccaggataaaacattttcagataaactaattggagacggagtagcgattatcccaagtgaaggtaaggtttatgcaccatttgatgggaaaattacaaatatttttccgactaagcacgcaattggattgaagagtgatgagggtgttgagttactaattcatattggattagatactgttgagctaaaaggtcaaggttttattagtcatgtagaagaaggagacagagttttcaaaaatcagttgatttttgaaatggacttgaatttaatcaagactaaaggctacgaaacagttacaccagtaattgtaacgaataccaatgattttctagatgtattagtattacctaataatcagacaatcgagcattctaaggaattactggtaatattataa

SEQ ID NO: 4025 - protein, 612 aa, Streptococcus pneumoniae
MSYKDTVQKILDVIGGEKNVNRVTHCVTRLRLELKDENLVNDDDVKKIPGVIGIMKKNGQYQIILGNDVANYYKEFVKLGNFESDSVVQGHKGNILERIIEYIAGSMTPIIPAMLGGGMLKVLVIILPMLGILQSDSQTIAFLTFFGDAPYYFLPLLLAYSASQKLKVTSTLAMSVAGVLLHPNFVQMVQSGNPLSLFGAPVTPASYGSSVVPILIMVWLMKYIEKMIAKLTPAVTKSFLQPTLVLLVSSCIALVVVGPIGVIVGEGLSNLVGQMYGVAGWLTLAILGAIMPFIVMTGMHWAFAPIFLAASIATPDVLILPAMLGSNLAQGAASMAVALKSKNNNTKQIAFAAGFSALLAGITEPALYGVTLKYKKPLYAAMIGGGLAGLFAGLTSVKAYLFAVPSLIALPQFIYSDVPSNIVNALIVAVISVVITFVLAYIFGIDEEESSSNLEVKAGVSNKKMIFSPISGEIIPLSDVQDKTFSDKLIGDGVAIIPSEGKVYAPFDGKITNIFPTKHAIGLKSDEGVELLIHIGLDTVELKGQGFISHVEEGDRVFKNQLIFEMDLNLIKTKGYETVTPVIVTNTNDFLDVLVLPNNQTIEHSKELLVIL

SEQ ID NO: 4026 - DNA, 1863 bp, Streptococcus pyogenes M1 GAS
  CDS (1)..(1863): transl_table=11
atgacgtatcaagaaactgccaaggctattttagcggcggttggtggcaaaacaaatattcaacgtgtgacacactgtgtaacacgtctacgcttagtactgaaaaatgatgagaaagttaaagatcagcaagtcaaagccatttcaaatgtgattggcgtgatgcgcaaaaacggccagtaccaaattatcttgggcaatgatgtcaataattattaccaagcctttttaagcctagggcattttgacaatcaagatgaagatcattcttcaaaagcgaaaggaagtatccttgagcgcttgattgaaaccattgctggcgtgattacaccgctgattccagcccttcttggtggtggaatgctcaaagtggtgggaatcttgcttcctatgcttggcttagcgagtgcggactctcaaaccgttgcctttattaacttctttggcgatgcggcttattattttatgcctgtcatgattgcctattcagcagcggcgcgctttaaggtgacacctgttttagcagcgacgatcgcagggattttattgcatcctgcctttgttgcaatggtagcagaaggtaaaccattgactttatttggagcaccagtcactcctgctagctatggctcatctgttattcccattttgatgatggtttacttgatgcaatacattgaaaaatgggtcaatcgcttggtgccaagcgtgatgaaaagcttcttacagccaaccttaatcattttgatttctggctttttggctttagtggttgtaggtcctcttggtgtgattattggtcaagggttatctaataccatgctcgctatttatcatgtggctccgtggctagcacttgctattttgggagcgattatgccgcttgttgtcatgacggggatgcactgggcttttgcaccaatctttttggccgcttcggtcgcaacaccagatgtcttgattttaccagcaatgttggcttctaatttggctcaaggagccgcatctttggctgttgcctttaaaacaaagcagaaacaaacacgtcaagttgcccttgccgcggggatttcagctttgctggcaggtatcacggaaccggcactttatggggtcacactgaaatttaaaaagccactctatgcagccatgatttcaggtggtctggttggagcctttattggttttgtcaatattgcttcttatacctttgtcgtaccttctattattggtttaccacagtacatcaacccatcaggcggagctaattttacaaatgctttgattgccggaactgcgacgattgtgttagccttcagtttgacttggttcatgggaattgatgaagagtccccaaagcaagtgagtgttgcagcagatatgtcacaagttaagagcggcttgtcaaccaaacaaacgttgtatgctccaatgacaggtgagatgctttttctatcagaagttcctgatgaaaccttttcttccaagttattaggagaaggatttgccatattaccaagcgaaggtgaggtctatgccccctttgatggtgaagtcatcactttctttccaaccaagcatgctgttgccttaaaaaacacacgtggtgtggaagtcttgattcatgtcggtattgatacggttgagttaaaagggcaaggtttcgagcagttagtgtctgttggcgatgtcgtgaaacgaggccaggcacttctaaaaatggatattgatttcattacttcaaaaggctattcactcatcagtcctgtggtcgtgaccaattcggctgagcagttggagattattattcaagatgacaaaaaaatggtgactaaagaggacgctttgttagtcattttataa

SEQ ID NO: 4027 - protein, 620 aa, Streptococcus pyogenes M1 GAS
MTYQETAKAILAAVGGKTNIQRVTHCVTRLRLVLKNDEKVKDQQVKAISNVIGVMRKNGQYQIILGNDVNNYYQAFLSLGHFDNQDEDHSSKAKGSILERLIETIAGVITPLIPALLGGGMLKVVGILLPMLGLASADSQTVAFINFFGDAAYYFMPVMIAYSAAARFKVTPVLAATIAGILLHPAFVAMVAEGKPLTLFGAPVTPASYGSSVIPILMMVYLMQYIEKWVNRLVPSVMKSFLQPTLIILISGFLALVVVGPLGVIIGQGLSNTMLAIYHVAPWLALAILGAIMPLVVMTGMHWAFAPIFLAASVATPDVLILPAMLASNLAQGAASLAVAFKTKQKQTRQVALAAGISALLAGITEPALYGVTLKFKKPLYAAMISGGLVGAFIGFVNIASYTFVVPSIIGLPQYINPSGGANFTNALIAGTATIVLAFSLTWFMGIDEESPKQVSVAADMSQVKSGLSTKQTLYAPMTGEMLFLSEVPDETFSSKLLGEGFAILPSEGEVYAPFDGEVITFFPTKHAVALKNTRGVEVLIHVGIDTVELKGQGFEQLVSVGDVVKRGQALLKMDIDFITSKGYSLISPVVVTNSAEQLEIIIQDDKKMVTKEDALLVIL

SEQ ID NO: 4028 - DNA, 1839 bp, Streptococcus pneumoniae TIGR4
  CDS (1)..(1839): transl_table=11
atgagttataaagatacggtacaaaaaatcctcgatgtaattggaggtgaaaaaaatgtcaatagagttacccattgtgtaacacgtttaagattagaattaaaagatgaaaatttagtcaatgatgatgatgtgaagaagataccaggtgtaataggtattatgaaaaagaatggacaatatcaaattatacttggtaatgatgtagctaattattataaagaattcgttaaacttggcaattttgaatccgattcagttgttcaagggcacaaagggaatattttagaaagaatcattgagtatatcgctggttccatgactccaatcattccagcaatgttagggggaggtatgttgaaagtcttggtaatcattttaccaatgcttggtatattgcaatcagattctcagactattgcttttttgacattttttggggatgctccatattatttcttaccgctgttattagcttattctgcatcacaaaaattaaaagtaacatctacattagctatgtctgtagcaggtgtacttctccatccaaattttgttcaaatggtgcaatcagggaatcctcttagtttatttggtgcacctgtgacaccagctagttatggttcatcagtcgttccaattcttattatggtttggttgatgaaatatattgaaaaaataattgctaaattaacactagctattactaagagttttttgcaacctacgctagtattattagtatcaagctgtattgccttagttgtagtcggacctattggagtaattgttggtgaaggattatcaaatctagttgggcaaatgtatggtgtagctggatggcttacattagctattcttggtgctattatgccatttattgttatgactggaatgcattgggcttttgcacctatttttttggcggcatctattgctactccagacgtattaattcttccagcaatgttagggtcaaacttagctcaaggggctgcttcgatggctgttgcattaaagagtaaaaataataatacaaaacaaattgcttttgcagcaggtttctcagccttacttgcagggattaccgaacctgcattatatggtgtgactttaaaatataaaaaaccgctttatgcagctatgattggtggtggattagcgggattatttgcaggtcttactagtgttaaagcatatctatttgctgtcccatctttgatagcgttgcctcaatttatttattctgatgtgccatcaaatattgtaaatgctttaattgtggcggtcatttcggttgttattacctttgtattagcttatatatttggaatcgatgaagaagagagttctagcaatttagaagttgaagctggagtttcaaataaaaaaatgatattttctcctatatcaggagaaatcattccgttaagcgatgtccaggataaaacattttcagataaactaattggagacggagtagcgattatcccaagtgaaggtaaggtttatgcaccatttgatgggaaaattacaaatatttttccgactaagcacgcaattggattgaagagtgatgagggtgttgagttactaattcatattggattagatactgttgagctaaaaggtcaaggttttattagtcatgtagaagaaggagacagagttttcaaaaatcagttgatttttgaaatggacttgaatttaatcaagactaaaggctacgaaacagttacaccagtaattgtaacgaataccaatgattttctagatgtattagtattacctaataatcagacaatcgagcattctaaggaattactggtaatattataa

SEQ ID NO: 4029 - protein, 612 aa, Streptococcus pneumoniae TIGR4
MSYKDTVQKILDVIGGEKNVNRVTHCVTRLRLELKDENLVNDDDVKKIPGVIGIMKKNGQYQIILGNDVANYYKEFVKLGNFESDSVVQGHKGNILERIIEYIAGSMTPIIPAMLGGGMLKVLVIILPMLGILQSDSQTIAFLTFFGDAPYYFLPLLLAYSASQKLKVTSTLAMSVAGVLLHPNFVQMVQSGNPLSLFGAPVTPASYGSSVVPILIMVWLMKYIEKIIAKLTLAITKSFLQPTLVLLVSSCIALVVVGPIGVIVGEGLSNLVGQMYGVAGWLTLAILGAIMPFIVMTGMHWAFAPIFLAASIATPDVLILPAMLGSNLAQGAASMAVALKSKNNNTKQIAFAAGFSALLAGITEPALYGVTLKYKKPLYAAMIGGGLAGLFAGLTSVKAYLFAVPSLIALPQFIYSDVPSNIVNALIVAVISVVITFVLAYIFGIDEEESSSNLEVEAGVSNKKMIFSPISGEIIPLSDVQDKTFSDKLIGDGVAIIPSEGKVYAPFDGKITNIFPTKHAIGLKSDEGVELLIHIGLDTVELKGQGFISHVEEGDRVFKNQLIFEMDLNLIKTKGYETVTPVIVTNTNDFLDVLVLPNNQTIEHSKELLVIL

SEQ ID NO: 4030 - DNA, 1839 bp, Streptococcus pneumoniae R6
  CDS (1)..(1839): transl_table=11
atgagttataaagataaggtacaaaaaatcctcgatgtaattggaggtgaaaaaaatgtcaatagagttacccattgtgtaacacgtttaagattagaattaaaagatgaaaatttagtcaatgatgatgatgtgaagaagataccaggtgtaataggtattatgaaaaagaatggacaatatcaaattatacttggtaatgatgtagctaattattataaagaattcgttaaacttggcaattttgaatccgattcagttgttcaagggcacaaagggaatattttagaaagaatcattgagtatatcgctggttccatgactccaatcattccagcaatgttagggggaggtatgctgaaagtcttggtaattattttaccaatgcttggtatattgcaatcagattctcagactattgcttttttgacattttttggggatgctccatattatttcttaccgctgttattagcttattctgcatcacaaaaattaaaagtaacatctacattagctatgtctgtagcaggtgtacttctccatccaaattttgttcaaatggtgcaatcagggaatcctcttagtttatttggtgtacctgtgataccagctagttatggttcgtcagtcgttccaattattattatggtttggttgatgaaatatattgaaaaaatgattgctaaattaacaccagctgttactaagagttttttgcaacctacgctagtattattagtatcaagctgtattgccttagttgtagtcgggcctattggagtaattgttggtgaaggattatcaaatctagttgggcaaatgtatgatgtagctggatggcttacattagctattcttggtgctattatgccatttattgttatgactggaatgcattgggcttttgcacctatttttttggcggcatctattgctactccagacgtattaattcttccagcaatgttagggtcaaacttagctcaaggggctgcttcgatggctgttgcattaaagagtaaaaataataatacaaaacaaattgcttttgcagcaggtttctcagccttacttgcagggattaccgaacctgcattatatggtgtgactttaaaatataaaaaaccgctttatgcagctatgattggtggtggattagcgggattatttgcaggtcttactagtgttaaagcgtatctatttgctgtcccatctttgatagcgttgcctcaatttatttattctgatgtaccatcaaatattgtaaatgctttaattgtggcggttatttcggttgttattacctttgtattagcttatatatttggaatcgatgaagaagagagttctagcaatttagaagttaaagctggagtttcaaataaaaaaatgatattttctcctatatcaggagaaatcattccgttaagcgatgtccaggataaaacattttcagataaactaattggagacggagtagcgattattccaagtgaaggtaaggtttatgcaccatttgatgggaaaattacaaatatttttccgactaagcacgcaattggattgaagagtgatgagggtgttgagttactaattcatattggattagatactgttgagctaaaaggtcaaggttttattagtcatgtagaagaaggagacagagttttcaaaaatcagttgatttttgaaatggacttgaatttaatcaagactaaaggctacgaaacagttacaccagtaattgtaacgaataccaatgattttctagatgtattagtattacctaataatcagacaatcgagcattctaaggaattactggtaatattataa

SEQ ID NO: 4031 - protein, 612 aa, Streptococcus pneumoniae R6
MSYKDKVQKILDVIGGEKNVNRVTHCVTRLRLELKDENLVNDDDVKKIPGVIGIMKKNGQYQIILGNDVANYYKEFVKLGNFESDSVVQGHKGNILERIIEYIAGSMTPIIPAMLGGGMLKVLVIILPMLGILQSDSQTIAFLTFFGDAPYYFLPLLLAYSASQKLKVTSTLAMSVAGVLLHPNFVQMVQSGNPLSLFGVPVIPASYGSSVVPIIIMVWLMKYIEKMIAKLTPAVTKSFLQPTLVLLVSSCIALVVVGPIGVIVGEGLSNLVGQMYDVAGWLTLAILGAIMPFIVMTGMHWAFAPIFLAASIATPDVLILPAMLGSNLAQGAASMAVALKSKNNNTKQIAFAAGFSALLAGITEPALYGVTLKYKKPLYAAMIGGGLAGLFAGLTSVKAYLFAVPSLIALPQFIYSDVPSNIVNALIVAVISVVITFVLAYIFGIDEEESSSNLEVKAGVSNKKMIFSPISGEIIPLSDVQDKTFSDKLIGDGVAIIPSEGKVYAPFDGKITNIFPTKHAIGLKSDEGVELLIHIGLDTVELKGQGFISHVEEGDRVFKNQLIFEMDLNLIKTKGYETVTPVIVTNTNDFLDVLVLPNNQTIEHSKELLVIL

SEQ ID NO: 4032 - DNA, 1863 bp, Streptococcus pyogenes MGAS8232
  CDS (1)..(1863): transl_table=11
atgacgtatcaagaaactgccaaggctattttagcgacggttggtggcaaaacaaatattcaacgtgtgacacactgtgtaacacgtctacgcttagtactgaaaaatgatgagaaagttaaagatcagcaagtcaaagccatttcaaatgtgattggcgtgatgcgcaaaaacggccagtaccaaattatcttgggcaatgatgtcaataattattaccaagcctttttaagcctagggcattttgacaatcaagatgaagatcattcttcaaaagccaaaggaagtatccttgagcgcttgattgaaaccattgctggtgtgattacaccgctgattccagcccttcttggtggtggaatgctcaaagtggtgggaatcttgcttcctatgcttggcttagcgagtgcggactctcaaaccgttgtctttattaacttctttggcgatgcggcttattattttatgcctgtcatgattgcctattcagcagcggcgcgctttaaggtgacacctgttttagcagcgacgatcgcagggattttattgcatcctgcctttgttgcaatggtagcagaaggtaaaccattggctttatttggagcaccagtcactcctgctagctatggctcatctgttattcccattttgatgatggtttacttgatgcaatacattgaaaaatggggcaatcgcttggtgccaagcgtgatgaaaagcttcttacagccaaccttaatcattttgatttctggctttttggttttagtggttgtaggtcctcttggtgtgattattggtcaagggttatctaataccatgctcactatttatcatgtggctccgtggctagcacttgccattttgggagcgattatgccgcttgttgtcatgacggggatgcactgggcttttgcaccaatctttttggccgcttcggtcgcaacaccagatgtcttgattttaccagcaatgttggcttctaatttggctcaaggagccgcatctttggctgttgcctttaaaacaaagcagaaacaaacacgtcaagttgcccttgccgcggggatttcagctttgctggcaggtatcacggaaccggcactttatggggtcacactgaaatttaaaaagccactctatgcagccatgatttcaggtggtctggtcggagcctttattggttttgtcaatattgcttcttatacctttgtcgtaccttctattattggtttaccacagtacatcaacccatcaggcggagctaattttacaaatgctttgattgccggagctgcgacgattgtgttagccttcagtttgacttggttcatgggaattgatgaagaatccccagagcaagtgagtgttgcagcagatatgtcacaagttaagagcggcttgtcaaccaaacaaacgttgtatgctccaatgacaggtgagatgctttttctatcagaagttcctgatgaaaccttttcttccaagttattaggagaaggatttgccatattaccaagcgaaggtgtggtctatgccccctttgatggtgaagtcatcactttctttccaaccaagcatgctgttgccttaaaaaacacacgtggtgtggaagtcttgattcatgtcggtattgatacggttgagttaaaagggcaaggtttcgagcagttagtgtctgttggcgatgtcgtgaaacgaggccaggcacttctaaaaatggatattgatttcattacttcaaaaggctattcactcatcagtcctgtggtcgtgaccaattcggctgagcagttggagattattattcaagatgacaaaaaaatggtgactaaagaggacgctttgttagtcattttataa

SEQ ID NO: 4033 - protein, 620 aa, Streptococcus pyogenes MGAS8232
MTYQETAKAILATVGGKTNIQRVTHCVTRLRLVLKNDEKVKDQQVKAISNVIGVMRKNGQYQIILGNDVNNYYQAFLSLGHFDNQDEDHSSKAKGSILERLIETIAGVITPLIPALLGGGMLKVVGILLPMLGLASADSQTVVFINFFGDAAYYFMPVMIAYSAAARFKVTPVLAATIAGILLHPAFVAMVAEGKPLALFGAPVTPASYGSSVIPILMMVYLMQYIEKWGNRLVPSVMKSFLQPTLIILISGFLVLVVVGPLGVIIGQGLSNTMLTIYHVAPWLALAILGAIMPLVVMTGMHWAFAPIFLAASVATPDVLILPAMLASNLAQGAASLAVAFKTKQKQTRQVALAAGISALLAGITEPALYGVTLKFKKPLYAAMISGGLVGAFIGFVNIASYTFVVPSIIGLPQYINPSGGANFTNALIAGAATIVLAFSLTWFMGIDEESPEQVSVAADMSQVKSGLSTKQTLYAPMTGEMLFLSEVPDETFSSKLLGEGFAILPSEGVVYAPFDGEVITFFPTKHAVALKNTRGVEVLIHVGIDTVELKGQGFEQLVSVGDVVKRGQALLKMDIDFITSKGYSLISPVVVTNSAEQLEIIIQDDKKMVTKEDALLVIL

SEQ ID NO: 4034 - DNA, 1869 bp, Streptococcus agalactiae 2603V/R
  CDS (1)..(1869): transl_table=11
atgactaaataccaagagactgctaaagctattttagcagcagtagggggagaaaaaaatattcaacacgtaacccactgtgtgacacgattacgattagttttagacaatgatgaaattgtcaacgatcaggttattaaaactattccgaatgttatcggtgttatgcgtaaaaatgatcaataccaaattattttgggaaatgatgtcaataattattataatgcttttttggccttaggtcattttgaaaatactaccagagaattttcatcacaaaaaaagagttcaatacttgagaaattaattgaaacgattgcaggagtcattacgccgcttatacctgctcttctaggaggagggatgctcaaggttataggtattttgctccctatgctcggtatagcaagctctagttctcaaacagtagcttttatcaatttttttggtgatgccgcttattattttatgccaataatgattgcttattcagctgcgtcacgatttaaagttacacctgtattagctgctacagtaggagggattctcttacaccctgcttttgtgacaatggtagctgaaggaaaaccattatctttatttggagctccggttacactggctagttatggttcttctgttattccaatcttaattatggtttttcttatgcaatatattgagagatggattaataaaattgttcctagtgtaatgaagagttttttacaaccgactttgattattctcatttctggctttttagctttagtggtcgtggggccactgggggtaattattggtaaaggattgtctagtgcaatgctttcgatttaccatgtggcgccatggttagctttatctattcttggtgctattatgccattggttgttatgacaggaatgcactgggcatttgctccaatatttttagctgcttctgttgcgacaccagatgttttgattttaccagcaatgttagcttctaatttagctcaaggtgcggcttctcttgctgttgcagttaaggctaaacaaaaacaaacacgtcaggtggcctttgcagcaggtttatcagcactactagctggtatcacagaacctgcactttatggtgtcacactgaaattcaagaagcctttatacgctgcaatgatatcaggtggtttagtaggagcttatattggattagttaatattgcttcctatacatttgtagtaccatctattattggtttgccacaatatatcaatccacaggggggcaataatttcagtaatgctgttattgcagcaatagctactattattttgactttcattattacatggttcttgggaattgatgaaggagaaaacgaaaaaagtagtattaatgctcaagagcacacacatattagaagtggtttatcaaaaaaagagacattgtattcacctatggtaggcaatgtattacctttatctaaagtacccgatgaaacattttcatctaaattactaggtgaaggtttagcaatcactcctagtgtgggtgaagtttatgcaccatttgatggtgaaattataagtttatttcctacaaaacatgccattgccttaaaggatgataagggagtcgaagtgttaatccatattggaatagatactgtagaactaaatggagaaggttttgaacaattggtcaaagttggcgattttgttaaacgaggacagttacttttgcgaatggatattgattttattagttcaaaggggtattctcttattagtccggttgtagttacaaattcaattgaccaacttgaaattatcgttaaagacgcagagacaatggttacaaatgaagatgatttacttgtaattctttaa

SEQ ID NO: 4035 - protein, 622 aa, Streptococcus agalactiae 2603V/R
MTKYQETAKAILAAVGGEKNIQHVTHCVTRLRLVLDNDEIVNDQVIKTIPNVIGVMRKNDQYQIILGNDVNNYYNAFLALGHFENTTREFSSQKKSSILEKLIETIAGVITPLIPALLGGGMLKVIGILLPMLGIASSSSQTVAFINFFGDAAYYFMPIMIAYSAASRFKVTPVLAATVGGILLHPAFVTMVAEGKPLSLFGAPVTLASYGSSVIPILIMVFLMQYIERWINKIVPSVMKSFLQPTLIILISGFLALVVVGPLGVIIGKGLSSAMLSIYHVAPWLALSILGAIMPLVVMTGMHWAFAPIFLAASVATPDVLILPAMLASNLAQGAASLAVAVKAKQKQTRQVAFAAGLSALLAGITEPALYGVTLKFKKPLYAAMISGGLVGAYIGLVNIASYTFVVPSIIGLPQYINPQGGNNFSNAVIAAIATIILTFIITWFLGIDEGENEKSSINAQEHTHIRSGLSKKETLYSPMVGNVLPLSKVPDETFSSKLLGEGLAITPSVGEVYAPFDGEIISLFPTKHAIALKDDKGVEVLIHIGIDTVELNGEGFEQLVKVGDFVKRGQLLLRMDIDFISSKGYSLISPVVVTNSIDQLEIIVKDAETMVTNEDDLLVIL

SEQ ID NO: 4036 - DNA, 1863 bp, Lactobacillus plantarum WCFS1
  CDS (1)..(1863): transl_table=11
atgacatataaagaaatgaacgaccagattattaatggtgtcgggggtaaaagtaatattgagtcagttgtacactgtgcaacaaggctgagattcgtgctgaaggatgaggccaaggcagatgatgatttggtacggtcgattccaggaattttacaagttgtcaaaaaagcgggacagtaccaattagttatcggaaataatgttgaggatgtttataatgaactttctgatatgttacagctggatgaaaatgtagatcataatcagtctaaggataagcggagtattttcgacaaaataattagtacgattactggctcaattgcacctgcgattccattgcttgctggtgctgggatggggaaagtattgttgctcattctgacactgtctggattattaactgaaaaaagtcaaacttatcagatgttaaatttgatttttgatactggctatttctttatgccagcatttattggattttccgctgctaagatttttaagacaaaccaatttctaggggcatttatgggattggtcactgttaatccaaattgggttgcaatggtagcggctgggaagcctgttagtttcataggtgttcctatccaattggtttcttattcttcaaccttgattacagctattttatccgtatggttaatgtcttatattgaaaagtttgtaaagaagattacgccaggcatgattaaagtctttgcagagccgatgcttatcatgttgattactgcaccactgacttttattgttcttggaccaattgccaatttgatttcaatgggaattgcaagtataagcatgttcttgtatgataacgccggctttatcgcaattccgctacttgctgccgcatatccatggttagtttctattggtattcataaagcgctcagtccaattagtatccaattagttgcgacacagggatttgatccaataattcgggttgtggctttgtgttcgaacatgtcacaagctgccgcatcattagcagtcggtttgaaaaccaaaaataagcagttgagagccttagcactttcatccactgtgacagcatatcttggtggtattaccgaaccagccatgtttggtgtgaatctgaagttaaagaagccgatgtacggtgccatgattggtggggcagttgccggtttgtttgccggatttatgaaaatgaaagcatttatttatgtcactcctggactactcagcttaccaatgtgggtatctaagacagaaaactacgtcgtattggcagtcgctaccattgttattgctagtgtggcaacatttatcgcaacttggttgattggcttcgaagatcctgtcagcgaggaagttatgaaacaaaagcaggcgcaggcgaacaaagtggtgacaactaaacattcgattaatagccccgttgttggggaagctcggatgttgaatgaagttaatgatgaaacgtttgcaagtggcgttatgggcaaagggattgctgtcatcccaactgagggtgtcgtgattgcccccacggatggtgttgcatcagctgtctttgataccagccatgcgattggccttcatttagataatgatgctgatttgttgattcatgtgggaattgatactgttgaattaaaaggtcaatattttgaaacattagtaaaaaagggtgagcgctttcacgcaggtcaagagttattacggtttgatttagacaagataaaacaggctggatatgatccaacggttatgattattgtgttaaatacaaaggactttttagaggttctaccagtaccagaatcgaacgaatctgtaaccgcagataataatttattaatgttagcgtaa

SEQ ID NO: 4037 - protein, 620 aa, Lactobacillus plantarum WCFS1
MTYKEMNDQIINGVGGKSNIESVVHCATRLRFVLKDEAKADDDLVRSIPGILQVVKKAGQYQLVIGNNVEDVYNELSDMLQLDENVDHNQSKDKRSIFDKIISTITGSIAPAIPLLAGAGMGKVLLLILTLSGLLTEKSQTYQMLNLIFDTGYFFMPAFIGFSAAKIFKTNQFLGAFMGLVTVNPNWVAMVAAGKPVSFIGVPIQLVSYSSTLITAILSVWLMSYIEKFVKKITPGMIKVFAEPMLIMLITAPLTFIVLGPIANLISMGIASISMFLYDNAGFIAIPLLAAAYPWLVSIGIHKALSPISIQLVATQGFDPIIRVVALCSNMSQAAASLAVGLKTKNKQLRALALSSTVTAYLGGITEPAMFGVNLKLKKPMYGAMIGGAVAGLFAGFMKMKAFIYVTPGLLSLPMWVSKTENYVVLAVATIVIASVATFIATWLIGFEDPVSEEVMKQKQAQANKVVTTKHSINSPVVGEARMLNEVNDETFASGVMGKGIAVIPTEGVVIAPTDGVASAVFDTSHAIGLHLDNDADLLIHVGIDTVELKGQYFETLVKKGERFHAGQELLRFDLDKIKQAGYDPTVMIIVLNTKDFLEVLPVPESNESVTADNNLLMLA

SEQ ID NO: 4038 - DNA, 1863 bp, Streptococcus pyogenes SSI-1
  CDS (1)..(1863): transl_table=11
atgacgtatcaagaaactgccaaggctattttagcggcggttggtggcaaaacaaatattcaacgtgtgacacactgtgtaacacgtctacgcttagtactgaaaaatgatgagaaagttaaagatcagcaagtcaaagccatttcaaatgtgattggcgtgatgcgcaaaaacggccagtaccaaattatcttgggcaatgatgtcaataattattaccaagcctttttaagcctagggcattttgacaatcaagatgaagatcattcttcaaaagcgaaaggaagtatccttgagcgcttgattgaaaccattgctggcgtgattacaccgctgattccagcccttcttggtggtggaatgctcaaagtggtgggaatcttgcttcctatgcttggcttagcgagtgcggactctcaaaccgttgcctttattaacttctttggcgatgcggcttattattttatgcctgtcatgattgcctattcagcagcggcgcgctttaaggtgacacctgttttagcagcgacgatcgcagggattttattgcatcctgcctttgttgcaatggtagcagaaggtaaaccattgactttatttggagcatcagtcactcctgctagctatggctcatctgttattcccattttgatgatggtttacttgatgcaatacattgaaaaatgggtcaatcgcttggtgccaagcgtgatgaaaagcttcttacagccaaccttaatcattttgatttctggctttttggctttagtggttgtaggtcctcttggtgtgattattggtcaagggttatctaataccatgctcgctatttatcatgtggctccgtggctagcacttgccattttgggagcgattatgccgcttgttgtcatgacggggatgcactgggcttttgcaccaatctttttggccgcttcggtcgcaacaccagatgtcttgattttaccagcaatgttggcttctaatttggctcaaggagccgcatctttggctgttgcctttaaaacaaagcagaaacaaacacgtcaagttgcccttgccgcggggatttcagctttgctggcaggtatcacggaaccggcactttatggggtcacactgaaatttaaaaagccactctatgcagccatgatttcaggtggtctggttggagcctttattggttttgtcaatattgcttcttatacctttgtcgtaccttctattattggtttaccacagtacatcaacccatcaggcggagctaattttataaatgctttgattgccggagctgcgacgattgtgttagccttcagtttgacttggttcatgggaattgatgaagagtccccaaagcaagtgagtgttgcagcagatatgtcacaagttaagagcggcttgtcaaccaaacaaacgttgtatgctccaatgacaggtgagatgctttttctatcagaagttcctgatgaaaccttttcttccaagttattaggagaaggatttgccatattaccaagcgaaggtgtggtctatgccccctttgatggtgaagtcatcactttctttccaaccaagcatgctgttgccttaaaaaacacacgtggtgtggaagtcttgattcatgtcggtattgatacggttgagttaaaagggcaaggtttcgagcagttagtgtctgttggcgatgtcgtgaaacgaggccaggcacttctaaaaatggatattgatttcattacttcaaaaggctattcactcatcagtcctgtggtcgtgaccaattcggctgagcagttggagattattattcaagatgacaaaaaaatggtgactaaagaggacgctttgttagtcattttataa

SEQ ID NO: 4039 - protein, 620 aa, Streptococcus pyogenes SSI-1
MTYQETAKAILAAVGGKTNIQRVTHCVTRLRLVLKNDEKVKDQQVKAISNVIGVMRKNGQYQIILGNDVNNYYQAFLSLGHFDNQDEDHSSKAKGSILERLIETIAGVITPLIPALLGGGMLKVVGILLPMLGLASADSQTVAFINFFGDAAYYFMPVMIAYSAAARFKVTPVLAATIAGILLHPAFVAMVAEGKPLTLFGASVTPASYGSSVIPILMMVYLMQYIEKWVNRLVPSVMKSFLQPTLIILISGFLALVVVGPLGVIIGQGLSNTMLAIYHVAPWLALAILGAIMPLVVMTGMHWAFAPIFLAASVATPDVLILPAMLASNLAQGAASLAVAFKTKQKQTRQVALAAGISALLAGITEPALYGVTLKFKKPLYAAMISGGLVGAFIGFVNIASYTFVVPSIIGLPQYINPSGGANFINALIAGAATIVLAFSLTWFMGIDEESPKQVSVAADMSQVKSGLSTKQTLYAPMTGEMLFLSEVPDETFSSKLLGEGFAILPSEGVVYAPFDGEVITFFPTKHAVALKNTRGVEVLIHVGIDTVELKGQGFEQLVSVGDVVKRGQALLKMDIDFITSKGYSLISPVVVTNSAEQLEIIIQDDKKMVTKEDALLVIL

SEQ ID NO: 4040 - DNA, 1935 bp, Erwinia carotovora subsp. atroseptica SCRI1043
  CDS (1)..(1935): transl_table=11
atgaattatcaaaaaatgaattatcaaaaacttggggtcgacatactcgcgttgagcggcggcaagcagaatgtcagcaaactgacccactgcgccactcgtttacgttttgagttcaacgatagccatgcggtacaggcagaagcgattgccaaacttcccggcgtcatcagcgtcgtagatcgcggcggtcagtttcaggtggtgatcggcaacgatgttcaaatcacctaccgggcgattttgaatgagatcggcgaaatgaacggccagcgcacttctgataaaaacaagcagcagaagaaaggcggcattttctcgcaaatcatcagcgtaatatccaccaccttcactcctgtcatcccggcgattaccggtgcggggatgatcaaagcgctgctggcgatcctcaaactgaccggattaatttccgccgacagcacgacctatcgcctgctggatactatctccgatgcggctttcttcttcctgcccgtgctgctggcctacggtgcctccatcaagttcgcctgtaacccgattctggcgatgacgattgcgggcgccttgctgcacccaaatctggctcagttgctggcatcaggcgggccgatcagctttatcggtattccagtacggctggcagactatgccggatcggtgttaccgatcatcctcaccgtgtggatcatgtcctacatcgagcgcttcgctgaaaaaatttcgccctcgatgatcacctttttcaccaagccaatgatcgtgctgctgtttaccgcaccgttggcgctggtagtgattgggcctttcggtattttcctcaacgatttagtcgccagcggtgccgctatcattgacggaaaggcaagctggctcattccgatgttgatgggtggactgcaaccgttcctggtgatcaccggtacggcctgggcgatgacgccgattgctacctcgcagcttacccgcaacggtttcgagatgattaacggtcccggcatgctggcttccaatattgctcagggtgccgccacactgtgcgttgcgtttaaaaccaagaacaaaaacctgaaacagttagcttcttctgcgggcttcactgccctgctgggtatcaccgagccttctttatacggggtaacgctgaaactgaagaaaccgctgattgccgccatgattggcgggggctgcgcgggcatctatgccggtttagcgggtctggttcgctacgccttcgtctcaccgggactggcagcgctgcctgcctttattggcgaaaacccgatgaacatcgtacatgcgctgatcacctgcgccattgcaatcgtcgtcacgtttgcgctcacctggattatgggattcgacgatccggtggatgaaactgacaatgcccaaaccgactcgacccaatcagacgcgcgccaatctgcaccagcagctaataccacacaaaaatcacaggccacagaaaaccacgctgaaccgcaaacgattctcagcccgctgtccggcaagctggtcgcgctgagcgacatcaacgatgacgtattctcacagggattactggggcaaggcgttgcgattattcctgacaacggtgaagtggtcgcgcccgtcagtggcgaaatcatcacattccttgagtccaaacatgccgtcggtatccgcacggatagcggtctggaattactgattcatgtcggcctcgatacggtgaacctcaacggcaagcactttaccggctacatcaaaccgggcgaccgtgtcaccgcgggcgacaggttaattagcttcgatctgcatgagataacgcgtttgggctatgacccgattacgccagtcgtgatcatcaacagcgatgagtacgctagcgtcgtctgcaccgtgccacagccgatcgcaccgatggataccatcattaacgtgaacgcctga

SEQ ID NO: 4041 - protein, 644 aa, Erwinia carotovora subsp. atroseptica SCRI1043
MNYQKMNYQKLGVDILALSGGKQNVSKLTHCATRLRFEFNDSHAVQAEAIAKLPGVISVVDRGGQFQVVIGNDVQITYRAILNEIGEMNGQRTSDKNKQQKKGGIFSQIISVISTTFTPVIPAITGAGMIKALLAILKLTGLISADSTTYRLLDTISDAAFFFLPVLLAYGASIKFACNPILAMTIAGALLHPNLAQLLASGGPISFIGIPVRLADYAGSVLPIILTVWIMSYIERFAEKISPSMITFFTKPMIVLLFTAPLALVVIGPFGIFLNDLVASGAAIIDGKASWLIPMLMGGLQPFLVITGTAWAMTPIATSQLTRNGFEMINGPGMLASNIAQGAATLCVAFKTKNKNLKQLASSAGFTALLGITEPSLYGVTLKLKKPLIAAMIGGGCAGIYAGLAGLVRYAFVSPGLAALPAFIGENPMNIVHALITCAIAIVVTFALTWIMGFDDPVDETDNAQTDSTQSDARQSAPAANTTQKSQATENHAEPQTILSPLSGKLVALSDINDDVFSQGLLGQGVAIIPDNGEVVAPVSGEIITFLESKHAVGIRTDSGLELLIHVGLDTVNLNGKHFTGYIKPGDRVTAGDRLISFDLHEITRLGYDPITPVVIINSDEYASVVCTVPQPIAPMDTIINVNA

SEQ ID NO: 4042 - DNA, 1461 bp, Erwinia carotovora subsp. atroseptica SCRI1043
  CDS (1)..(1461): transl_table=11
atgtcaaagaattatgcggctgtatcccgttcgatagtcgatgccatcggtggtgctgataacatcactgccgtgacgcactgtatgacccgcctgcgttttgtgcttaaagataatgatgcggcgaatgtcgccgaattgaaggcgatcggcggcgtgctaggtgtggtgaaaaacgataaccagtgtcaggtcatcatcggtaatactgtttctcaggcttacgccgaggtggtgaagctattaccggaaggtgcggctgctgaaaaagcggtgccagtgaacaataaaattacgctgcgacgcatcggtgcaggcattctggatgcgctgattggcacgatgtcaccgcttatcccggcaattatcggtgggtcgatggtgaaattgctcgccatgattctggatatgaccgggctgtttgagaagggcgcatcgacgatcactattctgaacgtgattggcgacggcgcgttcttcttcctgccgatcatggtggcggcgtctgcggcggtaaaattcaaaaccaatatgtcgctggcgattgctatcgctggggtactggtgcatccgacgtttatcgatctgatggcaaaagcagcacagggtcagcaggtggtgtttatggggttgtcggtcacggcggtgaagtatacctataccgtaattccggcgctgtgtatgacctggattctgtcttacattgaaaaatgggtagaccgcattacgccagcagtgaccaaaaacttcctcaagccgatgttaatcgtgctgattgcgtccccgattgccatcatgcttatcgggccgattgggatttggattggtagcggtatttctgcggtagtgtacaccgtgcatgactatctgggctggctgtccgttgccatcatgggcgctatctggccacttctggtcatgaccggtatgcaccgtgtgtttacgccgaccattattcaaaccatcgctgaaaccggcaaagaaggcatggtcatgccgtctgaaattggcgcgaacctgtcgctgggtggctcatcactggccgtcgcttggcgtaccaaaaacccggaactgcgccagacggcgctggcagcagcggcatcagcgattgttgctgggatctctgaacctgcgctttatggtgtggctttacgtctgaaacgtccgctgatcgcttgtttaatcaccggatttatctgtggtgccgtcgcgggtatcggtggattagcaagccattcaatggcgtcgccggggctattcaccagcgtacagttcttcgatcctaccaatccgatgagcattgcctgggtattcggcgtcatgattctgtccgtcgtgatttccttcttcgtgaccttgctgctgggctttgaagacatcccagtagaagaaaaaccggaagaaaaacgcgtagagggcgatgagatttccgcgccgcagcgcgcagcgaacacgaattaa

SEQ ID NO: 4043 - protein, 486 aa, Erwinia carotovora subsp. atroseptica SCRI1043
MSKNYAAVSRSIVDAIGGADNITAVTHCMTRLRFVLKDNDAANVAELKAIGGVLGVVKNDNQCQVIIGNTVSQAYAEVVKLLPEGAAAEKAVPVNNKITLRRIGAGILDALIGTMSPLIPAIIGGSMVKLLAMILDMTGLFEKGASTITILNVIGDGAFFFLPIMVAASAAVKFKTNMSLAIAIAGVLVHPTFIDLMAKAAQGQQVVFMGLSVTAVKYTYTVIPALCMTWILSYIEKWVDRITPAVTKNFLKPMLIVLIASPIAIMLIGPIGIWIGSGISAVVYTVHDYLGWLSVAIMGAIWPLLVMTGMHRVFTPTIIQTIAETGKEGMVMPSEIGANLSLGGSSLAVAWRTKNPELRQTALAAAASAIVAGISEPALYGVALRLKRPLIACLITGFICGAVAGIGGLASHSMASPGLFTSVQFFDPTNPMSIAWVFGVMILSVVISFFVTLLLGFEDIPVEEKPEEKRVEGDEISAPQRAANTN

SEQ ID NO: 4044 - DNA, 1863 bp, Streptococcus pyogenes MGAS10394
  CDS (1)..(1863): transl_table=11
atgacgtatcaagaaactgccaaggctattttagcggcggttggtggcaaaacaaatattcaacgtgtgacacactgtgtaacacgtctacgcttagtactgaaaaatgatgagaaagttaaagatcagcaagtcaaagccatttcaaatgtgattggcgtgatgcgcaaaaacggccagtaccaaattatcttgggcaatgatgtcaataattattaccaagcctttttaagcctagggcattttgacaatcaagatgaagatcattcttcaaaagcaaaaggaagtatccttgagcgcttgattgaaaccattgctggtgtgattacaccgctgattccagcccttcttggtggtggaatgctcaaagtggtgggaatcttgcttcctatgcttggcttagcgagtgcggactctcaagccgttgcctttattaacttctttggcgatgcggcttattattttatgcctgtcatgattgcctattcagcagcggcgcgctttaaggtgacacctgttttagcagcgacgatcgcagggattttattgcatccagcctttgttgcaatggtagcagaaggtaaaccattggctttatttggagcaccagtcactcctgctagctatggctcatctgttattcccattttgatgatggtttacttgatgcaatacattgaaaaatgggtcaatcgcttggtgccaagcgtgatgaaaagcttcttacagccaaccttaatcattttgatttctggctttttggctttagtggttgtaggtcctcttggtgtgattattggtcaagggttatctaataccatgctcactatttatcatgtggctccgtggctagcacttgccattttgggagcgattatgccgcttgttgtcatgacggggatgcactgggcttttgcaccaatctttttggccgcttcggtcgcaacaccagatgtcttgattttaccagcaatgttggcttctaatttggctcaaggagccgcatctttggctgttgcctttaaaacaaagcagaaacaaacacgtcaagttgcccttgccgcggggatttcagctttgctggcaggtatcacggaaccggcactttatggggtcacactgaaatttaaaaagccactctatgcagccatgatttcaggtggtctggtcggagcctttattggttttgtcaatattgcttcttatacctttgtcgtaccttctattattggtttaccacagtacatcaacccatcaagcggagctaattttacaaatgctttgattgccggagctgcgacgattgtgttagccttcagtttgacttggttcatgggaattgatgaagaatccccagagcaagtgagtgttgcagcagatatgtcacaagttaagagcggcttgtcaaccaaacaaacgttgtatgctccaatgacaggtgagatgctttttctatcagaagttcctgatgaaaccttttcttccaagttattaggagaaggatttgccatattaccaagcgaaggtgtggtctatgccccctttgatggtgaagtcatcactttctttccaaccaagcatgctgttgccttaaaaaacacacgtggtgtggaagtcttgattcatgtcggtattgatacggttgagttaaaagggcaaggtttcgagcagttagtgtctgttggcgatgtcgtgaaacgaggccaggcacttctaaaaatggatattgatttcattacttcaaaaggctattcactcatcagtcctgtggtcgtgaccaattcggctgagcagttggagattattattcaagatgacaaaaaaatggtgactaaagaggacgctttgttagtcattttataa

SEQ ID NO: 4045 - protein, 620 aa, Streptococcus pyogenes MGAS10394
MTYQETAKAILAAVGGKTNIQRVTHCVTRLRLVLKNDEKVKDQQVKAISNVIGVMRKNGQYQIILGNDVNNYYQAFLSLGHFDNQDEDHSSKAKGSILERLIETIAGVITPLIPALLGGGMLKVVGILLPMLGLASADSQAVAFINFFGDAAYYFMPVMIAYSAAARFKVTPVLAATIAGILLHPAFVAMVAEGKPLALFGAPVTPASYGSSVIPILMMVYLMQYIEKWVNRLVPSVMKSFLQPTLIILISGFLALVVVGPLGVIIGQGLSNTMLTIYHVAPWLALAILGAIMPLVVMTGMHWAFAPIFLAASVATPDVLILPAMLASNLAQGAASLAVAFKTKQKQTRQVALAAGISALLAGITEPALYGVTLKFKKPLYAAMISGGLVGAFIGFVNIASYTFVVPSIIGLPQYINPSSGANFTNALIAGAATIVLAFSLTWFMGIDEESPEQVSVAADMSQVKSGLSTKQTLYAPMTGEMLFLSEVPDETFSSKLLGEGFAILPSEGVVYAPFDGEVITFFPTKHAVALKNTRGVEVLIHVGIDTVELKGQGFEQLVSVGDVVKRGQALLKMDIDFITSKGYSLISPVVVTNSAEQLEIIIQDDKKMVTKEDALLVIL

SEQ ID NO: 4046 - DNA, 1908 bp, Pectobacterium carotovorum subsp
  CDS (1)..(1908): transl_table=11
atgaattatcaaaaacttggagtcgacatactcgcgttgagcggcggcaagcagaacgtcagcaaactgacccactgcgccacccgcttacgctttgagttcaacgacagccatgccgtacaggcagaggcgattgccaaactccccggcgtcatcagcgtggtcgatcgcggcggtcagtttcaggtggtgatcggcaacgatgtccaaatcacctatcgcgcgattttgaacgagattggcgagatgaacggccagcgcactgctggcagtaaagaaccgcagaagaaaggcggcattttctcgcaaatcatcagcgtgatttccaccaccttcacgcccgttatcccggcgattactggcgcagggatgattaaagcccctgttggcgatcctcaagctgactgggttaaatttccgccgaacagcacgacctatcgcctgctggacaccatctccgatgcggccttcttcttcctacctgtgctgctggcctacggtgcctccatcaagttcgcctgtaatccgattctggcgatgacaatcgctggcgcattgctgcacccgaatctggctcagctactggcctccggcggccctatcagctttatcggtattccggtacggctggcggactacgccggctcggtgttgccgatcattcttaccgtatggatcatgtcttacatcgagcaatttgccgaaaagatctcgccctcgatgatcaaatttttcaccaagccgatgatcgtgctgctgtttaccgcgccgctcgcgctggtggtgattgggcctttcggtatattcctcaacgatttggttgccagcggtgccgctatcatcgacggaaaggcgagctggcttattccgatgttgatgggtggcctgcaaccgtttttggtcatcaccggcaccgcctgggcgatgacgccgattgccacctcgcagcttacccgcaacggctttgagatgatcaacgggcccggcatgctggcctccaacattgcgcagggtgccgccacgctgtgcgtcgcgtttaaaaccaaaaacaagaatctgaaacagctggcttcttcggcgggtttcaccgctctgctgggtatcaccgagccttctctgtacggggtgacgctgaaactgaagaaaccgctcattgccgccatgatcggcggaggctgtgcaggtatctacgccggattggccgggctggttcgctatgctttcgtatcaccgggactggcagcgctgcccgccttcattggtgaaaacccgatgaacatcgtccatgcgctgatcacctgcgccattgcgattgtcgtcacgtttgcgctcacctggatcatgggatttgacgatccggtggatgaaaccgacaccgcacacaccagcaatggtcagtcgacatcagtagcagagcccgcccaaaagccgcaggcggcgcaaggccacgccgaaacgcaaacgattcaaagcccgatgtccggcaagctggtcgcattgagtgacatcaacgatgacgtattctcacagggattattgggacaaggtgtggccattatccccgacagcggtgaagtgatcgcgcccgtcagtggcgaaatcatcacgttccttgagtctaaacatgccgtcggtatccgcgctgacagcggtctggaattactgattcatgtcggcctcgatacggtgaatctcaacggcaagcactttaccggctatgtcaaaccgggcgaccgggttactgcgggcgacaggttaatcagcttcgatctgcatgaaatcacgcgtttgggctatgacccgattacgcccgtggtgattatcaacagcgatgactacaccagcgtcgtctgtaccgcaccacagccgatcgcgccacgggacaccatcattaacgtgcacgcctga

SEQ ID NO: 4047 - protein, 635 aa, Pectobacterium carotovorum subsp
MNYQKLGVDILALSGGKQNVSKLTHCATRLRFEFNDSHAVQAEAIAKLPGVISVVDRGGQFQVVIGNDVQITYRAILNEIGEMNGQRTAGSKEPQKKGGIFSQIISVISTTFTPVIPAITGAGMIKAPVGDPQADWVKFPPNSTTYRLLDTISDAAFFFLPVLLAYGASIKFACNPILAMTIAGALLHPNLAQLLASGGPISFIGIPVRLADYAGSVLPIILTVWIMSYIEQFAEKISPSMIKFFTKPMIVLLFTAPLALVVIGPFGIFLNDLVASGAAIIDGKASWLIPMLMGGLQPFLVITGTAWAMTPIATSQLTRNGFEMINGPGMLASNIAQGAATLCVAFKTKNKNLKQLASSAGFTALLGITEPSLYGVTLKLKKPLIAAMIGGGCAGIYAGLAGLVRYAFVSPGLAALPAFIGENPMNIVHALITCAIAIVVTFALTWIMGFDDPVDETDTAHTSNGQSTSVAEPAQKPQAAQGHAETQTIQSPMSGKLVALSDINDDVFSQGLLGQGVAIIPDSGEVIAPVSGEIITFLESKHAVGIRADSGLELLIHVGLDTVNLNGKHFTGYVKPGDRVTAGDRLISFDLHEITRLGYDPITPVVIINSDDYTSVVCTAPQPIAPRDTIINVHA

SEQ ID NO: 4048 - DNA, 1461 bp, Pectobacterium carotovorum subsp
  CDS (1)..(1461): transl_table=11
atgtcaaagaattatgcggctgtatcccgttcgatcgtcgatgccatcggtggtgctgataacatcgccgccgtgacccactgtatgacccgcctgcgctttgtgcttaaagataatgatgcagcgaatgtggccgaactgaaggcgataagcggtgtgttgggcgtcgtaaaaaacgataaccagtgccaggtcattatcggcaacaccgtttctcaggcctatgccgaggtggtgaagctgctgccggaaggcgcggcggcggaaaaaacggtgccggtgaacaataaaattacgctgcgacgcattggtgcgggcattctggatgcgctgattggtacgatgtcgccgctcattccggcgattatcggcgggtcgatggtaaaactgctcgccatgatcctggatatgaccggcatatttgagaagggctcttccacgctgacgattctgaacgtgattggcgacggtgcattcttcttcctgccgattatggtggcagcatctgcggcggtaaaattcaaaaccaatatgtcgctagcgattgctatcgctggggtgctggtgcatccgacgtttatcgatttgatggcaaaagcggcacaagggcagcaggtggtgtttatggggctgtccgttaccgcggttaagtacacctacaccgtgattccggcgctgtgtatgacctggattctgtcttacattgaaaaatgggtagatcgcattacgcctgcggtcaccaagaacttcctgaagccgatgttaatcgtgctgattgcctctccgattgccatcatgcttattggcccgattggaatctggatcggtagcggtatttctgctgtcgtctacaccgtgcatgattatctgggctggctgtccgttgccatcatgggcgctatctggccgctgctggtaatgactggtatgcatcgcgtgtttaccccgactattattcaaaccatcgccgaaacgggaaaagaaggcatggtgatgccgtctgaaattggcgcgaatctgtcgcttggcggttcttcactggcggtcgcctggcgcaccaaaaacccggaactgcgccagacggcgctggccgcggccgcctcggcgattgttgccgggatttctgaacccgcactgtacggtgtagctttgcgcctgaagcgtccgctgatcgcctgtctaattaccggtttcatctgtggcgccgttgccggtatcggcgggctggccagtcattcaatggcatcgccggggctgtttaccagcgtgcaattcttcgatcctgcgaatccgatgagcattgcctgggtgttcggcgtcatgattctgtctgtcgtgatttctttcttcgtcaccttgctgctgggctttgaagacattccggtagaagaaaagccggaagagaaacgcgtgcagggtgatgatttttccgcgccgcaacgcgccacgaacacgaattaa

SEQ ID NO: 4049 - protein, 486 aa, Pectobacterium carotovorum subsp
MSKNYAAVSRSIVDAIGGADNIAAVTHCMTRLRFVLKDNDAANVAELKAISGVLGVVKNDNQCQVIIGNTVSQAYAEVVKLLPEGAAAEKTVPVNNKITLRRIGAGILDALIGTMSPLIPAIIGGSMVKLLAMILDMTGIFEKGSSTLTILNVIGDGAFFFLPIMVAASAAVKFKTNMSLAIAIAGVLVHPTFIDLMAKAAQGQQVVFMGLSVTAVKYTYTVIPALCMTWILSYIEKWVDRITPAVTKNFLKPMLIVLIASPIAIMLIGPIGIWIGSGISAVVYTVHDYLGWLSVAIMGAIWPLLVMTGMHRVFTPTIIQTIAETGKEGMVMPSEIGANLSLGGSSLAVAWRTKNPELRQTALAAAASAIVAGISEPALYGVALRLKRPLIACLITGFICGAVAGIGGLASHSMASPGLFTSVQFFDPANPMSIAWVFGVMILSVVISFFVTLLLGFEDIPVEEKPEEKRVQGDDFSAPQRATNTN

SEQ ID NO: 4050 - DNA, 23 bp, Artificial sequence
  primer
atggccaaaaattatgcggcgct

SEQ ID NO: 4051 - DNA, 27 bp, Artificial sequence
  primer
ttaattaagacttacttctttggcgac

SEQ ID NO: 4052 - protein, 523 aa, Artificial sequence
  consensus sequence
  Variant (2)..(7): Xaa in position 2 to 7 is any amino acid
  Variant (9)..(12): Xaa in position 9 to 12 is any amino acid
  Variant (15)..(16): Xaa in position 15 to 16 is any amino acid
  Variant (18)..(20): Xaa in position 18 to 20 is any amino acid
  Variant (25)..(25): Xaa in position 25 is any amino acid
  Variant (30)..(45): Xaa in position 30 to 45 is any amino acid
  Variant (47)..(48): Xaa in position 47 to 48 is any amino acid
  Variant (50)..(57): Xaa in position 50 to 57 is any amino acid
  Variant (59)..(59): Xaa in position 59 is any amino acid
  Variant (61)..(63): Xaa in position 61 to 63 is any amino acid
  Variant (66)..(66): Xaa in position 66 is any amino acid
  Variant (68)..(70): Xaa in position 68 to 70 is any amino acid
  Variant (72)..(92): Xaa in position 72 to 92 is any amino acid
  Variant (93)..(98): Xaa in position 93 to 98 is any or no amino acid
  Variant (100)..(108): Xaa in position 100 to 108 is any amino acid
  Variant (110)..(112): Xaa in position 110 to 112 is any amino acid
  Variant (114)..(114): Xaa in position 114 is any amino acid
  Variant (118)..(119): Xaa in position 118 to 119 is any amino acid
  Variant (121)..(122): Xaa in position 121 to 122 is any amino acid
  Variant (124)..(124): Xaa in position 124 is any amino acid
  Variant (126)..(130): Xaa in position 126 to 130 is any amino acid
  Variant (132)..(134): Xaa in position 132 to 134 is any amino acid
  Variant (136)..(140): Xaa in position 136 to 140 is any amino acid
  Variant (141)..(141): Xaa in position 141 is any or no amino acid
  Variant (143)..(143): Xaa in position 143 is any amino acid
  Variant (145)..(152): Xaa in position 145 to 152 is any amino acid
  Variant (154)..(157): Xaa in position 154 to 157 is any amino acid
  Variant (159)..(159): Xaa in position 159 is any amino acid
  Variant (161)..(163): Xaa in position 161 to 163 is any amino acid
  Variant (165)..(165): Xaa in position 165 is any amino acid
  Variant (168)..(171): Xaa in position 168 to 171 is any amino acid
  Variant (173)..(176): Xaa in position 173 to 176 is any amino acid
  Variant (179)..(181): Xaa in position 179 to 181 is any amino acid
  Variant (184)..(184): Xaa in position 184 is any amino acid
  Variant (186)..(186): Xaa in position 186 is any amino acid
  Variant (189)..(196): Xaa in position 189 to 196 is any amino acid
  Variant (197)..(199): Xaa in position 197 to 199 is any or no amino acid
  Variant (201)..(206): Xaa in position 201 to 206 is any amino acid
  Variant (208)..(209): Xaa in position 208 to 209 is any amino acid
  Variant (211)..(214): Xaa in position 211 to 214 is any amino acid
  Variant (216)..(218): Xaa in position 216 to 218 is any amino acid
  Variant (220)..(220): Xaa in position 220 is any amino acid
  Variant (222)..(230): Xaa in position 222 to 230 is any amino acid
  Variant (234)..(240): Xaa in position 234 to 240 is any amino acid
  Variant (242)..(244): Xaa in position 242 to 244 is any amino acid
  Variant (246)..(246): Xaa in position 246 is any amino acid
  Variant (248)..(249): Xaa in position 248 to 249 is any amino acid
  Variant (251)..(251): Xaa in position 251 is any amino acid
  Variant (253)..(254): Xaa in position 253 to 254 is any amino acid
  Variant (256)..(260): Xaa in position 256 to 260 is any amino acid
  Variant (262)..(265): Xaa in position 262 to 265 is any amino acid
  Variant (268)..(268): Xaa in position 268 is any amino acid
  Variant (270)..(288): Xaa in position 270 to 288 is any amino acid
  Variant (291)..(295): Xaa in position 291 to 295 is any amino acid
  Variant (298)..(299): Xaa in position 298 to 299 is any amino acid
  Variant (301)..(302): Xaa in position 301 to 302 is any amino acid
  Variant (304)..(304): Xaa in position 304 is any amino acid
  Variant (307)..(307): Xaa in position 307 is any amino acid
  Variant (309)..(312): Xaa in position 309 to 312 is any amino acid
  Variant (314)..(328): Xaa in position 314 to 328 is any amino acid
  Variant (329)..(329): Xaa in position 329 is any or no amino acid
  Variant (331)..(335): Xaa in position 331 to 335 is any amino acid
  Variant (337)..(339): Xaa in position 337 to 339 is any amino acid
  Variant (341)..(342): Xaa in position 341 to 342 is any amino acid
  Variant (344)..(344): Xaa in position 344 is any amino acid
  Variant (348)..(348): Xaa in position 348 is any amino acid
  Variant (350)..(350): Xaa in position 350 is any amino acid
  Variant (352)..(356): Xaa in position 352 to 356 is any amino acid
  Variant (358)..(358): Xaa in position 358 is any amino acid
  Variant (360)..(361): Xaa in position 360 to 361 is any amino acid
  Variant (363)..(365): Xaa in position 363 to 365 is any amino acid
  Variant (367)..(369): Xaa in position 367 to 369 is any amino acid
  Variant (372)..(372): Xaa in position 372 is any amino acid
  Variant (380)..(380): Xaa in position 380 is any amino acid
  Variant (382)..(383): Xaa in position 382 to 383 is any amino acid
  Variant (385)..(385): Xaa in position 385 is any amino acid
  Variant (388)..(388): Xaa in position 388 is any amino acid
  Variant (390)..(391): Xaa in position 390 to 391 is any amino acid
  Variant (393)..(393): Xaa in position 393 is any amino acid
  Variant (395)..(397): Xaa in position 395 to 397 is any amino acid
  Variant (399)..(401): Xaa in position 399 to 401 is any amino acid
  Variant (403)..(413): Xaa in position 403 to 413 is any amino acid
  Variant (415)..(441): Xaa in position 415 to 441 is any amino acid
  Variant (442)..(442): Xaa in position 442 is any or no amino acid
  Variant (444)..(445): Xaa in position 444 to 445 is any amino acid
  Variant (447)..(452): Xaa in position 447 to 452 is any amino acid
  Variant (454)..(458): Xaa in position 454 to 458 is any amino acid
  Variant (459)..(511): Xaa in position 459 to 511 is any or no amino acid
  Variant (513)..(522): Xaa in position 513 to 522 is any amino acid
YXXXXXXIXXXXGGXXNXXXVTHCXTRLRXXXXXXXXXXXXXXXXIXXVXXXXXXXXQXQXXXGNXVXXXYXXXXXXXXXXXXXXXXXXXXXXXXXXXIXXXXXXXXXGXXXPXIPAXXGXXMXKXXXXXLXXXGXXXXXXSXTXXXXXXXXDXXXXFXPXXXAXSAXXXXKXXXXLAXXXAGXLXHPXXXXXXXXXXXGXXXXXXGXXVXXXXYXXXVXPXXXXXXXXXYIEXXXXXXXPXXXKXFXXPXLXXLXXXXXAXXXXGPXGXXXXXXXXXXXXXXXXXXXWLXXXXXGAXXPXXVXTGXHXXXXPXXXXXXXXXXXXXXXXPXXXXXNXXXGXXSXAVAXKXKXXXXXQXAXXAXXXAXXXGIXEPALYGVXLXXKXPLXAXXIXGXXXGXXXGXXXXXXXXXXXPXXXXXXXXXXXXXXXXXXXXXXXXXXXXVXXFXXXXXXGXXXXXXXXXXXXXXXXXXXXXXXXXXXXXXXXXXXXXXXXXXXXXXXXXXXXXXXXXXVXXXXXXXXXXG

SEQ ID NO: 4053 - protein, 59 aa, Artificial sequence
  protein pattern
  Variant (3)..(4): Xaa in position 3 to 4 is any amino acid
  Variant (6)..(6): Xaa in position 6 is Ile or Val
  Variant (7)..(7): Xaa in position 7 is Ala, Glu, Asn, Gln, Ser or Thr
  Variant (8)..(8): Xaa in position 8 is any amino acid
  Variant (10)..(10): Xaa in position 10 is Thr or Val
  Variant (13)..(13): Xaa in position 13 is any amino acid
  Variant (18)..(18): Xaa in position 18 is Phe or Leu
  Variant (19)..(19): Xaa in position 19 is any amino acid
  Variant (20)..(20): Xaa in position 20 is Ile or Leu
  Variant (21)..(21): Xaa in position 21 is Asp or Lys
  Variant (22)..(22): Xaa in position 22 is Asp or Asn
  Variant (23)..(23): Xaa in position 23 is Asp, Glu or Asn
  Variant (24)..(24): Xaa in position 24 is Ala, Asp, Glu or Asn
  Variant (25)..(25): Xaa in position 25 is any amino acid
  Variant (26)..(26): Xaa in position 26 is Ala, Ile or Val
  Variant (27)..(27): Xaa in position 27 is any amino acid
  Variant (28)..(28): Xaa in position 28 is Asp, Ser or Val
  Variant (29)..(30): Xaa in position 29 to 30 is any amino acid
  Variant (31)..(31): Xaa in position 31 is Ile, Leu or Val
  Variant (32)..(32): Xaa in position 32 is Lys or Arg
  Variant (33)..(33): Xaa in position 33 is any amino acid
  Variant (35)..(35): Xaa in position 35 is Gly, Pro or Ser
  Variant (36)..(36): Xaa in position 36 is Gly or Asn
  Variant (37)..(37): Xaa in position 37 is Ile or Val
  Variant (38)..(38): Xaa in position 38 is Ile or Leu
  Variant (39)..(39): Xaa in position 39 is Gly or Gln
  Variant (40)..(40): Xaa in position 40 is Ile or Val
  Variant (41)..(41): Xaa in position 41 is Met or Val
  Variant (42)..(42): Xaa in position 42 is Lys or Arg
  Variant (43)..(43): Xaa in position 43 is any amino acid
  Variant (44)..(44): Xaa in position 44 is Ala, Asp or Asn
  Variant (45)..(45): Xaa in position 45 is Asp, Gly or Asn
  Variant (47)..(47): Xaa in position 47 is any amino acid
  Variant (49)..(49): Xaa in position 49 is Ile, Leu or Val
  Variant (50)..(50): Xaa in position 50 is Ile or Val
  Variant (51)..(51): Xaa in position 51 is Ile or Leu
  Variant (54)..(54): Xaa in position 54 is Asp, Asn or Thr
  Variant (56)..(56): Xaa in position 56 is Ala, Glu, Asn or Ser
  Variant (57)..(57): Xaa in position 57 is Asp, Asn or Gln
  Variant (58)..(58): Xaa in position 58 is any amino acid
  Variant (59)..(59): Xaa in position 59 is Phe or Tyr
GGXXNXXXVXHCXTRLRXXXXXXXXXXXXXXXXIXXXXXXXXXXXQXQXXXGNXVXXXX

SEQ ID NO: 4054 - protein, 37 aa, Artificial sequence
  protein pattern
  Variant (2)..(13): Xaa in position 2 to 13 is any amino acid
  Variant (14)..(14): Xaa in position 14 is any or no amino acid
  Variant (16)..(16): Xaa in position 16 is any amino acid
  Variant (17)..(17): Xaa in position 17 is any or no amino acid
  Variant (21)..(21): Xaa in position 21 is Lys or Arg
  Variant (22)..(22): Xaa in position 22 is any amino acid
  Variant (23)..(23): Xaa in position 23 is Gly, Ile or Val
  Variant (24)..(25): Xaa in position 24 to 25 is any amino acid
  Variant (26)..(26): Xaa in position 26 is Ile or Leu
  Variant (27)..(27): Xaa in position 27 is Thr or Val
  Variant (28)..(28): Xaa in position 28 is Leu or Pro
  Variant (29)..(29): Xaa in position 29 is Ala, Gly or Ser
  Variant (30)..(30): Xaa in position 30 is Ile, Met or Val
  Variant (31)..(31): Xaa in position 31 is any amino acid
  Variant (33)..(33): Xaa in position 33 is Asn, Ser or Val
  Variant (35)..(35): Xaa in position 35 is Ala or Leu
  Variant (36)..(36): Xaa in position 36 is any amino acid
YXXXXXXXXXXXXXLXXYIEXXXXXXXXXXXKXFXXP

SEQ ID NO: 4055 - protein, 38 aa, Artificial sequence
  protein pattern
  Variant (2)..(5): Xaa in position 2 to 5 is any or no amino acid
  Variant (7)..(7): Xaa in position 7 is Ile or Leu
  Variant (8)..(8): Xaa in position 8 is Ala or Ser
  Variant (9)..(9): Xaa in position 9 is any amino acid
  Variant (11)..(11): Xaa in position 11 is Ala or Gly
  Variant (12)..(12): Xaa in position 12 is Ala or Ser
  Variant (13)..(13): Xaa in position 13 is Ser or Thr
  Variant (14)..(14): Xaa in position 14 is Leu or Met
  Variant (15)..(15): Xaa in position 15 is Ala or Cys
  Variant (18)..(18): Xaa in position 18 is any amino acid
  Variant (19)..(19): Xaa in position 19 is Lys or Arg
  Variant (20)..(20): Xaa in position 20 is Ser or Thr
  Variant (22)..(22): Xaa in position 22 is Asn or Gln
  Variant (23)..(23): Xaa in position 23 is any amino acid
  Variant (24)..(24): Xaa in position 24 is Glu, Asn or Gln
  Variant (25)..(25): Xaa in position 25 is any amino acid
  Variant (26)..(26): Xaa in position 26 is Lys or Arg
  Variant (28)..(28): Xaa in position 28 is any amino acid
  Variant (30)..(30): Xaa in position 30 is any amino acid
  Variant (31)..(31): Xaa in position 31 is Ala or Ser
  Variant (33)..(33): Xaa in position 33 is Ala or Gly
  Variant (34)..(34): Xaa in position 34 is any amino acid
  Variant (35)..(35): Xaa in position 35 is Ser or Thr
  Variant (37)..(37): Xaa in position 37 is Ile or Leu
  Variant (38)..(38): Xaa in position 38 is Leu, Met or Val
AXXXXNXXXGXXXXXVAXXXKXXXXXQXAXXAXXXAXX

SEQ ID NO: 4056 - protein, 59 aa, Artificial sequence
  protein pattern
  Variant (2)..(2): Xaa in position 2 is any or no amino acid
  Variant (4)..(5): Xaa in position 4 to 5 is any amino acid
  Variant (6)..(6): Xaa in position 6 is Phe, Ile or Leu
  Variant (7)..(7): Xaa in position 7 is Ile or Leu
  Variant (8)..(8): Xaa in position 8 is Asp, Asn or Thr
  Variant (9)..(9): Xaa in position 9 is any amino acid
  Variant (10)..(10): Xaa in position 10 is Phe or Ile
  Variant (11)..(11): Xaa in position 11 is Gly or Ser
  Variant (13)..(13): Xaa in position 13 is any or no amino acid
  Variant (15)..(16): Xaa in position 15 to 16 is any amino acid
  Variant (17)..(17): Xaa in position 17 is any or no amino acid
  Variant (19)..(19): Xaa in position 19 is Leu or Met
  Variant (21)..(21): Xaa in position 21 is Ile, Leu or Val
  Variant (22)..(22): Xaa in position 22 is Leu or Met
  Variant (23)..(23): Xaa in position 23 is Ile, Leu or Val
  Variant (25)..(25): Xaa in position 25 is any amino acid
  Variant (26)..(26): Xaa in position 26 is Gly or Ser
  Variant (28)..(28): Xaa in position 28 is Ala or Ser
  Variant (29)..(29): Xaa in position 29 is any amino acid
  Variant (30)..(30): Xaa in position 30 is Lys or Arg
  Variant (31)..(31): Xaa in position 31 is Phe or Leu
  Variant (32)..(32): Xaa in position 32 is any amino acid
  Variant (33)..(33): Xaa in position 33 is Cys, Thr or Val
  Variant (34)..(34): Xaa in position 34 is Asn or Thr
  Variant (35)..(36): Xaa in position 35 to 36 is any amino acid
  Variant (39)..(39): Xaa in position 39 is any amino acid
  Variant (40)..(40): Xaa in position 40 is Ala, Ser or Thr
  Variant (41)..(41): Xaa in position 41 is Ile or Val
  Variant (42)..(42): Xaa in position 42 is Ala or Gly
  Variant (44)..(44): Xaa in position 44 is Ala, Ile or Val
  Variant (46)..(46): Xaa in position 46 is Leu or Val
  Variant (49)..(49): Xaa in position 49 is Ala, Asn, Ser or Thr
  Variant (50)..(50): Xaa in position 50 is Phe or Leu
  Variant (51)..(51): Xaa in position 51 is Ala, Ile or Val
  Variant (52)..(52): Xaa in position 52 is Ala, Asp, Glu, Gln or Thr
  Variant (53)..(53): Xaa in position 53 is Leu or Met
  Variant (54)..(54): Xaa in position 54 is Leu, Met or Val
  Variant (55)..(55): Xaa in position 55 is Ala or Gln
  Variant (56)..(56): Xaa in position 56 is any amino acid
  Variant (57)..(57): Xaa in position 57 is Ala or Gly
  Variant (58)..(58): Xaa in position 58 is any amino acid
  Variant (59)..(59): Xaa in position 59 is Pro or Gln
SXTXXXXXXXXDXAXXXFXPXXXAXXAXXXXXXXXXLAXXXXGXLXHPXXXXXXXXXXX

SEQ ID NO: 4057 - protein, 54 aa, Artificial sequence
  protein pattern
  Variant (2)..(5): Xaa in position 2 to 5 is any amino acid
  Variant (8)..(8): Xaa in position 8 is Phe, Ile or Leu
  Variant (10)..(10): Xaa in position 10 is any or no amino acid
  Variant (12)..(28): Xaa in position 12 to 28 is any amino acid
  Variant (29)..(29): Xaa in position 29 is any or no amino acid
  Variant (32)..(32): Xaa in position 32 is any amino acid
  Variant (33)..(33): Xaa in position 33 is Leu, Pro or Val
  Variant (34)..(34): Xaa in position 34 is any amino acid
  Variant (35)..(35): Xaa in position 35 is Ile or Leu
  Variant (36)..(36): Xaa in position 36 is Leu or Met
  Variant (38)..(38): Xaa in position 38 is Ala or Gly
  Variant (39)..(39): Xaa in position 39 is Ile or Leu
  Variant (40)..(40): Xaa in position 40 is any amino acid
  Variant (42)..(42): Xaa in position 42 is Phe or Leu
  Variant (43)..(43): Xaa in position 43 is Ile, Leu or Val
  Variant (45)..(45): Xaa in position 45 is Ile or Met
  Variant (48)..(50): Xaa in position 48 to 50 is any amino acid
  Variant (51)..(51): Xaa in position 51 is Ala or Val
  Variant (52)..(52): Xaa in position 52 is Phe or Met
  Variant (53)..(53): Xaa in position 53 is Ala or Thr
AXXXXGPXGXIXXXXXXXXXXXXXXXXXXWLXXXXXGXXXPXXVXTGXXXXXXP

SEQ ID NO: 4058 - protein, 27 aa, Artificial sequence
  protein pattern
  Variant (2)..(2): Xaa in position 2 is any amino acid
  Variant (3)..(3): Xaa in position 3 is Ala or Thr
  Variant (4)..(4): Xaa in position 4 is Ile, Leu or Val
  Variant (5)..(7): Xaa in position 5 to 7 is any amino acid
  Variant (8)..(8): Xaa in position 8 is Ala, Gly, Asn, Ser or Thr
  Variant (9)..(9): Xaa in position 9 is Ala, Asp or Thr
  Variant (10)..(10): Xaa in position 10 is any amino acid
  Variant (11)..(11): Xaa in position 11 is Gly or Ile
  Variant (12)..(12): Xaa in position 12 is Leu or Val
  Variant (13)..(13): Xaa in position 13 is Asp or Glu
  Variant (14)..(14): Xaa in position 14 is Ala, Leu or Val
  Variant (17)..(18): Xaa in position 17 to 18 is any or no amino acid
  Variant (20)..(21): Xaa in position 20 to 21 is any or no amino acid
  Variant (23)..(23): Xaa in position 23 is Met or Val
  Variant (24)..(24): Xaa in position 24 is Glu, Asn or Ser
  Variant (25)..(25): Xaa in position 25 is Leu or Pro
  Variant (26)..(26): Xaa in position 26 is any amino acid
  Variant (27)..(27): Xaa in position 27 is Gly or Ile
KXXXXXXXXXXXXXLIXXGXXTXXXXX

SEQ ID NO: 4059 - DNA, 1479 bp, Escherichia coli K12
  CDS (1)..(1479): transl_table=11
atgtcgaaaaaatacatcatagggattgatggcggaagtcagagcacaaaagtggtgatgtacgatctggaaggtaacgtggtttgcgaaggcaaaggcttattacagccgatgcacacgccagatgccgatactgcagaacatcctgacgacgatttatgggcatcattatgttttgccggtcacgatttgatgagtcagtttgccgggaataaagaagatattgtcggtattggtctgggatccatccgttgctgccgtgcgttattgaaagccgatggcacgcctgctgcgccgttgattagctggcaggatgcacgcgttacacgcccttacgaacacactaaccctgacgtggcatatgtcacctctttttcgggttatctgacgcatcgcttaaccggcgagtttaaagacaatatcgccaactattttggtcagtggccggtggattataagagctgggcatggagcgaagatgctgcggtaatggataagtttaatatcccccgtcatatgctgtttgatgtgcaaatgcctggcaccgtcctcggacatatcacaccacaagccgcactggcgacacatttcccggcaggactgccggttgtttgtaccaccagtgataaaccggtagaagctctgggggccggattactggatgatgaaacggcggtaatttctcttggcacttacatcgcattgatgatgaacggcaaagcactgccgaaagatccagtagcgtactggccgattatgtcttctattccgcaaacattgctgtatgaaggttacggtattcgcaaaggcatgtggacggtgagctggctgcgcgacatgctaggcgagtcgttaattcaggatgccagggcgcaggatctttcaccggaagatttactcaacaaaaaagcttcttgtgtgccgccaggctgtaatggtctgatgacggtgctggactggctgaccaatccgtgggaaccgtacaaacgcgggattatgatcggctttgattccagcatggattacgcatggatatatcgttcgatactggaaagcgtggcgctgacgctgaagaacaattacgacaatatgtgtaatgaaatgaatcactttgcgaagcatgtgatcattactggcggcggttcgaacagcgatctgtttatgcagatttttgccgacgtgttcaaccttccggcacgacgtaacgccattaacggttgtgcaagcctgggggcagcgattaatacagcggtaggtctggggctatacccggattacgcaacggctgtcgataacatggttcgcgtgaaagatatctttataccgattgagagcaatgccaaacgctacgacgcgatgaataaaggcattttcaaagacctaaccaaacatactgatgtgatcctgaaaaaatcgtatgaagtgatgcatggggaattggggaatgtggattcgatccagagctggtcgaatgcgtaa

SEQ ID NO: 4060 - protein, 492 aa, Escherichia coli K12
MSKKYIIGIDGGSQSTKVVMYDLEGNVVCEGKGLLQPMHTPDADTAEHPDDDLWASLCFAGHDLMSQFAGNKEDIVGIGLGSIRCCRALLKADGTPAAPLISWQDARVTRPYEHTNPDVAYVTSFSGYLTHRLTGEFKDNIANYFGQWPVDYKSWAWSEDAAVMDKFNIPRHMLFDVQMPGTVLGHITPQAALATHFPAGLPVVCTTSDKPVEALGAGLLDDETAVISLGTYIALMMNGKALPKDPVAYWPIMSSIPQTLLYEGYGIRKGMWTVSWLRDMLGESLIQDARAQDLSPEDLLNKKASCVPPGCNGLMTVLDWLTNPWEPYKRGIMIGFDSSMDYAWIYRSILESVALTLKNNYDNMCNEMNHFAKHVIITGGGSNSDLFMQIFADVFNLPARRNAINGCASLGAAINTAVGLGLYPDYATAVDNMVRVKDIFIPIESNAKRYDAMNKGIFKDLTKHTDVILKKSYEVMHGELGNVDSIQSWSNA

SEQ ID NO: 4061 - DNA, 1560 bp, Pseudomonas aeruginosa PAO1
  CDS (1)..(1560): transl_table=11
atgaacgacaagaactatctgctggcgatcgacaatggcacccagagcgtgcgcgccctgctgttcgacctgcagggcaacctgctgggcaagggcaaggtggagctggaggcctactactcgaagcatccgggctgggccgaacaggaccccgagtactactgggcgatgctcggcgaggcctgtcggcggctctgggaccaggtggacatcgatcgcgggctcatccgcggggtgtcgctgaccacccagcgtggcacggtgatccacgtcgatgccgagggcaggccgttgcgtccggcgatcctctggctcgaccagcgccgggcggaggtccgcgagcgcatcagggggccttggggctggctgttcaagctggtcggcgccgagggcgcggtggagcatttccgcgcccaggccgaggtcaactgggtggcccaggagcagccggagatcgctgcgaagaccgacaaggtgttgctgctttccggctttctcagccaccgcctgaccggccgtttcgtcgactcggtggggtgctgcgttgcctacctgccgttcgactacaagcgcctgcgctgggccgcgccgcgcgactggaaatggcaggcgctggcggtacgccgcgagcagttgccggagctgttcaagccgggcgagcggctcggcgagatcagcgccgaggccagccggcacaccggcattccgcaaggcctgccgttgatcgccgcgggggccgacaaggcctgcgaggtgctcggcgcaggtgcgctggagcccaccatcgcctgcctctcctatggcaccacggcgaccatcaacaccactcgcgcccgctacctggaaaccgtgccgctgattccaccctatccggcggcgattcccgatcatttcaataccgaggtgatgatctatcgcggctactggatggtcagctggttcaagcgcgagttcggcttgcgcgagatgcagcaggcgcgcgagcagggggtcgagccggagcaactgttcgacgaactggtcaacggcgtgccgcccggctcgatgggcctgaccctgcaaccctactggtcgccgggaatccgcgaaccgggactggaggccaagggggcgatgatcggtttcggcgacgtgcatacccgggcgcacatctaccgggccatcctcgagggcctggcctatgccctgcgccagggcaaggagcgcatcgagaagcgttcgggcacgccgatcgtgcgcctgcgcgtggccggcggcggctcgcagagcgacgcggcgatgcagctcaccgccgacatcttcggcctgccggccgagcgcccgcatgtctacgaggcgtccggcctgggtgcggcgatcgactgcgcggtggggctcggcctctatccggacgtcgccagcgcggtggccgggatgacccgcgtcggccgggttttcctgccccaggcggaagcccggcagatctaccagcggctctatggcgaggtttacctgcgcatgtatcgccagttgcgcccgctctaccgcagcattcgcgagattaccggctaccctgcctga

SEQ ID NO: 4062 - protein, 519 aa, Pseudomonas aeruginosa PAO1
MNDKNYLLAIDNGTQSVRALLFDLQGNLLGKGKVELEAYYSKHPGWAEQDPEYYWAMLGEACRRLWDQVDIDRGLIRGVSLTTQRGTVIHVDAEGRPLRPAILWLDQRRAEVRERIRGPWGWLFKLVGAEGAVEHFRAQAEVNWVAQEQPEIAAKTDKVLLLSGFLSHRLTGRFVDSVGCCVAYLPFDYKRLRWAAPRDWKWQALAVRREQLPELFKPGERLGEISAEASRHTGIPQGLPLIAAGADKACEVLGAGALEPTIACLSYGTTATINTTRARYLETVPLIPPYPAAIPDHFNTEVMIYRGYWMVSWFKREFGLREMQQAREQGVEPEQLFDELVNGVPPGSMGLTLQPYWSPGIREPGLEAKGAMIGFGDVHTRAHIYRAILEGLAYALRQGKERIEKRSGTPIVRLRVAGGGSQSDAAMQLTADIFGLPAERPHVYEASGLGAAIDCAVGLGLYPDVASAVAGMTRVGRVFLPQAEARQIYQRLYGEVYLRMYRQLRPLYRSIREITGYPA

SEQ ID NO: 4063 - DNA, 1560 bp, Treponema denticola ATCC 35405
  CDS (1)..(1560): transl_table=11
atgaagaccatcttaacggtcgattgcggaacccaaagtttgcgtacaatgctctttgacttaaagggaaatatcttggcggcaaaccgcattccgtataagcctcatacaagccctcaacctgcatgggccgaacaagatgtaaaagtttactggaatgctctaaaagaaggccttgccggtcttaaagaaaaagagcctcttcactttaaaaatattgccggaatgggcatatcttcgatgagggctacaacggttcttgtcggcaaggacggaaatgtgctgcggcctgcaatcgtatggctcgacaacaggactgcacgaggcccctatcatcccaaccgccttatacgcacggcctttcatgctgcgggagtttatgattctataattacggttcaatcaaattgtaagataaactggtttagagaaaacgagcctgaaatatgggataaaacatggaagatgttttttctttcgggttggtttatttataagctgacaggaaagccttgcgatgtagtctcctcgatggtaggctacattccctttgtaaaccgaaaaagaacatgggcaaaaaaacattcgattgaagaaactctcatgcccttagaaaacgaaaaaaggcatgaccttatagaaagcggaaaaataatcggcactttaacggacgaagtttcaaaagaattgggactcccgcaaggcattccacttgttgcctgcggaagcgacaaggcttgcgaaaccataggggcaggcgtaatagattcttctatggcgtctttaagtttcggcacaacagccacaatcgaagtctgctcaaaaaaatactttgaatataaaaaactctttcctgcctactgcggcattctccccgatacatggctttcggaattggaaatcttccgaggctattggatgataagctggtttaaggaagagctgggcaaggaagaatgtaaggcagccgaatctaagggcatcatccctgaagttattttggataaacttttacatgcctcgcctccgggcggaaggggcctcatgctccagccctactggggagcaagtatctttgaccgctatgcaaaggggagcatcataggcttcggcgatgttcacggaagagaagacttatacagggctataatcgaaggccttgcctactccttgcgtgaaggtttggaattaatcgaagcaaaaggaaatttaagatgcgaaaaggttgcagcctcaggaggagcttctcaaagcgatgcaatctgccaaattaccgcagacattttaaaccgtccccttgtacggggaaaaacgccggaagcttcttccctaggagccgcaatcataaccgctgcaggaatcggagagcatgcttcaatcaaagatgccgtaaaggaaatggtcttatacgaaaaggaatttacaccgaaccctgaacaccgcaccctttatgacggccttttcagcgtatacaaaaaaatatatcctgcactaaaagatatttataaggatatacaaagagtaacaaattatcccgaaacaaaaaagatgaacgggtaa

SEQ ID NO: 4064 - protein, 519 aa, Treponema denticola ATCC 35405
MKTILTVDCGTQSLRTMLFDLKGNILAANRIPYKPHTSPQPAWAEQDVKVYWNALKEGLAGLKEKEPLHFKNIAGMGISSMRATTVLVGKDGNVLRPAIVWLDNRTARGPYHPNRLIRTAFHAAGVYDSIITVQSNCKINWFRENEPEIWDKTWKMFFLSGWFIYKLTGKPCDVVSSMVGYIPFVNRKRTWAKKHSIEETLMPLENEKRHDLIESGKIIGTLTDEVSKELGLPQGIPLVACGSDKACETIGAGVIDSSMASLSFGTTATIEVCSKKYFEYKKLFPAYCGILPDTWLSELEIFRGYWMISWFKEELGKEECKAAESKGIIPEVILDKLLHASPPGGRGLMLQPYWGASIFDRYAKGSIIGFGDVHGREDLYRAIIEGLAYSLREGLELIEAKGNLRCEKVAASGGASQSDAICQITADILNRPLVRGKTPEASSLGAAIITAAGIGEHASIKDAVKEMVLYEKEFTPNPEHRTLYDGLFSVYKKIYPALKDIYKDIQRVTNYPETKKMNG

SEQ ID NO: 4065 - DNA, 1575 bp, Pseudomonas fluorescens Pf-5
  CDS (1)..(1575): transl_table=11
atggataaccacaacaacaataagcaggactacctgctggccatcgacaacggcacccagagcgttcgtgcgctgctgttcgacctcaaaggcaacctgctgggcaagggcaaggtggagcttgaagcctatttttccagccggcccggctgggccgaacagcacccggactactactgggccaagctcggcgaagcctgccaactgctctggcagcagaccggcatcgaccgttcgcagatccgcggcgtgtccctgaccacccagcgcggcaccctgatcaacgtcgatgcccagggccgcgcgctgcgcccggcgatcctctggctcgaccagcgccaggccgaggtcgaaggcaagatcaaggggccctggggctggctgttcaagttgatcggtgccgaggccacggtggattattttcgcgcccaggccgaggccaactgggtggcacaggagcagcccgaggtgtgggccgccaccgacaagttcctgttgctctcgggctttctcacccatcgcctgaccggcaatttcgtcgactcggtgggctgctgcgtggcctacctgccgttcgactacaaacgcctgcgctgggccgcccccagtgactggaagtggcaggccctggcggtgcgccaggagcagttgccgaccctgctcaagcccggggaaaccctgggccggatcaccgccgaggccagccgccataccggcatacccgaaggcctgccgctgattgccgcgggtgccgacaaggcctgcgaagtgctgggctcgggcgtccaggactccaccaccgcctgcctgtcctacggcaccacggccaccatcaccaccacccgttcgcgctacctggaagtggtgcctttgataccgccgtacccggcggcggtgccggaccactacaactgcgaggtgatgatctttcgcggctactggatggtcagctggttcaagcagcagttcggcctgcgcgaagtgcagcaggcggcggagcaggggctggagccggagcagctgttcgacgccctggtccaggcggtgccgcccgggtccatgggcctgaccctgcaaccctactggtcgccgggcatccgcgagccgggcatggaagccaagggggcgatgatcggctttggcgacgtgcacacccgggcgcacatctaccgggccattctcgaaggcctggcttatgccctgcgccagggcatggagcgcatcgaaaagcgctccaggctgaagatcagccgcctgcgggtggccggcggcggctcccagagcgacgcggccatgcaactgacggcggacatcttcggcctgccggtggagcggccccatgtctatgaagcctcggggctgggtgcggtgatcgcctgcgcggtgggcctggggctgtacccggacttcgccacggccatcagcgccatgacccgggttggcgcagtgttcgagccccagccccaggcgcagcagatgtaccagcggctgtacagcgaggtctacctgcgcatgtaccgccagctcaagccgctgtaccagagcattcgcgagattaccggttacccggcttag

SEQ ID NO: 4066 - protein, 524 aa, Pseudomonas fluorescens Pf-5
MDNHNNNKQDYLLAIDNGTQSVRALLFDLKGNLLGKGKVELEAYFSSRPGWAEQHPDYYWAKLGEACQLLWQQTGIDRSQIRGVSLTTQRGTLINVDAQGRALRPAILWLDQRQAEVEGKIKGPWGWLFKLIGAEATVDYFRAQAEANWVAQEQPEVWAATDKFLLLSGFLTHRLTGNFVDSVGCCVAYLPFDYKRLRWAAPSDWKWQALAVRQEQLPTLLKPGETLGRITAEASRHTGIPEGLPLIAAGADKACEVLGSGVQDSTTACLSYGTTATITTTRSRYLEVVPLIPPYPAAVPDHYNCEVMIFRGYWMVSWFKQQFGLREVQQAAEQGLEPEQLFDALVQAVPPGSMGLTLQPYWSPGIREPGMEAKGAMIGFGDVHTRAHIYRAILEGLAYALRQGMERIEKRSRLKISRLRVAGGGSQSDAAMQLTADIFGLPVERPHVYEASGLGAVIACAVGLGLYPDFATAISAMTRVGAVFEPQPQAQQMYQRLYSEVYLRMYRQLKPLYQSIREITGYPA

SEQ ID NO: 4067 - DNA, 1575 bp, marine gamma proteobacterium HTCC2207
  CDS (1)..(1575): transl_table=11
atggaaaaagtagcagacaagcaagagtatttactcgctatagataacggcacccagagtgttcgcgccatgatctttgatcgagatggtcaaataattgctaagagcaaagttgatatcgaaccttacttttccaccgagccaggctgggccgaacagcacgccgactatttttggcaagccctctgccaagcttgtcatcaactctggagtcagctggagattccccgtgaatcgattaaagctatgtcagtcaccacccagcgcgccactgtggttcctatgggtgccgatggccaaccgctgcgcgccgcgataagttggctcgatcaacgtcagatccatagcgaacccgagcttgggacactggagtcgctattaatgcgcgccgtgggtgccaaagtggcggtagacacttttcacactcaggccgaagccaactggattgcgcagcatgaaccggaagtctggggccaagtggacaaactgctgctgctctctggctatcagaattacaaactcactggcgattacaaagattctatcgccagccaagtgggatttgtgccctttgactttaaacagctgcaatgggctgaggccaaagactggaaatggcgggcgattccctccataaagcgggatatgctgccagaactggttgaggccggtggcctactgggtcatatcagcccggtagctgcagcggagacgggtataccccaagggctacgccttatagcctgtggttcagacaaagcctgcgaagtgcttggcactggctgtctggatagcaatactggcagccttagctacggcaccaccgccacttttaatatcaccagcgacaaatatcttgaagcgatcccctatcatcccgcctatcccggtgtaattcctggcagttttaatattgaaatgatggtgccgcgtggctattggatggtaagctggtttaaacagcagtttgggcttgaggaacagtccgccgccgagcaacagggcgtaactgtggaatccctattcgatgatttattgcggcaggtgcccgcaggttctgcgggactcactctgcagccctactggggcgcaggtgcagataacgaaggtccagaggccaagggcgccattatcggctttggcgatgtacacacccgcgcgcatctctatcgcgccattatcgaggggctcacctacgccctccgtgccggtaaagagagagtggaaaagcgtagcggccagccgatcactaaactactggtctccggcggcggctctcagagcgatcagattatgcagatcaccgcagatatatttggcatgccggtgcagcgaccccacacctacgagacttcagctctgggtgccgctatagcggccgcagtaggcagtggaatctacccagattttgccagtgcagcggccaatatgacccaccctggtgaccgttttgagcctatagaagccaatcagaaaatctacgctcaactctatagtcaggtctatcgaaaaatgtataaagggcttaaacccagctatgaggcgatcaggaaaatcaccggttatccgagctaa

SEQ ID NO: 4068 - protein, 524 aa, marine gamma proteobacterium HTCC2207
MEKVADKQEYLLAIDNGTQSVRAMIFDRDGQIIAKSKVDIEPYFSTEPGWAEQHADYFWQALCQACHQLWSQLEIPRESIKAMSVTTQRATVVPMGADGQPLRAAISWLDQRQIHSEPELGTLESLLMRAVGAKVAVDTFHTQAEANWIAQHEPEVWGQVDKLLLLSGYQNYKLTGDYKDSIASQVGFVPFDFKQLQWAEAKDWKWRAIPSIKRDMLPELVEAGGLLGHISPVAAAETGIPQGLRLIACGSDKACEVLGTGCLDSNTGSLSYGTTATFNITSDKYLEAIPYHPAYPGVIPGSFNIEMMVPRGYWMVSWFKQQFGLEEQSAAEQQGVTVESLFDDLLRQVPAGSAGLTLQPYWGAGADNEGPEAKGAIIGFGDVHTRAHLYRAIIEGLTYALRAGKERVEKRSGQPITKLLVSGGGSQSDQIMQITADIFGMPVQRPHTYETSALGAAIAAAVGSGIYPDFASAAANMTHPGDRFEPIEANQKIYAQLYSQVYRKMYKGLKPSYEAIRKITGYPS

SEQ ID NO: 4069 - DNA, 1557 bp, Oceanobacter sp. RED65
  CDS (1)..(1557): transl_table=11
atgcataaacaaaccatcctgaccattgataatggcactcagagcgtacgtgctttgttattcagtttaaatggcgatctgctggccaagggtaaagtagaaatagagccttatttttcaaagcaccctggctgggctgagcaagacccagattattattggaaaagtgcaggagaagcctgtaaggcactttggagtagtactgactattcggcagacacagttgttggcttaggtgttacgacccagcgtggaacagtggtcaatgtggacgaatatggaaaaccattgcggccagcaattatttggttagatcagcgtcacgcagaaattgaaaagcccattaaaggcatttggggcgttttatttaaagtgttaggtttgcgcaatgttgttgagggctttcagcgcaaagcgcaagccgcttggatagagcaaaatcagccggatgtttggcgcaatacgcataagtttttgttgctaagtggctatctgaattatcgtttgacgggacaatacaaagactccgtcggaagtacagtagggtacttgccattcgactataaaaagcatgcgtgggcaggtcgtcatgattggaagtggcaggtggccaatgtccgaaaagaaatgttaccggagctagtgaagccgggtgaggttgttggagagttggagcctcacgcagctgaacatttgggattgaaagcgggtgtccccgtcgtcgcttgtgcgtctgataaagcatgcgaagtcataggtagtggtggaaatgattcgcatattgcttgtttaagctacggcacaacggcaaccatcaataccaccactaagcgttacattgagccagtcaaatttattccaccttaccctgcagccattcctgagtcatataatacggaagttatgatttatcgtggtttttggatggtcagttggtttaaaaatcagtttggattgcgcgagcgtcaaattgccgaagagcgaggtgtgccgccggagatgttgttcgatgagctggtggattcagtgcctgctggttctatggggttaatgttgcaaccgtattggtcgcctggtactcgcattcctggtccggaagcaaagggctctgttatcggttttggagacgttcatacaagagcacacctgtaccgttcaatccttgaagggttggcttatggcttgcgtgagggtaaagagcgtatcgagaaacgtagcggaacgcgtattactaagttaagggttagcggtggtggtagtcaaagtgatgcggcgatgcaattgacagcagatatttttaatttgcctgcggagcgaccaagtacttatgaaacgtctggattgggtgctgcaatcaatgttgctgtcgggttgggtttttacgaaaactatgatgttgctatcgataaaatgacttcagtgggcgacattttttatccagatttgaacacgagtcgtttatataatgaactttataaaagtgtttatcttaaaatgtataagcgcttgcagcccttatacaagcaaataaaacgcataacaggttatccgcaatag

SEQ ID NO: 4070 - protein, 518 aa, Oceanobacter sp. RED65
MHKQTILTIDNGTQSVRALLFSLNGDLLAKGKVEIEPYFSKHPGWAEQDPDYYWKSAGEACKALWSSTDYSADTVVGLGVTTQRGTVVNVDEYGKPLRPAIIWLDQRHAEIEKPIKGIWGVLFKVLGLRNVVEGFQRKAQAAWIEQNQPDVWRNTHKFLLLSGYLNYRLTGQYKDSVGSTVGYLPFDYKKHAWAGRHDWKWQVANVRKEMLPELVKPGEVVGELEPHAAEHLGLKAGVPVVACASDKACEVIGSGGNDSHIACLSYGTTATINTTTKRYIEPVKFIPPYPAAIPESYNTEVMIYRGFWMVSWFKNQFGLRERQIAEERGVPPEMLFDELVDSVPAGSMGLMLQPYWSPGTRIPGPEAKGSVIGFGDVHTRAHLYRSILEGLAYGLREGKERIEKRSGTRITKLRVSGGGSQSDAAMQLTADIFNLPAERPSTYETSGLGAAINVAVGLGFYENYDVAIDKMTSVGDIFYPDLNTSRLYNELYKSVYLKMYKRLQPLYKQIKRITGYPQ

SEQ ID NO: 4071 - DNA, 24 bp, Artificial sequence
  primer
atgtcgaaaaaatacatcataggg

SEQ ID NO: 4072 - DNA, 22 bp, Artificial sequence
  primer
ttacgcattcgaccagctctgg

SEQ ID NO: 4073 - protein, 529 aa, Artificial sequence
  consensus sequence
  Variant (2)..(4): Xaa in position 2 to 4 is any amino acid
  Variant (5)..(12): Xaa in position 5 to 12 is any or no amino acid
  Variant (14)..(14): Xaa in position 14 is any amino acid
  Variant (17)..(17): Xaa in position 17 is any amino acid
  Variant (22)..(22): Xaa in position 22 is any amino acid
  Variant (24)..(26): Xaa in position 24 to 26 is any amino acid
  Variant (30)..(30): Xaa in position 30 is any amino acid
  Variant (32)..(37): Xaa in position 32 to 37 is any amino acid
  Variant (39)..(45): Xaa in position 39 to 45 is any amino acid
  Variant (47)..(48): Xaa in position 47 to 48 is any amino acid
  Variant (50)..(50): Xaa in position 50 is any amino acid
  Variant (55)..(59): Xaa in position 55 to 59 is any amino acid
  Variant (61)..(62): Xaa in position 61 to 62 is any amino acid
  Variant (64)..(65): Xaa in position 64 to 65 is any amino acid
  Variant (67)..(69): Xaa in position 67 to 69 is any amino acid
  Variant (71)..(80): Xaa in position 71 to 80 is any amino acid
  Variant (82)..(82): Xaa in position 82 is any amino acid
  Variant (84)..(89): Xaa in position 84 to 89 is any amino acid
  Variant (91)..(91): Xaa in position 91 is any amino acid
  Variant (93)..(99): Xaa in position 93 to 99 is any amino acid
  Variant (101)..(102): Xaa in position 101 to 102 is any amino acid
  Variant (108)..(108): Xaa in position 108 is any amino acid
  Variant (112)..(112): Xaa in position 112 is any amino acid
  Variant (114)..(122): Xaa in position 114 to 122 is any amino acid
  Variant (123)..(132): Xaa in position 123 to 132 is any or no amino acid
  Variant (134)..(148): Xaa in position 134 to 148 is any amino acid
  Variant (150)..(154): Xaa in position 150 to 154 is any amino acid
  Variant (156)..(159): Xaa in position 156 to 159 is any amino acid
  Variant (160)..(162): Xaa in position 160 to 162 is any or no amino acid
  Variant (164)..(166): Xaa in position 164 to 166 is any amino acid
  Variant (170)..(174): Xaa in position 170 to 174 is any amino acid
  Variant (178)..(180): Xaa in position 178 to 180 is any amino acid
  Variant (182)..(186): Xaa in position 182 to 186 is any amino acid
  Variant (188)..(190): Xaa in position 188 to 190 is any amino acid
  Variant (194)..(194): Xaa in position 194 is any amino acid
  Variant (196)..(198): Xaa in position 196 to 198 is any amino acid
  Variant (201)..(215): Xaa in position 201 to 215 is any amino acid
  Variant (216)..(217): Xaa in position 216 to 217 is any or no amino acid
  Variant (219)..(220): Xaa in position 219 to 220 is any amino acid
  Variant (222)..(224): Xaa in position 222 to 224 is any amino acid
  Variant (226)..(228): Xaa in position 226 to 228 is any amino acid
  Variant (230)..(234): Xaa in position 230 to 234 is any amino acid
  Variant (236)..(239): Xaa in position 236 to 239 is any amino acid
  Variant (241)..(241): Xaa in position 241 is any amino acid
  Variant (243)..(243): Xaa in position 243 is any amino acid
  Variant (245)..(245): Xaa in position 245 is any amino acid
  Variant (247)..(248): Xaa in position 247 to 248 is any amino acid
  Variant (250)..(252): Xaa in position 250 to 252 is any amino acid
  Variant (258)..(259): Xaa in position 258 to 259 is any amino acid
  Variant (261)..(261): Xaa in position 261 is any amino acid
  Variant (263)..(264): Xaa in position 263 to 264 is any amino acid
  Variant (266)..(268): Xaa in position 266 to 268 is any amino acid
  Variant (270)..(270): Xaa in position 270 is any amino acid
  Variant (273)..(273): Xaa in position 273 is any amino acid
  Variant (279)..(285): Xaa in position 279 to 285 is any amino acid
  Variant (287)..(287): Xaa in position 287 is any amino acid
  Variant (288)..(288): Xaa in position 288 is any or no amino acid
  Variant (290)..(294): Xaa in position 290 to 294 is any amino acid
  Variant (296)..(296): Xaa in position 296 is any amino acid
  Variant (298)..(301): Xaa in position 298 to 301 is any amino acid
  Variant (303)..(307): Xaa in position 303 to 307 is any amino acid
  Variant (309)..(310): Xaa in position 309 to 310 is any amino acid
  Variant (312)..(312): Xaa in position 312 is any amino acid
  Variant (315)..(315): Xaa in position 315 is any amino acid
  Variant (323)..(325): Xaa in position 323 to 325 is any amino acid
  Variant (327)..(328): Xaa in position 327 to 328 is any amino acid
  Variant (330)..(332): Xaa in position 330 to 332 is any amino acid
  Variant (334)..(336): Xaa in position 334 to 336 is any amino acid
  Variant (338)..(339): Xaa in position 338 to 339 is any amino acid
  Variant (342)..(342): Xaa in position 342 is any amino acid
  Variant (344)..(344): Xaa in position 344 is any amino acid
  Variant (346)..(346): Xaa in position 346 is any amino acid
  Variant (348)..(350): Xaa in position 348 to 350 is any amino acid
  Variant (353)..(353): Xaa in position 353 is any amino acid
  Variant (355)..(356): Xaa in position 355 to 356 is any amino acid
  Variant (359)..(359): Xaa in position 359 is any amino acid
  Variant (365)..(372): Xaa in position 365 to 372 is any amino acid
  Variant (373)..(374): Xaa in position 373 to 374 is any or no amino acid
  Variant (378)..(379): Xaa in position 378 to 379 is any amino acid
  Variant (387)..(387): Xaa in position 387 is any amino acid
  Variant (390)..(391): Xaa in position 390 to 391 is any amino acid
  Variant (394)..(394): Xaa in position 394 is any amino acid
  Variant (396)..(396): Xaa in position 396 is any amino acid
  Variant (402)..(402): Xaa in position 402 is any amino acid
  Variant (405)..(405): Xaa in position 405 is any amino acid
  Variant (407)..(407): Xaa in position 407 is any amino acid
  Variant (409)..(410): Xaa in position 409 to 410 is any amino acid
  Variant (412)..(424): Xaa in position 412 to 424 is any amino acid
  Variant (432)..(433): Xaa in position 432 to 433 is any amino acid
  Variant (436)..(436): Xaa in position 436 is any amino acid
  Variant (442)..(443): Xaa in position 442 to 443 is any amino acid
  Variant (445)..(446): Xaa in position 445 to 446 is any amino acid
  Variant (448)..(451): Xaa in position 448 to 451 is any amino acid
  Variant (453)..(453): Xaa in position 453 is any amino acid
  Variant (455)..(455): Xaa in position 455 is any amino acid
  Variant (461)..(462): Xaa in position 461 to 462 is any amino acid
  Variant (466)..(466): Xaa in position 466 is any amino acid
  Variant (468)..(468): Xaa in position 468 is any amino acid
  Variant (470)..(474): Xaa in position 470 to 474 is any amino acid
  Variant (476)..(478): Xaa in position 476 to 478 is any amino acid
  Variant (480)..(485): Xaa in position 480 to 485 is any amino acid
  Variant (487)..(487): Xaa in position 487 is any amino acid
  Variant (489)..(495): Xaa in position 489 to 495 is any amino acid
  Variant (497)..(498): Xaa in position 497 to 498 is any amino acid
  Variant (500)..(501): Xaa in position 500 to 501 is any amino acid
  Variant (502)..(502): Xaa in position 502 is any or no amino acid
  Variant (505)..(507): Xaa in position 505 to 507 is any amino acid
  Variant (509)..(510): Xaa in position 509 to 510 is any amino acid
  Variant (511)..(514): Xaa in position 511 to 514 is any or no amino acid
  Variant (516)..(518): Xaa in position 516 to 518 is any amino acid
  Variant (520)..(521): Xaa in position 520 to 521 is any amino acid
  Variant (523)..(525): Xaa in position 523 to 525 is any amino acid
MXXXXXXXXXXXLXIDXGTQSXRXXXFDLXGXXXXXXKXXXXXXXSXXPXWAEQXXXXXWXXLXXAXXXLXXXXXXXXXXIXGXXXXXXRXTXXXXXXXGXXLRPAIXWLDXRXXXXXXXXXXXXXXXXXXXGXXXXXXXXXXXXXXXWXXXXXPXXXXXXXKXXXLSGXXXXXLTGXXXDXXXXXVXXXPFDXKXXXWAXXXXXXXXXXXXXXXXXLXXLXXXGXXXGXXXXXAXXXXGXPXGXPXXAXXXDKACEXXGXGXXDXXXAXLSXGTTATXXXXXXXYXXEXXXXXPXYXXXXPXXXXXEXXIXRGXWMVSWFKXXXGXXEXXXAXXXGXXPEXLXDXLXXXVPXGXXGLXLQPYWXXXXXXXXXXAKGXXIGFGDVHXRAXXYRXIXEGLAYXLRXGXEXXEXXXXXXXXXXXXXGGGSQSDXXMQXTADIFXXPXXRXXXXEXSXLGAAIXXAVGXGXYXXXXXAXXXMXXXXXXFXPXXXXXXXYXXLXXXVYXXXYXXXXXXLXXXYXXIXXXTGYP

SEQ ID NO: 4074 - protein, 14 aa, Artificial sequence
  protein pattern
  Variant (3)..(3): Xaa in position 3 is Phe or Tyr
  Variant (4)..(4): Xaa in position 4 is any amino acid
  Variant (5)..(5): Xaa in position 5 is Asn, Ser or Thr
  Variant (6)..(6): Xaa in position 6 is His or Tyr
  Variant (7)..(7): Xaa in position 7 is Lys or Arg
  Variant (11)..(11): Xaa in position 11 is Asp, Glu, Asn, Gln or Arg
  Variant (12)..(12): Xaa in position 12 is Phe or Tyr
  Variant (13)..(13): Xaa in position 13 is any amino acid
SGXXXXXLTGXXXD

SEQ ID NO: 4075 - protein, 12 aa, Artificial sequence
  protein pattern
  Variant (6)..(6): Xaa in position 6 is any amino acid
  Variant (7)..(7): Xaa in position 7 is Ala, Cys, Thr or Val
  Variant (9)..(9): Xaa in position 9 is Ala or Val
  Variant (11)..(11): Xaa in position 11 is any amino acid
LGAAIXXAXGXG

SEQ ID NO: 4076 - DNA, 783 bp, Escherichia coli K12
  CDS (1)..(783): transl_table=11
atgctggaaatactctatcaggatgaatggctggttgcggtaaataaaccctccggctggctggttcaccgcagctggctggatcgcgacgagaaagtagtggtcatgcaaaccgtgcgtgaccagataggccagcatgtttttactgctcatcgtctggaccgacccacttctggtgtgttgttgatgggattatccagcgaggccggacggctgctggcacaacagtttgaacagcaccaaatccagaaacgttaccatgcgattgtgcgcggctggttgatggaagaagcggtgctggattatccactggtggaagaactggacaaaatcgctgataaatttgcccgcgaagataaaggcccgcagccagcagtgacgcattatcgcggtctggcgaccgtagaaatgccggtagcgaccggacgttacccgaccacgcgctacggcctggtggaactggagccgaaaaccggacgcaaacatcagcttcgccgacatcttgcccatttgcgtcatccgattattggcgatagcaaacatggcgatttacgccagaatcgcagcggtgctgagcattttggcctccagcggttaatgctacatgccagtcagttgtcattgacgcatccttttactggcgagccgctgactattcacgcgggcctggacgacacctggatgcaggcgttatcacaatttggctggcgcggtctgcttcctgaaaatgaaagggttgagttcagtgcgccatcgggtcaggatggagagataagttcctaa

SEQ ID NO: 4077 - protein, 260 aa, Escherichia coli K12
MLEILYQDEWLVAVNKPSGWLVHRSWLDRDEKVVVMQTVRDQIGQHVFTAHRLDRPTSGVLLMGLSSEAGRLLAQQFEQHQIQKRYHAIVRGWLMEEAVLDYPLVEELDKIADKFAREDKGPQPAVTHYRGLATVEMPVATGRYPTTRYGLVELEPKTGRKHQLRRHLAHLRHPIIGDSKHGDLRQNRSGAEHFGLQRLMLHASQLSLTHPFTGEPLTIHAGLDDTWMQALSQFGWRGLLPENERVEFSAPSGQDGEISS

SEQ ID NO: 4078 - DNA, 738 bp, Xanthomonas campestris pv. campestris str. ATCC 33913
  CDS (1)..(738): transl_table=11
gtgagcacatcccctgatccattgcagattctctaccaggacgccgtcctggccgttgtcgacaaacccgcgggcctgatggtccacgacagcaagctggcgcgcggggaagacgattttcttgcggaccgtctgcgcgtgcagctgggccgcccgatctttctggtgcaccggctcgaccgcgccaccagcggctgcctgttgctggccttcgatcgcgacaccgccagcgcgctaggcaaggccttgatggccggcgaggtagagaaggattatctggccatctgccgcggctggcccgccgaggagcgcttcatcgtcgaccacgatctggatggcggcccgggcaaaccgatcaagaagccggcggtgacccacttccagcgcctggccaccggcgagctggagatcccgtccaccggctttgccacctcgcgctatgccttgctgcgctgccagccgcagaccgggcggtttcggcagatccgccggcatctcaagcacctgtcgcatcacatgatcggcgacaccagccatggcgatggccgccacaaccgcagcttccgcatgctcggcatccaccgcatgttgctgcatgccgaacgcctgggcttcccgcatcctgccgatggcaggcgcatcagcgtggtggcgccgctggatgtggagtttgcgaaagcgtgtgcgttgttcgggtgggacgtggcggggttgcaaggcacgacacacgtgcagtga

SEQ ID NO: 4079 - protein, 245 aa, Xanthomonas campestris pv. campestris str. ATCC 33913
MSTSPDPLQILYQDAVLAVVDKPAGLMVHDSKLARGEDDFLADRLRVQLGRPIFLVHRLDRATSGCLLLAFDRDTASALGKALMAGEVEKDYLAICRGWPAEERFIVDHDLDGGPGKPIKKPAVTHFQRLATGELEIPSTGFATSRYALLRCQPQTGRFRQIRRHLKHLSHHMIGDTSHGDGRHNRSFRMLGIHRMLLHAERLGFPHPADGRRISVVAPLDVEFAKACALFGWDVAGLQGTTHVQ

SEQ ID NO: 4080 - DNA, 735 bp, Xanthomonas axonopodis pv. citri str. 306
  CDS (1)..(735): transl_table=11
gtgagcatatcccccaaacatctgcagattctctaccaggacgatgtcctggccgtcgtcgacaaacccgccggcctgatggtccatgacagcaagctggcgcgtggagaggacgacttcctggccgaccgcctgcgcgagcagctgggcaagccgatctttttggtgcaccggctcgaccgcgccaccagcggctgcctgctgttggccttcgatcgcgacagcgccagtgcgctgggcaaggctttgatggccggcgaggtggagaaacagtatctgaccgtctgtcgcggctggccggccgaggagcgcttcatcgtcgaccatgacctggacggcggtccgggcaagccggtcaagaagccggcagtgacgcatttccagcgtctggccaccggcgagctggagattccttccaccgggttcaccacctcgcgctacgcactgctgcgctgtcagccgcaaaccggccgcttccggcagattcgccggcatatgaagcatctgtcgcatcacatggtcggcgacaccagccacggcgacggccgccacaaccgcagtttccgcatgctcggcatccaccgcatgttgctgcacgccgaacgcctggaatttccgcatccggccgatggcaggcgcatcggcgtcaccgcgccgctggatgtcgaattttccaaggcctgcgcgttgtttgggtgggagatggcggggttgggagtcatgcagacggcgtga

SEQ ID NO: 4081 - protein, 244 aa, Xanthomonas axonopodis pv. citri str. 306
MSISPKHLQILYQDDVLAVVDKPAGLMVHDSKLARGEDDFLADRLREQLGKPIFLVHRLDRATSGCLLLAFDRDSASALGKALMAGEVEKQYLTVCRGWPAEERFIVDHDLDGGPGKPVKKPAVTHFQRLATGELEIPSTGFTTSRYALLRCQPQTGRFRQIRRHMKHLSHHMVGDTSHGDGRHNRSFRMLGIHRMLLHAERLEFPHPADGRRIGVTAPLDVEFSKACALFGWEMAGLGVMQTA

SEQ ID NO: 4082 - DNA, 750 bp, Chromobacterium violaceum ATCC 12472
  CDS (1)..(750): transl_table=11
atgctgcaaatactgtatcgagacgatctgctgatcgccatccacaagccgtccaacctgctggtgcaccgcaccgagctggaccgccacgaaacccgtttcgccatccagatgctgcgcgaccagatcggccggcgcgtctatccggtgcaccggctggacaagggcacctcgggcgcattgctgttcgcgctggacaaggacgccggccgcgaattgtccttgcagttcgaacgccagcaggtgtacaagcgctacctcgccgtggtccgcggccaccccgacgacgcgggccatatcgaccatccgctcagccgccgcccggacgacctggaatggataggcgagaaagtggaaaccgcgccgcagccggccgtcaccgattaccggacgctggcgcgcgtagagttgcccatcatggtggaacgctatcccaccagccgctacagcctgctggagctggaaccgcagaccggccgcaagcaccaattgcgccgccatctgaaacacatcgcccaccccatcatcggcgactccacccatggcaagggccgccacaaccggatgttcgcagaccagctgggctgccggcgcatgctgctggcctgcgtggaaatgcggctgacccaccccattaccggccagcccctgctgctgaactgcccgctggagagcaacttctccgcgctgctggcgcgcctgggctggaccgacgccgcgcgcgatgccggaatcgaattaaccatctga

SEQ ID NO: 4083 - protein, 249 aa, Chromobacterium violaceum ATCC 12472
MLQILYRDDLLIAIHKPSNLLVHRTELDRHETRFAIQMLRDQIGRRVYPVHRLDKGTSGALLFALDKDAGRELSLQFERQQVYKRYLAVVRGHPDDAGHIDHPLSRRPDDLEWIGEKVETAPQPAVTDYRTLARVELPIMVERYPTSRYSLLELEPQTGRKHQLRRHLKHIAHPIIGDSTHGKGRHNRMFADQLGCRRMLLACVEMRLTHPITGQPLLLNCPLESNFSALLARLGWTDAARDAGIELTI

SEQ ID NO: 4084 - DNA, 771 bp, Photorhabdus luminescens subsp. laumondii TTO1
  CDS (1)..(771): transl_table=11
atgttggaagtgttataccaggatgatcatattgtggcagttaacaagccagcggggtggttagttcatcgtagctggttggcgcgtcatgaaacggtctttgttatgcagacattgcgtgatcagattggtcagcatgtttttccggtacaccgtctggatagaccaacgtctggcgtattgctgatggcgctttccagcgatgttgctcgccagctctctcaacagtttgaacatcatcaattacaaaaaacttatcatgctgtcgtgcgcggttatgtgttggaatcagctattattgattacgctttggttgaggagctggataagatcgccgataaatttgcagagggtgataaagaggcccaatcctgcgtgacttattaccgaccactggcaacggtggagtgtccggtagaaataggtcgttatcctacatcacgttttagtttgttggaattgacaccgaaaacaggtcgaaaacatcaattaagacgccatatggcacatattcgtcaccccattattggtgatacaacacatggcgatttacggcaaaacagaggcgttgctgttcattatcaaaccagccggttaatgcttcatgccagttatcttgagttggatcatcctgttacgggggagaaattatcgcttacggcaaaatgggatgcatcatggcagcatttaatacaacaatttggctggcaaggtattatccccgatttggaatatgatgaagcgagtaagatagaaaattttatagattag

SEQ ID NO: 4085 - protein, 256 aa, Photorhabdus luminescens subsp. laumondii TTO1
MLEVLYQDDHIVAVNKPAGWLVHRSWLARHETVFVMQTLRDQIGQHVFPVHRLDRPTSGVLLMALSSDVARQLSQQFEHHQLQKTYHAVVRGYVLESAIIDYALVEELDKIADKFAEGDKEAQSCVTYYRPLATVECPVEIGRYPTSRFSLLELTPKTGRKHQLRRHMAHIRHPIIGDTTHGDLRQNRGVAVHYQTSRLMLHASYLELDHPVTGEKLSLTAKWDASWQHLIQQFGWQGIIPDLEYDEASKIENFID

SEQ ID NO: 4086 - DNA, 738 bp, Vibrio vulnificus YJ016
  CDS (1)..(738): transl_table=11
atgctggagattgtgtatcaggatgaatattttgtggccgtgaataaaccggcgggcatgcttgtgcatcgcagttggttggataaacatgaaacgcagtttgtaatgcagacattgcgtgatcaaattggtcagcatgtttttccgcttcatcgcctggatcgtccaacctccggggtgttggtttttgcactgtcctctgaagtcgcatctcaggttatgcccatgtttgccggacaggagatgagtaaaacctaccatgcgattgtgcgtggctggatagaggaagaaggggagctagactacgcgttgaaggttgaactggataagattgcggacaagtttgcttcgcaagagaaggaagcacaagacgcgattacgctctacaaaccactggccaaagtggaagtgccttattcaacgggcaagttcccaacgacccgctatgggttaatggagctcaagccgaaaaccggtcgtaagcatcaacttcgtcgccatatggcgcatcttcgtcatccgatcgtgggggataccacccatggtgatggcaaacacaacaagctgttccgtgaagagtttgaagcaccgaggttgctgctgcacgcctctgaactcagatttgtccatccgtatacacagcaagaagtggtgattcgagcagaggttgataaagtttggcaacagttgtttgagcgttttgagtggccaagcaccttgcttaccgccagtcactga

SEQ ID NO: 4087 - protein, 245 aa, Vibrio vulnificus YJ016
MLEIVYQDEYFVAVNKPAGMLVHRSWLDKHETQFVMQTLRDQIGQHVFPLHRLDRPTSGVLVFALSSEVASQVMPMFAGQEMSKTYHAIVRGWIEEEGELDYALKVELDKIADKFASQEKEAQDAITLYKPLAKVEVPYSTGKFPTTRYGLMELKPKTGRKHQLRRHMAHLRHPIVGDTTHGDGKHNKLFREEFEAPRLLLHASELRFVHPYTQQEVVIRAEVDKVWQQLFERFEWPSTLLTASH

SEQ ID NO: 4088 - DNA, 753 bp, Geobacter sulfurreducens PCA
  CDS (1)..(753): transl_table=11
gtggagatcctctttcgcgaccaatacctggtggccgtgcacaagccggccgggctcctggtgcaccgaagccccatcgaccgccatgaaacccgtttcgccctccaggaggtgcgcgacctcctcggccgccgggtctatcccgttcatcgcctcgacaagcccacctccggcgtcctggtgttcgccctggacccggcaacggcccgttcgctcggcgatgccttcgccggcggccgggtgaacaagacctacctggcggtcacccgggggattgtcccgccggagggaatcattgaccactccctgagcgaagaaccggaccggctggacggtgcgaagagctcaccagcagcgcctcagccggcggtcaccgttttccggcgactcgcggaagcagaactgcccgtggtaacggggcgctatgcctcctcccgctactcacttgcggaactaacaccccacaccggccgccgccaccagctgcggcgccacatgaagcacatcttccacccgatcatcggcgacaccacctacggcgaagggcgccacaaccgcttcttccgggaagagttcggctgcggccgtctcctgctccatgccgcggagctttcgctgccgcatcccgcaagcggagaaaccctgaccatcgccgcaccgccggaccgggagctcgcccgcctcctggatcgcctcggctggctggctgcggcgaccggtcgcgggcggccgggcatgcctgcgccgccttga

SEQ ID NO: 4089 - protein, 250 aa, Geobacter sulfurreducens PCA
MEILFRDQYLVAVHKPAGLLVHRSPIDRHETRFALQEVRDLLGRRVYPVHRLDKPTSGVLVFALDPATARSLGDAFAGGRVNKTYLAVTRGIVPPEGIIDHSLSEEPDRLDGAKSSPAAPQPAVTVFRRLAEAELPVVTGRYASSRYSLAELTPHTGRRHQLRRHMKHIFHPIIGDTTYGEGRHNRFFREEFGCGRLLLHAAELSLPHPASGETLTIAAPPDRELARLLDRLGWLAAATGRGRPGMPAPP

SEQ ID NO: 4090 - DNA, 873 bp, Bdellovibrio bacteriovorus HD100
  CDS (1)..(873): transl_table=11
ttgtgcttcattccgggcctcctgcctgagtctagatcagttcaatgcgaggtcaagtctgccctcttcgctatggcgacgtttattttgacaagaccgccaataataactatctctagggtcgcgcggccgcccggcgaaaggaccctcgtggagttattgtataaagatgaatattttattgccgtgaacaagccttctggctttcatgtgcatcctcacgagaatgtccagcaccgggtctcccgcgataagatctgcctttaccacgcccgtcgtatgatgaagcagcacgtgtatccggtgcaccgcctggatgccggcaccagtggggtgctgctgtttgccctttcttctgagtctgccagtaaactgtgccgcctgttcaccgagcgcgccacccataaaacctatcaggcggtcgtgcgtggtttcgtaaaggaagaaggcgaagtgcagctgcccttggaactggattccaccggcgatctggttgacgcccataccagctttaaacgcctggcgaccgtggaattccccgtggccgtcggtaaaaaattccccaccgcccgctattcctgggtggaggtcaccccgcacaccggtcgctaccaccagatccgccgtcacttcaaccgcatctctcatccattactgggggacgccgttcatggcgattcccaccacaaccgtttcttcagaaatcacttggaaatcgagggtttgtgcctgaaagccctgcgcctggagttcacgcacccctggagtggcgaaaaagtctctatcgaggccccgccttgcgataaatggaagaaaattcaacttctgtttgatccggcacttccgcttgagggcaaactgaaatccctttga

SEQ ID NO: 4091 - protein, 290 aa, Bdellovibrio bacteriovorus HD100
MCFIPGLLPESRSVQCEVKSALFAMATFILTRPPIITISRVARPPGERTLVELLYKDEYFIAVNKPSGFHVHPHENVQHRVSRDKICLYHARRMMKQHVYPVHRLDAGTSGVLLFALSSESASKLCRLFTERATHKTYQAVVRGFVKEEGEVQLPLELDSTGDLVDAHTSFKRLATVEFPVAVGKKFPTARYSWVEVTPHTGRYHQIRRHFNRISHPLLGDAVHGDSHHNRFFRNHLEIEGLCLKALRLEFTHPWSGEKVSIEAPPCDKWKKIQLLFDPALPLEGKLKSL

SEQ ID NO: 4092 - DNA, 786 bp, Erwinia carotovora subsp. atroseptica SCRI1043
  CDS (1)..(786): transl_table=11
atgcttgagattatttatcaggatgagcatctggttgccgtcaataaacccagtggctggttagtgcaccgtagttggctcgatcgcaaagaaaagatcgtagtgatgcaaactgtgcgcgatcagattggccagcacgtctataccgttcatcgcctcgacaggccgacgtctggcgtattgctgctcgcgctgtctagcgaagtggcgcgtgcgctatctcagcagtttgaatcgcaccagatgcagaaaatgtaccatgctgttgtacggggctatgtactggatgacggcgtgattgactatgcgctcaccgaagagctggacaagattgccgataaatttgccaatcctgataaagcgccgcagcctgctgtcacgcattaccgttctttagcgcaggctgagatgccagttgccatcggacgttacccaacggcacgctacagtttgatggaactgaagccgcagaccgggcgtaaacaccaactacgccgccatatgtcacatctccaccatccgattattggcgataccgcgcacggtgacctgcgacataatcgtggtatggagacgcatttctcctgcggcaggctcatgttgcatgccagcgagttacagctgaatcatcccgtgagcggacagccactgacgttgcaggcacgctgggattcaccgtggcagggtgtggtgaggcagtttggctggcaagggattctccctgagtttgaaggggttgagtttcctgctgagtcaggtcaggatagcggtcatctcgtcgagtaa

SEQ ID NO: 4093 - protein, 261 aa, Erwinia carotovora subsp. atroseptica SCRI1043
MLEIIYQDEHLVAVNKPSGWLVHRSWLDRKEKIVVMQTVRDQIGQHVYTVHRLDRPTSGVLLLALSSEVARALSQQFESHQMQKMYHAVVRGYVLDDGVIDYALTEELDKIADKFANPDKAPQPAVTHYRSLAQAEMPVAIGRYPTARYSLMELKPQTGRKHQLRRHMSHLHHPIIGDTAHGDLRHNRGMETHFSCGRLMLHASELQLNHPVSGQPLTLQARWDSPWQGVVRQFGWQGILPEFEGVEFPAESGQDSGHLVE

SEQ ID NO: 4094 - DNA, 711 bp, Mannheimia succiniciproducens MBEL55E
  CDS (1)..(711): transl_table=11
atgttagagattttgtatcaggatgaacatatcgtagcggttaataaaccggcgggtatgctggttcatcgaagttggttagaccgccatgaaacgcagttcgtcatgcaaacgttgcgggatcagatagggcggttggtttatcctattcaccgtttggatcgtcctacatcaggcgtactgttattcgctttaagtagtgaaacggcgaatcttttatgtcagcaatttgaaaccaagcaggttgaaaaaagctatttagccgttgttcggggttatttgacgggtagcgaacgtatcgattatccgttaaaaatccaattagacaagattgcggataaatttgctcaggaagataaagctccgcaacctgccgtgacggattatgaaggtttaaaaaccgttgaaaaaccttatgcaacaccacgttatgccacatcccgttatgctttggtgcggcttgtaccgcatactgggcgtaaacatcagttacgtcgtcacatgaaacatatttttcatcctattttaggtgatactcaatatggcgatttgcaccagaacagaacgttgacggaacacacggaagtaagccggttaatgctgcatgctgaaaaactgagttttattcatccgataaaacggcaacgaactgaaataaccgccggacttgacgaacaatggaaaaaattgatggcattgtttgaatggtaa

SEQ ID NO: 4095 - protein, 236 aa, Mannheimia succiniciproducens MBEL55E
MLEILYQDEHIVAVNKPAGMLVHRSWLDRHETQFVMQTLRDQIGRLVYPIHRLDRPTSGVLLFALSSETANLLCQQFETKQVEKSYLAVVRGYLTGSERIDYPLKIQLDKIADKFAQEDKAPQPAVTDYEGLKTVEKPYATPRYATSRYALVRLVPHTGRKHQLRRHMKHIFHPILGDTQYGDLHQNRTLTEHTEVSRLMLHAEKLSFIHPIKRQRTEITAGLDEQWKKLMALFEW

SEQ ID NO: 4096 - DNA, 720 bp, Haemophilus influenzae 86-028NP
  CDS (1)..(720): transl_table=11
atgctagaaattttatatcaagatgagtttctcgttgcggtgaataagcctgatggtatgttggttcatcgcagttggttagatcctcacgaaactcaatttgtgatgcaaactttacgagatcagattggtcagcacgtatttcctattcatcgtttagatcgaccgacatctggcgtgttgttatttgcattgagcagtgaaattgcgaatttaatgtgtgaacagtttgaacaaaagtgcgttcagaaatcttatttggctgtagtgcgagggtatctacagggaaaagagcggatagattatccactaaaaattcaattggataaaatcgcagataaattttctcaagaagataaagagcctcaagaagcagtgactgattatgaaggattaaaaatagtcgaaatgccttatcctgctgggcgttatcaaacggcacgttattctttagttaaattaatccctcatacaggtagaaaacaccaattacgtcgccatatgaaacatatttttcatccgattttaggggatacgcaatatggtgacttacatcaaaatcgtgcattaatgtcacatttaggttgttctcgattatttttacattctaatagtttgtcttttattcatccaataacgaaagagcaaataacaattacagcaggtttagatgaacaatggcatcaattaataaatcaatttgggtgggaaaatgtttga

SEQ ID NO: 4097 - protein, 239 aa, Haemophilus influenzae 86-028NP
MLEILYQDEFLVAVNKPDGMLVHRSWLDPHETQFVMQTLRDQIGQHVFPIHRLDRPTSGVLLFALSSEIANLMCEQFEQKCVQKSYLAVVRGYLQGKERIDYPLKIQLDKIADKFSQEDKEPQEAVTDYEGLKIVEMPYPAGRYQTARYSLVKLIPHTGRKHQLRRHMKHIFHPILGDTQYGDLHQNRALMSHLGCSRLFLHSNSLSFIHPITKEQITITAGLDEQWHQLINQFGWENV

SEQ ID NO: 4098 - DNA, 915 bp, Colwellia psychrerythraea 34H
  CDS (1)..(915): transl_table=11
atgaataattctactttagaagtagcaatttccgaggatatagagccggaaaaacctgtacttgatatcctatatcaagatgagtatatggtagcggttgataaacctgcggggttatttgtacatcgaagttatatggataaagatgaaatttattttgctttgcagttagttcgagatcaggtagggcaatatgtttatcccgttcatcgattagacagaccaacttcgggtgtacttctttttgctttaactaaagacgtagcgactaaactaagtgaagcttttgccaataaaagtagccaagctgagtttaagtctgacactgagcttgagggcaaggttcatgataagactcagacgggtcaacaaggccagcagagtatgaccgaaggacttactacggataaaaatatcgatggcagtgatttagctatggtgaaaacctattatgccttagcacgtggtcacttggcagtaccggtagatttaatcgatcatccactgaaagagaagctagataaattgggggataaaaatgttagccgtgacaagccagcacaatcggcgcagagttattatcaagtaaagcagcaagcgagtttgccgataaaagtcggtaagtttgatagtgtgaggtattctttaattgaagtacgccctattactggcagacgtcatcaaattcgtcgtcacttagcgcatttacgtcaccctattctaggggatatcaactacggcgataacaagcaaaacccatttttcatcgaacactttggttttaaacgcttgatgttaatagccaagtcattagaatttaaccaccccatcaacaatgatagaattaaaatatcagcgccgtttgatgaacaatggcagcaggtttttactacatttgaatggccactaagttag

SEQ ID NO: 4099 - protein, 304 aa, Colwellia psychrerythraea 34H
MNNSTLEVAISEDIEPEKPVLDILYQDEYMVAVDKPAGLFVHRSYMDKDEIYFALQLVRDQVGQYVYPVHRLDRPTSGVLLFALTKDVATKLSEAFANKSSQAEFKSDTELEGKVHDKTQTGQQGQQSMTEGLTTDKNIDGSDLAMVKTYYALARGHLAVPVDLIDHPLKEKLDKLGDKNVSRDKPAQSAQSYYQVKQQASLPIKVGKFDSVRYSLIEVRPITGRRHQIRRHLAHLRHPILGDINYGDNKQNPFFIEHFGFKRLMLIAKSLEFNHPINNDRIKISAPFDEQWQQVFTTFEWPLS

SEQ ID NO: 4100 - DNA, 729 bp, Dechloromonas aromatica RCB
  CDS (1)..(729): transl_table=11
ttgcctgaagaactgccgattctctatcgcgacgagcatgtcgtcgtcatcgacaagccgtcgggcttgcttgttcatcgctcagaaatcgaccgtcacgagacgcgcttcgccattcagatccttcgtgatcagatcggccagcgggtctggccggcacaccgacttgaccgtggcacctctggcgtattgcttttcggactgaatcccgccatggctagccagcttgggaagcagttcgagcagggcaccgtcgaaaaagcctactgggctgtcgttcggggctatccgccagcgtcaggcagcattgaccatccgctgacccgccagcgcgacccttatgaattcaaaggggagcagtgcagcaccgaggctcagccagcactgacgcacttccggaagctggccgagatcgagctgccggtcgaagtcgaccgttatccaagcagccgctatgcacttctggaactggagccgattaccggacgtcggcaccagatcaggcgccatttgaagcatcttgcccacccgatcattggcgatgccacctatggcaaagggcgtcacaaccgctactttgccgagcaactcggctgccaccgcttgctgctcgcctgcatcagactctcgttcaaccaccctgtcaccgggctgcgactggacataaaaacgccagtgtccggcgagttcgccgccacactggcgcgttttggctggcctggcagctag

SEQ ID NO: 4101 - protein, 242 aa, Dechloromonas aromatica RCB
MPEELPILYRDEHVVVIDKPSGLLVHRSEIDRHETRFAIQILRDQIGQRVWPAHRLDRGTSGVLLFGLNPAMASQLGKQFEQGTVEKAYWAVVRGYPPASGSIDHPLTRQRDPYEFKGEQCSTEAQPALTHFRKLAEIELPVEVDRYPSSRYALLELEPITGRRHQIRRHLKHLAHPIIGDATYGKGRHNRYFAEQLGCHRLLLACIRLSFNHPVTGLRLDIKTPVSGEFAATLARFGWPGS

SEQ ID NO: 4102 - DNA, 813 bp, Geobacter metallireducens GS-15
  CDS (1)..(813): transl_table=11
gtggaaatcctttaccgcgacgagcatctcgtggcagtccacaaaccgctgggactactcgtccaccgctcgcccatagaccggcacgagacccggtttgccctccaggaagtgcgtgaccttctggggcggcgcgtctatccggttcaccgactcgacaaacccacctcaggtgtcctcctcttcgccctcgatccagctttcgcccggggcctcgtcggcgccttcgcgtccgggagcgtgaccaagacgtatctggcggtggttcggggaaccatgccggaggaaggggtgattgaccatcccctggcagaggagcccgatcgtttcgagcagggacgggggaatgccggagagagggcgccccagtcggcagtgaccggctatcgacgcttggcagacgtggagcttcctgttgccgttggacgctatcccacgagtcgctattcgctggtgtcgctctcgccgcgcacgggtcgccgtcatcagcttcgccgccacctcaagcacctcttccaccccatcgttggcgatacgaaatacggcgaagggcgccacaaccggttctttcgggaagagcttctgacggtacgcatgcttctgcacgccgttgagcttaccgttcctcacccggcaaccggtgcgccgctgacggtctgtgccccggtcgagggggcttttgcagctctcctcgcccggttcggctggctctctgccgttccttcccgttggctcggcccccagggaaaaagcatggctggggaggagatgcaaacgagacagcggatttctcctgtgctacctttgttgtag

SEQ ID NO: 4103 - protein, 270 aa, Geobacter metallireducens GS-15
MEILYRDEHLVAVHKPLGLLVHRSPIDRHETRFALQEVRDLLGRRVYPVHRLDKPTSGVLLFALDPAFARGLVGAFASGSVTKTYLAVVRGTMPEEGVIDHPLAEEPDRFEQGRGNAGERAPQSAVTGYRRLADVELPVAVGRYPTSRYSLVSLSPRTGRRHQLRRHLKHLFHPIVGDTKYGEGRHNRFFREELLTVRMLLHAVELTVPHPATGAPLTVCAPVEGAFAALLARFGWLSAVPSRWLGPQGKSMAGEEMQTRQRISPVLPLL

SEQ ID NO: 4104 - DNA, 723 bp, Haemophilus somnus 2336
  CDS (1)..(723)
atgtcagagccaatagaattggatattttatatcaagatgagtttctcgttgtagtgaataaacctgccggaatgttggttcaccgcagttggctagatcgtcatgaaactcaatttgtcatgcaaactttacgagatcaaattggtcaacatgtttttcctattcatcgtttagatcgtccaacatcaggtgttttactttttgccttaaatgctggaattgctaatttattatgttcacaatttgaattaaaacaagtgaaaaaaagctatttggcgatagttcgtggttatttgagcgatgctcaacgaattgattatccgcttaaagtgcaactggacaaaattgcagataaatttagtcgaaaagaagaactgcaagatgcaataacggattattatggtttaaaaaccgttgaaatgccttatggcgtagggcgttatagctcttcccgctattcacttgtacgtttaatgccttatacgggacgtaagcatcaattacgtcgccatttaaagcatatttttcatcctattttgggtgatactcaatatggtgatttacaccaaaatcgggctttcagtcaaaatcttggtgtaagcaggttaatgttacatgctgaaaaactttgttttcaacatccggtaactaatgaaacaatagaaattgttgctgatttagatgagcaatggaaattgttattcaaaatatttaattggtaa

SEQ ID NO: 4105 - protein, 240 aa, Haemophilus somnus 2336
MSEPIELDILYQDEFLVVVNKPAGMLVHRSWLDRHETQFVMQTLRDQIGQHVFPIHRLDRPTSGVLLFALNAGIANLLCSQFELKQVKKSYLAIVRGYLSDAQRIDYPLKVQLDKIADKFSRKEELQDAITDYYGLKTVEMPYGVGRYSSSRYSLVRLMPYTGRKHQLRRHLKHIFHPILGDTQYGDLHQNRAFSQNLGVSRLMLHAEKLCFQHPVTNETIEIVADLDEQWKLLFKIFNW

SEQ ID NO: 4106 - DNA, 744 bp, Actinobacillus pleuropneumoniae serovar 1 str. 4074
  CDS (1)..(744)
atggaacttgagattttatatcgtgatgatgaactgattgcgattaataaaccggcgggaatgttagttcaccgatcatggctagataaacacgaaacgcaatttgcgatgcaaacattacgtgatcaaatcggtcagcacgtcttcccgattcatcgcttagatcgcccgacttccggtgtgttattgtttgcgctaaatagtgagatggctcgcctaatgagcgaacaatttgaacaacaccaactgaagaaaggctatttagcggtggtacgaggttatctactcgacaaaggcgagatcgattatccgctaaaagtcattttagacaaaattgccgataagttttcgcagccgaaagaagcgcagcaagcggtcactttttaccaaaatcttgcaagtgtcgaaatgctttatccggcaggcaaacaccaaacggcacgttacagtttggttgaattattaccgaaaaccggacgtaaacaccaattgcgccgccatatgaagcatctatttcatccgattatgggcgatacgaaatatggtgacttgcaccagaatcgtactttaaccgaaaaaaccggttgcgaccgattaatgctacattcgcattttttgaaatttacgcacccgaaaacggcgcaaaaaatcgaaatttttgcaccgcttgataaacaatggcaaaatctgtttgctacttttaactggaactttcctacattttttcaatctgaaccaaactaa

SEQ ID NO: 4107 - protein, 247 aa, Actinobacillus pleuropneumoniae serovar 1 str. 4074
MELEILYRDDELIAINKPAGMLVHRSWLDKHETQFAMQTLRDQIGQHVFPIHRLDRPTSGVLLFALNSEMARLMSEQFEQHQLKKGYLAVVRGYLLDKGEIDYPLKVILDKIADKFSQPKEAQQAVTFYQNLASVEMLYPAGKHQTARYSLVELLPKTGRKHQLRRHMKHLFHPIMGDTKYGDLHQNRTLTEKTGCDRLMLHSHFLKFTHPKTAQKIEIFAPLDKQWQNLFATFNWNFPTFFQSEPN

SEQ ID NO: 4108 - DNA, 720 bp, Haemophilus influenzae R2866
  CDS (1)..(720)
atgttagaaattttatatcaagatgagtttctcgtagcggtgaataagcctgctggtatgctggttcatcgcagttggttagatcctcacgaaactcaatttgtgatgcaaaccttgcgagatcagattggtcagcacgtatttcctattcatcgtttagatcgaccgacatctggtgtgttgttatttgcattgagcagtgaaattgcgaatttaatgtgtgaacagtttgaacaaaagtgcgttcagaaatcttatttggctgtagtgcgagggtatctacagggaaaagagcggatagattatccactaaaaattcaattggataaaatcgcagataaattttctcaagaagataaagagcctcaagaagcagtgactgattatgaaggattaaaaatagtcgaaatgccttatcctgctgggcgttatcaaacggcgcgttattctttagttaaattaatccctcatacaggtagaaaacaccaattacgtcgccatatgaaacatatttttcacccaattttaggtgatacgcaatatggtgacttacatcaaaatcgtgcattaacgtttcatctaggcttttctcggttatttttacattctaatagtttgtcttttattcatccaataaagaaagagcaaataacaattacagcaggtttagatgaacaatggcagcaattaatgaatcaatttggatgggaaaatgtttga

SEQ ID NO: 4109 - protein, 239 aa, Haemophilus influenzae R2866
MLEILYQDEFLVAVNKPAGMLVHRSWLDPHETQFVMQTLRDQIGQHVFPIHRLDRPTSGVLLFALSSEIANLMCEQFEQKCVQKSYLAVVRGYLQGKERIDYPLKIQLDKIADKFSQEDKEPQEAVTDYEGLKIVEMPYPAGRYQTARYSLVKLIPHTGRKHQLRRHMKHIFHPILGDTQYGDLHQNRALTFHLGFSRLFLHSNSLSFIHPIKKEQITITAGLDEQWQQLMNQFGWENV

SEQ ID NO: 4110 - DNA, 720 bp, Haemophilus influenzae R2846
  CDS (1)..(720)
atgttagaaattttatatcaagatgcgtttctagttgcggtgaataagcctgctggcatgttggttcatcgcagttggttagatcctcatgaaactcaatttgtgatgcaaactttgcgagatcagattggtcagcacgtatttcctattcatcgtttagatcgaccaacatctggtgtgttgttatttgcattgagcagtgaaattgcgaatttaatgtgtgaacaatttgaacaaaagtgcgttcagaaatcttatttgactgtagtgcgagggtatctacagggaaaagcacagatagattatccactaaaaattcaattggataaaatcgcagataaattttctcaagaagataaagagcctcaagaagccgttactgattatgaaggattaaaaatagtcgaaatgccctatcctgctgggcgttatcaaacggcacgttattctttagttaaattgatccctcatacaggcagaaaacaccaattacgtcgccatatgaaacatatttttcacccaattttaggggatacgcaatatggtgacttacatcaaaatcgtgcattaatgtcacatttaggttgttctcgattatttttacattctgatagtttgtcttttattcatccaataacgaaagagcaaataacaattacagcaggtttagatgaacaatggcagcaattaatgaatcaatttggatgggaaaatgtttga

SEQ ID NO: 4111 - protein, 239 aa, Haemophilus influenzae R2846
MLEILYQDAFLVAVNKPAGMLVHRSWLDPHETQFVMQTLRDQIGQHVFPIHRLDRPTSGVLLFALSSEIANLMCEQFEQKCVQKSYLTVVRGYLQGKAQIDYPLKIQLDKIADKFSQEDKEPQEAVTDYEGLKIVEMPYPAGRYQTARYSLVKLIPHTGRKHQLRRHMKHIFHPILGDTQYGDLHQNRALMSHLGCSRLFLHSDSLSFIHPITKEQITITAGLDEQWQQLMNQFGWENV

SEQ ID NO: 4112 - DNA, 771 bp, Vibrio sp. Ex25
  CDS (1)..(771)
atgctagaacaagaaatagcgcgatcttcagaaccagtggaactggagatcgtttatcaggatgaatattttgtagcggttaacaagcctgccggcatgctggtgcaccgcagttggttagataaacacgaaactcagtttgtcatgcaaactttgcgcgaccaaattggtcagcatgtgttcccattacatcgtctggatcgtccaacatctggtgtgctcgtgtttgcgttgtcgagtgaagtcgcgtcacaagtcatgccgatgtttgctgaacataaaatggaaaagacgtaccacgcgatagtacgtggttggattgaggaagagggcgtcttggattacgcacttaaagtcgagttagacaagattgcggataagtttgcttcacaagaaaaagaagcgcaagaagcggtgacggaatataaaccgttggctaaagtggaagttccctattcgacgggtaaatttcctacaacgcgttattgcttagttgagatgaaacctaaaacggggcgtaagcaccaacttcgtcgtcatatggcgcatctacgccatccgatcgtgggtgatacaacgcacggagatggcaagcacaacaagctatatcgcacagagtttgattctcatcgtttgctactgcacgcttcagagttacggtttgtccatccatttaccgatcaagatattgtcatgacggccaatcttgatgagacttggcagcaattgtttactcgatttgagtgggatgaatcgatgatcaaccgataa

SEQ ID NO: 4113 - protein, 256 aa, Vibrio sp. Ex25
MLEQEIARSSEPVELEIVYQDEYFVAVNKPAGMLVHRSWLDKHETQFVMQTLRDQIGQHVFPLHRLDRPTSGVLVFALSSEVASQVMPMFAEHKMEKTYHAIVRGWIEEEGVLDYALKVELDKIADKFASQEKEAQEAVTEYKPLAKVEVPYSTGKFPTTRYCLVEMKPKTGRKHQLRRHMAHLRHPIVGDTTHGDGKHNKLYRTEFDSHRLLLHASELRFVHPFTDQDIVMTANLDETWQQLFTRFEWDESMINR

SEQ ID NO: 4114 - DNA, 855 bp, Shewanella sp. ANA-3
  CDS (1)..(855): transl_table=11
atgaacctagatgatgattggctggatatgccagaggataaattcaacccaaccgagagcgacgaacagtcagagcctgcgcctgaactgcgtgttttgtatcaagacgagcacttggtggctatccataaacccgcgggattattggttcatcgcagctacttagcacggcgtgaacgcttttttgcgatgcaactgactcgtgacttggtcggttgccatgtgtttccggtacaccgtttagatagaccgacctcgggcgtgttgttatttgccaaaagcagtgaggtggccaatgccctatgtgagcaatttgccaaccacagtattgaaaaacaatatttggcactggtgcgtggcaatatgcacgagagtggtgtgttggattatgcgctcaaagtcgaattggatgaggtggctgacaagtttgccaatcaagataaggccgcgcaggacgctgtgactcaatatgagccgctattaaataccgaaattccttatccgtcggggcgttacgctaccagccgtttcgcgttagtgaaactgagtccaaaaacggggcgtaagcatcaactcagacgccatatggcgcatttacgtcacccgattattggcgataccacgcacggagatggtaagcaaaatgcgtttttccgtacgcatttcgatatcaatcgattgtggctgattgcgaagaagttaaccttcactcacccagttacccaagcgcgactgagtatcgaaaccgagcttgagccagaatgggaaaccgtgttttcaggactgggctgggatgatgccgccctttgttgcgagccaagtgtgttgattgcagagcaaacgacgaccgtttaa

SEQ ID NO: 4115 - protein, 284 aa, Shewanella sp. ANA-3
MNLDDDWLDMPEDKFNPTESDEQSEPAPELRVLYQDEHLVAIHKPAGLLVHRSYLARRERFFAMQLTRDLVGCHVFPVHRLDRPTSGVLLFAKSSEVANALCEQFANHSIEKQYLALVRGNMHESGVLDYALKVELDEVADKFANQDKAAQDAVTQYEPLLNTEIPYPSGRYATSRFALVKLSPKTGRKHQLRRHMAHLRHPIIGDTTHGDGKQNAFFRTHFDINRLWLIAKKLTFTHPVTQARLSIETELEPEWETVFSGLGWDDAALCCEPSVLIAEQTTTV

SEQ ID NO: 4116 - DNA, 855 bp, Shewanella sp. MR-7
  CDS (1)..(855): transl_table=11
atgaacctagatgatgattggctggatatgccagaggataaatacaacccaagcgagagcgacgagcagtcagagcctgcgccagagctgcgtgttttgtatcaagatgagcacttggtggctatccacaaacctgcgggattattggttcatcgcagctacttagcacggcgtgagcgcttttttgcgatgcaactgactcgtgacttggttggttgccatgtgtttccggtacaccgtttagatagacccacctcgggagtgttattatttgccaaaagcagtgaggtggccaacgccctttgcgagcaatttgctaaccacagtattgaaaaacaatatttggcactggtgcgtggcaatatgcacgagagtggcattttggattatgcgcttaaagtcgaattggatgaggtggctgacaagtttgccaatcaagataaagccgcgcaggatgcagtgactcaatatgagccgctattaaataccgaaattccttatccgtcggggcgttatgcaactagccgcttcgcgttagtgaaactgagtcccaaaacggggcgtaagcaccaacttagacgccatatggcgcatttacgtcatcctattattggcgataccactcacggcgatgggaaacaaaatgcgtttttccgtgcgcatttcgatatcaatcgattgtggctgattgcgaagaagttaaccttcactcacccggtgacacttgagcgcttaagtattgaaaccgagcttgagccagaatgggaaaccgtgtttgcaggactgggctgggacgatgccacgctttgtcgagagccaagtgtgttgattgcggagcaaacgacgaccgtttaa

SEQ ID NO: 4117 - protein, 284 aa, Shewanella sp. MR-7
MNLDDDWLDMPEDKYNPSESDEQSEPAPELRVLYQDEHLVAIHKPAGLLVHRSYLARRERFFAMQLTRDLVGCHVFPVHRLDRPTSGVLLFAKSSEVANALCEQFANHSIEKQYLALVRGNMHESGILDYALKVELDEVADKFANQDKAAQDAVTQYEPLLNTEIPYPSGRYATSRFALVKLSPKTGRKHQLRRHMAHLRHPIIGDTTHGDGKQNAFFRAHFDINRLWLIAKKLTFTHPVTLERLSIETELEPEWETVFAGLGWDDATLCREPSVLIAEQTTTV

SEQ ID NO: 4118 - DNA, 741 bp, Alkalilimnicola ehrlichei MLHE-1
  CDS (1)..(741): transl_table=11
gtgcgcgccgccccgacgatccctctcaccatgacttcggacgcgcccctggacattatccaccgggatcacgacctggtggcggtggacaagccggcgggtatgccggtgcaccggtcccgccgccatcccggcgacgctgtgttgctgcaacggctgcgcgaccagctcggccagtggctctggccggtgcaccggctggacccgcccacgtcggggttggtggtgttcgccctgcatcccgaggccgcgcgggccctcgctgcgcagtttcagcagcgtgaggtggagaaacgctacctagcagtggttcggggctggccgttggagcaggggcgggtggagcacccgctccggcgacccgggcgatccgagcgccagccggcggtcaccgatttccaccgactcgcgaccacagagctgccgatccccatgccgccgcatccgaccgcacgctacgcgctgttggagctgcgccccatcaccggccggcaacatcagttgcggcggcacatgaagcacatcagccacccgatcatcggtgacaccacctacggcaaggggccccacaaccgcctgttccgggagcggtttggtgccagtgaattactgttgcgggcgacacggcttgcctttcggcatcccgggacaggggcgcggctgcaccttgactgcccgctgaatgaggcctggagggcggtgctgagggggtcggggctggcaggcgcggatgggatctag

SEQ ID NO: 4119 - protein, 246 aa, Alkalilimnicola ehrlichei MLHE-1
MRAAPTIPLTMTSDAPLDIIHRDHDLVAVDKPAGMPVHRSRRHPGDAVLLQRLRDQLGQWLWPVHRLDPPTSGLVVFALHPEAARALAAQFQQREVEKRYLAVVRGWPLEQGRVEHPLRRPGRSERQPAVTDFHRLATTELPIPMPPHPTARYALLELRPITGRQHQLRRHMKHISHPIIGDTTYGKGPHNRLFRERFGASELLLRATRLAFRHPGTGARLHLDCPLNEAWRAVLRGSGLAGADGI

SEQ ID NO: 4120 - DNA, 855 bp, Shewanella sp. MR-4
  CDS (1)..(855): transl_table=11
atgaacctagatgatgattggctggatatgccagaggataaatacaacccaagcgagagcgacgagcagtcagagcttgcgccagagctgcgtgttttgtatcaagacgagcacttggtggctatccacaaacccgcggggttattggttcatcgaagctacttagcgcggcgtgagcgcttttttgcgatgcagctgactcgggacttggttggttgccatgtgtttccggttcaccgtttagatagacccacctcgggtgtgttgttatttgccaaaagcagtgaggtggccaacgccctttgcgagcaatttgccaaccacagtattgaaaaacaatatttggcactggtacgtggcaatatgcacgagagtggcattttggattatgcgcttaaagtcgaattggatgaggtggctgacaagtttgccaatcaagataaagccgcgcaggatgctgtgactcaatatgagccgctgttaaataccgaaattccttatccgtcggggcgttatgctaccagccgcttcgcgttagttaaactgagtcccaaaacggggcgtaagcaccaactcagacgccatatggcgcatttacgtcatccgattattggcgataccacccacggcgatgggaaacaaaatgcgtttttccgcgcgcatttcgatatcaatcgattgtggctgattgcgaagaagttaaccttcactcacccggtgacacttgagcgcttaagtattgaaaccgagcttgagccagaatgggaaaccgtgtttgcaggattgggctgggacgatgccgcgctttgtcgagagccaagtgtgttgattgcagggcaaacgacgaccgtttaa

SEQ ID NO: 4121 - protein, 284 aa, Shewanella sp. MR-4
MNLDDDWLDMPEDKYNPSESDEQSELAPELRVLYQDEHLVAIHKPAGLLVHRSYLARRERFFAMQLTRDLVGCHVFPVHRLDRPTSGVLLFAKSSEVANALCEQFANHSIEKQYLALVRGNMHESGILDYALKVELDEVADKFANQDKAAQDAVTQYEPLLNTEIPYPSGRYATSRFALVKLSPKTGRKHQLRRHMAHLRHPIIGDTTHGDGKQNAFFRAHFDINRLWLIAKKLTFTHPVTLERLSIETELEPEWETVFAGLGWDDAALCREPSVLIAGQTTTV

SEQ ID NO: 4122 - DNA, 735 bp, Pseudoalteromonas tunicata D2
  CDS (1)..(735): transl_table=11
atgctgacaattttattccaagatgagcattttgtagcgatagataagccttcaggtttgttggttcatcgctcttttttagataagcatgaaacgcaatttgcgatgcaaatgctaagagaccagcttggtcagcatgtgtttccggttcatcgtttagatagaccaacatcaggtgttttattgtttgcgctaagtagtgacgcggctcgtaaaatgaatgagcaatttagcgaccacagggtgacaaaacgttatcttgcattagtacgtggttttgcgcctgattatcgtttgctggatagaccccttaaagaagagctcgacaaaatcgcagataaatatgccgatcaaaataaagcgccacaagcagcacaaactgaatttcgttgtttgcagcaagtgaccttacccattgctttggggaaatatccgacaattcggtattccttggtggagtgttttcctaaaactgggcgaaaacatcaaattcgacgacacttaaattttttgtcgcatcctataattggtgatgttaatcatggtgataatcaacataatcactttttttggcagcattttgaacgccagcgtctaatgttgtttgctcagcggctgactttcatgcacccttatagtggacaaaaaataataatagaagcgccattaggtgaatcaacattggctttatttaatcagttttcttggcctgacaaggaagccgcttattgttaa

SEQ ID NO: 4123 - protein, 244 aa, Pseudoalteromonas tunicata D2
MLTILFQDEHFVAIDKPSGLLVHRSFLDKHETQFAMQMLRDQLGQHVFPVHRLDRPTSGVLLFALSSDAARKMNEQFSDHRVTKRYLALVRGFAPDYRLLDRPLKEELDKIADKYADQNKAPQAAQTEFRCLQQVTLPIALGKYPTIRYSLVECFPKTGRKHQIRRHLNFLSHPIIGDVNHGDNQHNHFFWQHFERQRLMLFAQRLTFMHPYSGQKIIIEAPLGESTLALFNQFSWPDKEAAYC

SEQ ID NO: 4124 - DNA, 738 bp, Photobacterium sp. SKA34
  CDS (1)..(738): transl_table=11
atggaacttgaaattttatatcgcgatgactatttgattgcggttaacaagcctgccggtatgttggttcaccgttcatggctagatagtcatgagactgtttttgtgatgcaaacattgcgagatcaaattggccagcatgtcttcccattacatcgtttagatcgcccaacatcgggtgttttgttgtttggattatccagtgagattgcatcacaaatgatgccacttttcgctgggcgcgatatgcacaaaacgtatcatgctgttgtgcgtggttggataaaagaagcggcagtgctcgactatccgttgaaggttgagcttgataagatcgctgataaaaatgcatcagaagagaaagaagcacaacctgctgtaacggcttacgagccattagcgacggttgaaacagatattgcagtaggacgttactcaaccagtcgttactgtttagttgaaatgaaaccagaaactgggcggaagcaccagctacgtcgacatatgcaccatttaagtcatcatattattggtgatgtaaatcatggtgatgggcgccataaccgcatgttccgtgaacattatgattgtcaccgtttaatgctgcatgcctcgagattacaatttgatcacccgatcacaggtgattctattgatatttgtgcagatattgatgagacgtggcataaagtcatgactgcgtttaattggtccctcaatctattagtgcgagactaa

SEQ ID NO: 4125 - protein, 245 aa, Photobacterium sp. SKA34
MELEILYRDDYLIAVNKPAGMLVHRSWLDSHETVFVMQTLRDQIGQHVFPLHRLDRPTSGVLLFGLSSEIASQMMPLFAGRDMHKTYHAVVRGWIKEAAVLDYPLKVELDKIADKNASEEKEAQPAVTAYEPLATVETDIAVGRYSTSRYCLVEMKPETGRKHQLRRHMHHLSHHIIGDVNHGDGRHNRMFREHYDCHRLMLHASRLQFDHPITGDSIDICADIDETWHKVMTAFNWSLNLLVRD

SEQ ID NO: 4126 - DNA, 753 bp, Oceanospirillum sp. MED92
  CDS (1)..(753): transl_table=11
atgtcagaactcgacattctatttgaagatgatcaccttattgcaatcaataaaccaagtggtttgttagttcatccaagctgggtagcgcctcggggtacgcctaatctggcatcgatgctcaaagtatatttcgagggaggcagcccttatacgatccatcgtttggataggccaacatcaggtgtgattctgtttggaaagagtaaagaggtcgcacagaagatgaaccttatttttgccgaacgtgacgtgagtaaaacctacctgtgtatgtgccgtggctatactccagaagccgatacgattgattatgcgttgaaagagcagctggataaaattgccgataagcatgcaaatcaagataaggaagcccaggaagcggtttctcactatcgccgtttaggtacagtagagctcgatattccgattggccgttatgataaatctcgatattcgctggtagaggttaagcctgaaacagggcgtaagcatcaaataaggcgacatatgaagcatatttttcacccaatagcgggtgataccaagcatggcgataacaagcataataaaatgttaaagcagaattttgatttgcagcgattaatgttgatggccacgaatatccagtttacccacccaataacccaggaatttatggatattactgcgcccgttgatagttattgtgatgagctgtttgctggatttggctggaaaggactttttcctgattcgcttgtcgattcgtag

SEQ ID NO: 4127 - protein, 250 aa, Oceanospirillum sp. MED92
MSELDILFEDDHLIAINKPSGLLVHPSWVAPRGTPNLASMLKVYFEGGSPYTIHRLDRPTSGVILFGKSKEVAQKMNLIFAERDVSKTYLCMCRGYTPEADTIDYALKEQLDKIADKHANQDKEAQEAVSHYRRLGTVELDIPIGRYDKSRYSLVEVKPETGRKHQIRRHMKHIFHPIAGDTKHGDNKHNKMLKQNFDLQRLMLMATNIQFTHPITQEFMDITAPVDSYCDELFAGFGWKGLFPDSLVDS

SEQ ID NO: 4128 - DNA, 711 bp, Oceanobacter sp. RED65
  CDS (1)..(711): transl_table=11
atgaccatcagcatgaccccaagcattctttaccaagatgatgacctcatcgccattaataaacccagcgggttacttgtgcataaaagctgggtggcaaaagacgcgaaagagtttgcactgcaaatcgttcgtgacatgtcaggcaagcatgtgtttcctgtgcatcgcttagatcgtcccacgtctggggttttattatttggtttttctggcgaaatcgcacagcaagtgcaggctcaatgggaacaggcgaacaaaacttattgggccgtggtgcgtggctggttaaaagaacaaaccttagtggatcatgctctaaaaggcatggcagattatggtcaggatgtggaaatcgttcaggaagcgcaaacccacttcaaacccattgattatgtggagatagacgcggaaattgatcgctatcctaaaagtcgctttagttgggtagaagccaaacctaagcaaggccgcacccatcaaattcgtcgccatttaaagcatttaagtcatccgattatcggcgacgctcgctatggtaaaggcaagtacaatcgctatattactgaacattatgattgccctcgcctgcttttacatcatcaacaactggaaatgactcaccccgtttcaggctctaagttaatgattaccgctcctttagagggcgctatgcagagcttgttttccacctttgattggaaacactag

SEQ ID NO: 4129 - protein, 236 aa, Oceanobacter sp. RED65
MTISMTPSILYQDDDLIAINKPSGLLVHKSWVAKDAKEFALQIVRDMSGKHVFPVHRLDRPTSGVLLFGFSGEIAQQVQAQWEQANKTYWAVVRGWLKEQTLVDHALKGMADYGQDVEIVQEAQTHFKPIDYVEIDAEIDRYPKSRFSWVEAKPKQGRTHQIRRHLKHLSHPIIGDARYGKGKYNRYITEHYDCPRLLLHHQQLEMTHPVSGSKLMITAPLEGAMQSLFSTFDWKH

SEQ ID NO: 4130 - DNA, 732 bp, Haemophilus ducreyi
  CDS (1)..(732): transl_table=11
atggaacttgatattttataccgtgatgatgaactgattgcaattaataaaccggcgggaatgttagtccatcgttcgtggctggataaagcagaaacattatttgcgatgcaaacattgcgtgatcaaatcaaccaacacgtttttcctattcaccggctagatcgccctacttcgggcgtacttttgtttgccttaaatagcgaaatggctcgcttgatgagtgaacaatttgaacaacataaagtcgaaaaagaataccttgcgattgttcgtggctatatcgcagaaaaaggtgaaattgattacccacttaaagtgatattagacaaaattgcggataaattttcccaaccaaaagcagcgcaacaagcggtcactttttatcaaaatcttgcaaaagtagagatgccttattccacaggtaaatatgccactacgcgttatagtttagttgcattatcaccgaaaacgggcagaaaacatcagcttagacggcatatgaaacatttatttcatccgattatgggcgatacgaaatatggcgatttacatcaaaaccggcgattaactgaaaaaacgggctgtaatcgtttaatgttacacgctcgtttgctacactttacccacccgaaaacattgcaaaaaatcaccatttctgcactgcttgatcagcaatggcagatgttattcaaccaatttggttggcatttcactgatttcttttactag

SEQ ID NO: 4131 - protein, 243 aa, Haemophilus ducreyi
MELDILYRDDELIAINKPAGMLVHRSWLDKAETLFAMQTLRDQINQHVFPIHRLDRPTSGVLLFALNSEMARLMSEQFEQHKVEKEYLAIVRGYIAEKGEIDYPLKVILDKIADKFSQPKAAQQAVTFYQNLAKVEMPYSTGKYATTRYSLVALSPKTGRKHQLRRHMKHLFHPIMGDTKYGDLHQNRRLTEKTGCNRLMLHARLLHFTHPKTLQKITISALLDQQWQMLFNQFGWHFTDFFY

SEQ ID NO: 4132 - DNA, 732 bp, Pasteurella multocida
  CDS (1)..(732): transl_table=11
atgacattagagattttatatcaagatccatatttgattgctgtaaataaaccagcaggtatgctagtccatcgtagttggttagatcggcatgaaacacaatttgtcatgcaaacattacgcgatcaaatagggcagcatgtttatcctattcaccgtttagatcgaccgacttcaggtgttttacttttcgcattaagtagcgaagtggcaaatttattgtgtcttcaatttgaaaataagcaagtgcaaaaaagttatttagcgattgttcgaggatatttagttggtgaggggcgaattgattacccactgaaagttcaattagacaaaattgcggataagtttgcccaagatgacaaggcgccacaagaagcggtgacagattatctcgggttagctaaagttgaaatgccgtattgtgtgaaaaagtacccaacaacgcgttattcgcttgtgcgtttaattccgcatacggggcgaaaacatcagctgcgtcgtcacatgaaacacctttttcatcctattttgggagatacacaatatggtgatttacaccaaaatcgtgcattaaccactcatacgggcgtgcaacgtttaatgttacatgcagaacgattgatctttacacacccgataacacagcaacagatcacgatctgtgcgggtgtcgatcaacaatggctcgatttgattaatatttttgattgggatttaaattccatacattaa

SEQ ID NO: 4133 - protein, 243 aa, Pasteurella multocida
MTLEILYQDPYLIAVNKPAGMLVHRSWLDRHETQFVMQTLRDQIGQHVYPIHRLDRPTSGVLLFALSSEVANLLCLQFENKQVQKSYLAIVRGYLVGEGRIDYPLKVQLDKIADKFAQDDKAPQEAVTDYLGLAKVEMPYCVKKYPTTRYSLVRLIPHTGRKHQLRRHMKHLFHPILGDTQYGDLHQNRALTTHTGVQRLMLHAERLIFTHPITQQQITICAGVDQQWLDLINIFDWDLNSIH

SEQ ID NO: 4134 - DNA, 1131 bp, Pectobacterium carotovorum subsp
  CDS (1)..(1131): transl_table=11
atgagcagagagaaccaggttcgtcagtcattattcgatattgagcgcgcattgagggaaagccctttctggcaggttgtcccgccggaagaagaggcgtttaacagcacggagcctttcagcctcgataccatgaaacccgaagagtggttgcagtgggtctttttgccacgtatgcatgccttattggacagcgaactggcactgccgcggagctggttttactgccttattttgaagaagcgctggaagggtcgccagaagagaccgcggcggttttgttgcgtatcaagcagctcgatgagctattcacccccgatgtacaggatggcgcagtgcacgatgcttgagattatttatcaggatgagcatctggttgccgtcaataaacccagcggctggttagtccatcgtagctggctggatcgcaaagaaaaagtcgtggtgatgcagaccgtgcgcgatcagatcggccagcacgtgtataccgttcatcgcctcgacaggccgacatccggcgttttgctgctagcgctgtccagcgaggtggcgcgtgcgttatcccagcagtttgaatcgcaccagatgcagaaaacgtatcatgccgttgtacgaggctatgtgctggatgatggtgtgatcgactatgcgctcaccgaagaactggacaagatcgccgacaagtttaccaatcctgataaggcgccgcagcctgccgtcacgcattaccgttctttggcgcaggccgagatgccggtcgctattggccgttaccccacagcacgctacagtctgatggagctgaagccacagaccggacgcaagcaccaactccgccgccatatgtcacatatccaccatccgattattggcgataccgcgcacggcgacctgcgacacaatcgcggcatggaatcgcacttctcctgcggcagactcatgctgcatgccagcgagttgcaactgaatcatcctgtgagcgggcagccattgacgttgcaggcgcgttgggatgcgccgtggcagggggtggtgacacagtttggctggaaggggattctccctgagtttgaaggggttgagtttcctgccgactcaggtcaggatagcgagcatttcgtcgagcagtaa

SEQ ID NO: 4135 - protein, 376 aa, Pectobacterium carotovorum subsp
MSRENQVRQSLFDIERALRESPFWQVVPPEEEAFNSTEPFSLDTMKPEEWLQWVFLPRMHALLDSELALPRSWFYCLILKKRWKGRQKRPRRFCCVSSSSMSYSPPMYRMAQCTMLEIIYQDEHLVAVNKPSGWLVHRSWLDRKEKVVVMQTVRDQIGQHVYTVHRLDRPTSGVLLLALSSEVARALSQQFESHQMQKTYHAVVRGYVLDDGVIDYALTEELDKIADKFTNPDKAPQPAVTHYRSLAQAEMPVAIGRYPTARYSLMELKPQTGRKHQLRRHMSHIHHPIIGDTAHGDLRHNRGMESHFSCGRLMLHASELQLNHPVSGQPLTLQARWDAPWQGVVTQFGWKGILPEFEGVEFPADSGQDSEHFVEQ

SEQ ID NO: 4136 - DNA, 783 bp, Salmonella typhi
  CDS (1)..(783): transl_table=11
atgctggagatcctctatcaagacccgtggctggttgccgtgaataaacccgcaggctggcttgttcaccggagctggctggatcgcgacgaaaaagtcgtggtcatgcaaacggtgcgcgaccaaatcggccagcatgtttttaccgcccaccgtctcgacaggcccacgtcgggcgtactgttaatggggctgtccagcgaagcgggacgccgtctggcgcagcagttcgagcagcaccacatccgtaaacgctaccatgccattgtgcgcggctggctgatagatgacgcggtactggattatccgctggtggaagagcgcgataaaattgccgataaattcgcccgcgaagataaagcgccccagccggctgtaacgcagtatcgcgggctggcgacggtcgaaatggcggtgccgaccgggcgttatcccaccacgcgttatggcctggttgagctggaaccaaaaacgggacgcaagcaccagcttcgtcgtcatctggcgcatctgcgtcatcctatcatcggcgacagcaagcatggcgatttgcgacaaaaccgcagcgccgcagagcattttgcctgtcgtcgcctgatgcttcatgccagtcggcttgaactgacgcaccccttcaccggacagccgttgataattcaggccgggttggatgaaacctggatgcaggtgctgacacagtttggctggcgtggacttctccctgacaatgaaagggttgagtttacggcggcgtcccggcaggatgagactcatctgacataa

SEQ ID NO: 4137 - protein, 260 aa, Salmonella typhi
MLEILYQDPWLVAVNKPAGWLVHRSWLDRDEKVVVMQTVRDQIGQHVFTAHRLDRPTSGVLLMGLSSEAGRRLAQQFEQHHIRKRYHAIVRGWLIDDAVLDYPLVEERDKIADKFAREDKAPQPAVTQYRGLATVEMAVPTGRYPTTRYGLVELEPKTGRKHQLRRHLAHLRHPIIGDSKHGDLRQNRSAAEHFACRRLMLHASRLELTHPFTGQPLIIQAGLDETWMQVLTQFGWRGLLPDNERVEFTAASRQDETHLT

SEQ ID NO: 4138 - DNA, 783 bp, Salmonella typhimurium
  CDS (1)..(783): transl_table=11
atgctggagatcctctatcaagacccgtggctggttgccgtgaataaacccgcaggctggcttgttcaccggagctggctggatcgcgacgaaaaagtcgtggtcatgcaaacggtgcgcgaccaaatcggccagcatgtttttaccgcccaccgtctcgacaggcccacgtcgggcgtactgttaatggggctgtccagcgaagcgggacgccgtctggcgcagcagttcgagcagcaccacatccgtaaacgctaccatgccattgtgcgcggctggctgatggatgacgcggtactggattatccgctggtggaagagcgcgataaaattgccgataaattcgcccgcgaagataaagcgccccagccggccgtaacgcagtatcgcgggctggcgacggtcgaaatggcggtgccgaccgggcgttatcccaccacgcgttatggcctggttgagctggaaccaaaaacgggacgcaagcaccagcttcgtcgtcatctggcgcatctgcgtcatcctatcatcggcgacagtaaacatggcgatttgcgacaaaaccgcagcgccgcagagcattttgcctgtcgtcgcctgatgcttcatgccagtcgtcttgaactgacgcaccccttcaccggacagccgttgataattcaggccgggttggatgaaacctggatgcaggcgctgacgcagtttggctggcgtggacttctccctgacaatgaaagggttgagtttacggcggcgtcccggcaggatgagactcatctgacataa

SEQ ID NO: 4139 - protein, 260 aa, Salmonella typhimurium
MLEILYQDPWLVAVNKPAGWLVHRSWLDRDEKVVVMQTVRDQIGQHVFTAHRLDRPTSGVLLMGLSSEAGRRLAQQFEQHHIRKRYHAIVRGWLMDDAVLDYPLVEERDKIADKFAREDKAPQPAVTQYRGLATVEMAVPTGRYPTTRYGLVELEPKTGRKHQLRRHLAHLRHPIIGDSKHGDLRQNRSAAEHFACRRLMLHASRLELTHPFTGQPLIIQAGLDETWMQALTQFGWRGLLPDNERVEFTAASRQDETHLT

SEQ ID NO: 4140 - DNA, 735 bp, Vibrio cholerae
  CDS (1)..(735): transl_table=11
atgctcgagattgtttatcaagatgaatatttggtggcggtcaataaaccggctggcatgttggtgcaccgttcatggctcgacaagcatgaaaccgagtttgtgatgcagaccctgcgcgatcaaattggtcagcacgttttcccgctacaccgtctggatcgcccgacatccggtgtgttggtgtttgcgctttcgagtcagattgcctctgaagtgatgccgatgtttgccaatcatgagatggagaaaacctaccacgccattgtgcgcggctggattgaagaggcaaatgtgctcgattatccactcaaagaagagctcgacaaaattgccgataaatttgccaagcaagataaagaagcgcagtcggcggtgacagcttatcggccactcgccaaagtggaactgcccattgctacgggaaagtttgccactacccgctattgcttgatggagatgcaaccgaagaccgggcgcaaacatcagctgcgtcgtcatatggcacatctgcgtcatccgatagtgggtgataccacccatggcgatggagttcataaccgactgtttcgtgaacacttttccgcgcaacgtttgatgctgcatgccagcgagttacgttttatgcatccttatacccagcagccgttagtgattcgcgctggactagatgaagtgtggcaaggcttgcttagtgagtttggttggcaagagtcgctgttaatcaacgcttga

SEQ ID NO: 4141 - protein, 244 aa, Vibrio cholerae
MLEIVYQDEYLVAVNKPAGMLVHRSWLDKHETEFVMQTLRDQIGQHVFPLHRLDRPTSGVLVFALSSQIASEVMPMFANHEMEKTYHAIVRGWIEEANVLDYPLKEELDKIADKFAKQDKEAQSAVTAYRPLAKVELPIATGKFATTRYCLMEMQPKTGRKHQLRRHMAHLRHPIVGDTTHGDGVHNRLFREHFSAQRLMLHASELRFMHPYTQQPLVIRAGLDEVWQGLLSEFGWQESLLINA

SEQ ID NO: 4142 - DNA, 741 bp, Vibrio parahaemolyticus
  CDS (1)..(741): transl_table=11
gtggctccagtagagttggagattgtttatcaagatgagtattttgttgcggtgaacaagcccgccggcatgttggttcatcgcagttggctagataaacacgaaactcagtttgtcatgcagactctgcgagaccaaattggtcagcatgtctttccgttgcatcgcttggatcgtccgacttctggcgttttggtgtttgcgctctccagtgaagtggcttctcaagtgatgcctatgtttgctgagcacaaaatggagaagacctatcacgcgattgtccgtggttggattgaggaagagggcgttttagattacgcgttaaaagtcgaattagacaaaattgcagataagttcgcctcacaagaaaaagaagctcaagaggccgtaaccgcttacaaaccactggcgaaagtggaagtgccttattcgacgggcaagttcccaacaacgcgctactgtttgatggaaatgaagcccaagactggtcgcaagcaccaattgcgtcgtcacatggcccacctacgtcacccaattgtgggggacacatcgcacggtgatggtaaacacaacaaattgttccgtaacgaatttgattcacaccgcttgctgttacatgcttcggagctgcgttttgtgcatccgtttacaaatgaagaactggtgatgaaagcgagtatcgacgatacgtggcagcaattgtttactcgatttgagtgggacgaagagctcgttaagtaa

SEQ ID NO: 4143 - protein, 246 aa, Vibrio parahaemolyticus
MAPVELEIVYQDEYFVAVNKPAGMLVHRSWLDKHETQFVMQTLRDQIGQHVFPLHRLDRPTSGVLVFALSSEVASQVMPMFAEHKMEKTYHAIVRGWIEEEGVLDYALKVELDKIADKFASQEKEAQEAVTAYKPLAKVEVPYSTGKFPTTRYCLMEMKPKTGRKHQLRRHMAHLRHPIVGDTSHGDGKHNKLFRNEFDSHRLLLHASELRFVHPFTNEELVMKASIDDTWQQLFTRFEWDEELVK

SEQ ID NO: 4144 - DNA, 738 bp, Vibrio vulnificus
  CDS (1)..(738): transl_table=11
atgctggagattgtgtatcaggatgaatattttgtggccgtgaataaaccggcgggcatgcttgtgcatcgcagttggttggataaacatgaaacgcagtttgtaatgcagacattgcgtgatcaaattggtcagcatgtttttccgcttcatcgcctggatcgtccaacctccggggtgttggtttttgcactgtcctctgaagtcgcatctcaggttatgcccatgtttgccggacaggagatgagcaaaacctaccatgcgattgtgcgtggctggatagaggaagaaggggagctagactacgcgttgaaggttgaactggataagattgcggacaagtttgcttcgcaagagaaggaagcgcaagacgcgattacgctctacaaaccgcttgctaaagtggaagtaccttattcaacgagcaagttcccaacgacccgctatgggttaatggagctcaagccgaaaaccggtcgtaagcatcaacttcgtcgccatatggcgcatcttcgtcatccgatcgtgggggataccacccatggtgatggcaaacacaacaagctgttccgtgaagagtttgacgcgccgagattgctgctgcacgcctctgaactcagatttgtccatccgtatacacagcaagaagtggtgattcgagcagaggttgataaagtttggcaacagttgtttgaacgttttgagtggccgagcactttgcttaccgcaagtcactaa

SEQ ID NO: 4145 - protein, 245 aa, Vibrio vulnificus
MLEIVYQDEYFVAVNKPAGMLVHRSWLDKHETQFVMQTLRDQIGQHVFPLHRLDRPTSGVLVFALSSEVASQVMPMFAGQEMSKTYHAIVRGWIEEEGELDYALKVELDKIADKFASQEKEAQDAITLYKPLAKVEVPYSTSKFPTTRYGLMELKPKTGRKHQLRRHMAHLRHPIVGDTTHGDGKHNKLFREEFDAPRLLLHASELRFVHPYTQQEVVIRAEVDKVWQQLFERFEWPSTLLTASH

SEQ ID NO: 4146 - DNA, 774 bp, Yersinia pestis
  CDS (1)..(774): transl_table=11
atgctggaaattatctatcaagatgaacacattgttgcggtgaataagcctgccggttggttagtgcatcgtagttggttggaccgcaatgaaacggtatttgttatgcaaacggtacgtgatcagattggtcagcatgtgtataccgttcatcgccttgatcgcccgacatcaggcgtattgctcatggcattgtccagtgatgtggctcgtatgttgtcgttacaatttgagcaacaccagattcagaaaacgtatcatgcggtggtgcgcggatatgtattggaaggtggcaccgttgattacgcgatggccgaagagctggataaaatagcggataagtttgctaagtctgataaggctccacagccttctgtcagccattatgaagcattagcgcaagtggaagttcctttggcgattggccgctatgaaactgctcgctatagcttggtggcattgaaaccggaaacgggtcgtaagcaccagttgcgtcggcatatggctcatatccgtcaccccattattggtgacagtacacatggtgatttacgtcagaacagaggtgtcgctcagcattttggttgttcacggttgatgctgcatgccagccatttacacctcaatcaccctgtgaccggtgaagcgctgacgcttaccgctcgttgggatgaaccctggcaagggttgatgtcacaatttggctggtcgggtattgcccctcatcttgaaagggttgagtttccgctgactgccagtcaggataatgaataa

SEQ ID NO: 4147 - protein, 257 aa, Yersinia pestis
MLEIIYQDEHIVAVNKPAGWLVHRSWLDRNETVFVMQTVRDQIGQHVYTVHRLDRPTSGVLLMALSSDVARMLSLQFEQHQIQKTYHAVVRGYVLEGGTVDYAMAEELDKIADKFAKSDKAPQPSVSHYEALAQVEVPLAIGRYETARYSLVALKPETGRKHQLRRHMAHIRHPIIGDSTHGDLRQNRGVAQHFGCSRLMLHASHLHLNHPVTGEALTLTARWDEPWQGLMSQFGWSGIAPHLERVEFPLTASQDNE

SEQ ID NO: 4148 - DNA, 25 bp, Artificial sequence
  primer
atgctggaaatactctatcaggatg

SEQ ID NO: 4149 - DNA, 24 bp, Artificial sequence
  primer
ttaggaacttatctctccatcctg

SEQ ID NO: 4150 - protein, 287 aa, Artificial sequence
  consensus sequence
  Variant (2)..(2): Xaa in position 2 is any amino acid
  Variant (4)..(4): Xaa in position 4 is any amino acid
  Variant (6)..(6): Xaa in position 6 is any amino acid
  Variant (8)..(11): Xaa in position 8 to 11 is any amino acid
  Variant (13)..(14): Xaa in position 13 to 14 is any amino acid
  Variant (17)..(17): Xaa in position 17 is any amino acid
  Variant (19)..(19): Xaa in position 19 is any amino acid
  Variant (25)..(29): Xaa in position 25 to 29 is any amino acid
  Variant (30)..(32): Xaa in position 30 to 32 is any or no amino acid
  Variant (34)..(38): Xaa in position 34 to 38 is any amino acid
  Variant (40)..(41): Xaa in position 40 to 41 is any amino acid
  Variant (44)..(45): Xaa in position 44 to 45 is any amino acid
  Variant (46)..(46): Xaa in position 46 is any or no amino acid
  Variant (48)..(49): Xaa in position 48 to 49 is any amino acid
  Variant (51)..(53): Xaa in position 51 to 53 is any amino acid
  Variant (66)..(66): Xaa in position 66 is any amino acid
  Variant (69)..(72): Xaa in position 69 to 72 is any amino acid
  Variant (74)..(79): Xaa in position 74 to 79 is any amino acid
  Variant (81)..(84): Xaa in position 81 to 84 is any amino acid
  Variant (85)..(131): Xaa in position 85 to 131 is any or no amino acid
  Variant (133)..(133): Xaa in position 133 is any amino acid
  Variant (135)..(135): Xaa in position 135 is any amino acid
  Variant (137)..(137): Xaa in position 137 is any amino acid
  Variant (141)..(148): Xaa in position 141 to 148 is any amino acid
  Variant (149)..(149): Xaa in position 149 is any or no amino acid
  Variant (151)..(152): Xaa in position 151 to 152 is any amino acid
  Variant (154)..(156): Xaa in position 154 to 156 is any amino acid
  Variant (157)..(157): Xaa in position 157 is any or no amino acid
  Variant (159)..(161): Xaa in position 159 to 161 is any amino acid
  Variant (164)..(166): Xaa in position 164 to 166 is any amino acid
  Variant (167)..(172): Xaa in position 167 to 172 is any or no amino acid
  Variant (174)..(174): Xaa in position 174 is any amino acid
  Variant (176)..(176): Xaa in position 176 is any amino acid
  Variant (178)..(181): Xaa in position 178 to 181 is any amino acid
  Variant (183)..(185): Xaa in position 183 to 185 is any amino acid
  Variant (187)..(195): Xaa in position 187 to 195 is any amino acid
  Variant (196)..(196): Xaa in position 196 is any or no amino acid
  Variant (198)..(198): Xaa in position 198 is any amino acid
  Variant (201)..(201): Xaa in position 201 is any amino acid
  Variant (203)..(206): Xaa in position 203 to 206 is any amino acid
  Variant (208)..(208): Xaa in position 208 is any amino acid
  Variant (212)..(212): Xaa in position 212 is any amino acid
  Variant (215)..(215): Xaa in position 215 is any amino acid
  Variant (219)..(220): Xaa in position 219 to 220 is any amino acid
  Variant (222)..(223): Xaa in position 222 to 223 is any amino acid
  Variant (227)..(227): Xaa in position 227 is any amino acid
  Variant (230)..(232): Xaa in position 230 to 232 is any amino acid
  Variant (235)..(237): Xaa in position 235 to 237 is any amino acid
  Variant (239)..(247): Xaa in position 239 to 247 is any amino acid
  Variant (248)..(248): Xaa in position 248 is any or no amino acid
  Variant (251)..(251): Xaa in position 251 is any amino acid
  Variant (253)..(253): Xaa in position 253 is any amino acid
  Variant (255)..(256): Xaa in position 255 to 256 is any amino acid
  Variant (258)..(260): Xaa in position 258 to 260 is any amino acid
  Variant (263)..(271): Xaa in position 263 to 271 is any amino acid
  Variant (273)..(282): Xaa in position 273 to 282 is any amino acid
  Variant (283)..(284): Xaa in position 283 to 284 is any or no amino acid
  Variant (286)..(286): Xaa in position 286 is any amino acid
LXIXYXDXXXXAXXKPXGXLVHRSXXXXXXXXEXXXXXQXXRDXXXGXXVXXXHRLDRPTSGVLLXALXXXXAXXXXXXFXXXXXXXXXXXXXXXXXXXXXXXXXXXXXXXXXXXXXXXXXXXXXXXXXXXKXYXAXVRGXXXXXXXXXDXXLXXXXDXXXDKXXXXXXXXXQXAXTXXXXLXXXEXXXXXXXXXXTXRYXLXXXXPXTGRXHQXRRHXXHXXHPIXGDXXXGDXXXNXXXXXXXXXXRLXLXAXXLXXXHPXXXXXXXXXAXXXXXXXXXXXXFXW

SEQ ID NO: 4151 - protein, 40 aa, Artificial sequence
  protein pattern
  Variant (3)..(3): Xaa in position 3 is Ala, Cys, Gly or Ser
  Variant (5)..(8): Xaa in position 5 to 8 is any amino acid
  Variant (10)..(10): Xaa in position 10 is any amino acid
  Variant (14)..(14): Xaa in position 14 is any amino acid
  Variant (15)..(15): Xaa in position 15 is His or Arg
  Variant (17)..(17): Xaa in position 17 is Ile or Leu
  Variant (21)..(21): Xaa in position 21 is Leu or Met
  Variant (22)..(22): Xaa in position 22 is any amino acid
  Variant (24)..(24): Xaa in position 24 is Ile or Leu
  Variant (25)..(25): Xaa in position 25 is any amino acid
  Variant (27)..(27): Xaa in position 27 is any amino acid
  Variant (28)..(28): Xaa in position 28 is Ile or Met
  Variant (29)..(29): Xaa in position 29 is any amino acid
  Variant (32)..(33): Xaa in position 32 to 33 is any amino acid
  Variant (34)..(34): Xaa in position 34 is His or Tyr
  Variant (36)..(36): Xaa in position 36 is Asp, Glu or Lys
  Variant (37)..(39): Xaa in position 37 to 39 is any amino acid
RYXLXXXXPXTGRXXQXRRHXXHXXHXXXGDXXXGXXXXN

SEQ ID NO: 4152 - protein, 21 aa, Artificial sequence
  protein pattern
  Variant (3)..(4): Xaa in position 3 to 4 is any amino acid
  Variant (6)..(7): Xaa in position 6 to 7 is any amino acid
  Variant (9)..(9): Xaa in position 9 is Phe, Trp or Tyr
  Variant (10)..(10): Xaa in position 10 is Pro or Thr
  Variant (11)..(11): Xaa in position 11 is Ala, Ile, Leu or Val
  Variant (16)..(16): Xaa in position 16 is Lys or Arg
  Variant (17)..(17): Xaa in position 17 is Gly or Pro
RDXXGXXVXXXHRLDXXTSGV

SEQ ID NO: 4153 - protein, 29 aa, Artificial sequence
  protein pattern
  Variant (2)..(2): Xaa in position 2 is Ile, Leu or Val
  Variant (3)..(3): Xaa in position 3 is Phe or Tyr
  Variant (4)..(4): Xaa in position 4 is Glu, Gln or Arg
  Variant (6)..(7): Xaa in position 6 to 7 is any amino acid
  Variant (8)..(8): Xaa in position 8 is Phe, Ile, Leu, Met or Val
  Variant (9)..(9): Xaa in position 9 is Ala, Ile or Val
  Variant (10)..(10): Xaa in position 10 is Ala or Val
  Variant (11)..(11): Xaa in position 11 is Ile or Val
  Variant (12)..(12): Xaa in position 12 is any amino acid
  Variant (15)..(15): Xaa in position 15 is any amino acid
  Variant (17)..(17): Xaa in position 17 is any or no amino acid
  Variant (19)..(19): Xaa in position 19 is any or no amino acid
  Variant (22)..(22): Xaa in position 22 is any amino acid
  Variant (24)..(24): Xaa in position 24 is any amino acid
  Variant (25)..(25): Xaa in position 25 is Ile, Leu, Met or Val
  Variant (26)..(26): Xaa in position 26 is Ala or Asp
  Variant (27)..(28): Xaa in position 27 to 28 is any amino acid
  Variant (29)..(29): Xaa in position 29 is Ala, Glu or Gly
IXXXDXXXXXXXKPXGXLXVHXSXXXXXX

SEQ ID NO: 4154 - protein, 9 aa, Artificial sequence
  protein pattern
  Variant (2)..(2): Xaa in position 2 is any amino acid
  Variant (4)..(4): Xaa in position 4 is any amino acid
  Variant (6)..(6): Xaa in position 6 is Ile, Leu or Val
KXYXAXVRG

SEQ ID NO: 4155 - protein, 18 aa, Artificial sequence
  protein pattern
  Variant (2)..(2): Xaa in position 2 is Asp, Glu, Pro, Gln or Ser
  Variant (3)..(3): Xaa in position 3 is Ala, Cys or Ser
  Variant (4)..(4): Xaa in position 4 is Ile, Leu or Val
  Variant (5)..(5): Xaa in position 5 is Ser or Thr
  Variant (6)..(6): Xaa in position 6 is any amino acid
  Variant (7)..(7): Xaa in position 7 is Phe or Tyr
  Variant (8)..(9): Xaa in position 8 to 9 is any amino acid
  Variant (11)..(13): Xaa in position 11 to 13 is any amino acid
  Variant (15)..(15): Xaa in position 15 is any amino acid
  Variant (16)..(17): Xaa in position 16 to 17 is any or no amino acid
QXXXXXXXXLXXXEXXXP

SEQ ID NO: 4156 - protein, 39 aa, Artificial sequence
  protein pattern
  Variant (3)..(3): Xaa in position 3 is any amino acid
  Variant (5)..(8): Xaa in position 5 to 8 is any amino acid
  Variant (10)..(10): Xaa in position 10 is any amino acid
  Variant (11)..(11): Xaa in position 11 is Phe, Leu or Met
  Variant (12)..(12): Xaa in position 12 is any amino acid
  Variant (15)..(21): Xaa in position 15 to 21 is any amino acid
  Variant (22)..(22): Xaa in position 22 is Ile, Leu or Met
  Variant (23)..(23): Xaa in position 23 is any amino acid
  Variant (24)..(24): Xaa in position 24 is Ala or Thr
  Variant (25)..(26): Xaa in position 25 to 26 is any amino acid
  Variant (27)..(27): Xaa in position 27 is Asp, Glu, Gly or Ser
  Variant (28)..(33): Xaa in position 28 to 33 is any amino acid
  Variant (34)..(34): Xaa in position 34 is Phe, Ile, Leu, Met or Val
  Variant (35)..(36): Xaa in position 35 to 36 is any amino acid
  Variant (37)..(37): Xaa in position 37 is Phe or Leu
  Variant (38)..(38): Xaa in position 38 is Asp, Glu, Gly, Asn or Ser
RLXLXXXXLXXXHPXXXXXXXXXXXXXXXXXXXXXXXXW

SEQ ID NO: 4157 - DNA, 549 bp, Escherichia coli K12
  CDS (1)..(549): transl_table=11
atgattcggcaacgtcgtcgtgcgttaacgccggaacaacagcaggaaatgggtcaacaagccgctacccggatgatgacttatcccccggtggtgatggcacatacggtcgctgtattcctctcttttgatggcgaactcgacacccagccactcatagaacaactctggcgcgccggtaagcgcgtatatcttccagttttgcatccctttagtgccggtaatttgctgttcctgaattaccatccgcaaagcgaactggtgatgaacaggttgaagatccatgagccaaaattggatgtgcgtgacgtgctacccctttcccgattagacgtgctgatcacaccgctggtcgcctttgatgagtacggtcagcgcctgggaatgggcggtggtttttatgatcggaccttacaaaactggcagcactataaaacgcaaccggtgggttatgcgcatgattgtcagttggtggaaaaactccccgttgaagagtgggatatccctcttcctgcggtggttacaccgtcgaaagtctgggagtggtaa

SEQ ID NO: 4158 - protein, 182 aa, Escherichia coli K12
MIRQRRRALTPEQQQEMGQQAATRMMTYPPVVMAHTVAVFLSFDGELDTQPLIEQLWRAGKRVYLPVLHPFSAGNLLFLNYHPQSELVMNRLKIHEPKLDVRDVLPLSRLDVLITPLVAFDEYGQRLGMGGGFYDRTLQNWQHYKTQPVGYAHDCQLVEKLPVEEWDIPLPAVVTPSKVWEW

SEQ ID NO: 4159 - DNA, 945 bp, Oryza sativa
  CDS (1)..(699)
atgtcgagtgccgcggcggcgcaggaggtcgccgaccagaagcgcgcgctgcggtccgaggtgcggagggcgctcagggccctcacccccgagcagcgcgccagcgaagaccaggctattcaaaatgcaattttgaactcttcttggttcaaagaaagcaagcggttatgtgcttatataagctgtgcacaattgcgggaagttgatacatcaaaagtactgtcagaagttttatccccaaattctgaacatggacatgcaaaggatctttatgttcctcgagtggaagataagaatcgcaatatgcggatgctcaaaatcactaccatggatgatttagttaaaaattcaatgaacattctagaaccatcaccacttgatgctagtgggaatgctcgtgaagaagtgttgtcaacctcttcccctgttgatctttttctattgcctggacaagcttttgataggactggacgaagattaggacgtggtggagggtactatgacacattcttgatgagatatcaagaacttgctaaagagaaagggtgggatcagcctcttctagtcgcgctttcatactcggtgcaaattttggaggaaggcatcatcccagtcaactcaacagatgttcctattgatgctctggtctcatcctctggcatcattccaatcagtcctgcagcattggcgaggatataattgagctgattggtttctgctttgcgttgacagtcaacctctcttccctgaacaacacttttttagataatgcttcaccaaagctgagaaatttttcgatcaagtgattttgttacgcaatgtatctgtattctgaatatgaattgattttgtctgcgtattgtaatgacaactttgatcaaacatacaataagttcatatatattcatagaggactatggacctgaaaaaaaaaaaaaaaaaaaa

SEQ ID NO: 4160 - protein, 232 aa, Oryza sativa
MSSAAAAQEVADQKRALRSEVRRALRALTPEQRASEDQAIQNAILNSSWFKESKRLCAYISCAQLREVDTSKVLSEVLSPNSEHGHAKDLYVPRVEDKNRNMRMLKITTMDDLVKNSMNILEPSPLDASGNAREEVLSTSSPVDLFLLPGQAFDRTGRRLGRGGGYYDTFLMRYQELAKEKGWDQPLLVALSYSVQILEEGIIPVNSTDVPIDALVSSSGIIPISPAALARI

SEQ ID NO: 4161 - DNA, 1357 bp, Zea mays
  CDS (137)..(982)
gcacgagcccacagttcggatcccggaggaggtgcaccgcggccggggcggcaccgcggcacacgagccggctagccgcgactgtctagtacgactgtacgagacacggcggtagtggcagctggcaggaagggagatgattaaaaataccgtggccacgctgatggtgcgcctccaccacctgcccctgccccgcgccgcgcccgctcccacctaccgttgccgccgccacctcgccctcgcgccccctctccctcggctgcgggcatcggccgccgtcatgtcaacggcggcggaacagacgatcgccgaccagaagcgcacgctgcgcgccgaggtgcgcagggcgctgaaggccctctctgccgaccagcgcgccagcgaagatctggctattcaaactacaatactggattcctcttggttcaaagcaagcaaacggttgtgcgcttatataagctgtcagcagttgcgagaagttgatacatcaaaaatactagcagagtgtctaccgtcgaatcctggacaagaggaactggcaaaggatctttatgttcctcgagtggaggataagaaccgtaatatgaggatgctcaaaatcaccaccatggatgatttagttaagaattcaatgaacattctggaaccatcgcctgtggatgctactgggaacaatcgtgaagatgtattgtcatcattgtctcctgttgatctttttttattgccgggacaagcttttgatagaactggtcgaagactggggcgtggtggagggtactatgacacattcttgctgaagtaccaagaacttgcaaaagagaaagggtggaaccagcctctcttagttgctctttcgtactcggtgcaaattatggacgagggcatcatcccagtcaattcaactgatgttcctattgatgctctggtctcatcctctggtgttattccaataagtgctgcggcgttgcagaggatgcaatgaagttgattggcctctgtagccatgctttgacaagaagcaccttcttctgatccctggttgcactagcaaatacaccagcagatcagggaaactgtctcttttttccccctcgtggctcctctcttgtattgtatcatcttttacgttttaacagggtgaactggacgtctacatcttattccagccacttcagatttatagattttataatgtaaaccgtcgagctgaccaaaacagtcagtagacttgacatggtattcggagtttggtcgtcttgtatcttgaaagcttacgtcttcaggggactagccagtcgcctcaaaaggagataaataacaaaacttcatccgattttttaaagaaaacccccaaacc

SEQ ID NO: 4162 - protein, 281 aa, Zea mays
MIKNTVATLMVRLHHLPLPRAAPAPTYRCRRHLALAPPLPRLRASAAVMSTAAEQTIADQKRTLRAEVRRALKALSADQRASEDLAIQTTILDSSWFKASKRLCAYISCQQLREVDTSKILAECLPSNPGQEELAKDLYVPRVEDKNRNMRMLKITTMDDLVKNSMNILEPSPVDATGNNREDVLSSLSPVDLFLLPGQAFDRTGRRLGRGGGYYDTFLLKYQELAKEKGWNQPLLVALSYSVQIMDEGIIPVNSTDVPIDALVSSSGVIPISAAALQRMQ

SEQ ID NO: 4163 - DNA, 582 bp, Neisseria meningitidis
  CDS (1)..(582)
atgaggaacgaggaaaaacgcgccctgcgccgcgaattgcgcgggcggcgttcgcaaatggggcgggacgtgcgggcggcggcaacggtaaaaatcaaccacctgctcaaacgttatattaaaaaagggcggaaaatcggcgtgtattggccgatgggcaaggaattgcgtttggacggctttgtccgcgcggcgcaaaaacgcggtgcggaactctacctgccttatatcgaaccgcgttcgcggcggatgtggtttacgccgtatcctgccgatggagtaaaacaagaacgcaagcgcggtagggcgaagctgcatgtccctcagtttgcaggtcggaaaaagcgtgtgcatgatttgaacctcctgcttgtgccagtggtcggtatggacaggctgggctaccgcttgggacaggcaggcggctattacgatgcgacgctttcagcgatgaaataccgtttgcaggcaaaaaccgtgggcgtgggctttgcctgccagttggtggacaggctgccggtcgaggcgcacgaccggtctttggacggttttgtgtcggaggcggggatattgtgtttttag

SEQ ID NO: 4164 - protein, 193 aa, Neisseria meningitidis
MRNEEKRALRRELRGRRSQMGRDVRAAATVKINHLLKRYIKKGRKIGVYWPMGKELRLDGFVRAAQKRGAELYLPYIEPRSRRMWFTPYPADGVKQERKRGRAKLHVPQFAGRKKRVHDLNLLLVPVVGMDRLGYRLGQAGGYYDATLSAMKYRLQAKTVGVGFACQLVDRLPVEAHDRSLDGFVSEAGILCF

SEQ ID NO: 4165 - DNA, 546 bp, Streptococcus pneumoniae
  CDS (1)..(546)
ttgtatatgaaatcggaattacgcaagcaagtcttgcatgaaatgaaggctttatctcaagaacaaaaacaggctatagaccaagctttaaccgagcgaattttacaacaccccttttatcaagaagccaaggtcatcgcaacctacctctctttttctcatgagtttcaaacgcgggaactgattgagcaggcgctgaaggacggcaagaaggttttaatacccaaaacttatcccaaggggcgcatggactttgtagtctatgatccgcagcagttggtaaaaactgcctttgccttactggagccacagggagatttggaagtggtggatgtatctcagattgatttgattcatgttcctggcctggcttttacgacggatggatatcggattggatatggtggaggttattatgaccgctatctggaacatttttctggtcatactttgagtacggttcatccttgtcaaattcaggactttatacctgaaaaccatgatattcctgttcaggaggtattaattgatgaaggaaatctttga

SEQ ID NO: 4166 - protein, 181 aa, Streptococcus pneumoniae
LYMKSELRKQVLHEMKALSQEQKQAIDQALTERILQHPFYQEAKVIATYLSFSHEFQTRELIEQALKDGKKVLIPKTYPKGRMDFVVYDPQQLVKTAFALLEPQGDLEVVDVSQIDLIHVPGLAFTTDGYRIGYGGGYYDRYLEHFSGHTLSTVHPCQIQDFIPENHDIPVQEVLIDEGNL

SEQ ID NO: 4167 - DNA, 582 bp, Legionella pneumophila
  CDS (1)..(582)
atgtcagaccaatataaagttgctctaagaaataccataaaacaggtaagatccaagctttctgtatcctacagaacagcatcttccaatcaaatttgtactcgtatccgctcgctggaacaatacaggcaagcaaagcgaatagccttgtactttgcagttaatggagaaattgatttaacatttctctggaaaagcgcgcccctccaggggaagtattgttattttccggtattaaataatgattccactctttcttttttaccagccacccccagcaccccttttaaaacgaataaatacgatatcccggaaccggacgttgatattgagttggccttgcctgttgatgaattagacttgattatcatgcctctggttgcatttgatgcacactgtactcgtttgggtatgggctcaggctactatgatcgcaccttggctaataaatcaaaagcgcatctcttaggagtcgcctaccaatttcaaagggttgattacatagaaccacgcccttgggatgttcccctggatgccgtaataactcaaaaagctatttattggcgaaatcccttggcctaa

SEQ ID NO: 4168 - protein, 193 aa, Legionella pneumophila
MSDQYKVALRNTIKQVRSKLSVSYRTASSNQICTRIRSLEQYRQAKRIALYFAVNGEIDLTFLWKSAPLQGKYCYFPVLNNDSTLSFLPATPSTPFKTNKYDIPEPDVDIELALPVDELDLIIMPLVAFDAHCTRLGMGSGYYDRTLANKSKAHLLGVAYQFQRVDYIEPRPWDVPLDAVITQKAIYWRNPLA

SEQ ID NO: 4169 - DNA, 585 bp, Vibrio cholerae O1 biovar eltor str. N16961
  CDS (1)..(585): transl_table=11
atgacagattctcgtacacacctacgcctgcaaattcgtcagcgtcgacaatcactctcagcgtttgagcaacagacggctagccaacaacttatccatacctttgccagcttaccggaagtgactgccgcgcagcgtattgccctgtatcttgccaatgatggtgagctcaatacccaaccactgatcgaatggctttggcagcaaggtaaacaagtgtatctccctgttttgcaccctttcgcaaaaggtcacttgctgtttctgcactaccacacacacacaccaatgaacaaaaatcgctatgggatcgcagagcctaaactcgaccaacgtttgatctgcccggttcgagagctcgatattatcggtactcctttggtggcgtttgatcaatcaggccagcgtttgggaatgggtggcggctattacgatcgcactctcgcaccttggtttaaaacgcagcaaggcgcgatgccgattggtcttgcgcacgattgccaacaagtcgaacaactgcccactgcaagctgggatattccgttacgaaaaatcgtgacccccagcaaggtttggcagtggtag

SEQ ID NO: 4170 - protein, 194 aa, Vibrio cholerae O1 biovar eltor str. N16961
MTDSRTHLRLQIRQRRQSLSAFEQQTASQQLIHTFASLPEVTAAQRIALYLANDGELNTQPLIEWLWQQGKQVYLPVLHPFAKGHLLFLHYHTHTPMNKNRYGIAEPKLDQRLICPVRELDIIGTPLVAFDQSGQRLGMGGGYYDRTLAPWFKTQQGAMPIGLAHDCQQVEQLPTASWDIPLRKIVTPSKVWQW

SEQ ID NO: 4171 - DNA, 573 bp, Pasteurella multocida subsp. multocida str. Pm70
  CDS (1)..(573): transl_table=11
atgaatactgattctctgcttcgccaaaaaattcgaaatgacattcgaaaacgtcgtcaaaaactcaccgcacttgagcaacaacaagccgaacagtctattacacaacaagcattgcagctgattacacagaaaaaagcaaacacagtagcgctttatttatctttcgatggagaagtatctactcagcagctcattacgtgtttatggcagcaaggcatacaagttgctgtacctgttttgcatcctttttgtccggggcatttgttgtttttacgctatcatccagaatcggttatgtataagaattcatttggtattttagaacctcaactcaatgttcaagacgttgtgccaataagcgcgctagagataatttttacgcctcttgttgctttcgataaacaaggtaatcgtcttggaatgggcgggggattttatgatcgcacgttacaaggttggcaggaaaaatcctttatccctgtaggacttgcacatgcctgtcaatttgttgagcatttacctagccaagcttgggatatgccacttgcacagattttgattgcagaataa

SEQ ID NO: 4172 - protein, 190 aa, Pasteurella multocida subsp. multocida str. Pm70
MNTDSLLRQKIRNDIRKRRQKLTALEQQQAEQSITQQALQLITQKKANTVALYLSFDGEVSTQQLITCLWQQGIQVAVPVLHPFCPGHLLFLRYHPESVMYKNSFGILEPQLNVQDVVPISALEIIFTPLVAFDKQGNRLGMGGGFYDRTLQGWQEKSFIPVGLAHACQFVEHLPSQAWDMPLAQILIAE

SEQ ID NO: 4173 - DNA, 612 bp, Pseudomonas aeruginosa PAO1
  CDS (1)..(612): transl_table=11
atgatcgaatcgcaagacctcagccgcccggccctgcgccgcaagctccgccaggcgcgccgcgcgctctcccccctgcagcaacgcctcgccgcccgcgccctctatcgacaactggcgcagcatccccttttccgccgtgcccgccatatcgccctgtacctgcccaacgacggcgagatcgacccgcgtccgctgctgcgtgcggcgcagaagcgcggcaaggccacctacctgccggtgctggcgccctggccgcggacgcgcatggtattccagcgggtcggcagcggcgaacgctggacccgcaaccgcttccgcatcagcgaaccgctggccgacgccggccgccagcgcaaggcctgggcgctggacctggtactgctgccgctggtggggttcgacgaacagggcgggcgcctgggcatgggcggcggcttctacgaccgcagcctggcctacctggcgaggcgcaaaaatggtcacaaaccgacgctgatcggcctggcccatgaatgtcagaaggtggatcgactggcgctggccagctgggacattcccctggcgggaacggtgaccgatgcgggctggtacgtggcagggaaacgctag

SEQ ID NO: 4174 - protein, 203 aa, Pseudomonas aeruginosa PAO1
MIESQDLSRPALRRKLRQARRALSPLQQRLAARALYRQLAQHPLFRRARHIALYLPNDGEIDPRPLLRAAQKRGKATYLPVLAPWPRTRMVFQRVGSGERWTRNRFRISEPLADAGRQRKAWALDLVLLPLVGFDEQGGRLGMGGGFYDRSLAYLARRKNGHKPTLIGLAHECQKVDRLALASWDIPLAGTVTDAGWYVAGKR

SEQ ID NO: 4175 - DNA, 549 bp, Salmonella enterica subsp. enterica serovar Typhi str. CT18
  CDS (1)..(549): transl_table=11
atgattcggcaacgtcgccgtgcgctgacgccagagcagcaacgccgctttggtcaacaggccgccgcccgaatgctcagctttcctcccgtcgtgatggcgcacactgtcgccgtgtttctctcctttgatggcgaactcgacacccagccgctgatagaacagctatggcaagcgggcaagcgcgtctaccttccggttcttcatcccttcagccctggcaacctcctgtttctgcactatcatccgcagagtgcgctggtgaccaaccgcttaaatatccgggagccacggcttgatgtccgcgacgtattgccgctggcaaagctggatgtgctggtaacgccgttagtcgcgtttgacgaaggcgggcagcgtttaggcatgggcggcggtttttatgaccgcacgctacaaaactggcagcagcataagatcctacctgtgggctacgcgcatgattgccagttagtagaaaaactgccggttgaagagtgggatatcccgctgcctgcggtggtgacgccgtccaaaatttgggagtggtag

SEQ ID NO: 4176 - protein, 182 aa, Salmonella enterica subsp. enterica serovar Typhi str. CT18
MIRQRRRALTPEQQRRFGQQAAARMLSFPPVVMAHTVAVFLSFDGELDTQPLIEQLWQAGKRVYLPVLHPFSPGNLLFLHYHPQSALVTNRLNIREPRLDVRDVLPLAKLDVLVTPLVAFDEGGQRLGMGGGFYDRTLQNWQQHKILPVGYAHDCQLVEKLPVEEWDIPLPAVVTPSKIWEW

SEQ ID NO: 4177 - DNA, 549 bp, Salmonella typhimurium LT2
  CDS (1)..(549): transl_table=11
atgattcggcaacgtcgccgtgcgctaacgccagagcagcaacgccgttttggtcaacaggccgccgcccgaatgctcagctttcctcccgtcgtgatggcgcacactgtcgccgtgtttctctcctttgatggcgaactcgacacccagccgctgattgaacagctatggcgagcgggcaagcgcgtctaccttccggttcttcatcccttcagccctggcaacctcctgttcctgcactattatccgcagagtgtgctggtgaccaaccgcttaaagattcaggagccacggcttgatgtccgcgacgtattgccgctggcaaagctggatgtgctggtaacgccgttagtcgcgtttgacgaagacgggcagcgcctggggatgggcggcggattttatgaccgtacgttgcaaaactggcagcagcataagatcctacctgtgggctacgcgcatgattgccagttagtggaaaagttgccggttaaagagtgggatatcccgctgcctgcggtggtgacgccgtccaaaatttgggagtggtag

SEQ ID NO: 4178 - protein, 182 aa, Salmonella typhimurium LT2
MIRQRRRALTPEQQRRFGQQAAARMLSFPPVVMAHTVAVFLSFDGELDTQPLIEQLWRAGKRVYLPVLHPFSPGNLLFLHYYPQSVLVTNRLKIQEPRLDVRDVLPLAKLDVLVTPLVAFDEDGQRLGMGGGFYDRTLQNWQQHKILPVGYAHDCQLVEKLPVKEWDIPLPAVVTPSKIWEW

SEQ ID NO: 4179 - DNA, 597 bp, Yersinia pestis KIM
  CDS (1)..(597): transl_table=11
atgccgcaaaatccacaacatgcccttgagcggcaacgtatccgcgcggaaatccgtgagcatcggcgtctgctaacacccgttcaacagcaacaatcggcacatctggcggcacagcacattgccgagcaccccaaaatccagcaagctcacacggtagccgtgtttctctcctttgacggcgaacttgatacccagccaattattgagcaactgtggcagcagaaaaaacaggtttatttgcctgtcctccacccgtttagccccggtaatttattatttctgcgctatcgcccagaaagcccgctaatccgcaaccgactgaaaatccttgaaccccaactcgatgtgcgagaagtcttgccattgcatcaactcgatgtagtgattaccccattggtcgcctttgatcgccatggtcagcgtttggggatggggggcggtttttatgaccgaactctgcaacgctggcagcaaaatggcccttatcctattggattggcccatgattgccagttggtcgataagttaccgagtgaatattgggatgtgccgttgccagagattgtgacaccagcaaaagtgtggcagtggtga

SEQ ID NO: 4180 - protein, 198 aa, Yersinia pestis KIM
MPQNPQHALERQRIRAEIREHRRLLTPVQQQQSAHLAAQHIAEHPKIQQAHTVAVFLSFDGELDTQPIIEQLWQQKKQVYLPVLHPFSPGNLLFLRYRPESPLIRNRLKILEPQLDVREVLPLHQLDVVITPLVAFDRHGQRLGMGGGFYDRTLQRWQQNGPYPIGLAHDCQLVDKLPSEYWDVPLPEIVTPAKVWQW

SEQ ID NO: 4181 - DNA, 675 bp, Shewanella oneidensis MR-1
  CDS (1)..(675): transl_table=11
atgtctatcacttcacctgtctcgaacacttgggccccaacagtcaaggggccacatggcactcagtccaaaattgataccaagtcgctaagcccaaatctcagccgcgccgaattacgcaaacaggtacgtttggcccgccgctcactttcaacagaggtgcaggcagaggcaagcattaacgcctgtgagcgaatgctcaaaaagctgatggcaatgaatgcccagcatgtcgcgctttatctaacccacgatggcgaactcgctaccgccccgcttatcgcagcgctttggcagcgaggtattcaaacctatctgccacgactacacccctttaatgcagggcaattattgtttttgcattaccacgccgactcgccgatgcagcccaatcaatacggcattttagagcctaagctggatgtgcgtagcgttatgccgattgagcgccttgatgtggtcgttacaccgctcgtggcctttgatatcaaaggcaatcgcatgggcatgggcggcggctattacgacagaacgctagccaattggcaggataatggtaagccactgccgatgggttatgcccatgattgtcagcaagtaccgagccttccctgcgagcattgggatgtgcccttgcccgctatcatcaccccaagtcgggtatgggagttttga

SEQ ID NO: 4182 - protein, 224 aa, Shewanella oneidensis MR-1
MSITSPVSNTWAPTVKGPHGTQSKIDTKSLSPNLSRAELRKQVRLARRSLSTEVQAEASINACERMLKKLMAMNAQHVALYLTHDGELATAPLIAALWQRGIQTYLPRLHPFNAGQLLFLHYHADSPMQPNQYGILEPKLDVRSVMPIERLDVVVTPLVAFDIKGNRMGMGGGYYDRTLANWQDNGKPLPMGYAHDCQQVPSLPCEHWDVPLPAIITPSRVWEF

SEQ ID NO: 4183 - DNA, 609 bp, Pseudomonas putida KT2440
  CDS (1)..(609): transl_table=11
atgaccgaaaacgtgccgctcacccgcccccagctacgtcgcctgcttcgcaatgcccgccgcgcccttacccctgcccagcaacgccaggccaccctcggcctgtaccgccagctggcgcaacaccccttgttccgccgcgcccgccacattgccctgtacctgcccaacgacggtgaaatcgaccctcgcctgctgatgcgcgaagcccagcgtcgcggcaagtgcatctacctgccggtgctgcatgcctggccgcgcacgcgcatggtgttccagcgttttgagcagggtgagaagctcaagcccaaccgcttccgtattccagagccgattatcgatcgcaaacgccagcggccgatctgggcgctggatctgattctgctaccgctggtcgggtttgacgaagtgggcggccgcctgggtatgggcggtggcttctatgatcgcagcctggcctaccaggcgcgtcggcaaacctggaaaaaacccttgctgctggggctggcgcatgaatgccagaaggtcgagcggctggcgcaggccagttgggatgttccgctgcagggcacggtctcggaccgtggctggtacctggcgccacgttga

SEQ ID NO: 4184 - protein, 202 aa, Pseudomonas putida KT2440
MTENVPLTRPQLRRLLRNARRALTPAQQRQATLGLYRQLAQHPLFRRARHIALYLPNDGEIDPRLLMREAQRRGKCIYLPVLHAWPRTRMVFQRFEQGEKLKPNRFRIPEPIIDRKRQRPIWALDLILLPLVGFDEVGGRLGMGGGFYDRSLAYQARRQTWKKPLLLGLAHECQKVERLAQASWDVPLQGTVSDRGWYLAPR

SEQ ID NO: 4185 - DNA, 600 bp, Vibrio vulnificus CMCP6
  CDS (1)..(600): transl_table=11
atgcaaaatctttcccggcaagacatccgtacacttatccgccaaagacgcaatcaattatgcagtgatactcaatatcaagctgcgctggatttgacagcccactttgcccagctcgatgaactcactgacgcgcaacacatcgccctctatctttctgctgacggagagctcgataccaaaccgttgattgaatggctttgggaactgggtaagcaagtgtatctcccggtcatccatcctttttccaaagggcagcttctttttctgcactaccatcgccacaccgatttgatctacaaccgctacggtatccttgagcccaagcttgataaacgtcatatcatcccactcgcagagcttgatttaatttgtacgccactggtcgcctttgacagtacagggcaaaggctcggtatgggaggcggctactatgaccgcaccttagagcgttggtttcgcactggcttaggtgccaagcctatcggtatcgcccatgattgccagcatgttgagcagctaccttgcgaagtttgggatattcctttgcctaagatcgtgaccccaagccaaatctggcaatgggaaaacgacgtttaa

SEQ ID NO: 4186 - protein, 199 aa, Vibrio vulnificus CMCP6
MQNLSRQDIRTLIRQRRNQLCSDTQYQAALDLTAHFAQLDELTDAQHIALYLSADGELDTKPLIEWLWELGKQVYLPVIHPFSKGQLLFLHYHRHTDLIYNRYGILEPKLDKRHIIPLAELDLICTPLVAFDSTGQRLGMGGGYYDRTLERWFRTGLGAKPIGIAHDCQHVEQLPCEVWDIPLPKIVTPSQIWQWENDV

SEQ ID NO: 4187 - DNA, 612 bp, Pseudomonas syringae pv. tomato str. DC3000
  CDS (1)..(612): transl_table=11
atgatcagcgcccagtcacttacacgtccgcaattgcgccgccagctacgcaaggcacgcagagtgctcactcgcagccagcaacgcgcagccgcccgcggcctctaccagcagttggcgcaacacccgctgtttcgacgcgcccgtcacgtctccctgtacctgccgatggacggcgagatcgacccgcgcctgttgctgcgcgaagcacagcgtcgcggcaaggcaacttacctgccggtgctcaacgcatggccacgcacccgcatggttttccagcgtgtgcgtcccggcgagaaattcatccccaatcgctttcgcattcccgaaccgcgcatcaatcgcacgaagcaacgccctgtgtgggcactcgacctggtgctgatgccgctggtgggtttcgatgacgaaggcggtcgcctgggcatgggtggcggcttctacgaccgcagcctggcgtatctggcgcgcagaaaaacctggcgcaaaccggcgctgctgggcttggctcatgagtgtcagaaagtagatcgactggcgcaggccatttgggatgtaccgctacagggcacggtatcggacaagcaatggtatttgacgcagaggctctga

SEQ ID NO: 4188 - protein, 203 aa, Pseudomonas syringae pv. tomato str. DC3000
MISAQSLTRPQLRRQLRKARRVLTRSQQRAAARGLYQQLAQHPLFRRARHVSLYLPMDGEIDPRLLLREAQRRGKATYLPVLNAWPRTRMVFQRVRPGEKFIPNRFRIPEPRINRTKQRPVWALDLVLMPLVGFDDEGGRLGMGGGFYDRSLAYLARRKTWRKPALLGLAHECQKVDRLAQAIWDVPLQGTVSDKQWYLTQRL

SEQ ID NO: 4189 - DNA, 609 bp, Vibrio parahaemolyticus RIMD 2210633
  CDS (1)..(609): transl_table=11
atgtcatcacaatccatatcatcacgctcccggcaagacttccgcaaacttatccgtgaaaaacgcaacgccttgtgtagcgatacgcagtttcaagcggggctagacctagttactcaattcgcccaacttccagaaatccaacaagcgcagaacattgccatttatctctctgccgatggtgaactcgatacgaagccactgattgaatggttatggcaacagggaaagtcggtgtatttacccgtcatccatccgttctcaaaaggccagttattgtttcttcaatacgtgaatgaagatcaactggtctacaataagtaccgcattctcgaaccaaaactcgacattcgccaccttcttcccgtcaaacaattagatgtaatctgcacgcctttggtcggcttcgacagcatcgggcaccgcttaggtatgggtggaggctactacgatcgcactctttctcattggttcaagacaggagaaggtgccaaaccgattggcattgctcacgattgccagcatgtagaacgcttaccaattgaaagctgggatattccattacctaagatcgtgactccaagccaaatatggcaatgggaaaagtaa

SEQ ID NO: 4190 - protein, 202 aa, Vibrio parahaemolyticus RIMD 2210633
MSSQSISSRSRQDFRKLIREKRNALCSDTQFQAGLDLVTQFAQLPEIQQAQNIAIYLSADGELDTKPLIEWLWQQGKSVYLPVIHPFSKGQLLFLQYVNEDQLVYNKYRILEPKLDIRHLLPVKQLDVICTPLVGFDSIGHRLGMGGGYYDRTLSHWFKTGEGAKPIGIAHDCQHVERLPIESWDIPLPKIVTPSQIWQWEK

SEQ ID NO: 4191 - DNA, 588 bp, Candidatus Blochmannia floridanus
  CDS (1)..(588): transl_table=11
atgaatttaaataaaaaagctattcgatcatatatacgttctttgagacaatctttaaattattcagaacaatacaaatctgctcaacttatcactaataaaattatcaacttagattgtatacacaaagcaacccatattggaatatatatatcttttgatggagaaatatatactgatttacttattaaatttttattatcaatgaaaaaaaaaatttatattccagtattattgcataaacaacaacatttattatttgctccatacaccctatctacccctactatacaaaattatttaaatgtatatgaacctaaatataatattattgatcttatatccttagataagttagatataatatttatccctttagtagcttttgatgatcatggcaacagattaggtatgggaggaggtttttacgataaaactcttcaataccaaaaacataaatcacattgtatctatataggtctaggtcatgattttcaaaaaataccaacttccatcctgactcaggaaaaatgggatgtaaaattacctaaaataattacaccatcgtatttacattggcatacttaa

SEQ ID NO: 4192 - protein, 195 aa, Candidatus Blochmannia floridanus
MNLNKKAIRSYIRSLRQSLNYSEQYKSAQLITNKIINLDCIHKATHIGIYISFDGEIYTDLLIKFLLSMKKKIYIPVLLHKQQHLLFAPYTLSTPTIQNYLNVYEPKYNIIDLISLDKLDIIFIPLVAFDDHGNRLGMGGGFYDKTLQYQKHKSHCIYIGLGHDFQKIPTSILTQEKWDVKLPKIITPSYLHWHT

SEQ ID NO: 4193 - DNA, 597 bp, Photorhabdus luminescens subsp. laumondii TTO1
  CDS (1)..(597): transl_table=11
atgcaatcagagcacctattatcactcagacaaagcattagaaagaaaatacgccaacaacgccgtgaactcacttctgaacaacaatctctttttgcaagacaggctgctgagcgagcaatcaaccaccccaaaattcaccaagccaacaaaatcgcgctattcctttcgtttgatggtgaactcgatacccgtccactgattaaccaactctggcaacaaaataaacagatctatctgccggtattgcaccctttccgtcatcaccatctgctatttttaaactatcaacccaatagtcggcttgtcagaaatcgcttcaatatagaagagccaccgctgaatgttgagcaggttttaccgttatcagagctggatatcatgatgatcccgctggttgcttttgaccgcacaggacaacggcttggcatgggtggtggcttttacgatcgtacattgaggcaatggcaacaaaaaaatttctacccgataggtctggcgcataactgtcagttagtcgatacactgcccatagccgaatgggatatcccattacccgaaatcatcacacctgaaaaaatctggcaatggcagtaa

SEQ ID NO: 4194 - protein, 198 aa, Photorhabdus luminescens subsp. laumondii TTO1
MQSEHLLSLRQSIRKKIRQQRRELTSEQQSLFARQAAERAINHPKIHQANKIALFLSFDGELDTRPLINQLWQQNKQIYLPVLHPFRHHHLLFLNYQPNSRLVRNRFNIEEPPLNVEQVLPLSELDIMMIPLVAFDRTGQRLGMGGGFYDRTLRQWQQKNFYPIGLAHNCQLVDTLPIAEWDIPLPEIITPEKIWQWQ

SEQ ID NO: 4195 - DNA, 852 bp, Desulfovibrio vulgaris subsp. vulgaris str. Hildenborough
  CDS (1)..(852): transl_table=11
atgacccaaccacgaagcacctcaccggcatctccggcatctcccgcatcagctggcaatgcgacacggaagccgcggcatgacgcgaaggtgaccgcggcacactccgcagcgacggcacctgtggacccatcttcggcatcgggtacttccgctcaagccacaggtggcgattctcgcgcgacaggtgacagccccccggcaccgactggcataccgcccgccccctcttccatcatccgcggcgcggctgcgcaggacatggcaaccgccaagaccgccctgcggcgggagatgctgcaacggcgacgcgacctcgacagggaggaggcccagcgtcacggcgccttggcacaggcggccctgcttgcccatccggcatgggtcacggcacggcaggtggtgctctacgtcgccgtccgcaacgaactcgacacggacctgctactgcgcaccgcgtgggaggcgggcaaggaggttctgctgccccgctgcgaccccgcctgttccggcgtcatgtgccttgccccgtgcctctgtgccgccgacctcggccccggcagtcatggcattcccgaaccctcgcccctgcgctgcccgcctgtcgacccgcagtccccgacctttgcgcccgacctcgccatcatccccggcgtcgccttcgacagacagggcaaccgcctcggctacggcggcggctactacgaccgtttcctctccacccccggcatgtccgcgacgccgctggtcggcttcgcccatgccttccagattgtggacgccctccccgccgaagcgtgggaccgtcccgtgaacgcgctctgcaccgaggagggcctcatatggctatga

SEQ ID NO: 4196 - protein, 283 aa, Desulfovibrio vulgaris subsp. vulgaris str. Hildenborough
MTQPRSTSPASPASPASAGNATRKPRHDAKVTAAHSAATAPVDPSSASGTSAQATGGDSRATGDSPPAPTGIPPAPSSIIRGAAAQDMATAKTALRREMLQRRRDLDREEAQRHGALAQAALLAHPAWVTARQVVLYVAVRNELDTDLLLRTAWEAGKEVLLPRCDPACSGVMCLAPCLCAADLGPGSHGIPEPSPLRCPPVDPQSPTFAPDLAIIPGVAFDRQGNRLGYGGGYYDRFLSTPGMSATPLVGFAHAFQIVDALPAEAWDRPVNALCTEEGLIWL

SEQ ID NO: 4197 - DNA, 627 bp, Erwinia carotovora subsp. atroseptica SCRI1043
  CDS (1)..(627): transl_table=11
atgtcaattcttcccagcgcttcaccatcctcgactgcagtatcacgtcagcagattcgtcaggctgtgcgccagcagcggcgtttactgacgccggaacagcagagattatttgcactacaggcgtgtgaacgcgtcatggcacacccaaaaatcatacgggcagataacattgcggtatttctgtcgtttgatggcgagctggatacgcccccgttgattcaacagctgtggcagcagggaaagcgcgtttacttgccagtcctgcatccgtttcgcgctggatatctgctgtttctgcgctatgcaccggacaccgagctggtgcgcaatcgtctgaagattatggaaccgcgtctggatgtacgtcaggttttgccgttaccgcagttggatattcttctgacgccgctggtggcgtttgatcatcaggggcagcgcttgggcatgggcggtggtttttacgaccgtacgttgcagtatcgcaaccagatgtctcgcgggccttacccgattgggctggcccacgattgtcagcaggttgacgcactaccagtcgaaagttgggacattccgctgccggaaattattaccccctcccatcattggcagtggaacacgcgctag

SEQ ID NO: 4198 - protein, 208 aa, Erwinia carotovora subsp. atroseptica SCRI1043
MSILPSASPSSTAVSRQQIRQAVRQQRRLLTPEQQRLFALQACERVMAHPKIIRADNIAVFLSFDGELDTPPLIQQLWQQGKRVYLPVLHPFRAGYLLFLRYAPDTELVRNRLKIMEPRLDVRQVLPLPQLDILLTPLVAFDHQGQRLGMGGGFYDRTLQYRNQMSRGPYPIGLAHDCQQVDALPVESWDIPLPEIITPSHHWQWNTR

SEQ ID NO: 4199 - DNA, 597 bp, Yersinia pseudotuberculosis IP 32953
  CDS (1)..(597): transl_table=11
atgccgcaaaatccacaacatgcccttgagcggcaacgtatccgcgcggaaatccgtgagcatcggcgtctgctaacacccgttcaacagcaacaatcggcacatctggcggcacagcacattgccgagcaccccaaaatccagcaagctcacacggtagccgtgtttctctcctttgacggcgaacttgatacccagccaattattgagcaactgtggcagcagaaaaaacaggtttatttgcctgtcctccacccgtttagccccggtaatttattatttctgcgctatcgcccagaaagcccgctaacccgcaaccgactgaaaatccttgaaccccaactcgatgtgcgagaagtcttgccattgcatcaactcgatgtagtgattaccccattggtcgcctttgatcgccatggtcagcgtttggggatggggggcggtttttatgaccgaactctgcaacgctggcagcaaaatggcccttatcctattggattggcccatgattgccagttggtcgataagttaccgagtgaatattgggatgtgccgttgccagagattgtgacaccagcaaaagtgtggcagtggtga

SEQ ID NO: 4200 - protein, 198 aa, Yersinia pseudotuberculosis IP 32953
MPQNPQHALERQRIRAEIREHRRLLTPVQQQQSAHLAAQHIAEHPKIQQAHTVAVFLSFDGELDTQPIIEQLWQQKKQVYLPVLHPFSPGNLLFLRYRPESPLTRNRLKILEPQLDVREVLPLHQLDVVITPLVAFDRHGQRLGMGGGFYDRTLQRWQQNGPYPIGLAHDCQLVDKLPSEYWDVPLPEIVTPAKVWQW

SEQ ID NO: 4201 - DNA, 666 bp, Methylococcus capsulatus str. Bath
  CDS (1)..(666): transl_table=11
ttggttcaagggcgaaagcatgctacggcgcaaacggggaatactctttgccacccgccttccatgaacacgcttgccgatatccggacccgcatccgtgagtggcgacgtgcccagtctcctgcccatgtccgccgcaccagcctcttgatagccggccgttgcatcgatgcgggctggctcgatggcgctgcccgcatggcagcctatttacccaatgacggcgaggtcgatacgacggtgctgttcgaatacctccgcgagcgcggccgcaccgcgttcatcccccttctgcggaaacacacgctctggttcggtccctacgttggcccggcggcattgcgtcccaatcgctatggcatcccggaacccgccatcgacggccggatgatcaccgacgccagggagctcgatctcgtgttcgtgcccctggtggcattcgacccgcggggtcatcgcctcggcatgggcggcggttactatgaccgaaccttcgcattccggctcgcagaacctgcgcgtgcctcccctcgcctgatcggcctcgctttcgaaggccagaaggtcgaacggctggaggcccgaccctgggacgtcccgctcgataccgcggttaccgaagcgggcatctaccacttccctggccgtgggtccgcttccccgtga

SEQ ID NO: 4202 - protein, 221 aa, Methylococcus capsulatus str. Bath
MVQGRKHATAQTGNTLCHPPSMNTLADIRTRIREWRRAQSPAHVRRTSLLIAGRCIDAGWLDGAARMAAYLPNDGEVDTTVLFEYLRERGRTAFIPLLRKHTLWFGPYVGPAALRPNRYGIPEPAIDGRMITDARELDLVFVPLVAFDPRGHRLGMGGGYYDRTFAFRLAEPARASPRLIGLAFEGQKVERLEARPWDVPLDTAVTEAGIYHFPGRGSASP

SEQ ID NO: 4203 - DNA, 612 bp, Pseudomonas syringae pv. syringae B728a
  CDS (1)..(612): transl_table=11
atgatcagcgcccaatcactcacacgtccacaattgcgccgccagctacgcaaggcacgcaaagccctgagtcaaagccagcaacgcgcagccgcacgggatatttaccgtcaactcgcgcagcacccgctgtttcggcgtgcacgacatgtttcgctgtacctgccgatggatggcgagatcgacccgcggctgttgctgcgcgaagcacagcgccgcggcaaggcaacctatctgccggtgctcaatgcctggccgcgcacccgcatggtttttcagcgtgtgcgtcccggcgagacattcatccccaaccgtttccgcatccccgagccgcgcatcgaccgggcaaggcaacgccctgtctgggcgctcgatctgatcctgatgccgttggtaggtttcgatgacgaaggcggtcgactgggcatgggcggaggtttctacgaccgcagcctggcgtacctggcgcgcagaaagacctggcgcaaaccgctgttactcgggctggctcatgaatgtcagaaagtggatcgactggcgcaggccagttgggatgtaccgctgcacggcacgctatcggataaaggctggtatgtgacgcagactctctga

SEQ ID NO: 4204 - protein, 203 aa, Pseudomonas syringae pv. syringae B728a
MISAQSLTRPQLRRQLRKARKALSQSQQRAAARDIYRQLAQHPLFRRARHVSLYLPMDGEIDPRLLLREAQRRGKATYLPVLNAWPRTRMVFQRVRPGETFIPNRFRIPEPRIDRARQRPVWALDLILMPLVGFDDEGGRLGMGGGFYDRSLAYLARRKTWRKPLLLGLAHECQKVDRLAQASWDVPLHGTLSDKGWYVTQTL

SEQ ID NO: 4205 - DNA, 564 bp, Haemophilus influenzae 86-028NP
  CDS (1)..(564): transl_table=11
atgaatactcaaaaacgccagcaaatccgcgctgaaattcgaaaaatacgcgcaaatttaaccgcacttcaacagcaacaagcagcacaatcagtgacccaacaggcgttaaatcttatcgagcaacgacaagccaaaaatattgcattatatttttcttttgatggtgaaatttcaacaaaagccttaatccaatccctgtggatgcaaaataaaaatgtgtatttgcctgttttacatccttttactaaacactatttattgtttttacgctatttacctgatacgccaatgaaacaaaatcagtttggcatttgggagccaaagctaaatgttcaaaatgttttgccattaaatgaactggatattttatttacgccattggtggcttttgataaaaaaggaaatcgccttggtatgggcggtggattttatgatcgcacgttgcagaattggcaaaataagtcttttattccagttggtttagcgcaccaatgtcagcaagtagaaaatcttcccactgagcattgggatgtgccactgtttgatattttggtggattaa

SEQ ID NO: 4206 - protein, 187 aa, Haemophilus influenzae 86-028NP
MNTQKRQQIRAEIRKIRANLTALQQQQAAQSVTQQALNLIEQRQAKNIALYFSFDGEISTKALIQSLWMQNKNVYLPVLHPFTKHYLLFLRYLPDTPMKQNQFGIWEPKLNVQNVLPLNELDILFTPLVAFDKKGNRLGMGGGFYDRTLQNWQNKSFIPVGLAHQCQQVENLPTEHWDVPLFDILVD

SEQ ID NO: 4207 - DNA, 693 bp, Pseudomonas fluorescens Pf-5
  CDS (1)..(693): transl_table=11
ttgtcagccaatgccagttatccatgctggcattggtttttccgggtaggctgttctgccaaatccgaccttctcatagcctctttcatgaccgaacctgcgccgctttcccgcccgcaacttcgccgcatgctgcgcaaggcccgtcgcgccctgagccctgccgagcaacgccaggcagcccttggcctgtaccgccaactggctcaggacccggtgtttcgtcgggcacggcacctgtccctgtatctgcccaccgacggtgaaatcgacccgcgcctgctgctgcgtgccgcccagcgccggggcaaggccacctacctgccggtgctcagcgcctggccccggaccaagatggttttccagcgcgtcctcccgggagaaacgctgcggcccaatcgttttcgcattctcgagccccgggtcaattgcgcgcggcaacgcaaggtctgggccctggacctggtgctgctgcccctggttggctttgatgaagaaggtggacgcctggggatgggtggcggcttttatgaccgcagcctggcctaccttgcgcggcgccagaactggcgcaagccgaagctgctggggctggcccatgaatgtcagaaagtcggaaagctggaccaggccagttgggatgtacccttgcacggtacggtgacggatcggggatggtacttcgctcgatag

SEQ ID NO: 4208 - protein, 230 aa, Pseudomonas fluorescens Pf-5
MSANASYPCWHWFFRVGCSAKSDLLIASFMTEPAPLSRPQLRRMLRKARRALSPAEQRQAALGLYRQLAQDPVFRRARHLSLYLPTDGEIDPRLLLRAAQRRGKATYLPVLSAWPRTKMVFQRVLPGETLRPNRFRILEPRVNCARQRKVWALDLVLLPLVGFDEEGGRLGMGGGFYDRSLAYLARRQNWRKPKLLGLAHECQKVGKLDQASWDVPLHGTVTDRGWYFAR

SEQ ID NO: 4209 - DNA, 579 bp, Colwellia psychrerythraea 34H
  CDS (1)..(579): transl_table=11
atgaatgcacgttcacaattgcgaaaagaaattagacaacgccgtaatgcgctatccgtaacggaacagtctaatgcagcgatagctttgaccaaaagattgtctagtcatagtcagcttctgctagctaaacgcatcgcaatctacttaagtaatgatggcgaattatcaacggataactttataagttggtgttggcagaataacaaagaggtctacttaccagtagtacatcctttcagtaagggaaacctactattcttgcattaccagcaagatactgagctagttagcaacaggtatggcattttagagccaaagttagacgttactttggtttgtccacttgagcagcttgatattatatgtacgcctttagtcgcttttgataactcaggcgcaaggttaggcatgggtggcggcttttatgaccgcagcctagctcactggcaacaaaataaaacatacccgctcggcttagcccatgattgccagctggtcgatactgtgccagtagaaggttgggacattcccttacctgaaataattacgccaagtaaaaactatcgatttatttag

SEQ ID NO: 4210 - protein, 192 aa, Colwellia psychrerythraea 34H
MNARSQLRKEIRQRRNALSVTEQSNAAIALTKRLSSHSQLLLAKRIAIYLSNDGELSTDNFISWCWQNNKEVYLPVVHPFSKGNLLFLHYQQDTELVSNRYGILEPKLDVTLVCPLEQLDIICTPLVAFDNSGARLGMGGGFYDRSLAHWQQNKTYPLGLAHDCQLVDTVPVEGWDIPLPEIITPSKNYRFI

SEQ ID NO: 4211 - DNA, 612 bp, Pseudomonas syringae pv. phaseolicola 1448A
  CDS (1)..(612): transl_table=11
atgatcagcgcccaatcgctcacacgtccgcaactgcgccgccagctacgcaaggcacgcagggcgctgactcgcagccagcaacgcgaagccgcccgcgatgtttaccgacaattggcgcagcacccgctgtttcgacgtgcccggcatgtttcgctatacctgccgatggatggcgagatcgacccgcggctgctgctgcgtgaagcacaacgacgcggcaaggccacttacctgccagtgctcaatgcatggccgcgaacgcgcatggtttttcagcgcgtgcgtccaggcgagaaattcatccccaatcgcttccgcattcccgagcctctcatcaaccgtgcgaaacaacgccatgtgtgggcactcgatctggtgcttatgccattggtagggttcgataacgaaggcggtcgcctgggcatgggcggagggttttatgaccgaagcctggcgtatctggcgcgcaggaaggcctggcgcaaaccggttctgctcgggctggctcacgaatgtcagaaagtggatcgactggcgcaggccagttgggatgtaccgctacaaggcacggtatctgataaaggctggtatctgacacagatactctga

SEQ ID NO: 4212 - protein, 203 aa, Pseudomonas syringae pv. phaseolicola 1448A
MISAQSLTRPQLRRQLRKARRALTRSQQREAARDVYRQLAQHPLFRRARHVSLYLPMDGEIDPRLLLREAQRRGKATYLPVLNAWPRTRMVFQRVRPGEKFIPNRFRIPEPLINRAKQRHVWALDLVLMPLVGFDNEGGRLGMGGGFYDRSLAYLARRKAWRKPVLLGLAHECQKVDRLAQASWDVPLQGTVSDKGWYLTQIL

SEQ ID NO: 4213 - DNA, 600 bp, Thiobacillus denitrificans ATCC 25259
  CDS (1)..(600): transl_table=11
atggacaaatacgcgcttaggcgtcagttgaaggcggcgcgcaacgcgcttcgcccgacggcgcggcgccatgcggcgcgcggcgcgctgcgtctggccctgcgccacggcctgttgctgcgggcacaacgaatcggcttctacctgccgcagggcggcgaattcgacgcccatcccctgctcgatcatgccctcgccatgcgccgcgcgtgctatctgcccgtggtgccgcggcgcggccgcgtcatgcgcttcggacgcttgcatcgcgcgacgcggatgagtccgaaccgctacggcattcccgagccgctcgacccgcgcccgctgcgcgcgcgcgagctcgatctgctgctgatgccgctcgtcggcttcgacaccgacggctatcggctcggcatgggcggcggctactacgacgccaccctcgccttcatgcaacaccggcgccactggcgcaagccgcgtctggtcggcgtcgcctacgaatgccagcgcgtcgacacgctgccgcacgacccctgggacatgccgctcgacgccgtgctgaccgagcgccggctgtaccgtttcgattcgagccggccgctgcggacctag

SEQ ID NO: 4214 - protein, 199 aa, Thiobacillus denitrificans ATCC 25259
MDKYALRRQLKAARNALRPTARRHAARGALRLALRHGLLLRAQRIGFYLPQGGEFDAHPLLDHALAMRRACYLPVVPRRGRVMRFGRLHRATRMSPNRYGIPEPLDPRPLRARELDLLLMPLVGFDTDGYRLGMGGGYYDATLAFMQHRRHWRKPRLVGVAYECQRVDTLPHDPWDMPLDAVLTERRLYRFDSSRPLRT

SEQ ID NO: 4215 - DNA, 606 bp, Pseudomonas fluorescens PfO-1
  CDS (1)..(606): transl_table=11
atgaccgaacccgcgctgctgccccgtcctcaactgcgccgcctgctgcgcaaggcccgccgctcgctgacgcgaagcgaacaacgccaggccgccgaaggcctgtacaggcaactggcacaagacccgcactttcgccgggccaaacacatttccctgtacctgcccaccgacggtgaaatcgacccgcgcctgttgctgcgcgccgcccagcgtcggggcaagaaaacctacctgccggtgctcagtgcctggccgcggaccaaaatggtctttcagcaaatccgccccggcgaaaaactaaaacccaaccgtttccgcattcttgaaccgcgcgccaatctggcccgtcagcgcaaggtctgggcgctggatctggtgttgttgcccctggtggggtttgacgatgtcggcggacgcctgggtatgggcggcggtttctacgatcgcagcctggcgtatctggcccgacgacagaactggcgcaagccgacgctgctgggcctggcccatgaatgtcagaaagtcgaacgtctcgcgcaagcgagctgggatgtaccgttgcagggaacggtgacagacaaggcgtggtatttcgcaggatag

SEQ ID NO: 4216 - protein, 201 aa, Pseudomonas fluorescens PfO-1
MTEPALLPRPQLRRLLRKARRSLTRSEQRQAAEGLYRQLAQDPHFRRAKHISLYLPTDGEIDPRLLLRAAQRRGKKTYLPVLSAWPRTKMVFQQIRPGEKLKPNRFRILEPRANLARQRKVWALDLVLLPLVGFDDVGGRLGMGGGFYDRSLAYLARRQNWRKPTLLGLAHECQKVERLAQASWDVPLQGTVTDKAWYFAG

SEQ ID NO: 4217 - DNA, 585 bp, Saccharophagus degradans 2-40
  CDS (1)..(585): transl_table=11
atgaataaagacacattaaggcaaaccatgcgcgccaagcgcaacgcgttaacgccaagccaacaagcttttgccagtgagcaggtagcaacacacttagctcaaagcagcgactaccagcaagccacccacatcgctttttatttagcttgcgatggcgaattagatttaacccctgccctcaagcaagcccttgcagataacaaagcctgctacttacccgttattgcccccaaccgccagttgcgttttcgccgctacaacgaaggttgctcgttagtaacaaaccgctacggcattgccgaaccgagcgcagacaacccagaaattcaacccaaccgcttagacctagtacttgccccgcttgttggttttgacagtaactttaatcgcttaggcatgggtggcgggttttacgacagcacctttcgccgcgcgccgcagcctttaggcaagcgcgatagacgagccgcggtattatttggcgttggccatagcgttcaaaaagttgcgcaattagaaagggaagcgtgggatgtaacactggatggtgtgctgacagaaacagggctggacctgcgttag

SEQ ID NO: 4218 - protein, 194 aa, Saccharophagus degradans 2-40
MNKDTLRQTMRAKRNALTPSQQAFASEQVATHLAQSSDYQQATHIAFYLACDGELDLTPALKQALADNKACYLPVIAPNRQLRFRRYNEGCSLVTNRYGIAEPSADNPEIQPNRLDLVLAPLVGFDSNFNRLGMGGGFYDSTFRRAPQPLGKRDRRAAVLFGVGHSVQKVAQLEREAWDVTLDGVLTETGLDLR

SEQ ID NO: 4219 - DNA, 576 bp, Actinobacillus pleuropneumoniae serovar 1 str. 4074
  CDS (1)..(576)
atgcaatcacattccgtacaaactcgcagacaacttcgtcaatccattctgaacgaacgagctaaattagctttagaacaacaatcaatcgcttcttttaatctgattccgcaagcacttgctcttatcaatcaatatcacaccgaacatattgcactctatttgccttttaatagcgaaatttcaccgcttccgttgattgaacgattacaacaacaaaacaaatcgctctatctgcctattctccatccgtttgctaaaggtcatctgttctttcaacaatatgatgcagaaacgctattcatcacgcataaattcggtatgcaacagcctaagccggacgtacgtaaggtaaaaccgttaaatgaaatcgagatgatatttactccgctacttgcttgtgataaaagcggtaatcgtttaggttacggaggcggtttttatgacagaacgcttgccctaactccgcaagcgataagcgtagggcttgcatatccgtttcaatttgttgagaatttaccgacggaaccttgggatataccgcttaaccacttgatcataggagatataaagtga

SEQ ID NO: 4220 - protein, 191 aa, Actinobacillus pleuropneumoniae serovar 1 str. 4074
MQSHSVQTRRQLRQSILNERAKLALEQQSIASFNLIPQALALINQYHTEHIALYLPFNSEISPLPLIERLQQQNKSLYLPILHPFAKGHLFFQQYDAETLFITHKFGMQQPKPDVRKVKPLNEIEMIFTPLLACDKSGNRLGYGGGFYDRTLALTPQAISVGLAYPFQFVENLPTEPWDIPLNHLIIGDIK

SEQ ID NO: 4221 - DNA, 612 bp, Pseudomonas aeruginosa UCBPP-PA14
  CDS (1)..(612)
atgatcgaatcgcaagacctcagccgcccggccctgcgccgcaagctccgccaggcgcgccgcgcgctctcccccctgcagcaacgcctcgccgcccgcgccctctatcgacaactggcgcagcatcccctttttcgccgtgcccgccatatcgccctgtacctgcccaacgacggcgagatcgacccgcgtccgctgctgcgtgcggcgcagaagcgcggcaaggccacctacctgccggtgctggcgccctggccgcggacgcgcatggtgttccagcgggtcggcagcggcgaacgctggacccgcaaccgcttccgcatcagcgaaccgctggccgacgccggccgccagcgcaaggcctgggcgctggacctggtactgctgccgctggtggggttcgacgaacagggcgggcgcctgggcatgggcggcggcttctacgaccgcagcctggcctacctgacgaggcgcaaaaatggtcacaaaccgacgctgatcggcctggcccatgaatgtcagaaggtggatcgactggcgctggccagctgggacattcccctggcgggaacggtgaccgatgcgggctggtacgtggcagggaaacgctag

SEQ ID NO: 4222 - protein, 203 aa, Pseudomonas aeruginosa UCBPP-PA14
MIESQDLSRPALRRKLRQARRALSPLQQRLAARALYRQLAQHPLFRRARHIALYLPNDGEIDPRPLLRAAQKRGKATYLPVLAPWPRTRMVFQRVGSGERWTRNRFRISEPLADAGRQRKAWALDLVLLPLVGFDEQGGRLGMGGGFYDRSLAYLTRRKNGHKPTLIGLAHECQKVDRLALASWDIPLAGTVTDAGWYVAGKR

SEQ ID NO: 4223 - DNA, 564 bp, Haemophilus influenzae R2846
  CDS (1)..(564)
atgaatactcaaaaacgccagcaaatccgctctgacattcgaaaaatacgagcaaatttaaccgcacttcaacagaaaaaagctgaacaatcggttactcaacaggcgttaaatcttatcgagcaacgacaagccaaaaatattgcattatatttttcttttgatggtgaaatttcaacaaaagccttaatccaatccctgtggatgcaaaataaaaatgtgtatttgcctgttttacatccttttactaaacactatttattgtttttacgctatttacctgatacgccaatgaaacaaaatcagtttggcatttgggagccaaagctaaatgttcaaaatgttttgccattaaatgaactggatattttatttacgccattggtggcttttgataaaaaaggaaatcgccttggtatgggcggtggattttatgatcgcacgttgcagaattggcaaaataagtcttttattccagttggtttagcgcaccaatgtcagcaagtagaaaatcttcccactgagcattgggatgtgccactgtttgatattttggtggattaa

SEQ ID NO: 4224 - protein, 187 aa, Haemophilus influenzae R2846
MNTQKRQQIRSDIRKIRANLTALQQKKAEQSVTQQALNLIEQRQAKNIALYFSFDGEISTKALIQSLWMQNKNVYLPVLHPFTKHYLLFLRYLPDTPMKQNQFGIWEPKLNVQNVLPLNELDILFTPLVAFDKKGNRLGMGGGFYDRTLQNWQNKSFIPVGLAHQCQQVENLPTEHWDVPLFDILVD

SEQ ID NO: 4225 - DNA, 564 bp, Haemophilus influenzae R2866
  CDS (1)..(564)
atgaatactcaaaaacgccagcaaatccgcactgaaatccgaaaaatacgtgcaaatttaaccgcacttcaacagcaccaagctgaacaatcggttactcaacacgcattaaatcttatcgagcaacgacaagccaaaaatattgcattatatttttcttttgatggtgaaatttccacaaaagccttaatccaatccctgtggatgcaaaataaaaatgtgtatttgcctgttttacatccttttactaaacactatttattgtttttacgctatttacctgatacgccaatgaaacaaaatcagtttggcatttgggagccaaagctaaatgttcaaaatgttttgccattaaatgaactggatattttatttacgccattggtagcttttgataaaaaaggaaatcgccttggtatgggcggtggattttatgatcgcacgttgcagaattggcaagataaatcttttattccagtggggttagcgtaccaatgtcagcaagtagaaaatcttcccactgagcattgggatgtgccactattcgatattttggtggattaa

SEQ ID NO: 4226 - protein, 187 aa, Haemophilus influenzae R2866
MNTQKRQQIRTEIRKIRANLTALQQHQAEQSVTQHALNLIEQRQAKNIALYFSFDGEISTKALIQSLWMQNKNVYLPVLHPFTKHYLLFLRYLPDTPMKQNQFGIWEPKLNVQNVLPLNELDILFTPLVAFDKKGNRLGMGGGFYDRTLQNWQDKSFIPVGLAYQCQQVENLPTEHWDVPLFDILVD

SEQ ID NO: 4227 - DNA, 585 bp, Nocardioides sp. JS614
  CDS (1)..(585): transl_table=11
gtgacgggcacccaatcacccgcgaagtcggcggtccgcgaccgcctcctcaccacccggcaccgccgaccgctggccgaggtcggcgtcgcggcccgggcgatcgccgagcacctgctggcgctgccggaggtgcgccgggcggccacggtcgcggcgtacgtctcggtcggcagcgagccgggcagcggcccgctgctggccgggctgcgcgccgcgggcaagcgggtgctgctcccggtggtgctgcccgacctcgacctggactgggcggcgtacgacggcccggaccacctggtgccggcgcggcgcggcctgctcgagccggacgcggagcggctcggtccagaggcgatcggcaccgcggacgtggtgctgacgcccggcctggccgtgtcaccctccggggtccggctcggccgcggcggcggctgctacgaccgggccctcggccgagtgccggtcggcaccttcacctgcgtgctgctctacgacggggaggtcggcctcgacgtgccggtcgagccccacgaccgtccggtgctgttcgcggcgaccccctcgggggtcgtccgcctgggttga

SEQ ID NO: 4228 - protein, 194 aa, Nocardioides sp. JS614
MTGTQSPAKSAVRDRLLTTRHRRPLAEVGVAARAIAEHLLALPEVRRAATVAAYVSVGSEPGSGPLLAGLRAAGKRVLLPVVLPDLDLDWAAYDGPDHLVPARRGLLEPDAERLGPEAIGTADVVLTPGLAVSPSGVRLGRGGGCYDRALGRVPVGTFTCVLLYDGEVGLDVPVEPHDRPVLFAATPSGVVRLG

SEQ ID NO: 4229 - DNA, 600 bp, Vibrio sp. Ex25
  CDS (1)..(600)
atgtcagacctctctcgacaagacttccgcaaactgattcgtgaaaagcgcaacgcattgtgtagcgatacgcaattccaagcggggatcgaccttgtcactcagttctctcaacttcctgaaatccagcaagcgcagcatattgctatttatctttctgctgacggtgaacttgataccaagccgctcattgaatggttgtggcaacagggaaaatcggtttatctacctgtcatccatccgttttccaaaggtcagttactgtttcttctgtacgtaagtgatgatcaattggtctacaacaaatacggcatcttagagcccaaactggacatccgccatctcaagcccgttcgtcaaattgatatcatttgtacacctttggttggattcgacagcatcggccaccgcttaggcatgggcggagggtattatgaccgtaccctgtctcattggtttataaccggagaaggtgccaagcctgttggtatcgctcacgactgccaacatgtagaacgcttaccaattgaaagctgggacattccattacctaagatcgtgaccccaagccgaatatggcaatgggaaagtggcaagtaa

SEQ ID NO: 4230 - protein, 199 aa, Vibrio sp. Ex25
MSDLSRQDFRKLIREKRNALCSDTQFQAGIDLVTQFSQLPEIQQAQHIAIYLSADGELDTKPLIEWLWQQGKSVYLPVIHPFSKGQLLFLLYVSDDQLVYNKYGILEPKLDIRHLKPVRQIDIICTPLVGFDSIGHRLGMGGGYYDRTLSHWFITGEGAKPVGIAHDCQHVERLPIESWDIPLPKIVTPSRIWQWESGK

SEQ ID NO: 4231 - DNA, 678 bp, Shewanella sp. ANA-3
  CDS (1)..(678): transl_table=11
atgtctatcacttcacctgtctcgaacacttcggccccaacaatcaaggggccacacggcactcagtctgaaatcgataccaccactctcaacccaaatctaagccgcgccgaattacgcaaacagatccgcttggctcgccgctcgctttcgacagaggtgcaaactgaggctagccttgccgccagccagcgaatgctcgaaaaactgagcgcactgaatgcccagcatgtcgcactttacctcacccacgatggtgaactcgcaaccgctacgcttatcgaagcactttggcagcagggcattcacacctatctgccacggctccacccctttaatgctgggcaattattgtttttgcattaccacgccgactcgccaatgcagccgaatcaatttggcattttagagcctaagttggatgtgcgcgccgtgatgccaattgagcgactggatgtggtgatcaccccgctggttgcctttgatatcaaaggcaatcgtatgggaatgggcggcggctattacgacagaacattagccaattggcatagcaaaggtaaacctctgcctatgggttacgcccatgattgccagcaagtaccgagcctgccctgcgagcattgggatgtgcccttacctactatcatcactccaagccgcgaatggcggttcgactag

SEQ ID NO: 4232 - protein, 225 aa, Shewanella sp. ANA-3
MSITSPVSNTSAPTIKGPHGTQSEIDTTTLNPNLSRAELRKQIRLARRSLSTEVQTEASLAASQRMLEKLSALNAQHVALYLTHDGELATATLIEALWQQGIHTYLPRLHPFNAGQLLFLHYHADSPMQPNQFGILEPKLDVRAVMPIERLDVVITPLVAFDIKGNRMGMGGGYYDRTLANWHSKGKPLPMGYAHDCQQVPSLPCEHWDVPLPTIITPSREWRFD

SEQ ID NO: 4233 - DNA, 687 bp, Shewanella sp. MR-7
  CDS (1)..(687): transl_table=11
atgtctatcacttcacctgtctcgaacacttcggccccaacagtcaatgggccacacggcaatcagtctgcaattgatacccagtcgctaagcccaaatctaagtccaacgctaagccgcgccgaattacgcaaacagatccgcttggctcgccgctcgctgccgattgaagtgcagactgaggcgagccttgccgcaggtctgcgaatgctagaaaaacttagcgcgctgaatgcccagcatgtcgcactttacctcacccacgatggtgaattggcaaccgctccgcttatcgaagcgctttggcaacaggggattcaaacctatctgccacggctccacccctttaatgcagggcaattattgtttttgcattaccacgccgactcgccaatgcagccgaatcaatttggtattttagagcctaagttggatgtgcgcgccgtgatgccgattgagcacatcgatgtggtggtcaccccgctggttgcctttgatatcaaaggcaatcgcatgggcatgggcggcggctattacgacagaacactagccaattggcacgccaaaggtaaacctctgcccatgggttacgcccatgattgccaacaggtcacgactctgccctgcgagcattgggatgtgcccttaccggctattatcactccaagcagagaatgggagttttga

SEQ ID NO: 4234 - protein, 228 aa, Shewanella sp. MR-7
MSITSPVSNTSAPTVNGPHGNQSAIDTQSLSPNLSPTLSRAELRKQIRLARRSLPIEVQTEASLAAGLRMLEKLSALNAQHVALYLTHDGELATAPLIEALWQQGIQTYLPRLHPFNAGQLLFLHYHADSPMQPNQFGILEPKLDVRAVMPIEHIDVVVTPLVAFDIKGNRMGMGGGYYDRTLANWHAKGKPLPMGYAHDCQQVTTLPCEHWDVPLPAIITPSREWEF

SEQ ID NO: 4235 - DNA, 576 bp, Alkalilimnicola ehrlichei MLHE-1
  CDS (1)..(576): transl_table=11
atgcgcgcccgccgccgtgcgcaacccatggccgtgcgccgctgggccgcccgccagctcgcccgccgcgtggcccgccatccgctgttgcgcaacgtccgccggttggccgccttcatgcccgccgacggtgagatggacccgctgcccctgatgcggcgtctgcaccggcgggggatcaccctctacctgccggtggtgcgccccggcagccgggtgttgcgcttccgggcctggtgcccggggcggccgctacgacccaaccggttcggtatccccgagccgctgcccaacagctccccgttactgcgcccccgggatctcgacttggtgctgacgccgctggtggcgttcgaccaccggggcggccggctcggcatgggcggcggcttctacgatgccagcttcgccttcctcgggcgctggcgctggcgcacccacccccgcctgctgggtgtggcctggtccttccagcacgtcccggagctgcccctggccccctgggatatcccgctgcacggggtggcgacggagcggggaatctggatcccgcgaaacggctcggtcaggcgctag

SEQ ID NO: 4236 - protein, 191 aa, Alkalilimnicola ehrlichei MLHE-1
MRARRRAQPMAVRRWAARQLARRVARHPLLRNVRRLAAFMPADGEMDPLPLMRRLHRRGITLYLPVVRPGSRVLRFRAWCPGRPLRPNRFGIPEPLPNSSPLLRPRDLDLVLTPLVAFDHRGGRLGMGGGFYDASFAFLGRWRWRTHPRLLGVAWSFQHVPELPLAPWDIPLHGVATERGIWIPRNGSVRR

SEQ ID NO: 4237 - DNA, 675 bp, Shewanella sp. MR-4
  CDS (1)..(675): transl_table=11
atgtctatcacttcacctgtctcgaacacttcagccccaacagtcaaggggccacacggcaatcagtctgcaattgatacccagtcgctaagcccaacgctaagccgcgccgaattacgcaaacagatccgcttggctcgccgctcgctgccgattgaagtgcagactgaggcgagccttgccgccagtcagcgaatgctcgaaaaacttagcgcgctgaatgcccagcatgtcgcactttacctcacccacgatggtgaattggcaaccgctccgctgatcgcagcgctttggcgacaggggattcaaacctatctgccacggctccacccctttaatgcagggcaattattgtttttgcattaccacgccgactcgccaatgcagccgaatcaatttggcattttagagcctaagttggatgtgcgcgccgtgatgccgattgagcgactcgatgtggtggtcaccccgctggttgccttcgatatcaaaggcaatcgtatgggcatgggcggtggctattacgacagaacattagccaattggcacgccaaaggtaaacctctgcccatgggttacgcccatgattgccaacaggtcacggccctgccctgcgagcattgggatgtgcccttaccggctatcatcaccccaagcagagaatgggagttttga

SEQ ID NO: 4238 - protein, 224 aa, Shewanella sp. MR-4
MSITSPVSNTSAPTVKGPHGNQSAIDTQSLSPTLSRAELRKQIRLARRSLPIEVQTEASLAASQRMLEKLSALNAQHVALYLTHDGELATAPLIAALWRQGIQTYLPRLHPFNAGQLLFLHYHADSPMQPNQFGILEPKLDVRAVMPIERLDVVVTPLVAFDIKGNRMGMGGGYYDRTLANWHAKGKPLPMGYAHDCQQVTALPCEHWDVPLPAIITPSREWEF

SEQ ID NO: 4239 - DNA, 582 bp, Pseudoalteromonas tunicata D2
  CDS (1)..(582): transl_table=11
ttgaaaagagatgaaatccgagatttagtgcgaaaaaagcgcaacgcactcactcaaacagaacaaaaaaatgctgccaaacagctcaaagtgaatttaattcaacaactaaaaccctacaaaaacgccaaaatagccctctacctcaccaacgatggtgaactaggaacaagcgaactaatacaagctcttcaagcagaaaaccacagcttatttctacctgtaatacacccattttcaaaaggctatttactctttcagaagtatgaaaaaaattcacccatgaccactaatcgctatggtatctttgagcccaagttaaattgcagtcaaatttgccctattgagcagcttgatatcatttttacgcctttagtggcatttgatgaaaaaggcaatcgattaggaatggggggtgggttttacgaccgaactttggccaaatattatcaagagcaatggcaaaaaccgatcgtaataggccttgctcacgaatgccaaaaagtagcgctgttaccctgtgaaagctgggatataccattgaaatggatagcaacccccgaatttaactaccgttggtag

SEQ ID NO: 4240 - protein, 193 aa, Pseudoalteromonas tunicata D2
MKRDEIRDLVRKKRNALTQTEQKNAAKQLKVNLIQQLKPYKNAKIALYLTNDGELGTSELIQALQAENHSLFLPVIHPFSKGYLLFQKYEKNSPMTTNRYGIFEPKLNCSQICPIEQLDIIFTPLVAFDEKGNRLGMGGGFYDRTLAKYYQEQWQKPIVIGLAHECQKVALLPCESWDIPLKWIATPEFNYRW

SEQ ID NO: 4241 - DNA, 597 bp, Photobacterium sp. SKA34
  CDS (1)..(597): transl_table=11
atgacatcacattttgtaactccacgacaaaaaatcagacaacaaatccgcttacagcgacaacaacttcttcctgaacaacaaatacacgctagcctaaaattgcttaaacaagctcagcaatgccaacagtttactgctagtcaaaatattgcgctttatttgagcaatgatggtgagatcagcactcaacccattatcgactggttatggcaaagcggaaaatctgtttacctaccggttttgcacccttttagcaaagggcacttgttatttcttcactacacccctaacacccctatgcgtaaaaatcgctatcaaatctcagagcccactctcgatgtgcgagtagttaaacccgttaatgaattagatattatttgtaccccactggtggcttttgataagtcggggcaacgattaggtatgggagggggctactatgatcgcactcttagtcagtggcatcagcataaacaaggcccttacccactaggtttagcccatgattgccaacatgtagaacaattgccaagcgagcaatgggatgtgccgttacctaaaattattaccccgtcaaagatctatagttggtaa

SEQ ID NO: 4242 - protein, 198 aa, Photobacterium sp. SKA34
MTSHFVTPRQKIRQQIRLQRQQLLPEQQIHASLKLLKQAQQCQQFTASQNIALYLSNDGEISTQPIIDWLWQSGKSVYLPVLHPFSKGHLLFLHYTPNTPMRKNRYQISEPTLDVRVVKPVNELDIICTPLVAFDKSGQRLGMGGGYYDRTLSQWHQHKQGPYPLGLAHDCQHVEQLPSEQWDVPLPKIITPSKIYSW

SEQ ID NO: 4243 - DNA, 585 bp, Oceanospirillum sp. MED92
  CDS (1)..(585): transl_table=11
atggataaacgtaagcaactccgcaaacagatccgttccctgcgacgctccttaacgcccagccaacagaataccgccgcacaagcgcttcttcgcaatatgcgaacccgtcaggattttcgccgagccaagtcaattgcgatgtacctgcctaacgatggcgaaatcgatcctaccccattgataaagctctgctggaagctgggtaaagaggtctatctacctgtgcttcaccctattctgcataaccgactctggtttgtaccttatacgcagaagaccccgatggttcggaatatctattcaattcgcgaaccaaagctggaaccaggccgacgtaaagcggcatgggcattagatctggtgcttttacctttggtcgcttttgatcctaaaggaaatcgcatgggcatgggcggtggttactatgaccgtacttttgcgttcaaagggcttaagaagggcatgagagggcctgacctaattggccttgctcacgaaatacagagagtagaagagttacctgtcgagggttgggatatccctctgacaacaatagttaccgacgctaaaagctacccgtag

SEQ ID NO: 4244 - protein, 194 aa, Oceanospirillum sp. MED92
MDKRKQLRKQIRSLRRSLTPSQQNTAAQALLRNMRTRQDFRRAKSIAMYLPNDGEIDPTPLIKLCWKLGKEVYLPVLHPILHNRLWFVPYTQKTPMVRNIYSIREPKLEPGRRKAAWALDLVLLPLVAFDPKGNRMGMGGGYYDRTFAFKGLKKGMRGPDLIGLAHEIQRVEELPVEGWDIPLTTIVTDAKSYP

SEQ ID NO: 4245 - DNA, 588 bp, marine gamma proteobacterium HTCC2207
  CDS (1)..(588): transl_table=11
atgaattccagcgaaatccgaagtaatattcgagaaaaacgacgagcactgaaccctagccagcaacgtacggcctcagaacaattggccaagctactctgtcgccaagacttttttcagcgcgccaaacgtatcggcatctatctggccaacgatggtgaaatagatcccagcgcgatcgtcactgccgcctttagagctaaaaaggcctgctttcttccgttgattgacccgcttaaagccaacagcctgcactttgccgaatatcagctcggcgacacgctgcataaaaatcgctttggcatactcgaaccgcaattcagatccacagctataacgccaccctggagtctcgacttaattcttttgcctttagtggcgtttgatcgcgccggcaatcgactgggtatgggaggtggtttttatgaccgtactctggctccaagaccgggcaagccaaacaatgtcaaactgattggccttgcccatcagtgccaagaagtttcaggactgtcgccgcagagctgggacatccccttacataaaatagccactgaccaagagataatatgcgcaagactaaaataa

SEQ ID NO: 4246 - protein, 195 aa, marine gamma proteobacterium HTCC2207
MNSSEIRSNIREKRRALNPSQQRTASEQLAKLLCRQDFFQRAKRIGIYLANDGEIDPSAIVTAAFRAKKACFLPLIDPLKANSLHFAEYQLGDTLHKNRFGILEPQFRSTAITPPWSLDLILLPLVAFDRAGNRLGMGGGFYDRTLAPRPGKPNNVKLIGLAHQCQEVSGLSPQSWDIPLHKIATDQEIICARLK

SEQ ID NO: 4247 - DNA, 720 bp, Oceanobacter sp. RED65
  CDS (1)..(720): transl_table=11
atggcgagcaagtccgtcttcgagcggaaagcccgattctttgcaggaaccaccaccttggacctttcggttcaaggcctttctctgacagcggcacagtggagagccctttcttttactatgagcattcagcaagattcgacacaacccattgatcgccaattgattcgtcaagccatgcgcggcaaacggcaatcactcagtgaccaacaacagcttaagcatgccaaagccatcgctaagcacgctatgtcagccaattttttcacccgagcacaaaccatcgctatctatctcgccaacgatggcgaagccaatcctgtcgtcttagcagaaaaatcgttataccgtggcaagcaatgcgttttacccattcttcatcccaccaagaaaggttttttgcaatttgcagattaccgattaccacgcaaaaaaaacaagtttggtatcgaagagcctattagccgtgagtttgtgaaagcgcagcaattagaccttgtgtttatgccactagtggcctttgatcagcaaggaggacgtttagggatgggtggcggattttacgatcgcagctttgaattcttgcgtcattcgacgctacctaaaccaaagcttattggtttggcccatagctttcagcaagtagagtcattgcctattgaagaatgggatgtacccatgcatgcaatcgttacagaaaagggcctaatagagttttaa

SEQ ID NO: 4248 - protein, 239 aa, Oceanobacter sp. RED65
MASKSVFERKARFFAGTTTLDLSVQGLSLTAAQWRALSFTMSIQQDSTQPIDRQLIRQAMRGKRQSLSDQQQLKHAKAIAKHAMSANFFTRAQTIAIYLANDGEANPVVLAEKSLYRGKQCVLPILHPTKKGFLQFADYRLPRKKNKFGIEEPISREFVKAQQLDLVFMPLVAFDQQGGRLGMGGGFYDRSFEFLRHSTLPKPKLIGLAHSFQQVESLPIEEWDVPMHAIVTEKGLIEF

SEQ ID NO: 4249 - DNA, 588 bp, Buchnera aphidicola subsp
  CDS (1)..(588): transl_table=11
atgttattaaaatgtcgtgattttcaaagaaaatattttcgaaaattaagaaaaaaaataaataataagattcgagagcaattagctatttctatttcaaaaaaaatattttattgtaatattttggattcggttaaaaacatagcaatattttgttcatttgacggagaaattgatacttatccattaattttaaaattatggagacaaaattataatgtatatcttccaattattaattataattacaaaaaaatattaggattcatgaagtatttacctaatactagtttaataaaaaatagatttaatatattagaacctgtctttgatagaaagaattttatacaatctgatgatttagatataatgtttgtaccattagtagcttttgatgaatttggatatcgtttaggtatgggtggagggttttacgatcgaattttgattaattacgatattaaaaaaagtttttttcctataggtctagcatttgattgtcaattttcaaaaaatataaatattaaatattgggatgttgccttaccagtgattataacacctaaaaagttttggatatggatataa

SEQ ID NO: 4250 - protein, 195 aa, Buchnera aphidicola subsp
MLLKCRDFQRKYFRKLRKKINNKIREQLAISISKKIFYCNILDSVKNIAIFCSFDGEIDTYPLILKLWRQNYNVYLPIINYNYKKILGFMKYLPNTSLIKNRFNILEPVFDRKNFIQSDDLDIMFVPLVAFDEFGYRLGMGGGFYDRILINYDIKKSFFPIGLAFDCQFSKNINIKYWDVALPVIITPKKFWIWI

SEQ ID NO: 4251 - DNA, 600 bp, Buchnera aphidicola subsp
  CDS (1)..(600): transl_table=11
atgtcgactaaacgttcacaaaatcgaaaagaaattcgctcctatattagaatagtacgcaattcagtaacgttaacaaaaaaatatgatgaatcaaataaaattgtgagaactgcatttaattgtaatattatttataatgctaaaaacattgcttgttttttatcatttgatggagaaataaatacatatcccttaattttaaaattatggttaaacaataaaaatgtatttcttcctatagtaagttctagttattcaagaaaattattttttgtgccgtttacttgtaaatctattttatattataatcaatataacatattacaacctttttataatatgaaagatattattttagaatcagatttagatttaataatagtacctttagtagcatttgattgtagaggtgtgcgcctaggtatgggtggaggtttttatgatcagtttttaaaaaattgggaaagaaaaaaatttattccaataggaatggcttatgattttcagttcgtaaattacatacctagacagccttgggatatttccctacctattgttttaacacctaataaaatacacttttttcatcaaaattaa

SEQ ID NO: 4252 - protein, 199 aa, Buchnera aphidicola subsp
MSTKRSQNRKEIRSYIRIVRNSVTLTKKYDESNKIVRTAFNCNIIYNAKNIACFLSFDGEINTYPLILKLWLNNKNVFLPIVSSSYSRKLFFVPFTCKSILYYNQYNILQPFYNMKDIILESDLDLIIVPLVAFDCRGVRLGMGGGFYDQFLKNWERKKFIPIGMAYDFQFVNYIPRQPWDISLPIVLTPNKIHFFHQN

SEQ ID NO: 4253 - DNA, 564 bp, Haemophilus influenzae
  CDS (1)..(564): transl_table=11
atgaatactcaaaaacgccagcaaatccgcactgaaatccgaaaaatacgtgcaaatttaaccgcacttcaacagcaccaagctgaacaatcggttactcaacacgcgttaaatcttatcgagcaacgacaagccaaaaatattgcattatatttttcttttgatggtgaaatttccacaaaagccttaatccaatccctgtggatgcaaaataaaaatgtgtatttgcctgttttacatccttttactaaacactatttattgtttttacgctatttacctgatacgccaatgaaacaaaatcagtttggcatttgggagccaaagctaaatgttcaaaatgttttgccattaaatgaactggatattttatttacgccattggtggcttttgataaaaaaggaaatcgccttggtatgggcggtggattttatgatcgcacgttgcagaattggcaaaataaatcttttattccagtggggttagcgtaccaatgtcagcaagtagaaaatcttcccactgagcattgggatgtgccactattcgatattttggtaggttga

SEQ ID NO: 4254 - protein, 187 aa, Haemophilus influenzae
MNTQKRQQIRTEIRKIRANLTALQQHQAEQSVTQHALNLIEQRQAKNIALYFSFDGEISTKALIQSLWMQNKNVYLPVLHPFTKHYLLFLRYLPDTPMKQNQFGIWEPKLNVQNVLPLNELDILFTPLVAFDKKGNRLGMGGGFYDRTLQNWQNKSFIPVGLAYQCQQVENLPTEHWDVPLFDILVG

SEQ ID NO: 4255 - DNA, 22 bp, Artificial sequence
  primer
atgattcggcaacgtcgtcgtg

SEQ ID NO: 4256 - DNA, 23 bp, Artificial sequence
  primer
ttaccactcccagactttcgacg

SEQ ID NO: 4257 - protein, 197 aa, Artificial sequence
  consensus sequence
  Variant (2)..(4): Xaa in position 2 to 4 is any amino acid
  Variant (6)..(7): Xaa in position 6 to 7 is any amino acid
  Variant (9)..(10): Xaa in position 9 to 10 is any amino acid
  Variant (12)..(33): Xaa in position 12 to 33 is any amino acid
  Variant (34)..(35): Xaa in position 34 to 35 is any or no amino acid
  Variant (37)..(45): Xaa in position 37 to 45 is any amino acid
  Variant (47)..(48): Xaa in position 47 to 48 is any amino acid
  Variant (51)..(55): Xaa in position 51 to 55 is any amino acid
  Variant (57)..(67): Xaa in position 57 to 67 is any amino acid
  Variant (68)..(74): Xaa in position 68 to 74 is any or no amino acid
  Variant (78)..(85): Xaa in position 78 to 85 is any amino acid
  Variant (86)..(88): Xaa in position 86 to 88 is any or no amino acid
  Variant (90)..(97): Xaa in position 90 to 97 is any amino acid
  Variant (98)..(100): Xaa in position 98 to 100 is any or no amino acid
  Variant (102)..(104): Xaa in position 102 to 104 is any amino acid
  Variant (106)..(106): Xaa in position 106 is any amino acid
  Variant (109)..(118): Xaa in position 109 to 118 is any amino acid
  Variant (119)..(127): Xaa in position 119 to 127 is any or no amino acid
  Variant (130)..(133): Xaa in position 130 to 133 is any amino acid
  Variant (137)..(137): Xaa in position 137 is any amino acid
  Variant (140)..(141): Xaa in position 140 to 141 is any amino acid
  Variant (143)..(143): Xaa in position 143 is any amino acid
  Variant (151)..(151): Xaa in position 151 is any amino acid
  Variant (155)..(155): Xaa in position 155 is any amino acid
  Variant (157)..(164): Xaa in position 157 to 164 is any amino acid
  Variant (165)..(174): Xaa in position 165 to 174 is any or no amino acid
  Variant (176)..(176): Xaa in position 176 is any amino acid
  Variant (178)..(180): Xaa in position 178 to 180 is any amino acid
  Variant (182)..(182): Xaa in position 182 is any amino acid
  Variant (184)..(185): Xaa in position 184 to 185 is any amino acid
  Variant (186)..(187): Xaa in position 186 to 187 is any or no amino acid
  Variant (189)..(192): Xaa in position 189 to 192 is any amino acid
  Variant (195)..(195): Xaa in position 195 is any amino acid
RXXXRXXRXXLXXXXXXXXXXXXXXXXXXXXXXXXAXXXXXXXXXDXXGEXXXXXLXXXXXXXXXXXXXXXXXXYLPXXXXXXXXXXXFXXXXXXXXXXXNXXXIXEPXXXXXXXXXXXXXXXXXXXLDXXXXPLVXFDXXGXRLGMGGGXYDRXLXXXXXXXXXXXXXXXXXXGXAXXXQXVXXXXLXXXXWDXPL

SEQ ID NO: 4258 - protein, 28 aa, Artificial sequence
  protein pattern
  Variant (2)..(2): Xaa in position 2 is Ile, Leu or Val
  Variant (3)..(5): Xaa in position 3 to 5 is any amino acid
  Variant (7)..(7): Xaa in position 7 is Gly or Leu
  Variant (9)..(9): Xaa in position 9 is Ala or Gly
  Variant (12)..(13): Xaa in position 12 to 13 is any amino acid
  Variant (15)..(15): Xaa in position 15 is any amino acid
  Variant (17)..(17): Xaa in position 17 is Leu or Met
  Variant (19)..(19): Xaa in position 19 is any amino acid
  Variant (23)..(23): Xaa in position 23 is Phe or Tyr
  Variant (26)..(27): Xaa in position 26 to 27 is any amino acid
  Variant (28)..(28): Xaa in position 28 is Phe or Leu
DXXXXPXVXFDXXGXRXGXGGGXYDXXX

SEQ ID NO: 4259 - protein, 21 aa, Artificial sequence
  protein pattern
  Variant (2)..(2): Xaa in position 2 is any amino acid
  Variant (4)..(4): Xaa in position 4 is Phe, His, Trp or Tyr
  Variant (5)..(6): Xaa in position 5 to 6 is any amino acid
  Variant (8)..(8): Xaa in position 8 is any amino acid
  Variant (10)..(11): Xaa in position 10 to 11 is any amino acid
  Variant (12)..(12): Xaa in position 12 is Ile, Leu or Val
  Variant (13)..(16): Xaa in position 13 to 16 is any amino acid
  Variant (19)..(19): Xaa in position 19 is any amino acid
  Variant (21)..(21): Xaa in position 21 is Leu, Met or Val
GXAXXXQXVXXXXXXXWDXPX

SEQ ID NO: 4260 - DNA, 2136 bp, Escherichia coli K12
  CDS (1)..(2136): transl_table=11
atgaaatcaatgaatattgccgccagtagtgaactggtatcccgactttcttctcatcgtcgcgtggtggcgttgggagatactgattttacggacgtcgcggcagtcgtcattaccgctgcggatagtcgcagtggcattcttgcgttgcttaagcgcaccggttttcatctaccggtgtttttgtattccgaacatgctgttgaattacctgcgggcgttacggcggtaatcaacggcaacgagcagcagtggctggagctggaatccgcagcctgtcagtatgaagagaatttgctgccaccgttttatgacacgctgacgcagtacgttgagatgggcaacagcacctttgcttgccctggacatcaacatggtgcgttttttaaaaagcatcctgccggacgccatttttacgatttctttggtgagaacgtctttcgcgccgatatgtgtaacgctgacgtaaaattgggcgatctgcttattcatgaaggatcggcgaaagatgcgcagaaattcgcagccaaagtctttcatgccgataaaacctattttgtgctgaacggcacatcggcagcgaataaagtggtgacgaatgcgctgttaacgcgtggcgatctggtgctcttcgaccgtaacaaccataagtcgaatcatcacggcgcgctgattcaggcgggggcgacgccggtctatctggaagcttcacgcaacccgtttggtttcattggcggtattgatgcgcactgttttaatgaagagtatctgcgccagcaaattcgcgacgttgcgccagaaaaagccgacctgccgcgcccgtatcgcctggcgattattcagctgggaacctatgacggcactgtctataacgcccgtcaggtgatcgataccgttgggcatctgtgtgattacattctgtttgattccgcgtgggtcggttatgaacaatttatcccgatgatggcggatagctcgccgctgctgttagaacttaacgaaaacgatccggggatctttgtgactcagtcggtgcacaaacagcaggcgggattctcacagacgtcgcagatccataaaaaagataaccatatccgcggacaggcgcgtttttgcccgcataagcggttgaataacgcctttatgctccatgcttctaccagccctttctatccgctgtttgctgcactggatgttaacgccaaaattcatgaaggggagagtgggcgtcggctgtgggctgagtgtgttgagatagggattgaagcgcgcaaggctattcttgcgcgctgtaagctgttccgcccgtttatcccgcccgttgttgatggcaaattgtggcaggattatccgacatcagtgttagccagcgaccgccgttttttcagttttgagccgggggcgaagtggcacggctttgaaggatatgccgcggatcagtattttgttgatccgtgcaagctgttactcactacaccaggtatcgatgccgaaaccggcgaatatagcgactttggcgttccggcgacgattctggcgcactatctgcgtgagaacggcattgtgccggagaagtgcgatctcaactccattctgtttttattaactccggcggaaagccacgagaagctggcacaactggtggcgatgctggcgcaatttgaacagcatattgaggatgactcgccgctggttgaggtgttgccgagcgtttataacaagtatccggtgcgctatcgcgactacaccctgcgccagttgtgtcaggagatgcacgatctgtatgtcagtttcgacgtcaaagacctacaaaaagcgatgttccgccagcagagtttcccgtcagtggtgatgaacccccaggatgcgcatagcgcttatattcgcggtgacgtggagttggtgcggattcgtgatgccgaagggcgaattgcggcagaaggggcgttgccttatccacctggcgtgctttgcgtggtacccggggaagtctggggtggggcggttcaacgttatttccttgcactggaagaaggggtgaatttgttgccgggattttcgccggagctgcaaggtgtttatagcgaaaccgatgcggatggcgtgaaacggttgtacggttatgtgttgaagtaa

SEQ ID NO: 4261 - protein, 711 aa, Escherichia coli K12
MKSMNIAASSELVSRLSSHRRVVALGDTDFTDVAAVVITAADSRSGILALLKRTGFHLPVFLYSEHAVELPAGVTAVINGNEQQWLELESAACQYEENLLPPFYDTLTQYVEMGNSTFACPGHQHGAFFKKHPAGRHFYDFFGENVFRADMCNADVKLGDLLIHEGSAKDAQKFAAKVFHADKTYFVLNGTSAANKVVTNALLTRGDLVLFDRNNHKSNHHGALIQAGATPVYLEASRNPFGFIGGIDAHCFNEEYLRQQIRDVAPEKADLPRPYRLAIIQLGTYDGTVYNARQVIDTVGHLCDYILFDSAWVGYEQFIPMMADSSPLLLELNENDPGIFVTQSVHKQQAGFSQTSQIHKKDNHIRGQARFCPHKRLNNAFMLHASTSPFYPLFAALDVNAKIHEGESGRRLWAECVEIGIEARKAILARCKLFRPFIPPVVDGKLWQDYPTSVLASDRRFFSFEPGAKWHGFEGYAADQYFVDPCKLLLTTPGIDAETGEYSDFGVPATILAHYLRENGIVPEKCDLNSILFLLTPAESHEKLAQLVAMLAQFEQHIEDDSPLVEVLPSVYNKYPVRYRDYTLRQLCQEMHDLYVSFDVKDLQKAMFRQQSFPSVVMNPQDAHSAYIRGDVELVRIRDAEGRIAAEGALPYPPGVLCVVPGEVWGGAVQRYFLALEEGVNLLPGFSPELQGVYSETDADGVKRLYGYVLK

SEQ ID NO: 4262 - DNA, 2199 bp, Escherichia coli
  CDS (1)..(2199)
atgtcagaattaaaaattgccgttagtcgttcttgcccggattgtttttccactcatcgtgcatgcgtgaatatagacgaaagtaattatattgacgttgccgccattattttatcagtcagtgatgttgaacgtggaaaactcgatgaaatagacgctactggctatgacattcctgtttttattgcaacggaaaatgaagaacgtataccagcagaatatctttcacgtatttctggtgtcttcgaacatggagaagcacgcaaagaattttatggtcgtcagttagaaaccgctgccagccattatgaaactcaactgcgcccacctttctttcgcgcactggtcgattatgtcaatcagggcaacagcgcatttgactgccccggtcatcagggcggcgaatttttccgtcgccatccggcggggaatcagtttgtggaatactttggtgaggcgctgttccgtgccgacttgtgcaacgccgacgtagcgatgggcgatctgctgattcacgaaggcgcgccatgcattgcacagcaacatgcagcaaaagtgtttaatgccgataaaacctacttcgttttaaatggcacttcatcttctaacaaagtggttttaaacgccctgctgacaccgggtgatctggtgctatttgaccgcaataaccataagtctaaccaccacggggccttgctacaggctggtgcaacaccggtttatctggaaacagcacgtaacccgtatggttttatcggtggtattgatgcacactgcttcgaagaaagttatctgcgtgaactgattacagaagttgcaccgcaacgggcaaaagaggcgcgtccgttccgcctcgctgtgattcagctaggcacctacgacggtacgatttataacgcccgccaggtggtggataaaattggtcatctgtgtgactacatcctgtttgattccgcatgggtcggctatgaacagtttattccgatgatggctgactgttcgccgctgttgctggatcttaatgagaacgatccgggtattctggttacgcaatccgtacataaacagcaggctggtttttctcaaacttcacaaatccataaaaaagacagccacatcaaagggcaacagcgttatgtaccgcacaaacgcatgaacaacgcctttatgatgcatgcctccaccagcccgttctatccgctgtttgccgcactggatatcaacgccaaaatgcatgaaggtgtcagcggtcgtaatatgtggatggattgtgtggtaaatggcattaatgcccgcaaactgatcctcgataactgtcagcatattcgtccgttcatacctgaactggtggatggtaaaccctggcagtcgtatgaaacagcgcaaattgcggttgatctgcgcttcttccagtttgtaccaggtgagcactggcattcttttgaaggctatgcagagaatcaatactttgttgatccgtgcaaactgttgctgacaaccccaggtattgatgcacgtaacggcgaatatgaagcgttcggtgtacccgcgacgattcttgctaacttcctgcgcgaaaatggcgtagtgccggaaaaatgcgatcttaactccatcctcttcctgctgactccggcagaagatatggccaaacttcagcaacttgttgccctgctggtacgcttcgaaaaactgctggaatctgatgcgccgctggcggaagtgctaccttccatctacaaacagcatgaagagcgctacgccggttatacccttcgtcagttgtgccaggaaatgcatgatttgtatgcccgccacaacgtgaaacaactgcaaaaagagatgttccgtaaggaacacttcccacgcgtcagcatgaatccgcaagaagctaactacgcctatttacgcggtgaagtggagctggttcgtctgccggatgcagaaggccgtatcgctgccgaaggtgcgcttccttatcctccgggtgtgctgtgtgttgttccgggtgaaatctggggtggtgctgttttgcgttacttcagcgctctggaagaagggatcaacctgctgccaggttttgcaccggagctgcagggtgtctatatcgaagaacatgatggtcgtaagcaagtttggtgctatgtcatcaagcctcgtgatgcgcaaagcaccctgctgaaaggggaaaaattatga

SEQ ID NO: 4263 - protein, 732 aa, Escherichia coli
MSELKIAVSRSCPDCFSTHRACVNIDESNYIDVAAIILSVSDVERGKLDEIDATGYDIPVFIATENEERIPAEYLSRISGVFEHGEARKEFYGRQLETAASHYETQLRPPFFRALVDYVNQGNSAFDCPGHQGGEFFRRHPAGNQFVEYFGEALFRADLCNADVAMGDLLIHEGAPCIAQQHAAKVFNADKTYFVLNGTSSSNKVVLNALLTPGDLVLFDRNNHKSNHHGALLQAGATPVYLETARNPYGFIGGIDAHCFEESYLRELITEVAPQRAKEARPFRLAVIQLGTYDGTIYNARQVVDKIGHLCDYILFDSAWVGYEQFIPMMADCSPLLLDLNENDPGILVTQSVHKQQAGFSQTSQIHKKDSHIKGQQRYVPHKRMNNAFMMHASTSPFYPLFAALDINAKMHEGVSGRNMWMDCVVNGINARKLILDNCQHIRPFIPELVDGKPWQSYETAQIAVDLRFFQFVPGEHWHSFEGYAENQYFVDPCKLLLTTPGIDARNGEYEAFGVPATILANFLRENGVVPEKCDLNSILFLLTPAEDMAKLQQLVALLVRFEKLLESDAPLAEVLPSIYKQHEERYAGYTLRQLCQEMHDLYARHNVKQLQKEMFRKEHFPRVSMNPQEANYAYLRGEVELVRLPDAEGRIAAEGALPYPPGVLCVVPGEIWGGAVLRYFSALEEGINLLPGFAPELQGVYIEEHDGRKQVWCYVIKPRDAQSTLLKGEKL

SEQ ID NO: 4264 - DNA, 2196 bp, Lactobacillus sp strain 30a
  CDS (1)..(2196)
atgagttcttctcttaaaattgcttcgactcaagaagcgcgtcaatatttcgatactgaccgcgttgttgtcgatgctgtaggctctgattttactgatgtcggtgctgttatcgcaatggattacgaaacagatgtcatcgacgctgctgatgcaactaagtttggtattcctgtttttgccgtaactaaggatgcccaagctatcagtgctgatgagctgaagaagattttccacatcattgatttggaaaacaaatttgatgctactgttaacgctcgtgaaatcgaaactgctgttaacaactacgaagacagcattttaccaccattcttcaagtcattgaaagaatacgttagccgtggtttaatccaattcgactgcccaggtcaccaaggtggtcaatactacagaaagcacccagctggtcgtgaattctacgacttcttcggcgaaactgtcttccgtgcagacttatgtaacgctgacgttgccttgggtgacttgctgatccacgaaggtcctgctgttgctgctgaaaagcatgctgcacgtgtttacaacgctgacaagacttacttcgttttaggtggttcttccaacgctaacaacactgtaacatctgctttagtttctaacggcgacttggtattgttcgaccggaacaaccacaagtccgtttacaactcagctttagctatggctggtggccgtcctgtttacctccaaacaaaccgtaacccatacggcttcatcggtggtatctacgacagcgacttcgatgaaaagaagatccgtgaactggcagctaaggttgacccagaacgtgctaagtggaagcgtccattccgtctggctgttatccaattaggtacttacgatggtactatctacaacgcacacgaagttgtaaagcgtatcggtcacctttgtgattacatcgaattcgactctgcttgggtaggttacgaacaattcattcctatgatgcgtaactcttcaccattattgattgatgaccttggtccagaagatcctggtatcattgttgttcaatcagttcacaagcaacaagccggcttctcacaaacttcacaaatccacaagaaggatagccacatcaagggtcaattacgttactgtgaccacaagcactttaacaactccttcaacttgttcatgtctacttcaccattctacccaatgtatgcagcattagacgttaacgctgctatgcaagaaggcgaagcaggtcgcaagttatggcatgaccttctgattactaccattgaagctcgtaagaagttgatcaaggctggctcaatgttccgtccattcgttccacctgttgttaacggcaagaagtgggaagatggcgacactgaagatatggctaacaacattgactactggcgctttgaaaagggtgctaagtggcatgcttacgaaggctacggcgacaaccaatactacgttgatccaaacaagttcatgttaactacacctggtatcaacccagaaactggtgactacgaagacttcggtgttccagctactatcgttgctaactacttacgtgaccacggtatcatccctgaaaagtctgacttgaactctatcttgttcttgatgactccagctgaaactccagctaagatgaacaacctgatcactcaacttcttcaattacaacgcttgatcgaagaagatgctccattgaagcaagttcttccttcaatctacgctgctaacgaagaacgttacaatggctacactatccgtgaactttgccaagaattgcacgacttctacaagaacaacaacacgttcacataccagaagcgtctcttcttacgtgaattcttcccagaacaaggtatgcttccatacgaagctcgtcaagaattcatccgcaaccacaacaagcttgttccattgaacaagatcgaaggcgaaatcgccctcgaaggtgctcttccataccctccaggagtattctgtgtagcaccaggtgaaaagtggtcagaaactgctgttaagtacttcactatcttacaagatggtatcaacaacttccctggattcgctccagaaatccaaggtgtatacttcaagcaagaaggcgacaaggttgttgcttacggtgaagtttacgatgcagaagttgctaagaacgatgatcgttacaacaactaa

SEQ ID NO: 4265 - protein, 731 aa, Lactobacillus sp strain 30a
MSSSLKIASTQEARQYFDTDRVVVDAVGSDFTDVGAVIAMDYETDVIDAADATKFGIPVFAVTKDAQAISADELKKIFHIIDLENKFDATVNAREIETAVNNYEDSILPPFFKSLKEYVSRGLIQFDCPGHQGGQYYRKHPAGREFYDFFGETVFRADLCNADVALGDLLIHEGPAVAAEKHAARVYNADKTYFVLGGSSNANNTVTSALVSNGDLVLFDRNNHKSVYNSALAMAGGRPVYLQTNRNPYGFIGGIYDSDFDEKKIRELAAKVDPERAKWKRPFRLAVIQLGTYDGTIYNAHEVVKRIGHLCDYIEFDSAWVGYEQFIPMMRNSSPLLIDDLGPEDPGIIVVQSVHKQQAGFSQTSQIHKKDSHIKGQLRYCDHKHFNNSFNLFMSTSPFYPMYAALDVNAAMQEGEAGRKLWHDLLITTIEARKKLIKAGSMFRPFVPPVVNGKKWEDGDTEDMANNIDYWRFEKGAKWHAYEGYGDNQYYVDPNKFMLTTPGINPETGDYEDFGVPATIVANYLRDHGIIPEKSDLNSILFLMTPAETPAKMNNLITQLLQLQRLIEEDAPLKQVLPSIYAANEERYNGYTIRELCQELHDFYKNNNTFTYQKRLFLREFFPEQGMLPYEARQEFIRNHNKLVPLNKIEGEIALEGALPYPPGVFCVAPGEKWSETAVKYFTILQDGINNFPGFAPEIQGVYFKQEGDKVVAYGEVYDAEVAKNDDRYNN

SEQ ID NO: 4266 - DNA, 2196 bp, Escherichia coli
  CDS (1)..(2196)
atggggcagggttttccaccttgtccggtattcttacttccccgaaacgggtttgcgcttatgaaatcaatgaatattgccgccagtagtgaactggtatcccgactttcttctcatcgtcgcgtggtggcgttgggagatactgattttacggacgtcgcggcagtcgtcattaccgctgcggatagtcgcagtggcattcttgcgttgcttaagcgcaccggttttcatctaccggtgtttttgtattccgaacatgctgttgaattacctgcgggcgttacggcggtaatcaacggcaacgagcagcagtggctggagctggaatccgcagcctgtcagtatgaagagaatttgctgccaccgttttatgacacgctgacgcagtacgttgagatgggcaacagcacctttgcttgccctggacatcaacatggtgcgttttttaaaaagcatcctgccggacgccatttttacgatttctttggtgagaacgtctttcgcgccgatatgtgtaacgctgacgtaaaattgggcgatctgcttattcatgaaggatcggcgaaagatgcgcagaaattcgcagccaaagtctttcatgccgataaaacctattttgtgctgaacggcacatcggcagcgaataaagtggtgacgaatgcgctgttaacgcgtggcgatctggtgctcttcgaccgtaacaaccataagtcgaatcatcacggcgcgctgattcaggcgggggcgacgccggtctatctggaagcttcacgcaacccgtttggtttcattggcggtattgatgcgcactgttttaatgaagagtatctgcgccagcaaattcgcgacgttgcgccagaaaaagccgacctgccgcgcccgtatcgcctggcgattattcagctgggaacctatgacggcactgtctataacgcccgtcaggtgatcgataccgttgggcatctgtgtgattacattctgtttgattccgcgtgggtcggttatgaacaatttatcccgatgatggcggatagctcgccgctgctgttagaacttaacgaaaacgatccggggatctttgtgactcagtcggtgcacaaacagcaggcgggattctcacagacgtcgcagatccataaaaaagataaccatatccgcggacaggcgcgtttttgcccgcataagcggttgaataacgcctttatgctccatgcttctaccagccctttctatccgctgtttgctgcactggatgttaacgccaaaattcatgaaggggagagtgggcgtcggctgtgggctgagtgtgttgagatagggattgaagcgcgcaaggctattcttgcgcgctgtaagctgttccgcccgtttatcccgcccgttgttgatggcaaattgtggcaggattatccgacatcagtgttagccagcgaccgccgttttttcagttttgagccgggggcgaagtggcacggctttgaaggatatgccgcggatcagtattttgttgatccgtgcaagctgttactcactacaccaggtatcgatgccgaaaccggcgaatatagcgactttggcgttccggcgacgattctggcgcactatctgcgtgagaacggcattgtgccggagaagtgcgatctcaactccattctgtttttattaactccggcggaaagccacgagaagctggcacaactggtggcgatgctggcgcaatttgaacagcatattgaggatgactcgccgctggttgaggtgttgccgagcgtttataacaagtatccggtgcgctatcgcgactacaccctgcgccagttgtgtcaggagatgcacgatctgtatgtcagtttcgacgtcaaagacctacaaaaagcgatgttccgccagcagagtttcccgtcagtggtgatgaacccccaggatgcgcatagcgcttatattcgcggtgacgtggagttggtgcggattcgtgatgccgaagggcgaattgcggcagaaggggcgttgccttatccacctggcgtgctttgcgtggtacccggggaagtctggggtggggcggttcaacgttatttccttgcactggaagaaggggtgaatttgttgccgggattttcgccggagctgcaaggtgtttatagcgaaaccgatgcggatggcgtgaaacggttgtacggttatgtgttgaagtaa

SEQ ID NO: 4267 - protein, 731 aa, Escherichia coli
MGQGFPPCPVFLLPRNGFALMKSMNIAASSELVSRLSSHRRVVALGDTDFTDVAAVVITAADSRSGILALLKRTGFHLPVFLYSEHAVELPAGVTAVINGNEQQWLELESAACQYEENLLPPFYDTLTQYVEMGNSTFACPGHQHGAFFKKHPAGRHFYDFFGENVFRADMCNADVKLGDLLIHEGSAKDAQKFAAKVFHADKTYFVLNGTSAANKVVTNALLTRGDLVLFDRNNHKSNHHGALIQAGATPVYLEASRNPFGFIGGIDAHCFNEEYLRQQIRDVAPEKADLPRPYRLAIIQLGTYDGTVYNARQVIDTVGHLCDYILFDSAWVGYEQFIPMMADSSPLLLELNENDPGIFVTQSVHKQQAGFSQTSQIHKKDNHIRGQARFCPHKRLNNAFMLHASTSPFYPLFAALDVNAKIHEGESGRRLWAECVEIGIEARKAILARCKLFRPFIPPVVDGKLWQDYPTSVLASDRRFFSFEPGAKWHGFEGYAADQYFVDPCKLLLTTPGIDAETGEYSDFGVPATILAHYLRENGIVPEKCDLNSILFLLTPAESHEKLAQLVAMLAQFEQHIEDDSPLVEVLPSVYNKYPVRYRDYTLRQLCQEMHDLYVSFDVKDLQKAMFRQQSFPSVVMNPQDAHSAYIRGDVELVRIRDAEGRIAAEGALPYPPGVLCVVPGEVWGGAVQRYFLALEEGVNLLPGFSPELQGVYSETDADGVKRLYGYVLK

SEQ ID NO: 4268 - DNA, 2163 bp, Vibrio cholerae O1 biovar eltor str. N16961
  CDS (1)..(2163): transl_table=11
atgaattcattaaaaattgctacgagtttatcggttcgctcttgcttcacaacccaacgtgaagtggtggatgtactgaaaaccgacttctgtgacattggtgcggcggtggtttccgtcgaagacgtacaaaacggcatcatagataaaatgaatgcgaccggtttgaaactgccgatctttgttgctgtgtgctgcgaagaccaattcccagatgatttttgcgccgatatcaccggggtatttgagctgtgtgatgccaaagtcgagttctacggtaagcaagtggaaactgccgtgcgtcgttatcaagaaagtttgttgccacctttctttggtacattgaaaaaatacgtggacatgggtaactccacttttgcttgcccaggccatcaaggtggtcagttcttccgtaagcacccggttggtcgccagttttttgatttctttggtgaaaccttgttccgctctgatatgtgtaacgcggacgtacgtttgggcgacttgctgatccatgaaggtgcaccgcatgatgcacaggcttacgccgcgaaagtgtacaacgcggataaaacctacttcgtacttaacgggacttcagcttccaacaaagtggtgtgtaacgccctgctgacaccgggagatctggtgctgtttgatcgcaacaaccataaatccaaccaccacggtgcgttaattcaagcgggtgcgacaccggtttacttagaaacggcgcgtaacccattcggttttatcggtgggattgatacgcactgctttaacgaatcttacctacgtgatgcggtacgtaatgtcgacccaagccgcgcggaagcgaaacgcccattccgtcttgccatcattcagcttggcacttacgacggtacgatttacaacgcgcgtcaggtggtggatcgcatcggtcatttgtgtgactacatcctgtttgactcagcatgggtgggctatgaacagttcattcccatgatgaaagactgctcgccacttcttctcgatctaaagcctgaagatccgggcatcatcgtcactcagtccgtgcataaacagcaggcaggtttctcgcaaacttcgcaaattcacaagaaagatcaccacatcaaaggccaagagcgttactgcaaccataaacgctttaacaatgcctttatgctgcacgcttcaaccagcccattctacccgctgtttgcggcgctcgatgtgaacgccaagatgcacgaaggggacagtggccgctacctatggcgtgaagcggtaaaaaccggtatcgaagcccgtaagcttctaatgaaaaaatgcaaatacatcaagccgttcattccaccaatgatcgaaggtaaaccttggcagtctcaccccaccgagcaaattgccgatgatttacgtttctttgaatttgagccgggccagaaatggcatgcgtttgaaggttacgagcatggtcagtatttcgttgacccttgtaagttcctgctgaccacaccggggattgacccagaaactggcgaatacgagcactttggtattccggccaccatactggccaacttcctgcgtgagaacaacatcatcccagagaagtgcgatttgaactctatcctcttcctgctcaccccagccgaagatatggcgaagatgcagcatttagtggcacaaattgctcgttttgaacgcttgattgaagaagatgcaccactgagcgaagtattgccgaacgtgtaccgcgcgaatcgcgaacgctacaaaggctacaccatccgtcagttgtgtcaggaaatgcacgatctgtatgtcagccatgatgtgaaacagctgcaaaaagagatgttccgcgcgcgttatttcccacgtgcggtaatgaacccacaagaagcgaacttggcctttgtacgtggtcaggttgagctagtcccactgcgtgaagtggaaggccgtatcgccgctgaaggcgcactgccttaccctccgggtgtgttgtgtgtggttccgggagaaatatggggcggttcagtacagcgttacttcctcgctctagaagaaggcattaacttgctgccgggttttgcgcctgaattgcaaggggtgtatttggagccgacaggcgagggacgagtgcaagccatgggctatgtactgaaacgttaa

SEQ ID NO: 4269 - protein, 720 aa, Vibrio cholerae O1 biovar eltor str. N16961
MNSLKIATSLSVRSCFTTQREVVDVLKTDFCDIGAAVVSVEDVQNGIIDKMNATGLKLPIFVAVCCEDQFPDDFCADITGVFELCDAKVEFYGKQVETAVRRYQESLLPPFFGTLKKYVDMGNSTFACPGHQGGQFFRKHPVGRQFFDFFGETLFRSDMCNADVRLGDLLIHEGAPHDAQAYAAKVYNADKTYFVLNGTSASNKVVCNALLTPGDLVLFDRNNHKSNHHGALIQAGATPVYLETARNPFGFIGGIDTHCFNESYLRDAVRNVDPSRAEAKRPFRLAIIQLGTYDGTIYNARQVVDRIGHLCDYILFDSAWVGYEQFIPMMKDCSPLLLDLKPEDPGIIVTQSVHKQQAGFSQTSQIHKKDHHIKGQERYCNHKRFNNAFMLHASTSPFYPLFAALDVNAKMHEGDSGRYLWREAVKTGIEARKLLMKKCKYIKPFIPPMIEGKPWQSHPTEQIADDLRFFEFEPGQKWHAFEGYEHGQYFVDPCKFLLTTPGIDPETGEYEHFGIPATILANFLRENNIIPEKCDLNSILFLLTPAEDMAKMQHLVAQIARFERLIEEDAPLSEVLPNVYRANRERYKGYTIRQLCQEMHDLYVSHDVKQLQKEMFRARYFPRAVMNPQEANLAFVRGQVELVPLREVEGRIAAEGALPYPPGVLCVVPGEIWGGSVQRYFLALEEGINLLPGFAPELQGVYLEPTGEGRVQAMGYVLKR

SEQ ID NO: 4270 - DNA, 2163 bp, Pasteurella multocida subsp. multocida str. Pm70
  CDS (1)..(2163): transl_table=11
atgctaaatttaaaaattgcatatagcccattaattcgaccttattttcatacaaatagagaactcgtttctgttcaagaaacagatttcaccgacattggtgcaattatcctgagttctgaagatattgaagattatattgatagtatacaagcaactgaatttaatattccggtctttgttgctgtcattgaaggtcaatttttagatcctcaattctttgacaaagtctatcacgttcaagatctcaacaactacgacatcaacctatacagtcgccaaattgaaactgcggcgcggttttacgaagaaaaaatcctcccacctttctttaaaatgctaagtgaatatgtggaaatggggaattctgcttttgattgtccgggacaccaaggtggacaatatttccgtaaacatcctgcaggacgttatctctatgatttctacggtgaaaatattttccgctcagatatctgtaatgccgatgtaaaattaggcgatttgctaatccatgaaggagccgcttgtgatgctcaaaaacacgctgctcaagtctttaatgctgataaaacctacttcgtcttaaatgggacatcttctgcaaataaagtcgtcaccaatgcgttactcacaccgggtgatcttgtgctctttgatcgtaacaatcacaaatctatccatcacggtgcattaattcaagctggtgctacccctgtttatttggaaactgcgcgtaatccatttggttttatcggtgggatcgatagccattgttttgatgaagattatttgaaatctttaattaaagatgttgcgcctgaaaaactaacacaagcacgtcctttccgtttagccgttattcagctcggcacttatgacggaaccatctataatgcgcgccaagtcgtagataaaattggtcatttatgtgactacatcttgtttgattctgcgtgggtaggttatgaacaattcattccaatgatgaaagattgctcaccgctcttgcttgaattaaatgaaaatgatcccggcatcatcgtgacacaatcagtacacaaacaacaagccggcttctcacaagcctcacaaattcacaaaaaagacaagcacattaaaggtcaacagcgctactgtaatcataaacgctttaataatgcattcatgttacacgcctccaccagcccattctaccctctttttgccacacttgatgtcaatgcaaaaattcaaggtacccctgcgggtattcgtttatggcatgactgtgtcaaaatcgggatagaagcacgtaaaatggtgctgaatagttgtgatctgatcaaaccgtttattccgccttatgtcaatggcaaaaaatggcaagactacgatacagaagaaatggcaaatgatttaacattcttcaaattccatgctgatgataaatggcatcaatttgaaggctatgtagataaccaatattttgttgatccatgtaaattcatgctaacgacgccgggtattgatattgaaacaggtgaatacgaagacttcggtgtccctgctacgattcttgctaattatttacgtgaaaacggcattattccggaaaaatgtgacttaaactcaattctcttcttattaacgccagcagaaaccctcaccaaaatgcaaagtttggttgcacaaattgcggcatttgaacaacacatcaaaaaagattccttactaaaagaagtcttaccaagtgtttatcacaacaatgaaaaacgctatgaaggttataccatccgtcgtctttgccaagaaatgcatgatttgtatgtcagccgtaacgtgaaaactttacaacgcaacttattcagaaaagcgaccttgcctgaatatgtgatgaatccacatcaagctaatcttgaatttgttcgtaatcgtgtagaactggttccactaaccgaaatcgttaatcgcattgcggcagaaggagcacttccttatccaccgggtgtgctttgtgtcgtaccgggtgaaaaatggagtcagactgcacaggaatatttcttagcactcgaagaaggcattaatttattaccaggtttcgcaccagaaattcaaggggtatatctacaacaagatgcagatggacgtattcgtgcttatggctacgtattaactgaaaactaa

SEQ ID NO: 4271 - protein, 720 aa, Pasteurella multocida subsp. multocida str. Pm70
MLNLKIAYSPLIRPYFHTNRELVSVQETDFTDIGAIILSSEDIEDYIDSIQATEFNIPVFVAVIEGQFLDPQFFDKVYHVQDLNNYDINLYSRQIETAARFYEEKILPPFFKMLSEYVEMGNSAFDCPGHQGGQYFRKHPAGRYLYDFYGENIFRSDICNADVKLGDLLIHEGAACDAQKHAAQVFNADKTYFVLNGTSSANKVVTNALLTPGDLVLFDRNNHKSIHHGALIQAGATPVYLETARNPFGFIGGIDSHCFDEDYLKSLIKDVAPEKLTQARPFRLAVIQLGTYDGTIYNARQVVDKIGHLCDYILFDSAWVGYEQFIPMMKDCSPLLLELNENDPGIIVTQSVHKQQAGFSQASQIHKKDKHIKGQQRYCNHKRFNNAFMLHASTSPFYPLFATLDVNAKIQGTPAGIRLWHDCVKIGIEARKMVLNSCDLIKPFIPPYVNGKKWQDYDTEEMANDLTFFKFHADDKWHQFEGYVDNQYFVDPCKFMLTTPGIDIETGEYEDFGVPATILANYLRENGIIPEKCDLNSILFLLTPAETLTKMQSLVAQIAAFEQHIKKDSLLKEVLPSVYHNNEKRYEGYTIRRLCQEMHDLYVSRNVKTLQRNLFRKATLPEYVMNPHQANLEFVRNRVELVPLTEIVNRIAAEGALPYPPGVLCVVPGEKWSQTAQEYFLALEEGINLLPGFAPEIQGVYLQQDADGRIRAYGYVLTEN

SEQ ID NO: 4272 - DNA, 2199 bp, Escherichia coli O157:H7 EDL933
  CDS (1)..(2199): transl_table=11
  misc_feature (837)..(837): r is g or a
  misc_feature (1194)..(1194): s is g or c
atgtcagaattaaaaattgccgttagtcgttcttgcccggattgtttttccactcatcgtgcatgcgtgaatatagacgaaagtaattatattgacgttgccgccattattttatcagtcagtgatgttgaacgtggaaaactcgatgaaatagacgctactggctatgacattcctgtttttattgcaacggaaaatgaagaacgtataccagcagaatatctttcacgtatttctggtgtcttcgaacatggagaagcacgcaaagaattttatggtcgtcagttagaaaccgctgccagccattatgaaactcaactgcgcccacctttctttcgcgcactggtcgattatgtcaatcagggcaacagcgcatttgactgccccggtcatcagggcggcgaatttttccgtcgccatccggcggggaatcagtttgtggaatactttggtgaggcgctgttccgtgccgacttgtgcaacgccgacgtagcgatgggcgatctgctgattcacgaaggcgcgccatgcattgcacagcaacatgcagcaaaagtgtttaatgccgataaaacctacttcgttttaaatggcacttcatcttctaacaaagtggttttaaacgccctgctgacaccgggtgatctggtgctatttgaccgcaataaccataagtctaaccaccacggggccttgctacaggctggtgcaacaccggtttatctggaaacagcacgtaacccgtatggttttatcggtggtattgatgcacactgcttcgaagaaagttatctgcgtgaactgattacagaagttgcaccgcaacgggcaaaagargcgcgtccgttccgcctcgctgtgattcagctaggcacctacgacggtacgatttataacgcccgccaggtggtggataaaattggtcatctgtgtgactacatcctgtttgattccgcatgggtcggctatgaacagtttattccgatgatggctgactgttcgccgctgttgctggatcttaatgagaacgatccgggtattctggttacgcaatccgtacataaacagcaggctggtttttctcaaacttcacaaatccataaaaaagacagccacatcaaagggcaacagcgttatgtaccgcacaaacgcatgaacaacgcctttatgatgcatgcctccaccagcccgttstatccgctgtttgccgcactggatatcaacgccaaaatgcatgaaggtgtcagcggtcgtaatatgtggatggattgtgtggtaaatggcattaatgcccgcaaactgatcctcgataactgtcagcatattcgtccgttcatacctgaactggtggatggtaaaccctggcagtcgtatgaaacagcgcaaattgcggttgatctgcgcttcttccagtttgtaccaggtgagcactggcattcttttgaaggctatgcagagaatcaatactttgttgatccgtgcaaactgttgctgacaaccccaggtattgatgcacgtaacggcgaatatgaagcgttcggtgtacccgcgacgattcttgctaacttcctgcgcgaaaatggcgtagtgccggaaaaatgcgatcttaactccatcctcttcctgctgactccggcagaagatatggccaaacttcagcaacttgttgccctgctggtacgcttcgaaaaactgctggaatctgatgcgccgctggcggaagtgctaccttccatctacaaacagcatgaagagcgctacgccggttatacccttcgtcagttgtgccaggaaatgcatgatttgtatgcccgccacaacgtgaaacaactgcaaaaagagatgttccgtaaggaacacttcccacgcgtcagcatgaatccgcaagaagctaactacgcctatttacgcggtgaagtggagctggttcgtctgccggatgcagaaggccgtatcgctgccgaaggtgcgcttccttatcctccgggtgtgctgtgtgttgttccgggtgaaatctggggtggtgctgttttgcgttacttcagcgctctggaagaagggatcaacctgctgccaggttttgcaccggagctgcagggtgtctatatcgaagaacatgatggtcgtaagcaagtttggtgctatgtcatcaagcctcgtgatgcgcaaagcaccctgctgaaaggggaaaaattatga

SEQ ID NO: 4273 - protein, 732 aa, Escherichia coli O157:H7 EDL933
  misc_feature (398)..(398): The Xaa at location 398 stands for Leu, or Phe.
MSELKIAVSRSCPDCFSTHRACVNIDESNYIDVAAIILSVSDVERGKLDEIDATGYDIPVFIATENEERIPAEYLSRISGVFEHGEARKEFYGRQLETAASHYETQLRPPFFRALVDYVNQGNSAFDCPGHQGGEFFRRHPAGNQFVEYFGEALFRADLCNADVAMGDLLIHEGAPCIAQQHAAKVFNADKTYFVLNGTSSSNKVVLNALLTPGDLVLFDRNNHKSNHHGALLQAGATPVYLETARNPYGFIGGIDAHCFEESYLRELITEVAPQRAKEARPFRLAVIQLGTYDGTIYNARQVVDKIGHLCDYILFDSAWVGYEQFIPMMADCSPLLLDLNENDPGILVTQSVHKQQAGFSQTSQIHKKDSHIKGQQRYVPHKRMNNAFMMHASTSPXYPLFAALDINAKMHEGVSGRNMWMDCVVNGINARKLILDNCQHIRPFIPELVDGKPWQSYETAQIAVDLRFFQFVPGEHWHSFEGYAENQYFVDPCKLLLTTPGIDARNGEYEAFGVPATILANFLRENGVVPEKCDLNSILFLLTPAEDMAKLQQLVALLVRFEKLLESDAPLAEVLPSIYKQHEERYAGYTLRQLCQEMHDLYARHNVKQLQKEMFRKEHFPRVSMNPQEANYAYLRGEVELVRLPDAEGRIAAEGALPYPPGVLCVVPGEIWGGAVLRYFSALEEGINLLPGFAPELQGVYIEEHDGRKQVWCYVIKPRDAQSTLLKGEKL

SEQ ID NO: 4274 - DNA, 2349 bp, Sinorhizobium meliloti 1021
  CDS (1)..(2349): transl_table=11
gtgaaggctccgaccgtccccattccattccacaagctgctcaaggtcgtggcattcgtcgacgaaagcaatctggaaacgaagagacttcttgcgcacattgtcgcggaaaatttcgaagtcgagttgcgcggcagctataacgccgacgtgtccgaggacgcttcggttggtgcctatattgggacggtcgagggcggacggctcgaagatgcccgcaagttcgtccgtgcggtcagagacatcggattccgcacgccgctatgggccctcgcagactcccacggcattgcggacattgcggcgattaaaatggccggtgaagtggacggcttcgtttatcttgggcagcagacaccggcgttctacgcaaagcagatcatttcaagtctggtcaattacggcaagacgctcctcccgccgtttttcggcggcctcatggcttacgatggagaagccaacatcgcgttcgactgtccaggacaccaaggcggacagttttaccggaagtcgcccgcaggccagctctttttcaattatttcggcgaaagcatatttcgcgccgatctttgcaatgccgacgtcgaccttggcgacctgctaatccatgaagggccggcggccgaggcgcagaagaatgcggcaaggattttcggcgcggaccggacctacttcattctgaacggcacaagcacatcgaacaaagtggttacgaacgcggtactgcgcgcaggcgacctcgtgttgttcgaccgcaacaatcacaaatcgcttcatcagggcgcgctggtgcaggcgggagcgataccagtttacctgccgacctcacgcaactcgttcgggatgatcggtgccgtggactgggacgcctgggacgaagcgagcctgcgccggcagatcgaaaggcatcccctggtcgaggacaaggcgcgagccagtgcagagcgaccgttccgactcgcctgcatccaacttgcgacctatgacggcactatttacaacgtccgcaaggtgttggaacagatcggacacctgtgcgactacgtactctgggacgaggcgtggatcggctacaacgctttccacccgttgtttgaagaccacagtccgatgcggatcgacacgcttgatgccgaaatgccggggttgttctcaacgcaatccgtccacaagcaaggggcgggcttttcgcaagcctcgcagattcacaagcgcgacgagcacatccgtgatcagcgccgctacgtcgaacataagcgcttcaacgagtcgcttctcatgcatgtttcgacttcaccattctacccgctattcgcctcgttggacgtcaatgccaagatccacgagggcaaggctggtgaaatgctctgggatcgctgtatcgagctgggtatcgaggcacgcaagaagctcagagaattcacccggtactacgagtcgtcgggtgcggggccccaggagcagtggttcttcgaccccttcgtacccgatgtggtcacgatctcgggctccaaacataccgaggatgttgtcgagtcccgttgggaggcgctcccgacggaggtcatcaaacgggaacagcagtgctggcgcttccgtccaggggcttcatggcatggatattccggctactccgatggctacgcaatggtggatccaaacaagcttacgcttctcactccaggcatagaccgtgcgaccggggagtatcgagacttcggcatcccagcaacgatggttgccaattatcttcgcgaacagcgcatcgttcccgagaagtgcgacctcaacagcatactgtttctgctcacacctgccgaggacgagagcaagctcaacacgctgatagccaagttggtgaagttcaagaacttatgggatcgggacgcacctttggccgaggttctaccaaccgtgtttgcggcgaacagagagcgctatgcaggatacacactccggcaggtctgcgcagagatgcacgacttctatcggcaagcaggggtcaaggaattgcagcgcctctgcttcagggcggagagcatgcccgagcccgcaatgacgccgaaagcggcttatgaagccctcgtggcaaacgaagttgattatgtggcactcgacgaggctttcggcaggatttcggccacgctcgcgttgatctacccgccgggcataggcgtcatagtccccggggagcgctgggacgaaagggcgcggccgatgcacaactatttcctggcattccaagagtccttcaaccgcttccccggcttcaattacgaggtccagggtgtgtttcaggagcgcgttgacggccagatcaaattctacacctacgccgtgcgcgagtaa

SEQ ID NO: 4275 - protein, 782 aa, Sinorhizobium meliloti 1021
MKAPTVPIPFHKLLKVVAFVDESNLETKRLLAHIVAENFEVELRGSYNADVSEDASVGAYIGTVEGGRLEDARKFVRAVRDIGFRTPLWALADSHGIADIAAIKMAGEVDGFVYLGQQTPAFYAKQIISSLVNYGKTLLPPFFGGLMAYDGEANIAFDCPGHQGGQFYRKSPAGQLFFNYFGESIFRADLCNADVDLGDLLIHEGPAAEAQKNAARIFGADRTYFILNGTSTSNKVVTNAVLRAGDLVLFDRNNHKSLHQGALVQAGAIPVYLPTSRNSFGMIGAVDWDAWDEASLRRQIERHPLVEDKARASAERPFRLACIQLATYDGTIYNVRKVLEQIGHLCDYVLWDEAWIGYNAFHPLFEDHSPMRIDTLDAEMPGLFSTQSVHKQGAGFSQASQIHKRDEHIRDQRRYVEHKRFNESLLMHVSTSPFYPLFASLDVNAKIHEGKAGEMLWDRCIELGIEARKKLREFTRYYESSGAGPQEQWFFDPFVPDVVTISGSKHTEDVVESRWEALPTEVIKREQQCWRFRPGASWHGYSGYSDGYAMVDPNKLTLLTPGIDRATGEYRDFGIPATMVANYLREQRIVPEKCDLNSILFLLTPAEDESKLNTLIAKLVKFKNLWDRDAPLAEVLPTVFAANRERYAGYTLRQVCAEMHDFYRQAGVKELQRLCFRAESMPEPAMTPKAAYEALVANEVDYVALDEAFGRISATLALIYPPGIGVIVPGERWDERARPMHNYFLAFQESFNRFPGFNYEVQGVFQERVDGQIKFYTYAVRE

SEQ ID NO: 4276 - DNA, 2199 bp, Salmonella typhimurium LT2
  CDS (1)..(2199): transl_table=11
atgtcagaattaaaaattgccgttagccgtcattgcccggattgtttttctacacaccgtaatattgtaaatgttgatgagagtcgtttcatcgacgtggctgccatcgtgttatccattgacgacattgaacacggaaaactcgatgaaatcgacgcaacgggttacggtattcccgtgtttgtcgcgacacatgacgaagggcgcgtaccgcctgagtatttgccgcgtatctctggtgtattcgaatataatgaatcccgtactgccttctatggtcgccagttggaaaccgcagcaagccactacgaaacgcagttacgtccgccgtttttccgcgcgctggtggattatgtcaaccagggcaacagcgcatttgactgcccggggcatcagggcggcgaattcttccgccgtcatcctgccggtaatcagttcgtggaatactttggcgaaacgctcttccgctccgacctatgcaacgcggacgtggcgatgggcgatctgctgattcacgaaggcgcgccttgcattgcgcagcaacatgcggcgaaagtctttaacgccgataagacctactttgtgctgaacgggacctcctcctctaacaaagtcgtactcaacgcgctgttaacgccgggcgatctggtactgtttgaccgtaacaaccacaaatctaaccaccacggcgcattattgcaggcgggcgcaacgccagtttatctggaaaccgcgcgtaacccgtatggttttatcggcgggatcgacgctcactgcttcgaagaagattacctgcgcgagctgattagcgaagtcgcgccgcagcgtgcccgcgaagcacgtccattccgtctggccgtcatccagttaggcacctacgacggtaccatttataacgcccgtcaggtcgtcgataaaattggtcatctgtgcgactacatcctgtttgactccgcctgggtcggctatgaacaatttattccgatgatggccgattgttcgccgctgctgctggaactgaacgaaaacgatccgggtattctggtgacgcagtccgttcacaaacaacaagccggtttctcccagacctcgcagatccataaaaaagatagccatatcaaagggcaatcgcgctacgttccgcataagcgcatgaacaacgcctttatgatgcacgcctccaccagcccgttctatccgctgttcgccgcgctggacgttaacgccaaaatgcacgaaggcgtcagcggtcgcaatatgtggatggattgcgtggttaacggcatcgatgcccgtaaattgatcctcgaaaactgtcatcacatccgtccgttcgtaccggaactgattgatggtaagccgtggcagtcatacccgacgtcagagatcgccagcgatctgcgcttcttccacttcgttccgggagaacactggcatgcgtttgaaggctatgccgaacatcagtactttgtcgacccttgcaaactgctgctcaccacaccgggcattaatgcagcgagcggcgaatatgaagactttggcgttcctgccacgatcctcgccaacttcctgcgcgagaacggcgttgtgccggaaaaatgcgacctcaactccattctgttcctgctgacgccggcagaagacatggcgaagttacaacagcttgtcgccctgctggctcgtttcgaaaaactgctggaagctgatgcgccgttagcggaagtattaccgtccatctacaaacagcatgaagcgcgttatgccggctataccctgcgtcagctttgccaggagatgcacgatctctatgcgcggcacaacgtgaaacagctgcaaaaagagatgttccgtaaatcgcatttcccgaaagtcagtatgaatccgcaagaggccaactatgcctatctgcgcggcgaggtcgaactggttcgcctgccggaagcggaaggtcgtatcgcggctgaaggcgctctgccttacccgccgggagtgctgtgtgtagttccgggtgaaatctggggcggttctgtcctgcgttacttcagcgccctggaagaagggatcaacctgctgccgggctttgcgcctgaactgcagggcgtttatatcgaagaacacgacggccgtaagcaggtctggtgctacgtcattaaacctcgtgacgcacagcgctccctgctgaaggaggaaaaattatga

SEQ ID NO: 4277 - protein, 732 aa, Salmonella typhimurium LT2
MSELKIAVSRHCPDCFSTHRNIVNVDESRFIDVAAIVLSIDDIEHGKLDEIDATGYGIPVFVATHDEGRVPPEYLPRISGVFEYNESRTAFYGRQLETAASHYETQLRPPFFRALVDYVNQGNSAFDCPGHQGGEFFRRHPAGNQFVEYFGETLFRSDLCNADVAMGDLLIHEGAPCIAQQHAAKVFNADKTYFVLNGTSSSNKVVLNALLTPGDLVLFDRNNHKSNHHGALLQAGATPVYLETARNPYGFIGGIDAHCFEEDYLRELISEVAPQRAREARPFRLAVIQLGTYDGTIYNARQVVDKIGHLCDYILFDSAWVGYEQFIPMMADCSPLLLELNENDPGILVTQSVHKQQAGFSQTSQIHKKDSHIKGQSRYVPHKRMNNAFMMHASTSPFYPLFAALDVNAKMHEGVSGRNMWMDCVVNGIDARKLILENCHHIRPFVPELIDGKPWQSYPTSEIASDLRFFHFVPGEHWHAFEGYAEHQYFVDPCKLLLTTPGINAASGEYEDFGVPATILANFLRENGVVPEKCDLNSILFLLTPAEDMAKLQQLVALLARFEKLLEADAPLAEVLPSIYKQHEARYAGYTLRQLCQEMHDLYARHNVKQLQKEMFRKSHFPKVSMNPQEANYAYLRGEVELVRLPEAEGRIAAEGALPYPPGVLCVVPGEIWGGSVLRYFSALEEGINLLPGFAPELQGVYIEEHDGRKQVWCYVIKPRDAQRSLLKEEKL

SEQ ID NO: 4278 - DNA, 2136 bp, Salmonella typhimurium LT2
  CDS (1)..(2136): transl_table=11
atgaaatcaatgaatattgccgccagcggtgaactcattccccgtctctccacccaccgaaacgtagtggcgctggacagtaccgactttaccgatgtggccgcagtcgtcattaccactgccgacagccgtagcggtattctggcgttgcttaaacgcaccggttttcacctgccggtgtttatgcttgcggatgaacccgtcagcgcgcctgtcggcgttacggcggtaatagtcgggaacgcgcaggaatggctggagctggaaaacgctgcctgtcgctacgaagcggaacttctgccgcccttttatggcaccctgacccagtatgtcgacatggggaatagtacttttgcttgcccggggcaccagcatggcgaattttttagaaaacatcccgcaggccgccatttttatgacttttttggtgaaaacctgtttcgtgcggatatgtgtaacgccgatgtgaaacttggcgatctgctaatacatgaaggttctgccaaacacgcgcagaaatttgcggcaaaagtgtttaatgcggataaaacctactttgtgctgaatgggacttcggcggcgaataaagtggtcaccaacgccctgctgacgcgcggcgatctggtgctgtttgatcgtaataatcacaaatccaaccaccacggcgccctgattcaggccggggcgacgccagtctatcttgaagcggcgcgtaacccgtttggttttatcggtggcattgatgcgcactgttttgatgaaacgtacctgcgcgaccagattcgtgacgtgatgccggaaagcgccgatgcgtcgcgtccgttccgcctggcgatcattcagctgggtacctatgacggcactatttacaacgcccgtcaggtggtggataaaatcgggcatctctgcgattacattctgtttgactccgcgtgggtaggctatgagcagtttatcaatatgatggcggatacctcgccgttgcggctggagcttaatgaaaacgaccctgggatctttgtgacccaatcggtacataagcaacaggcggggttctcacaaacctcgcagatccacaaaaaagataaccatattcgcggccaggcgcgtttttgcccgcacaaacgcctgaacaacgccttcatgttgcatgcttcaaccagtccgttctacccgctgtttgcggcgctggatgtcaatgccaaaatccacgaaggggagagcggtcgccgcctgtgggcggagtgcgttgcgctgggcattgacgcgcgtaaagccattctcgcccgttgcaaactgcttcagccctttatcccactggtggttgacggcaagccgtggcaggcatatccgacggagaccattgccagcaatcgtcgtttcttcagttttgaacccggggcgaaatggcatggctttgagggctatgcggatgaccagtattttgtcgacccctgtaaactgttactgaccacgccaggtattgatgccgatagtgggcgatacaccgaattcggcatcccggcgaccattctcgcccactatctgcgtgagaacggtattgtgcctgagaagtgcgatctcaactcgattctgttcttgctgacacccgccgagagcgaagagaagctggcgcgactggtcgcgatgctggcgcaatttgaacggcacattgaagacgatacgccgcttgcggatgtattgccgacggtttttcagaaatacccggtgcgctaccgcgattacaccctgcgtgagctatgtcaggagatgcacaacctgtacgttagctttgacgttaaggatctgcaaaaagcgatgttccgcaaagaaagcctgccgcatgtggcgatgaacccacaggatgccaacagcgcctttattcgcggcgatgtagagctggtgcgtatcagcgaggcgggcgggcgtattgctgccgagggggcattgccatacccgccgggcgtactgtgcgtggtgccgggggagatttggggcggcgcggcgcagcgttattttttggcgctggaagagggcatcaatctgttgcctggtttttcgccggaattgcagggggtatatagcgagaccgatgccgatggaattcaacgcttgtacggatatgttttaaagtaa

SEQ ID NO: 4279 - protein, 711 aa, Salmonella typhimurium LT2
MKSMNIAASGELIPRLSTHRNVVALDSTDFTDVAAVVITTADSRSGILALLKRTGFHLPVFMLADEPVSAPVGVTAVIVGNAQEWLELENAACRYEAELLPPFYGTLTQYVDMGNSTFACPGHQHGEFFRKHPAGRHFYDFFGENLFRADMCNADVKLGDLLIHEGSAKHAQKFAAKVFNADKTYFVLNGTSAANKVVTNALLTRGDLVLFDRNNHKSNHHGALIQAGATPVYLEAARNPFGFIGGIDAHCFDETYLRDQIRDVMPESADASRPFRLAIIQLGTYDGTIYNARQVVDKIGHLCDYILFDSAWVGYEQFINMMADTSPLRLELNENDPGIFVTQSVHKQQAGFSQTSQIHKKDNHIRGQARFCPHKRLNNAFMLHASTSPFYPLFAALDVNAKIHEGESGRRLWAECVALGIDARKAILARCKLLQPFIPLVVDGKPWQAYPTETIASNRRFFSFEPGAKWHGFEGYADDQYFVDPCKLLLTTPGIDADSGRYTEFGIPATILAHYLRENGIVPEKCDLNSILFLLTPAESEEKLARLVAMLAQFERHIEDDTPLADVLPTVFQKYPVRYRDYTLRELCQEMHNLYVSFDVKDLQKAMFRKESLPHVAMNPQDANSAFIRGDVELVRISEAGGRIAAEGALPYPPGVLCVVPGEIWGGAAQRYFLALEEGINLLPGFSPELQGVYSETDADGIQRLYGYVLK

SEQ ID NO: 4280 - DNA, 2163 bp, Yersinia pestis KIM
  CDS (1)..(2163): transl_table=11
atgacactattaaaaatagcaacaagcgcccgcctggcttcttatgtagaaactcagcgcggagtggtgtacctcaatcagactgactttactgatgttgccgcggtggtaatgtcggttgaagatgcaaatgcgggtatattgtcaatgctgcatgaccttggttttgctattcctgcgtttattgccgtgacggcagaacagacggtctctgctgattatttgcccttgattaaaggtgtcattacgcttggtgaagcaaataaagctttttataacgctcaggtagaagctgccgccagtgaatatcaaaagaatctcttaccgccttttttctcaacactgaaaaaatatgtcgagatgaataactcgacctttgcttgccctggccatcaggggggcgaattttttcgcaagcatcctgcaggacgccagttttttgaattctacggtgagacgatttttcgttcagatatgtgtaatgccgatgtcaaattaggtgatttacttatccatgaaggggcggcaaaagatgcacagaaatatgctgctaaggtattcaatgccgataaaacctattttgtcctgaacggtacctcggcggccaacaaggtcgtgaccaacgctttactgacccgtggtgatttagtgttgtttgaccgcaataaccataaatctaaccatcatggtgcgctgatccaggcgggcgcgacgccggtttatctggaaacggcccgtaacccctttggttttattggtggtattgatgcgcactgcttcaatgaagattatttacgtcaacaactgcgtgaagttgctcccgagcgtgcagaagaggctcggccattccgattagcgatcattcaattgggtacctacgacggtacggtatataacgcccgccaagtagttgatagtattggtcatttatgcgattacattttgtttgattctgcttgggtgggttacgaacaatttattccgatgatgaaggatttctcaccgttattactggaattaaatgaaaatgaccctgggattattgtgactcaatcggtacacaagcagcaggccggtttttctcagacctctcaggtacataaaaaagataatcacattaaaggacagaaacgtcactgtaaccataagcgttttaataatgcctttatgttgcatgcatcgaccagtccgttttatccattatttgcggcattggatgttaatgccaaaatacactctggtgacagtggccgccgtatgtggatggattgtgtaaaactcggtattgaaacccgtaaatcgttattggcacgctgttcgatgttacggccttttattcctccagttgttggcggtaaaaattggcaagattatgctactgatgtgattgccaatgatgcgcgcttctttaattttgtcccagatgaacgctggcatggatttgagggatataaccaagatcagtatttggttgatccgtgcaaattattgctgacgacgccgggaattgatgccagtactggccgatatacttcgtttggtattccggcggctattttggcgactttcctgcgtgaaaatggaattgtgccagaaaaatgtgatcttaactcgatcctattcctgctgaccccggcagaaaataccgccaaaatggcacacctggtggatatgttggtgcagtttgaacgctatgttgaacaagatgcgaagctgtgtgatgtattaccgacgatctatcgtaagaatgaagagcgttatcacggttataccttgcgtcagttatgccaagaaatgcatgacctgtacgtcagccatgacgttaagcaattgcaaaaggatatgttccgtaaagccagtttcccgcaggtagtcatgaacccgcaagacgccaatattcagtttatccgcgataatattgagttgattcctattgctgaagctgaaggccgtattgccgccgaaggcgctttgccttatccaccgggtgtgctgtgtgtggtgcccggtgaagtgtggggtggggcggttcagcgttattttctggcgctggaagaggggattaacttactgccgggcttttcacctgagttacagggcgtttatatcgaaaaaggtgatgtgtcttggcggcgtatctttggttatgtgattacgcaatag

SEQ ID NO: 4281 - protein, 720 aa, Yersinia pestis KIM
MTLLKIATSARLASYVETQRGVVYLNQTDFTDVAAVVMSVEDANAGILSMLHDLGFAIPAFIAVTAEQTVSADYLPLIKGVITLGEANKAFYNAQVEAAASEYQKNLLPPFFSTLKKYVEMNNSTFACPGHQGGEFFRKHPAGRQFFEFYGETIFRSDMCNADVKLGDLLIHEGAAKDAQKYAAKVFNADKTYFVLNGTSAANKVVTNALLTRGDLVLFDRNNHKSNHHGALIQAGATPVYLETARNPFGFIGGIDAHCFNEDYLRQQLREVAPERAEEARPFRLAIIQLGTYDGTVYNARQVVDSIGHLCDYILFDSAWVGYEQFIPMMKDFSPLLLELNENDPGIIVTQSVHKQQAGFSQTSQVHKKDNHIKGQKRHCNHKRFNNAFMLHASTSPFYPLFAALDVNAKIHSGDSGRRMWMDCVKLGIETRKSLLARCSMLRPFIPPVVGGKNWQDYATDVIANDARFFNFVPDERWHGFEGYNQDQYLVDPCKLLLTTPGIDASTGRYTSFGIPAAILATFLRENGIVPEKCDLNSILFLLTPAENTAKMAHLVDMLVQFERYVEQDAKLCDVLPTIYRKNEERYHGYTLRQLCQEMHDLYVSHDVKQLQKDMFRKASFPQVVMNPQDANIQFIRDNIELIPIAEAEGRIAAEGALPYPPGVLCVVPGEVWGGAVQRYFLALEEGINLLPGFSPELQGVYIEKGDVSWRRIFGYVITQ

SEQ ID NO: 4282 - DNA, 2163 bp, Shewanella oneidensis MR-1
  CDS (1)..(2163): transl_table=11
atgaaatcattaaaagttgccgcaagcttatctgttagatcttgttttgatatagacagagaagttgtcaatgtattaaccactgatttttgcgatgtgggtgcggctgtagtctctgttgatgatgttaaagatggtattgttgaaaaaattaaaaataccggattaaaactgcctattttcgtatcagtttgctgcgaagaaaccttcccagatgatatttgttcctcgattaccggggtatttgaactctgcggtagcaataccgatttctatggtaagcaggtcgaaaccgctatcaagaaatatgagcaagctctattaccgcccttctttggcactctgaaaaaatacgtcgaaatgggtaactccacctttgcctgcccaggccatcagggcggacaattctttcgtaaacatcccgtaggtcgccaatttttcgatttctttggcgaaaccattttccgctccgacatgtgtaatgctgacgtaaaactcggtgatctgttaatccacgaaggtgcaccactggatgcacaaaaatatgcggcaaaagtctttaacgccgataaaacctactttgtgcttaacggcacttcctcctcgaataaagtcgccaccaatgcgctgcttgctaaaggtgatttagtattattcgaccgtaataaccacaaatccaaccaccatggtgcgttaattcaagccggcgcaacaccgatttacttagaaaccgcccgtaaccccttcggctttattggcggtatcgacgcccactgcttcaaagaagcttatttaagggaacaaattcgcgaagttgcaccagaacgtgccgatgaaaaacgcccgttccgtttagcgattatccaactcggcacctacgacggcaccatctacaatgctcgccaagtggttgatcgtattggtcatctatgtgattacatcctgtttgactcggcttgggttggctatgaacagtttattcctatgatgaatgactgctcgccactgctgctggaactgacgcctgaagatcccggtattatcgtgactcaatcagtacataaacagcaggcaggtttctcacaaacgtcgcaaatccataaaaaagataaacatatcaaaggccaagcgagatattgcaaccataaacgtttcaacaatgcctttatgatgcacgcctccaccagccacttctatccactgtttgccgcattagatgtgaacgctaagatgcacgaaggtgccagcggccgttatctgtggcgtgaagccgtcaaagccgggattgaagcccgtaagttactgcttaaaaaatgtaagtatatcaagccatttatccccagcatgatcgatggccgccaatggcaggattacccaaccgagcaaatggccgatgatttgcgcttctttgaatttgaaccaggacaaaaatggcactcattcgagggctatgaaaaaggccaatatttcgttgacccttgtaagttcctattaaccacaccaggtattgatgccgaaaccggtaaatatactgagtttggtattccagcgactattttggctaacttcttacgtgaaaataatattattcccgagaagtgcgacttaaattcgatattattcctaatgacacctgcggaagatatggcaaaaatgcagcacttagtgtcgcaaatatcccgcttcgagaaattagtcgatgaagatgcgccattatcggaagtattgccaaacgtctataacgccaataaagcccgttataaagactacaccattcgccaactctgccaagaaatgcacaacctttatgtcagccatgacgtaaaacaactgcaaaaagaaatgttccgccatgctcacttcccaaccaaggtgatggacccgcaggaagccaatcttgaatttattcgtggcaatgtcgaattagtgccactgtcgcaaatcgaaggtcgaattgccgcagaaggcgccctgccatatccaccaggggtgttatgtatggtgccaggtgaaatatggggtggcgcagtacaacgttatttcttagctctcgaagaaggcatcaacttattacccggattctcccctgaattacaaggtgtttatctcgaaagcacccctgacggaaaaatccaagccttaggttatgtgttaaataaataa

SEQ ID NO: 4283 - protein, 720 aa, Shewanella oneidensis MR-1
MKSLKVAASLSVRSCFDIDREVVNVLTTDFCDVGAAVVSVDDVKDGIVEKIKNTGLKLPIFVSVCCEETFPDDICSSITGVFELCGSNTDFYGKQVETAIKKYEQALLPPFFGTLKKYVEMGNSTFACPGHQGGQFFRKHPVGRQFFDFFGETIFRSDMCNADVKLGDLLIHEGAPLDAQKYAAKVFNADKTYFVLNGTSSSNKVATNALLAKGDLVLFDRNNHKSNHHGALIQAGATPIYLETARNPFGFIGGIDAHCFKEAYLREQIREVAPERADEKRPFRLAIIQLGTYDGTIYNARQVVDRIGHLCDYILFDSAWVGYEQFIPMMNDCSPLLLELTPEDPGIIVTQSVHKQQAGFSQTSQIHKKDKHIKGQARYCNHKRFNNAFMMHASTSHFYPLFAALDVNAKMHEGASGRYLWREAVKAGIEARKLLLKKCKYIKPFIPSMIDGRQWQDYPTEQMADDLRFFEFEPGQKWHSFEGYEKGQYFVDPCKFLLTTPGIDAETGKYTEFGIPATILANFLRENNIIPEKCDLNSILFLMTPAEDMAKMQHLVSQISRFEKLVDEDAPLSEVLPNVYNANKARYKDYTIRQLCQEMHNLYVSHDVKQLQKEMFRHAHFPTKVMDPQEANLEFIRGNVELVPLSQIEGRIAAEGALPYPPGVLCMVPGEIWGGAVQRYFLALEEGINLLPGFSPELQGVYLESTPDGKIQALGYVLNK

SEQ ID NO: 4284 - DNA, 2208 bp, Escherichia coli CFT073
  CDS (1)..(2208): transl_table=11
atgaacaaaatgtcagaattaaaaattgccgttagccgttcttgcccggattgcttttccactcatcgtgaatgcgtgaatattgacaaaagtaattatattgacgttgccgctattattttatcagtcaatgatgttgaacgtggaaaactcgatgaaatagacgctactggctatggcattcctgtttttattgcaacggaaaatgaagaacgtgtaccagcagaatatctgccacgtatttctggtgtcttcgagcattgcgaatcacggaaagagttttatggacgtcagttagaaaccgctgccagccattatgaaacgcaactgcgcccgcccttcttccgcgcactggtcgattatgtcaatcagggcaatagcgcttttgactgcccgggtcatcagggaggtgagtttttccgtcgccatccggcaggcaatcagttcgtggaatattttggcgaaatgctcttccgctccgacttgtgtaatgccgacgttgcaatgggtgatcttctgattcatgaaggtgcgccatgcattgcacagcaacatgcggctaaagtgtttaatgccgataaaacgtactttgttttaaacggcacctcctcctccaacaaagtggttttaaacgccctgctgacaccgggtgatctggtgctgtttgaccgcaataaccataagtctaaccatcacggggccttgctacaggctggtgcaacaccggtttatctggaaacagcacgtaacccgtatggttttatcggtggcattgatgcgcactgcttcgaagaaagttatctgcgtgaactgattacagaagttgcaccgcaacgggcaaaagaagcgcgtccgttccgcctcgctgtgattcagttaggcacctacgacggtactatttataacgcccgccaggtggtggataaaatcggtcatctgtgtgactacatcctgtttgactcagcatgggtcggctatgaacagtttattccgatgatggcggactgttcgccgctgctgctggagcttaatgagaacgatccgggtattctggttacgcaatctgtgcataaacaacaggctggtttttctcagacttcacaaattcataaaaaagacagccatatcaaagggcaacagcgttatgtaccgcacaaacgcatgaacaacgcctttatgatgcacgcctccaccagcccgttctatccgctgtttgccgcactggatatcaacgccaaaatgcatgaaggtgtcagcggtcgtaatatgtggatggattgtgtggttaacggtattaatgcccgcaaattgatcctcgataactgccagcacattcgcccgttcgttcctgaactggtggatggtaaaccctggcagtcgtatgaaacagcgcaaattgcggttgatctgcgcttctttaaatttgtacccggtgagcactggcattcttttgaaggctacgcagagaaccaatactttgtcgatccgtgcaaactgttgctgacaactccaggtattgatgcacgtaacggcgaatatgaagcgttcggtgtacctgcaacgattcttgctaacttcctgcgcgaaaatggcgtagtgccggaaaaatgcgatcttaactccatcctcttcctgctgactccggcagaagatatggccaaactgcagcaacttgttgccctgctggtacgcttcgaaaaactactggaagctgatgcgcctctggcggaagtactgccttccatctacaaacagcatgaagagcgctacgccggttataccctgcgtcagttgtgccaggaaatgcatgatttgtatgcccgtcacaacgtgaaacaactgcaaaaagagatgttccgtaaggaacacttccctcgcgtcagcatgaatccgcaagaagccaactacgcctacttacgcggtgaagtggagctggttcgtctgccggatgcagaaggccgtatcgctgccgaaggtgcgcttccttatcctccgggtgtgctgtgtgttgttcctggtgaaatctggggtggtgctgttttgcgttacttcagcgctctggaagaaggcatcaacctgctgccaggttttgcaccggagctgcagggtgtctatatcgaagaacatgatggtcgtaagcaagtttggtgctatgtcatcaagcctcgtgatgcgcaaagcaccctgttgaaaggggaaaaattatga

SEQ ID NO: 4285 - protein, 735 aa, Escherichia coli CFT073
MNKMSELKIAVSRSCPDCFSTHRECVNIDKSNYIDVAAIILSVNDVERGKLDEIDATGYGIPVFIATENEERVPAEYLPRISGVFEHCESRKEFYGRQLETAASHYETQLRPPFFRALVDYVNQGNSAFDCPGHQGGEFFRRHPAGNQFVEYFGEMLFRSDLCNADVAMGDLLIHEGAPCIAQQHAAKVFNADKTYFVLNGTSSSNKVVLNALLTPGDLVLFDRNNHKSNHHGALLQAGATPVYLETARNPYGFIGGIDAHCFEESYLRELITEVAPQRAKEARPFRLAVIQLGTYDGTIYNARQVVDKIGHLCDYILFDSAWVGYEQFIPMMADCSPLLLELNENDPGILVTQSVHKQQAGFSQTSQIHKKDSHIKGQQRYVPHKRMNNAFMMHASTSPFYPLFAALDINAKMHEGVSGRNMWMDCVVNGINARKLILDNCQHIRPFVPELVDGKPWQSYETAQIAVDLRFFKFVPGEHWHSFEGYAENQYFVDPCKLLLTTPGIDARNGEYEAFGVPATILANFLRENGVVPEKCDLNSILFLLTPAEDMAKLQQLVALLVRFEKLLEADAPLAEVLPSIYKQHEERYAGYTLRQLCQEMHDLYARHNVKQLQKEMFRKEHFPRVSMNPQEANYAYLRGEVELVRLPDAEGRIAAEGALPYPPGVLCVVPGEIWGGAVLRYFSALEEGINLLPGFAPELQGVYIEEHDGRKQVWCYVIKPRDAQSTLLKGEKL

SEQ ID NO: 4286 - DNA, 2181 bp, Vibrio vulnificus CMCP6
  CDS (1)..(2181): transl_table=11
atgaagcgtttagttattggtgttagtaattacatgccagaagatttcagtttattagctgaatctttagatgaacaatttaatcgtcatcttcatcctttagagcaagtcgaattaaccgatgttggtgctgccattattacgtcggcagatattaaggctggtctacacaaagtgatttctgaaacgggttatggcattccggttttcttggtcacagatgaaaacccagtgtcagccgaagattacgtatggttaaccggcgttatcgatttagaaagacaatccatcgaatactactgtcgccaaatcaatgaagcggtaaccaaatacgaatgccgcctattgccgcctttcttcaaacaactgacgcactacgtggaaatgggcaactctgcattcgactgtccaggacaccaaggcggtcagttcttcaaaaaacacccagcaggtaaacagttctacgatttcttcggtgaaaacctattccgtagtgacttgtgtaacgcggacgtagatttaggtgacttgttaatccacgaaggctctgcccaccaagctcaagcgcacgcagcaaaagtgttcaactcagacaaaacttacttcgtactcaacggcacttcggcttcaaacaaagtggtgtgtaacgcgttagtgaccgagggggacttggtgatgtttgaccgtaacaaccacaaatcaaaccaccacggcgcattaatccaagcgggcggtatgccagtttacctagaaacggcgcgtaacccttggggctttattggtggtatggatgagcactgttttgatgaagaatacatccgtgcccaaatcgccaaagtatcacccgaacgtgcgcgtgatgaacgtccattccgtcttgcgatcatccaattgggcacttacgacggtaccatctacaacgcacgctacgtgatggataagattggtcatctgtgtgactacatcctatttgactcagcatgggtgggttacgagcagttcattccgatgatgaaagactgttctccattgctactggatctgaaaccagaagatgcgggtgtgatcgtgactcagtctgttcacaagcaacaagctggcttttctcaaacctcgcaaatccacaaaaaagaccaccacatcaaaggtcaggctcgctactgcaaccacaaacgcttcaacaacgcgtttatgatgcacgcgtcaacttcaccattctatgcgctgttctccgcattggatgtgaacgccaagatccacgatggtgaagcgggtctgcgtctatggcgtgatgcggttaagacaggtatcgaagcgcgtaaagaaatccttaagagttgtgaattgattcgtccgttcattccagaccaagtcgaaggtcaaccttggggcagctacgacactgacgtgatcgcaacgaataagaaattcttcatgtttgagccaaacgcaagctggcacaaatttgaaggttacggtgaaggtcaatacttcgttgacccatgtaaattgttgctaactactgcgggtattgcagaagacggcagctacgcagactttggtattcctgccacgctattggcgaacttcctacgtgagaacggcatcatccctgagaagtgtgacttgaactctatcttgttccttctcactccagcagaggacatgggtaagatccgtcatcttgtggcgcaaattaaccgcttcgaaaaattcattcgtgatgatgcgccgctaaacatcgtgctgcctcgcgtttacgaagcgaataaagagcgctaccgcggctacaccatccgtcagctatgtcaggaaatgcatgacatgtacaaagagctgaacgtgaaacagctacaaaaagcgatgttccgtagcgaatacttcccaactatggtgcacaaaccagatgtggcgacacgcaaatacttccgtggcgagtgtgattacttgcctctgaaagaagcggtaggtcgtgtcgcagcagaaggtgcgcttccttaccctccaggcattatctgtgtgatcacaggcgaaatctggactcaacaagtggtcgattacttcttatctctagaagaaggcatcaaccgattcccaggcttcgcacccgagattcaaggtgtgtacctagaagacgtcaatggccgcaccaccgcccattgctacgcccttaaagattaa

SEQ ID NO: 4287 - protein, 726 aa, Vibrio vulnificus CMCP6
MKRLVIGVSNYMPEDFSLLAESLDEQFNRHLHPLEQVELTDVGAAIITSADIKAGLHKVISETGYGIPVFLVTDENPVSAEDYVWLTGVIDLERQSIEYYCRQINEAVTKYECRLLPPFFKQLTHYVEMGNSAFDCPGHQGGQFFKKHPAGKQFYDFFGENLFRSDLCNADVDLGDLLIHEGSAHQAQAHAAKVFNSDKTYFVLNGTSASNKVVCNALVTEGDLVMFDRNNHKSNHHGALIQAGGMPVYLETARNPWGFIGGMDEHCFDEEYIRAQIAKVSPERARDERPFRLAIIQLGTYDGTIYNARYVMDKIGHLCDYILFDSAWVGYEQFIPMMKDCSPLLLDLKPEDAGVIVTQSVHKQQAGFSQTSQIHKKDHHIKGQARYCNHKRFNNAFMMHASTSPFYALFSALDVNAKIHDGEAGLRLWRDAVKTGIEARKEILKSCELIRPFIPDQVEGQPWGSYDTDVIATNKKFFMFEPNASWHKFEGYGEGQYFVDPCKLLLTTAGIAEDGSYADFGIPATLLANFLRENGIIPEKCDLNSILFLLTPAEDMGKIRHLVAQINRFEKFIRDDAPLNIVLPRVYEANKERYRGYTIRQLCQEMHDMYKELNVKQLQKAMFRSEYFPTMVHKPDVATRKYFRGECDYLPLKEAVGRVAAEGALPYPPGIICVITGEIWTQQVVDYFLSLEEGINRFPGFAPEIQGVYLEDVNGRTTAHCYALKD

SEQ ID NO: 4288 - DNA, 2517 bp, Bradyrhizobium japonicum USDA 110
  CDS (1)..(2517): transl_table=11
gtgatagtcggactcgcggaagctcctcctcacccgaattgctgcgcaatccgcctctccccgcaagcggggagaggcgaaacgccagccgcagctcctgtcatccaactgtcatcgaatgtgccgagagctgtgtctccagtacattcgggacagacaatggactatttcaagcgcttcaacttcctgttcgccgcacccgtgttcgacgccgacgacctcgaaggcgtccgcttcaaccagatcatcgaggaaatccagcgctccggcttcgaggtcgtccgggcccgcaagctggaggacgcggagatcgcggtgcagaccgacgccgcgatcggctgcatggtggtggactggggcaagaagggcctggagggcaagacctcggcgctgatcaatttgatgcggcgccgcggcctcgacttcccgatcatcctgctgatccggcgcaagcggttcgaggatctgccggtcgaggtgctcgacttcatcgacggctatgtcttcctctccgaggagacgccgaccttcatcgccaagaacctgatcagccggctcaagcaatatgccgagacgctgaagacgccgttcttcggcgcgctggtcgactatgccgaggaaggcaaccagctctggacctgtccgggccacaatggcggcgtgttctacaatcgcagcccgatcggccgggtgttcgtcgagcatctcggcgaatccgtgttccgcgacgacctcgacaattccgtgctcgacctcggcgacctccttacccatgagggcccggcgctgaaggcgcagaaggaggcagcggcgatcttcggcgcggagaagacctatttcgtgctcaacggcacctcgacctcgaacaaggtcgcgctcggcgcgctcgtcaccgacggcgatctcgtgctgttcgaccgcaacaaccacaaggccgctcatcacggcgcgctgatgatcaatggcggcatcccggtctacgtcccgaccattcgcaacgcctggggcctgatcggcccgatgcgctgggacgtgctcgacgagaaggcgctgcgcgaggcgatccgcaaccatccgctggttagggatcgcgacgcctggcgcaaggaacggccgttccgcgtcgccgtggtcgaacagtgcacctatgacggctcgatccacagcgccgagatgatcctgaagcgcatcggccatctctgcgaatacatcctgttcgacgaggcctgggccggcttcatgaaattccacccgctctatgccggccgcttcgccatgggcctcgcgaaccttcccccggaagcgcccggcatcatcgcgacgcagtcgacccacaagcaactcgcgagcttctcgcaggcctcgcaaatccacatcaaggaccgtcacatccgcggccagaagcggcgcgtcgagcatcgccgcttcaacgaaagcttcatgcagcacgcttccacgtcaccgttctatccgctgttcgcatccctcgacgtcggcgcgcagatgatgaaggggcgctccggcgaagtgctgtgggacgacacgatccggctcggcatcgagctgcgcaagaagatccgcgcaatgcggcgtgagttcgaggagaaggagcagaaccccgatcggcgctggttcttcgagcccttcgtcccggatcgcgtcgccatccccgacgtcagtcgccccggcgccgcccacaatgtcgcctgggagacgctgtccaccgacgagctcgccaccaatcccgccttgtggcaactctctccggataccaactggcacggctttcccgatctcgcggaaggctttgccatgaccgatccgaacaagctgacgctgctcacgcctggcttcgatcgcaccaccggcgcctatgccgagcacggcatccccgcccccgtcgtcgcgcaatatctgcgcgagaaccgcatcgtgcccgagaagaacgacctcaactccctgctcttcctgctcactcccggcgtcgaggcgagcaaggccggcacgctgatctccggcctcgtcgccttcaagaggctgcacgacgacaatgcgttgctggcggacgcaatcccggaattctaccagcggcggcaggcgcgctatgccggcgtgcggctgcgcgatctctgcggcgacatgcaccgtttcttccgcgccgccgatgtcagcgcgctccaggcgcggcagttcatgcccgagcacatgcctgagatcgcgatgtcgccccgcgatgccgcccgctatttgttccgcaacgacgtcgactatctgccgatcgaggcgatcgcgggccgcatcgccaccacgcccttcgtagtctatccgcccggcatcgccaccatcgtgcccggcgagcggctgacggaacgcgccaagcccatggtcgattatctcaagatgttcgagacctgcttcaacacgttcccgggcttcgacgtcgaaatccagggcgtctacaaggagatcgatgcccagggccgtatcgggctctatacttacgtcgttgccgagtag

SEQ ID NO: 4289 - protein, 838 aa, Bradyrhizobium japonicum USDA 110
MIVGLAEAPPHPNCCAIRLSPQAGRGETPAAAPVIQLSSNVPRAVSPVHSGQTMDYFKRFNFLFAAPVFDADDLEGVRFNQIIEEIQRSGFEVVRARKLEDAEIAVQTDAAIGCMVVDWGKKGLEGKTSALINLMRRRGLDFPIILLIRRKRFEDLPVEVLDFIDGYVFLSEETPTFIAKNLISRLKQYAETLKTPFFGALVDYAEEGNQLWTCPGHNGGVFYNRSPIGRVFVEHLGESVFRDDLDNSVLDLGDLLTHEGPALKAQKEAAAIFGAEKTYFVLNGTSTSNKVALGALVTDGDLVLFDRNNHKAAHHGALMINGGIPVYVPTIRNAWGLIGPMRWDVLDEKALREAIRNHPLVRDRDAWRKERPFRVAVVEQCTYDGSIHSAEMILKRIGHLCEYILFDEAWAGFMKFHPLYAGRFAMGLANLPPEAPGIIATQSTHKQLASFSQASQIHIKDRHIRGQKRRVEHRRFNESFMQHASTSPFYPLFASLDVGAQMMKGRSGEVLWDDTIRLGIELRKKIRAMRREFEEKEQNPDRRWFFEPFVPDRVAIPDVSRPGAAHNVAWETLSTDELATNPALWQLSPDTNWHGFPDLAEGFAMTDPNKLTLLTPGFDRTTGAYAEHGIPAPVVAQYLRENRIVPEKNDLNSLLFLLTPGVEASKAGTLISGLVAFKRLHDDNALLADAIPEFYQRRQARYAGVRLRDLCGDMHRFFRAADVSALQARQFMPEHMPEIAMSPRDAARYLFRNDVDYLPIEAIAGRIATTPFVVYPPGIATIVPGERLTERAKPMVDYLKMFETCFNTFPGFDVEIQGVYKEIDAQGRIGLYTYVVAE

SEQ ID NO: 4290 - DNA, 2181 bp, Vibrio parahaemolyticus RIMD 2210633
  CDS (1)..(2181): transl_table=11
atgaaacgtttaattataggtgttagtaattacatgccagaagacttcagtttattagctgaatctttagatgaacaatttaatcgtcatttacaacctttagagcaagttgaattaaccgacgttggtgcggctattattacttcagcagacattaaagcaggtctgcataaaatgatttctgaaacgggttacggtattccagttttcttagtaacggatgaaaacccagtttcggcagaagattacgtttggctaactggcgttatcgatttagaaagacaatctattgagtactactgtcgtcaaatcaacgaagcagtaaccaagtacgaatgtcgtctgcttcctcctttcttcaagcaattaacgcactatgttgagatgggtaactcagcgtttgactgtccgggacaccaaggtggtcagttcttcaaaaaacacccagctggtaaacaattctacgatttctttggcgaaaacctgttccgtagtgacttgtgtaacgcggacgtggatttaggtgacttgctgatccacgaaggttctgcacaccaagcgcaagcgcacgctgcaaaagtatttaacgcggacaaaacttacttcgtactcaacggtacttctgcttcaaacaaagtggtgtgtaacgcgctagtaactgaaggtgatttggtactgttcgaccgtaacaaccacaaatcgaaccaccacggtgcgttaatccaagcgggtggtatgccagtttacttagaaacggcgcgtaacccttggggcttcatcggtggtatggatgagcactgtttcgatgaagaatacattcgtgctcaaatcgcgaaagtggatccagaacgtgcacgcgatgaacgtcctttccgtcttgctattatccagcttggtacttacgacggtactatctataacgctcgctacgtgatggataagatcggtcatctttgtgactacatcctgtttgactctgcgtgggttggttatgagcagttcatccctatgatgaaagactgttcaccactgctgctggatttgaaaccagaagacgcaggtgtgatcgtgactcagtctgttcacaaacaacaagctggtttctctcaaacatcgcaaatccacaaaaaagaccgccatatcaaaggtcaagctcgttactgtaaccacaaacgctttaacaacgcgtttatgatgcacgcatcgacttcaccattctacgcactgttctctgcgcttgatgtgaacgcgaagatccacgacggcgaagccggtctgcgtttatggcgcgatgcggttaagactggtatcgaagcgcgtaaagaaatccttaagagttgtgaattgattcgtccgttcattccagacgaagtcgaaggtcaaccttggggcagctacgacactgacgtgatcgcaacgaacaagaaattcttcatgtttgagccaaacgcaagctggcacaaatttgaaggttacggtgaaggtcaatacttcgttgacccatgtaaattgttgctaactactgcgggtattgcagaagacggcagctacgcagatttcggtattcctgcaacgctattggcgaacttccttcgtgaaaacggcatcatccctgagaagtgtgacttgaactctatcttgttcctactcactcctgcggaagatatgggtaagatccgtcaccttgtggctcaaattaaccgattcgaaaaattcatccgtgatgatgcgcctctaagtatcgtacttccaagcgtctacgaagcgaataaagaacgctaccgtggctacaccatccgtcagctatgtcaggaaatgcatgacatgtacaaagagctgaacgtgaaacagctacaaaaagcgatgttccgcagcgagtacttcccacaaatggttcacaaaccagacgtggcaacacgcaaatacttccgtggtgaatgcgattacctaccacttaaagaggccgttggtcgcgtagccgctgagggtgcacttccttaccctccaggcatcatctgtgtgatcactggtgaaatctggaccccacacgtggtggattacttcctatctctagaagaaggcatcaaccgcttcccaggcttcgcgccagaaattcaaggcgtgtaccttgaagatgttaacggtcgcactaccgcacattgttatgtcctaaaagattaa

SEQ ID NO: 4291 - protein, 726 aa, Vibrio parahaemolyticus RIMD 2210633
MKRLIIGVSNYMPEDFSLLAESLDEQFNRHLQPLEQVELTDVGAAIITSADIKAGLHKMISETGYGIPVFLVTDENPVSAEDYVWLTGVIDLERQSIEYYCRQINEAVTKYECRLLPPFFKQLTHYVEMGNSAFDCPGHQGGQFFKKHPAGKQFYDFFGENLFRSDLCNADVDLGDLLIHEGSAHQAQAHAAKVFNADKTYFVLNGTSASNKVVCNALVTEGDLVLFDRNNHKSNHHGALIQAGGMPVYLETARNPWGFIGGMDEHCFDEEYIRAQIAKVDPERARDERPFRLAIIQLGTYDGTIYNARYVMDKIGHLCDYILFDSAWVGYEQFIPMMKDCSPLLLDLKPEDAGVIVTQSVHKQQAGFSQTSQIHKKDRHIKGQARYCNHKRFNNAFMMHASTSPFYALFSALDVNAKIHDGEAGLRLWRDAVKTGIEARKEILKSCELIRPFIPDEVEGQPWGSYDTDVIATNKKFFMFEPNASWHKFEGYGEGQYFVDPCKLLLTTAGIAEDGSYADFGIPATLLANFLRENGIIPEKCDLNSILFLLTPAEDMGKIRHLVAQINRFEKFIRDDAPLSIVLPSVYEANKERYRGYTIRQLCQEMHDMYKELNVKQLQKAMFRSEYFPQMVHKPDVATRKYFRGECDYLPLKEAVGRVAAEGALPYPPGIICVITGEIWTPHVVDYFLSLEEGINRFPGFAPEIQGVYLEDVNGRTTAHCYVLKD

SEQ ID NO: 4292 - DNA, 2181 bp, Vibrio vulnificus YJ016
  CDS (1)..(2181): transl_table=11
atgaagcgtttagttattggtgttagtaattacatgccagaagattttagtttattagctgaatctttagatgaacaatttaatcgtcatcttcatcctttagagcaagtagaattaaccgatgttggtgctgccattattacgtcggcagatattaaggctggtctacacaaagtgatttctgaaacgggttatggcattccggttttcttggtcacagatgaaaacccagtgtcagccgaagattacgtatggttaaccggcgttatcgatttagaaagacaatccattgaatactactgtcgccaaatcaatgaagcggtaaccaaatacgaatgccgcctattgccgcctttcttcaaacaactgacgcactacgtggaaatgggcaactctgcattcgactgtccaggacaccaaggcggtcagttcttcaaaaaacacccagcaggtaaacagttctacgatttcttcggtgaaaacctattccgtagtgacttgtgtaacgcggacgtagatttaggtgacttgttgatccacgaaggctctgcccaccaagctcaagcgcacgcagcaaaagtgttcaactcagacaaaacttacttcgtactcaacggcacttcggcttcaaacaaagtggtttgtaacgcgttagtgaccgagggtgacttggtgatgtttgaccgtaacaaccacaaatcaaaccaccacggcgcattaatccaagcgggcggtatgccagtttacctagaaacggcgcgtaacccttggggctttattggtggcatggatgagcactgttttgatgaagaatacatccgtgcccaaatcgccaaagtatcacccgaacgtgcgcgtgatgcgcgtccattccgtcttgcgatcatccaattgggtacttacgacggtaccatctacaacgcacgctacgtgatggataagattggtcatctatgtgactacatcctgtttgactcggcatgggtaggctacgagcagttcattcctatgatgaaagactgttcgccactgctactggatctgaaaccagaagatgcgggtgtgatcgtgactcagtctgttcacaagcagcaagcaggcttctctcaaacctcgcaaatccacaaaaaagaccaccacatcaaaggtcaggctcgctactgcaaccacaaacgcttcaacaacgcgtttatgatgcacgcgtcaacctcacctttctacgcactgttctccgcattggatgtgaacgcgaagatccacgatggtgaagcgggtctgcgcctatggcgtgatgcggttaagacaggtatcgaagcgcgtaaagaaatcctcaaaagttgtgagctgatccgtccgttcattccagaccaagttgatggtcaaccatggggcagctacgacacggatgtcatcgccaccaacaagaaattcttcatgtttgagccaaacgcaagctggcataaattcgaaggttacggcgaaggccaatacttcgttgacccatgtaaattgctactcaccacagccggtattgccgaagatggtagctacgcagactttggtattcctgccacgctattggcgaacttcctacgtgagaacggcatcatccctgagaagtgtgacttgaactctatcttgttccttcttactccagcagaggacatgggtaagatccgtcatcttgtggcgcaaattaaccgcttcgagaaattcattcgtgatgatgcgccgctaaacatcgtgctgcctcgcgtttacgaagcgaacaaagagcgctaccgtggctacaccattcgtcagctatgtcaggaaatgcatgacatgtacaaagagctgaacgtgaaacagctacaaaaagcgatgttccgtagcgagtacttcccaaccatggtgcacaaaccggatgtggcaacacgcaaatacttccgcggcgagtgtgattacttgccgctgaaagaagcggtcggtcgtgtcgctgcagaaggtgcgcttccttaccctccaggcattatctgtgtgatcacgggcgaaatctggactcaacaagtggtcgattacttcttatctctagaagaaggcatcaaccgattcccaggcttcgcaccagagattcaaggtgtgtacctagaagacgtcaatggccgcaccaccgcccattgctacgcccttaaagattaa

SEQ ID NO: 4293 - protein, 726 aa, Vibrio vulnificus YJ016
MKRLVIGVSNYMPEDFSLLAESLDEQFNRHLHPLEQVELTDVGAAIITSADIKAGLHKVISETGYGIPVFLVTDENPVSAEDYVWLTGVIDLERQSIEYYCRQINEAVTKYECRLLPPFFKQLTHYVEMGNSAFDCPGHQGGQFFKKHPAGKQFYDFFGENLFRSDLCNADVDLGDLLIHEGSAHQAQAHAAKVFNSDKTYFVLNGTSASNKVVCNALVTEGDLVMFDRNNHKSNHHGALIQAGGMPVYLETARNPWGFIGGMDEHCFDEEYIRAQIAKVSPERARDARPFRLAIIQLGTYDGTIYNARYVMDKIGHLCDYILFDSAWVGYEQFIPMMKDCSPLLLDLKPEDAGVIVTQSVHKQQAGFSQTSQIHKKDHHIKGQARYCNHKRFNNAFMMHASTSPFYALFSALDVNAKIHDGEAGLRLWRDAVKTGIEARKEILKSCELIRPFIPDQVDGQPWGSYDTDVIATNKKFFMFEPNASWHKFEGYGEGQYFVDPCKLLLTTAGIAEDGSYADFGIPATLLANFLRENGIIPEKCDLNSILFLLTPAEDMGKIRHLVAQINRFEKFIRDDAPLNIVLPRVYEANKERYRGYTIRQLCQEMHDMYKELNVKQLQKAMFRSEYFPTMVHKPDVATRKYFRGECDYLPLKEAVGRVAAEGALPYPPGIICVITGEIWTQQVVDYFLSLEEGINRFPGFAPEIQGVYLEDVNGRTTAHCYALKD

SEQ ID NO: 4294 - DNA, 2358 bp, Rhodopseudomonas palustris CGA009
  CDS (1)..(2358): transl_table=11
atggactacttcaggcgtttcaccttcctgttctcggcaccgactttcgaggcggatgatctcgaaggcattcggttcaatcagatcgtcgcggagatcgagcggtccggcttcgagatcgtcaaggcgcgcaagctggaagatgccgagatcgcggtgcagaccgacgccgcgattggctgcatggtggtcgactggggcaagaagggcctcgagggcaagaccgccgcgctgatcaacctgatgcgccggcgcggtctcgatttcccgatcgtgctgctgatccgccgcaagaggttcgaggaagtgccggtcgaggtgctcgatttcatcgacggctacgtgtttctgtccgaggagacgccgaccttcatcgcccgcaacctgatcagccggctgaagcaatatgccgacacgctgaagacgccgttcttcggcgcgctggtcgactatgcggaggagggcaaccagctctggacctgccccggccacaacggcggcatgttctacagccgcagcccgatcgggcgggtgttcatcgagcatctcggcgaggcggtgttccgcgatgacctcgataattcggtgctcgaccttggcgatctgttgacccacgaggggccggcgctgcgcgcgcagaaggaagccgcgcagatcttcggtgccgagaagacctatttcgtgctcaacggcacctcgacctccaacaaggtcgccctcggcgcgctcgtctccgacggcgatctgatcctgttcgatcgcaacaatcacaaggcggcccatcacggcgcgctgatgatgggcggcggcattcccgtctacattcccacggttcgcaacgcctggggcctgatcgggccgatggcgtgggacgcgctggacgagacggcgctgcgcgaacgcattcgcagccatccgctggtcaaggaccctgaggcctggcgcaagccgcgcccgttccgcgtcgcggtggtcgaacagtgcacctacgacggcaccatccacagcgccgagatgatcctgcgccgcatcgggcatttgtgcgattacatcctgttcgacgaagcctgggccggcttcatgaagtttcatccgctgtatgccggccgcttcgcgatggggctggcgaacctcggcgacgatgcgcccggcatcatcgcgacgcagtcgacccacaagcagctcgccagtttctcccaggcgtcgcagatccacatcaaggatcgccacatccgcggccagaagcggcgggtcgagcatcggcgcttcaacgagagcttcatgcagcacgcctcgacgtcgccgttctatccgctgttcgcctcgctcgatgtcggcgcgcagatgatgaagggccgctccggcgaagtgctatgggacgatacgatccggcttggcatcgagctgcgcaagaagatccgcgcggtgcggagggagttcgaggagaaggaggcgcgggcggagcggcgctggttcttcgatccgttcgtgcccgatcgggtgacgatcgcggacgccgcccgtgaaggcgcggtgcacgatgtcgcctgggaggccgtgagcaccgaccagctcgcgaccgacccgacattctggcagatcgcgccgggcgcggcctggcacggctttgccgatatggcgcctggcttcgccatgaccgacccgaacaagctgacgctgctgacgccgggcttcgaccgggccaccggccgctatgccgagcacggcgtgccggcgccggtggtggcgcaatatctgcgcgagaaccgcattgttccggaaaagaacgatctcaactcgctgctatttctgctgacgccgggcgtcgaggcgagcaaggccggtacgctgatcagcggcctcgtcgcgttcaagaagctgcacgacgacaacgcgccgctcgacgaggtgatcccggaattcagccggcgccggcccgctcgctatgccggggtacggctgcgcgatttgtgcgggcagatgcaccggttcttccgcgacgccgatgtcagcgcgctgcaggccaagcagtttctgcccgaacatctacccgagatcgcgatgtcgccgcacgatgcggcgcgctgcctggtccgcaatgacgtcgactatctgccgatcagccagatcgcgggccggatcgccaccacgccgttcgtggtctatccgccggggatcgcgaccatcgtgcccggcgagcggctgagcgagcgagccaagccgatgctcgattacttgcagatgttcgagcgcagcttcaacgaattccccggcttcgaagtcgagattcagggcgtctatcgcgaattcgatgaattgggccgggttcgtctctacacctacgtcgtggccgaataa

SEQ ID NO: 4295 - protein, 785 aa, Rhodopseudomonas palustris CGA009
MDYFRRFTFLFSAPTFEADDLEGIRFNQIVAEIERSGFEIVKARKLEDAEIAVQTDAAIGCMVVDWGKKGLEGKTAALINLMRRRGLDFPIVLLIRRKRFEEVPVEVLDFIDGYVFLSEETPTFIARNLISRLKQYADTLKTPFFGALVDYAEEGNQLWTCPGHNGGMFYSRSPIGRVFIEHLGEAVFRDDLDNSVLDLGDLLTHEGPALRAQKEAAQIFGAEKTYFVLNGTSTSNKVALGALVSDGDLILFDRNNHKAAHHGALMMGGGIPVYIPTVRNAWGLIGPMAWDALDETALRERIRSHPLVKDPEAWRKPRPFRVAVVEQCTYDGTIHSAEMILRRIGHLCDYILFDEAWAGFMKFHPLYAGRFAMGLANLGDDAPGIIATQSTHKQLASFSQASQIHIKDRHIRGQKRRVEHRRFNESFMQHASTSPFYPLFASLDVGAQMMKGRSGEVLWDDTIRLGIELRKKIRAVRREFEEKEARAERRWFFDPFVPDRVTIADAAREGAVHDVAWEAVSTDQLATDPTFWQIAPGAAWHGFADMAPGFAMTDPNKLTLLTPGFDRATGRYAEHGVPAPVVAQYLRENRIVPEKNDLNSLLFLLTPGVEASKAGTLISGLVAFKKLHDDNAPLDEVIPEFSRRRPARYAGVRLRDLCGQMHRFFRDADVSALQAKQFLPEHLPEIAMSPHDAARCLVRNDVDYLPISQIAGRIATTPFVVYPPGIATIVPGERLSERAKPMLDYLQMFERSFNEFPGFEVEIQGVYREFDELGRVRLYTYVVAE

SEQ ID NO: 4296 - DNA, 2100 bp, Lactobacillus johnsonii NCC 533
  CDS (1)..(2100): transl_table=11
atgaattttctaaaaattgcattaagcaatcaacttaaaaataatgattttaattcatggcaaactactaatttgaacgatgaaactcaagctagtgaacttgccgctattgttgtagcagagactgataaaagtagtcttaaaactgctcaagatttacaaaaaaaatcagggcttggaattcctattattaaagtttcacatgaaacaatttctaataatgaaaaaaatcaaataattgatgccgcaaatcaatacacagcagaaatggttcctggctttttaactgatttggtcaatttcgcagaagatcgtccaattagttttacgacaccaggtcatcataatggcttatattacgaaaaacatccggcgggggtagtatttaatcgcttctttggtaaaaacctcatgtttgcggataccagtgatacagtaccagaattaggcgatactatgacccacgaagggacgcctttaactgctgagcaaaaagctgccgaaacttatcatgctgataaagtttatttctgtactaatggaacaacgagtgcaaattcaatttgtgcaagtgcactattaactaaagatgacctagttctttttgatcgaaataatcataaatccctctataacagtgccttagtaatgactggtgccaaacctgtatatattccaactgatcgtaatgcacttggattaattggagaaatggatcctgactttttaaatgaagaaaaaattcgagctgaaattgctaaagttgaccctgaaaaagctaaagctaagcgtccatttagactagctatcattcaatcagaaacatatgatggtcttttttacgacgcgaagtggatgattgataaaattggtaaactatgcgattacattctttttgattgtgcttggggtggattcgaacagtttgttccaattatgaatcacctgtctcccctcaacttagactttgggtcagaagatccgggtattttagtaactcaatcacttcataaacaacaagccggaatgggccaagcctcacaaattttgaaaaaggatgctcatattaaaggtcagaaacgttacgttgatcataagcactttaaccacgcttatcttaaatttgttacctcaagttactcttatccactttatgcctcactcaccgttaactcatatttaaccagcggtgagggtaataaaaaatggtgggaccaaatcttacgcttaggaattgaatggcggaaagaattaattaaaaaatcaaaattatttaagccactagtaattgataattttgaaaatattagtactgatgagttagctacaaatgaaaagtactggaatttagattccactaatctgtggcatggatttagcaaaattgcgtctggtcaggccatgatcgatcctctaaaaattactgttgtaactcccggaattgatgttaaaaatgcaaaatatgaagaaataggtattcctggaccagttgttgcagaatttttaatggagaagcggattattcgtgcaaaagatgacctatattctcttcttttcttattaacgccgggagatactaaggctgaattagatatcttgctgaatgcattcttagaatttgaacaatattataacgaggatgcacctctagacaaagtgctccctaagctaactaaagtatacggcgatcgctacaaaggttataccttaaaacagctctgccaagaaatgcatgaatattaccggggaaataatacctttaccctccagcaagaattatttgcgaaaccagatatgcaaaattatcaaatgactcccgagcatgctgactatctctttatgaaaaatgaaagtgaattagttaacttagaagatgttaaaggtcgcattgctgctgaaggtgccttaccttacccaccaggcgtgttcattgttgcgcccggcgaaaaatggagcgatattgatcaaaaatattttgaagttttagtaggtgctatcgagcgtttcccaggctttgtacctgaaattcagggagtctactgggatcaaaaatcagatggtaaaataagagtacaagcagaagtattaaaggagaattag

SEQ ID NO: 4297 - protein, 699 aa, Lactobacillus johnsonii NCC 533
MNFLKIALSNQLKNNDFNSWQTTNLNDETQASELAAIVVAETDKSSLKTAQDLQKKSGLGIPIIKVSHETISNNEKNQIIDAANQYTAEMVPGFLTDLVNFAEDRPISFTTPGHHNGLYYEKHPAGVVFNRFFGKNLMFADTSDTVPELGDTMTHEGTPLTAEQKAAETYHADKVYFCTNGTTSANSICASALLTKDDLVLFDRNNHKSLYNSALVMTGAKPVYIPTDRNALGLIGEMDPDFLNEEKIRAEIAKVDPEKAKAKRPFRLAIIQSETYDGLFYDAKWMIDKIGKLCDYILFDCAWGGFEQFVPIMNHLSPLNLDFGSEDPGILVTQSLHKQQAGMGQASQILKKDAHIKGQKRYVDHKHFNHAYLKFVTSSYSYPLYASLTVNSYLTSGEGNKKWWDQILRLGIEWRKELIKKSKLFKPLVIDNFENISTDELATNEKYWNLDSTNLWHGFSKIASGQAMIDPLKITVVTPGIDVKNAKYEEIGIPGPVVAEFLMEKRIIRAKDDLYSLLFLLTPGDTKAELDILLNAFLEFEQYYNEDAPLDKVLPKLTKVYGDRYKGYTLKQLCQEMHEYYRGNNTFTLQQELFAKPDMQNYQMTPEHADYLFMKNESELVNLEDVKGRIAAEGALPYPPGVFIVAPGEKWSDIDQKYFEVLVGAIERFPGFVPEIQGVYWDQKSDGKIRVQAEVLKEN

SEQ ID NO: 4298 - DNA, 2154 bp, Erwinia carotovora subsp. atroseptica SCRI1043
  CDS (1)..(2154): transl_table=11
atgaaacagttaaaaattgcggcgaatgcagcggttgccacccgtttaatcacaacgcgcgagattgtcgcgttgagtcagactgacttcactgatgtggcggcggtcgtggtttctattgaggaagcccgtagcggtattctgtcgatattgcagcacaccggttttagtattccggcgtttgtcgaagagcctgatgaagataaagagtcagatgttctgcctgcgggcagcgaatggctgattcttgatgatgaaggtgagcacgcgagcgtgctggaacgtgcggctaaagcctatcaagatgcgttgctgccgccgtttttcgatacgctgaccaagtacgtcaaaatgaagaacacgacgtttgcctgcccagggcatcagggcggtcagttcttccgtaagcatccggcagggcgtcagttttttgagttttacggtgagaacgtttttcgttcggacatctgtaacgccgacgtcaaactgggcgatttgctgatccatgaaggggcggcgaagaaggcacagaagcacgctgcgcgggtgtttaacgccgataagacctatttcgtgttaaacggcacgtcctctgcgaacaaagtcgtgacaaacgcgctgttagcgcgtggcgatctggtgctgtttgaccgtaacaaccataaatccaaccatcacggtgcgctggttcaggcgggggcgacgcctgtctatctggaaaccgtgcgcaatccgtttggctttatcggtggtgtggatgcgcactgctttgacgaaacctatctgcgcaagctgattgcggaagtcgcgccggaacgtgctaacgagccacgcccgttccgtctagctgtcatccagcttggcacctatgacgggaccatttataacgctcgtcaggttgtcgatagcatcgggcacctgtgtgactacattctgtttgactcggcctgggtcggctacgagcagttcatcccgatgatggagcagtgctcgccgctgttgctggatctgaatgagaacgatccgggcatctttgtcacccagtcggtgcataagcagcaggcgggcttctcccagacctcgcagatccacaaaaaagatacgcatatcaaagggcagcgtcgtttttgcaaccataagcaactgaataacgcttttatgctgcatgcgtcgaccagcccgttttacccgctgttcgccgcgttggatgttaatgccaaaatgcacgaaggggccagcgggcgtcgtatgtggatggactgcgtgaagctgggcattgaggcacgtaagcaactgctgacgcgctgttcgctcatcaaaccgtttgtgcctgttacggtaggcggtgcgctctggcaggatcatgatacggagacgatcgcgcaggacgtgcgtttcttcaactttgagccgggcgagaaatggcacgcgttcgaagggtacgcggaagatcagtattttatcgatccgtgcaaattactgctgactacgccgggtattgatgcaattagcggcgattataccgaatttggtattccggcgacgatccttgctaactatctgcgcgagcacggcatcatccctgaaaaatgcgacatgaactcgatcctgttcctgttaacgccagcggaagacacggccaaaatgcaggagctggttaatgcgctggttcattttgaaacgctgatcgctcgtgatgcgccgctgagcgaagtgttgcccagcctgtatcagaaatacaaagagcgctaccgtggttatcgactgcgtcggttgtgtcaggaaatgcatgatttttatgcccagcacaacgtgaaagatctgcaaaaagcgatgttccgcaaaaccgagtttccgtcagtggcgatgttgccgcaggatgccaacagggaatttgtgcgcgggaatatcgagctggttcccatcgttgaagctgaaggacgtatcgcggcggaaggtgcattgccatacccgccgggcgtgctgtgtgtggtaccgggggaagcctggggcggagcggtacagcgctattttctggcgctggaggatgggattaacctgctgcccggtttttcaccggaattgcagggggtttacagcgttgcggaagaagatggccgcaaacggctgtacggctacgtggtagaaaagtaa

SEQ ID NO: 4299 - protein, 717 aa, Erwinia carotovora subsp. atroseptica SCRI1043
MKQLKIAANAAVATRLITTREIVALSQTDFTDVAAVVVSIEEARSGILSILQHTGFSIPAFVEEPDEDKESDVLPAGSEWLILDDEGEHASVLERAAKAYQDALLPPFFDTLTKYVKMKNTTFACPGHQGGQFFRKHPAGRQFFEFYGENVFRSDICNADVKLGDLLIHEGAAKKAQKHAARVFNADKTYFVLNGTSSANKVVTNALLARGDLVLFDRNNHKSNHHGALVQAGATPVYLETVRNPFGFIGGVDAHCFDETYLRKLIAEVAPERANEPRPFRLAVIQLGTYDGTIYNARQVVDSIGHLCDYILFDSAWVGYEQFIPMMEQCSPLLLDLNENDPGIFVTQSVHKQQAGFSQTSQIHKKDTHIKGQRRFCNHKQLNNAFMLHASTSPFYPLFAALDVNAKMHEGASGRRMWMDCVKLGIEARKQLLTRCSLIKPFVPVTVGGALWQDHDTETIAQDVRFFNFEPGEKWHAFEGYAEDQYFIDPCKLLLTTPGIDAISGDYTEFGIPATILANYLREHGIIPEKCDMNSILFLLTPAEDTAKMQELVNALVHFETLIARDAPLSEVLPSLYQKYKERYRGYRLRRLCQEMHDFYAQHNVKDLQKAMFRKTEFPSVAMLPQDANREFVRGNIELVPIVEAEGRIAAEGALPYPPGVLCVVPGEAWGGAVQRYFLALEDGINLLPGFSPELQGVYSVAEEDGRKRLYGYVVEK

SEQ ID NO: 4300 - DNA, 2163 bp, Yersinia pseudotuberculosis IP 32953
  CDS (1)..(2163): transl_table=11
atgacactattaaaaatagcaacaagcgcccgcctggcttcttatgtagaaactcagcgcggagtggtgtacctcaatcagactgattttactgatgttgccgcggtggtaatgtcggttgaagatgcaaatgcgggtatattgtcaatgctgcatgaccttggttttgctattcctgcgtttattgccgtgacggcagaacagacggtctctgctgattatttgcccttgattaaaggtgtcattacgcttggtgaagcaaataaagctttttataacgctcaggtagaagctgccgccagtgaatatcaaaagaatctcttaccgccttttttctcaacactgaaaaaatatgtcgagatgaataactcgacctttgcttgccctggccatcaagggggcgaattttttcgcaagcatcctgcaggacgccagttttttgaattctacggtgagacgatttttcgttcagatatgtgtaatgccgatgtcaaattaggtgatttacttatccatgaaggggcggcaaaagatgcacagaaatatgctgctaaggtattcaatgccgataaaacctattttgtcctgaacgggacctcggcggccaacaaggtcgtgaccaacgctctactgacccgtggtgatttagtgttgtttgaccgcaataaccataaatctaaccatcatggtgcgctgatccaggcgggcgcgacgccggtttatctggaaacggctcgtaacccctttggttttattggtggtattgatgcgcactgcttcaatgaagattatttacgtcaacaactgcgtgaagttgctcccgagcgtgcagaagaggctcggccattccgattagcgatcattcaattgggtacctacgacggtacggtatataacgcccgccaagtagttgatagtattggtcatttatgcgattacattttgtttgattctgcttgggtgggttacgaacaatttattccgatgatgaaggatttctcaccgttattactggaattaaatgaaaatgaccctgggattattgtgactcaatcggtacacaagcagcaggccggtttttctcagacctctcaggtacataaaaaagataatcacattaaaggacagaaacgtcactgtaaccataagcgttttaataatgcctttatgttgcatgcatcgaccagtccgttttatccattatttgcggcattggatgttaatgccaaaatacactctggtgacagtggccgccgtatgtggatggattgtgtaaaactcggtattgaaacccgtaaatcgttattggcacgctgttcgatgttacggccttttattcctccagttgttggcggtaaaaattggcaagattatgctactgatgtgattgccaatgatgcgcgcttctttaattttgtcccagatgaacgctggcatggatttgagggatataaccaagatcagtatttggttgatccgtgcaaattattgctgacgacgccgggaattgatgccagcactggccgatatacttcgtttggtattccggcggctattttggcgactttcctgcgtgaaaatgggattgtgccagaaaaatgtgatcttaactcgatcctattcctgctgaccccggcagaaaataccgccaaaatggcacacctggtggatatgttggtgcagtttgaacgctatgttgaacaagatgcgaagctgtgtgatgtattaccgacgatctatcgtaagaatgaagagcgttatcacggttataccttgcgtcagttatgccaagaaatgcatgacctgtacgtcagccatgacgttaagcaattgcaaaaggatatgttccgtaaagccagtttcccgcgggtagtcatgaacccgcaagacgccaatattcagtttatccgcgataatattgagttgattcctattgctgaagctgaaggccgtattgccgccgaaggcgctttgccttatccaccgggtgtgctgtgtgtggtgcccggtgaagtgtggggtggggcggttcagcgttattttctggcgctggaagaggggattaacttactgccgggcttttcacctgagttacagggcgtttatatcgaaaaaggtgatgtgtcttggcggcgtatctttggttatgtgattacgcaatag

SEQ ID NO: 4301 - protein, 720 aa, Yersinia pseudotuberculosis IP 32953
MTLLKIATSARLASYVETQRGVVYLNQTDFTDVAAVVMSVEDANAGILSMLHDLGFAIPAFIAVTAEQTVSADYLPLIKGVITLGEANKAFYNAQVEAAASEYQKNLLPPFFSTLKKYVEMNNSTFACPGHQGGEFFRKHPAGRQFFEFYGETIFRSDMCNADVKLGDLLIHEGAAKDAQKYAAKVFNADKTYFVLNGTSAANKVVTNALLTRGDLVLFDRNNHKSNHHGALIQAGATPVYLETARNPFGFIGGIDAHCFNEDYLRQQLREVAPERAEEARPFRLAIIQLGTYDGTVYNARQVVDSIGHLCDYILFDSAWVGYEQFIPMMKDFSPLLLELNENDPGIIVTQSVHKQQAGFSQTSQVHKKDNHIKGQKRHCNHKRFNNAFMLHASTSPFYPLFAALDVNAKIHSGDSGRRMWMDCVKLGIETRKSLLARCSMLRPFIPPVVGGKNWQDYATDVIANDARFFNFVPDERWHGFEGYNQDQYLVDPCKLLLTTPGIDASTGRYTSFGIPAAILATFLRENGIVPEKCDLNSILFLLTPAENTAKMAHLVDMLVQFERYVEQDAKLCDVLPTIYRKNEERYHGYTLRQLCQEMHDLYVSHDVKQLQKDMFRKASFPRVVMNPQDANIQFIRDNIELIPIAEAEGRIAAEGALPYPPGVLCVVPGEVWGGAVQRYFLALEEGINLLPGFSPELQGVYIEKGDVSWRRIFGYVITQ

SEQ ID NO: 4302 - DNA, 2181 bp, Burkholderia sp. 383
  CDS (1)..(2181): transl_table=11
gtgagcctgttgaaaatcgcagtcgagccggcgctgattggtgccttcctcaccacgcacgaacaggtcgatgtatttcagaccgatttcacgaatatcgcggcaatcgtcgtcggaatcgattcggcgcaacaggtgcttaaaaccgtcgaaagaaccggattcgcgattccgttcttcgtcgcggtcgagcccgaccaggaagtgccgccgtcgatcctgccgagcgccagcggcgtgatccagctccgccacggcggacgccattactacggccggcagatctccgccgccgccgacatctacagcgagaacctgctgccgccgttcttcaaggtgatgcgcgaatacgtgcagcgcggttatgtcgaattcgattgccccggccaccagggcggccagttcttctcgaaccatccgctcggccggatgttcttcgacttcttcggcgagacgatctttcgcgccgacctctgcaatgccgacgtccggctcggcgacctgctgatccacgaaggcccggcgctggaagcgcagcgcaatgccgcgcggatctacaacgcggacaagacctacttcgtgctgaacggcacgtctacgtcgaacaaggtcgtcacgagcgcgctgctcgcccccgacgatctcgtgctgttcgaccgcaacaaccacaagtcggtacacctcggcgcgctcgtgctgtcgggcgcgcggccggtctacctcgaaaccgcacgcaacgcgtggggcctgatcggcggcgtcgacagcgcggcgctcgacgaagcgcgcattcgcgacgcgatccgcgacgtcgcaccggaacgcgccgaccggccgcggccgttccggctcgcggtgatccagctcggcacctacgacggcacgatctacaacgcacgcgagatcgtcgaccggatcgggcatctgtgcgactacatcctgttcgactcggcgtgggtcggctacgagcagttcatcccgatgatgcaggactgctcgccgctgatgctgacgctcggccccgacgatcccggcatcttcgtcacgcagtcggtgcacaagcagcaggccggtttctcgcagacgtcgcagatccacaagaaggacagccacatcgaaggccagaagcgcttctgcgatcaccggcgcttcaacaacgcgtacatgatccatgcgtcgacgagcccgttctacccgatgttcgcggcactcgacgtcaacgcgcagatgcacgccggcccggccggcaagcgcctgtggcgcgactgcgtggcgcacggcgtcgatgcgcgcaagctgctgctgaagacctgccgccagatccgaccgttcgttccccagaacatcgacggccgcccgtgggccgactacccgaccgagcagatcgtcgacgacctgcgcttcttccgcttccacccggccgacacgtggcacggcttcgaaggctatgcggacgaccagtatttcgtcgacccgtgcaagctgctgctgacgacgcccggcatcgatcgcgacacgcacgaatacgcggcgttcggcgcgccggcgccgatcctggcgcgctacctgcgcgagcacggcgtcgtgcccgagaaggccgacctgtacacgatcctgttcctgctcacgccgtcggagagcttcggcaagctgcagcatctgatcgcgcacctcgcgcagttcgagcgccatctcgaccaggacacaccgctgcgcgaagccattccgtcactgtgcgaagcgtatccggagctgtacggcaacatgcgcctgcggcagctgtgccagcggatgcacgacttctaccgcagccacgacatgaagcatctgcagaagctgatgttccggcgcgcgcagttcccgaaacaggcgatgctgccgcaggccgccaacgccgagctgattcgcaacaacgtcgagctcgtcacgctcgatcgcatcgaaggccggatcgcgacggaaggcgcgctgccctatccgcccggcatcttctgcgtggtgcccggcgaagcatggggcggcccggcgctcgactacttccgcgcgctcgaagccgggatcaacgcactgccgggtttcgagccggaaatccagggcgtctatctgcaaacgctgccggacggcacgaagcaggcttccgcttacgtcgtggcaaccggcaccgacgcgtcacgcgcgtaa

SEQ ID NO: 4303 - protein, 726 aa, Burkholderia sp. 383
MSLLKIAVEPALIGAFLTTHEQVDVFQTDFTNIAAIVVGIDSAQQVLKTVERTGFAIPFFVAVEPDQEVPPSILPSASGVIQLRHGGRHYYGRQISAAADIYSENLLPPFFKVMREYVQRGYVEFDCPGHQGGQFFSNHPLGRMFFDFFGETIFRADLCNADVRLGDLLIHEGPALEAQRNAARIYNADKTYFVLNGTSTSNKVVTSALLAPDDLVLFDRNNHKSVHLGALVLSGARPVYLETARNAWGLIGGVDSAALDEARIRDAIRDVAPERADRPRPFRLAVIQLGTYDGTIYNAREIVDRIGHLCDYILFDSAWVGYEQFIPMMQDCSPLMLTLGPDDPGIFVTQSVHKQQAGFSQTSQIHKKDSHIEGQKRFCDHRRFNNAYMIHASTSPFYPMFAALDVNAQMHAGPAGKRLWRDCVAHGVDARKLLLKTCRQIRPFVPQNIDGRPWADYPTEQIVDDLRFFRFHPADTWHGFEGYADDQYFVDPCKLLLTTPGIDRDTHEYAAFGAPAPILARYLREHGVVPEKADLYTILFLLTPSESFGKLQHLIAHLAQFERHLDQDTPLREAIPSLCEAYPELYGNMRLRQLCQRMHDFYRSHDMKHLQKLMFRRAQFPKQAMLPQAANAELIRNNVELVTLDRIEGRIATEGALPYPPGIFCVVPGEAWGGPALDYFRALEAGINALPGFEPEIQGVYLQTLPDGTKQASAYVVATGTDASRA

SEQ ID NO: 4304 - DNA, 2337 bp, Burkholderia xenovorans LB400
  CDS (1)..(2337): transl_table=11
atgttatacgaccagatgtttggtttcctgttctgttgcgcgatgccattgccgccaacacttccctcgtcgaggctgcaacgcatcgtcgacgaactcggccggctaggctacggcacaacgattacagccgagaccgcggaggccagctccgcgattcgcagcgacgcatcggtgggttgtatcgtcgtcgaatggtcgctaaccgaaccggagaacgaggtcgaagcgtttgtacggttcgtgcgcgagcgtggcctagacgttccggtgttcattctggtggagcgccacctgctccaggaaattccggtggcggtgctgggtcatgtgacgggttatatattcatcgaggaagacacgccggaattcgtcgcccgcaatctggtgagtcatctgcacagctatgccgattcgttaaagacacctttcttcggtgccatggtcgactacgcggagcaggccaaccagatgtggacctgcccaggtcacaacggcggggtgttctaccagaagagcccgattggtcgcgcgttcgtcaagcatttaggcgaggccgtattccgcaatgacctggataattcagtcatcgaactgggcgatctgctcgtgcacgaaggcccggcactggccgcacaaaaggccgccgcgcggatcttcggcgcggagcggacgtatttcgtgctcaacggcacgtcaacctcgaacaagatcgccttgaccgcgctggttgcgccgggcgacctcgtgctgttcgaccgcaataaccacaaggcggctcatcatggcgcgctgctgctcggcggcggcctaccggtttatcttcccaccgtgcgcaatgtgcacgggatgatcggcccgattgatttcgagacgctcgacgagacgcgcattcgtgacagcatccggcgcaaccccctgatcaaggacccgcaagcctggcagcggaagcggccgttccgggttgcgatcatcgagcaatgcacctacgacggcacgatctacgacgtgcagatgctcgtcgaaaagctcggtccgctgtgcgagtacatcatgttcgacgaagcatgggccggcttcatgaaattccatccactgttcaagggacacttcgcgatgggtctcgaagctctgggagcggatgcacctggcattatcgcagcacagtcgacgcacaagcagctggcgggtttttcgcaggcctcccagatccatgtgaaggatgcgcatctcgatgggcaacgcaggcaggtcagtcaccggcgtttcaacgagatgttcatgcagcattcgtcgacctcaccgttctatccgctgttcgcctcgcttgatgtcggcgcgcaaatgatgcgtggccgctccggagaggttttgtgggatgacacgatcaagctcggtatcgagatgcgcaagaagatccgcgccttgcgtcgcgaatatgaagcgacggaaacggacgtggcgcgacaatggttttttgatccgttcgtaccggatgtggtccagggacaagacaggattgaacgctgggaggacattccgaccgacgaactcgccgccagcacgcgttactgggaactggctcccgggcagaaatggcatggctatggggcactcgccccgggctacgtgatgaccgaccccaacaagctgacgctgctgacaccgggctttaaccgcgagacgggtgaatacgcggagcatggcattccggcggcggtactggccgagtttcttcgggaagtgcggatcgtcccggagaagaatgacctgaacagcatccttttcctgctgacgccggggctcgaatcgtcgaaggccggcacactgctgtcggcactggttcgcttcaagcagttacacgacgacaacgcgttgctcgaggacgtcattccctcatttgtggcagcgcatcgtgcgcgctatgcaggcgtcggcttgcggcggttgtgtgcgcagatgcatgacttttatcgggagcgaaacgtcagccgccttcagcgggaacagtttcgcgcggcgcattttcctgaagcagcgatgcccccgcagcaagcgatgcatgaactcgtgcgcaacaacgtcgagttgttgccgatcgatcagatccgcggccgcatcgcggccaccctcgcattggtctatccacccggcatcggggtcatcgtacccggtgaaagatatgacgagcgggcgttgccgatgctggattatttccgcatgttcgaggacggcggcaaccgttttccgggttttgaaaacgagattcagggcatttatcggaagaccgaaagcgatggaagcatgcgactctacacctacgtcgtgaccgaataa

SEQ ID NO: 4305 - protein, 778 aa, Burkholderia xenovorans LB400
MLYDQMFGFLFCCAMPLPPTLPSSRLQRIVDELGRLGYGTTITAETAEASSAIRSDASVGCIVVEWSLTEPENEVEAFVRFVRERGLDVPVFILVERHLLQEIPVAVLGHVTGYIFIEEDTPEFVARNLVSHLHSYADSLKTPFFGAMVDYAEQANQMWTCPGHNGGVFYQKSPIGRAFVKHLGEAVFRNDLDNSVIELGDLLVHEGPALAAQKAAARIFGAERTYFVLNGTSTSNKIALTALVAPGDLVLFDRNNHKAAHHGALLLGGGLPVYLPTVRNVHGMIGPIDFETLDETRIRDSIRRNPLIKDPQAWQRKRPFRVAIIEQCTYDGTIYDVQMLVEKLGPLCEYIMFDEAWAGFMKFHPLFKGHFAMGLEALGADAPGIIAAQSTHKQLAGFSQASQIHVKDAHLDGQRRQVSHRRFNEMFMQHSSTSPFYPLFASLDVGAQMMRGRSGEVLWDDTIKLGIEMRKKIRALRREYEATETDVARQWFFDPFVPDVVQGQDRIERWEDIPTDELAASTRYWELAPGQKWHGYGALAPGYVMTDPNKLTLLTPGFNRETGEYAEHGIPAAVLAEFLREVRIVPEKNDLNSILFLLTPGLESSKAGTLLSALVRFKQLHDDNALLEDVIPSFVAAHRARYAGVGLRRLCAQMHDFYRERNVSRLQREQFRAAHFPEAAMPPQQAMHELVRNNVELLPIDQIRGRIAATLALVYPPGIGVIVPGERYDERALPMLDYFRMFEDGGNRFPGFENEIQGIYRKTESDGSMRLYTYVVTE

SEQ ID NO: 4306 - DNA, 2160 bp, Haemophilus somnus 129PT
  CDS (1)..(2160)
atgttaaaattaaaaatcgcacatagcccattagtgcaaaaatattttacatcaactcgtgaattagttttattaaatcaaactgatttcaccgatataggtgcaataatattgactgccgaagatgttaagtatattcaacaaataaaaacgactgaatttaatattcctatttttgtcgtattaaatgaaggtgaaacactttctgatgaatattttgatcaggtttatcatgttcaagatctaaacagctatgatatcaatttgtatagccgtcaaattgaaacagctgcgtctctttatgagcaaaaaatgttacctccattctttaaaatgttaagcgaatatgtcgaaatgggtaatttggcatttgattgtccgggacaccaaggcggtcaatatttccgcaaacatccagccggccgttatctatacgatttctatggagaaaatattttccgttcagatatttgtaatgctgatgtgaaattgggagatttactaatacatgagggtgctccatgtgatgctcaacaacatgcggcaaaagtatataatgcagataaaacatattttgtgctaaacggaacttccgcctccaataaagtggtttgtaacgcactacttgcaccgggtgatctagtattatttgaccgcaacaatcacaaatcaaatcaccacggtgctttaattcaagcgggtgcaacccctgtttacttggaaactgcccgtaatccattcggcttcatcggcggtattgataaccactgttttgaagaagcatatcttaaaaaattaatcgcagaagtggcaccggaaaaacttgaagagaaacgtcctttccgtcttgcaattattcaattgggtacttatgacggaacaatttataacgccaaacaagttgttgaacgtattggacatttatgcgattacatcttgttcgattctgcatgggtcggctatgaacaattcattccaatgatgaaagattgctctccattattactagatttaaatgaaaatgaccctggtattatcgtgacacaatcggtacataaacaacaagcaggtttctcacaaacatcacaaattcataaaaaagacaaacatattaaaggacaagcaagatattgcaatcacaaacgctttaataatgcctttatgttgcatgcgtctaccagcccattctatcctctattcgccactctggatgtaaacgctcaaattcaaggttctcctgcagggaaacgtctatgggccgagtgtgtagaagttggtatcgaggcaagaaagttaatgcttaagcactgcactttaatcaaaccatttattcctccttatgtgaaaggtaaaaaatggcaagatcacgatactaaagaaattgcaaatgatcttgagtttttcaatttccatgcaaatgatacatggcataaatttgagggttatacagataatcaatattttgttgacccttgtaaattcatgctcacaactccggggattaacattgaaacaggggaatatgaagactttggtattccagcaacaatccttgctaacttcttgcgagaaaatggaatcattcctgaaaaatgtgacttgaactccattttattcttgcttacaccggctgaaacattgacaaaaatgcaaactttagttgctcaaatagctgcgtttgaaaaacatatcaaacaaaattcattactcaaagatgtactgcctactgtgtacaaaaataatgaggaacgctatcagggctacactatcagacaattatgtcaagaaatgcacaatctttacgtcagtagaaatgttaaacagctacaacgtgacttgtttagaaaaacaactctaccggaatatgctatgaacccacaaaaagcgaatatcgaatttgttcgtaacaaaattgaattagttccattgacagatattgtggggagaatcgccgccgaaggtgcattaccttaccctccaggtgttttatgtgttgttcccggtgaacgttggagtacgacagtacaacaatatttccttgcactggaagaaggcattaatgttcttcctggattcgcaccggaaattcagggcgtatatctacaaaaagatcctgatggacgtacacgtgcttatggatatgtattaactgaagcataa

SEQ ID NO: 4307 - protein, 719 aa, Haemophilus somnus 129PT
MLKLKIAHSPLVQKYFTSTRELVLLNQTDFTDIGAIILTAEDVKYIQQIKTTEFNIPIFVVLNEGETLSDEYFDQVYHVQDLNSYDINLYSRQIETAASLYEQKMLPPFFKMLSEYVEMGNLAFDCPGHQGGQYFRKHPAGRYLYDFYGENIFRSDICNADVKLGDLLIHEGAPCDAQQHAAKVYNADKTYFVLNGTSASNKVVCNALLAPGDLVLFDRNNHKSNHHGALIQAGATPVYLETARNPFGFIGGIDNHCFEEAYLKKLIAEVAPEKLEEKRPFRLAIIQLGTYDGTIYNAKQVVERIGHLCDYILFDSAWVGYEQFIPMMKDCSPLLLDLNENDPGIIVTQSVHKQQAGFSQTSQIHKKDKHIKGQARYCNHKRFNNAFMLHASTSPFYPLFATLDVNAQIQGSPAGKRLWAECVEVGIEARKLMLKHCTLIKPFIPPYVKGKKWQDHDTKEIANDLEFFNFHANDTWHKFEGYTDNQYFVDPCKFMLTTPGINIETGEYEDFGIPATILANFLRENGIIPEKCDLNSILFLLTPAETLTKMQTLVAQIAAFEKHIKQNSLLKDVLPTVYKNNEERYQGYTIRQLCQEMHNLYVSRNVKQLQRDLFRKTTLPEYAMNPQKANIEFVRNKIELVPLTDIVGRIAAEGALPYPPGVLCVVPGERWSTTVQQYFLALEEGINVLPGFAPEIQGVYLQKDPDGRTRAYGYVLTEA

SEQ ID NO: 4308 - DNA, 2160 bp, Haemophilus somnus 2336
  CDS (1)..(2160)
atgttaaaattaaaaatcgcacatagcccattagtgcaaaaatattttacatcaactcgtgaattagttttattaaatcaaactgatttcaccgatataggtgcaataatattgactgccgaagatgttaagtatattcaacaaataaaaacgactgaatttaatattcctatttttgtcgtattaaatgaaggtgaaacactttctgatgaatattttgatcaggtttatcatgttcaagatctaaacagctatgatatcaatttgtatagccgtcaaattgaaacagctgcgtctctttatgagcaaaaaatgttacctccattctttaaaatgttaagcgaatatgtcgaaatgggtaatttggcatttgattgtccgggacaccaaggcggtcaatatttccgcaaacatccagccggccgttatctatacgatttctatggagaaaatattttccgttcagatatttgtaatgctgatgtgaaattgggagatttactaatacatgagggtgctccatgtgatgctcaacaacatgcagcaaaagtatataatgcagataaaacatattttgtgctaaacggaacttccgcctccaataaagtggtttgtaacgcactacttgcaccgggtgatctagtattatttgaccgcaacaatcacaaatcaaatcaccacggtgctttaattcaagcgggtgcaacccctgtttacttggaaactgcccgtaatccattcggcttcatcggcggtattgataaccactgttttgaagaagcatatcttaaaaaattaatcgcagaagtggcaccggaaaaacttgaagagaaacgtcctttccgtcttgcaattattcaattgggtacctatgacggaacaatttataacgccaaacaagttgttgaacgtattggacatttatgcgattacatcttgttcgattctgcatgggtcggctatgaacaattcattccaatgatgaaagattgctctccattattactagatttagatgaaaatgaccctggtattatcgtgacacaatcggtacataaacaacaagcaggtttctcacaaacatcacaaattcataaaaaagacaaacatattaaaggacaagcaagatattgcaatcacaaacgctttaataatgcctttatgttgcatgcgtctaccagcccattctatcctctattcgccactctggatgtaaacgctcaaattcaaggttctcctgcagggaaacgtctatgggccgagtgtgtagaagttggtatcgaggcaagaaagttaatgcttaagcactgcactttaatcaaaccatttattcctccttatgtgaaaggtaaaaaatggcaagatcacgatactaaagaaattgcaaatgatcttgagtttttcaatttccatgcaaatgatacatggcataaatttgagggttatacagataatcaatattttgttgacccttgtaaattcatgctcacaactccggggattaacattgaaacaggggaatatgaagactttggtattccagcaacaatccttgctaacttcttgcgagaaaatggaatcattcctgaaaaatgtgacttgaactccattttattcttgcttacaccggctgaaacattgacaaaaatgcaaactttagttgctcaaatagctgcgtttgaaaaacatatcaaacaaaactcattactcaaagatgtactgcctactgtgtacaaaaataatgaggaacgctatcagggctacactatcagacaattatgtcaagaaatgcacaatctttacgtcagtagaaatgttaaacagctacaacgtgacttgtttagaaaaacaactctaccggaatatgctatgaacccacaaaaagcgaatatcgaatttgttcgtaacaaaattgaattagttccattgacagatattgtggggagaatcgccgccgaaggtgcattaccttaccctccaggtgttttatgtgttgttcccggtgaacgttggagtacgacagtacaacaatatttccttgcactggaagaaggcattaatgttcttcctggattcgcaccggaaattcagggcgtatatctacaaaaagatcctgatggacgtacacgtgcttatggatatgtattaactgaagcataa

SEQ ID NO: 4309 - protein, 719 aa, Haemophilus somnus 2336
MLKLKIAHSPLVQKYFTSTRELVLLNQTDFTDIGAIILTAEDVKYIQQIKTTEFNIPIFVVLNEGETLSDEYFDQVYHVQDLNSYDINLYSRQIETAASLYEQKMLPPFFKMLSEYVEMGNLAFDCPGHQGGQYFRKHPAGRYLYDFYGENIFRSDICNADVKLGDLLIHEGAPCDAQQHAAKVYNADKTYFVLNGTSASNKVVCNALLAPGDLVLFDRNNHKSNHHGALIQAGATPVYLETARNPFGFIGGIDNHCFEEAYLKKLIAEVAPEKLEEKRPFRLAIIQLGTYDGTIYNAKQVVERIGHLCDYILFDSAWVGYEQFIPMMKDCSPLLLDLDENDPGIIVTQSVHKQQAGFSQTSQIHKKDKHIKGQARYCNHKRFNNAFMLHASTSPFYPLFATLDVNAQIQGSPAGKRLWAECVEVGIEARKLMLKHCTLIKPFIPPYVKGKKWQDHDTKEIANDLEFFNFHANDTWHKFEGYTDNQYFVDPCKFMLTTPGINIETGEYEDFGIPATILANFLRENGIIPEKCDLNSILFLLTPAETLTKMQTLVAQIAAFEKHIKQNSLLKDVLPTVYKNNEERYQGYTIRQLCQEMHNLYVSRNVKQLQRDLFRKTTLPEYAMNPQKANIEFVRNKIELVPLTDIVGRIAAEGALPYPPGVLCVVPGERWSTTVQQYFLALEEGINVLPGFAPEIQGVYLQKDPDGRTRAYGYVLTEA

SEQ ID NO: 4310 - DNA, 2163 bp, Haemophilus influenzae R2866
  CDS (1)..(2163)
atgccaaacttaaaaattgcatatagtccaaaagttgaacaatatttctctacaaatagagaattagttgagattgctaaaacagactttacagatgttgcagctatcgtattaagttcaagtgatgtaggtgaatacctcgatagaattaaagcaacgaaatttgatgttccagtgtttgttgttcaaaccgacgaacaacaggtggatccaaaattctatgattctatttaccatattcaagatttaaacagttatgacatcaaactttatagccgtcaaatcgaaactgcagcgaaactttatgaagaaaaaatgttacctccattcttcaaaatgttaagtgaatatgtagaaatgggtaatattgcttttgactgtccgggacatcaaggtggtcaatactatcgtaaacatccagcaggtcgtttcctttatgacttctacggtgaaaacattttccgttcggacatttgtaatgcggacgtgaaattaggtgacttgttaattcacgaaggggcagcttgtgatgcacaaaaatatgcggctcaagtattcaatgcagataaaacttacttcgtattgaatggtacatcttcttcaaacaaagttgcgttaaatgctgtacttgctcctggcgatttggtgttatttgatcgtaataaccataaatcaaaccaccatggtgcattaattcaagcgggtgctaccccaatttacttagaaactgcacgtaacccatttggtttcattggtggtattgatagtcactgcttcgaagaagattatctgaaatcattaattaaagaagttgcacctgaaaaattaaaccaaaaacgtccattccgtttagcagtgattcaattaggtacttatgacggtacaatttataacgcacgccaagtagtggataaaataggtcacctttgtgattacatcttattcgactctgcatgggtaggttatgaacaattcattccaatgatgaaagactgctcgccattattgcttgaattaaatgaaaatgacccaggtattttagtgacacaatctgttcataaacaacaagcaggtttctcacaaacttcacaaattcacaaaaaagataaacacattaaaggtcaagatcgttatgtaaaccacaaacgtttcaacaatgcctttatgctacatgcgtcaactagtccgttctatccgttatttgctacgttagatgtgaatgcgaaaattcaaggtagtgaagctggtcgtcgattatggcatgaatgtgtgaaagtaggtatcgaagcgcgtaaattagcattaaaccactgtgaattaattcgtccatttattccaaccacaattaaaggtaaaaaatggcaagattatgacacagaggaaatcgcaactaatctcgagttcttcaaattccacccaacagatacatggcataaatttgaaggttatgctgatgaacaatacttcgttgacccatgtaaattcttgcttaccacaccgggtattagcttagaaacaggtgaatatgaagaatttggtgtaccagcaaccattcttgctaactacttacgtgaaaacggtattattccggaaaaatgtgacttgaactcaatcttattcttgctcactccggcagaaaccatcaccaaaatgcaaacattagttgctcaaatcgccttgtttgaaaaacacattaaacaagactctttattaaaagatgtcttaccaactgtgtataaaaacaatgaagatcgttacaaaggttacaccattcgtcaattatgccaagaaatgcatgatctttatgtcagccgcaatgtaaaacaacttcaaaaagatttgttccgcaaagcgacattaccagaatatgtattaaatccacatgatgcaaatattgagttagtacgtaacaaagttgaactcgttccgttgactgatattgttggtcgtgtggctgcggaaggtgcgttaccttaccctccaggtgtgttatgtgtggtgccaggagaaaaatggagcactacagcacaacaatatttccttgcgttagaagaagggatcaacacattacctggtttcgcacctgaaatccaaggggtttacttacaaaaagaccctgatggacgtactcgtgcatatggctatgttttaactgactattaa

SEQ ID NO: 4311 - protein, 720 aa, Haemophilus influenzae R2866
MPNLKIAYSPKVEQYFSTNRELVEIAKTDFTDVAAIVLSSSDVGEYLDRIKATKFDVPVFVVQTDEQQVDPKFYDSIYHIQDLNSYDIKLYSRQIETAAKLYEEKMLPPFFKMLSEYVEMGNIAFDCPGHQGGQYYRKHPAGRFLYDFYGENIFRSDICNADVKLGDLLIHEGAACDAQKYAAQVFNADKTYFVLNGTSSSNKVALNAVLAPGDLVLFDRNNHKSNHHGALIQAGATPIYLETARNPFGFIGGIDSHCFEEDYLKSLIKEVAPEKLNQKRPFRLAVIQLGTYDGTIYNARQVVDKIGHLCDYILFDSAWVGYEQFIPMMKDCSPLLLELNENDPGILVTQSVHKQQAGFSQTSQIHKKDKHIKGQDRYVNHKRFNNAFMLHASTSPFYPLFATLDVNAKIQGSEAGRRLWHECVKVGIEARKLALNHCELIRPFIPTTIKGKKWQDYDTEEIATNLEFFKFHPTDTWHKFEGYADEQYFVDPCKFLLTTPGISLETGEYEEFGVPATILANYLRENGIIPEKCDLNSILFLLTPAETITKMQTLVAQIALFEKHIKQDSLLKDVLPTVYKNNEDRYKGYTIRQLCQEMHDLYVSRNVKQLQKDLFRKATLPEYVLNPHDANIELVRNKVELVPLTDIVGRVAAEGALPYPPGVLCVVPGEKWSTTAQQYFLALEEGINTLPGFAPEIQGVYLQKDPDGRTRAYGYVLTDY

SEQ ID NO: 4312 - DNA, 2148 bp, Vibrio sp. Ex25
  CDS (1)..(2148)
atgcctgaagactttagcttattagctgaatctttagatgaacaatttaatcgtcacttactgcctttagaacaagttgaattaaccgacgttggtgcagctattattacgtcaacagacattaaagcgggtctgcacagaatgatttcggaaacagggtacggaatccctgttttcttagtgaccgatgaaactccagtttcggcagaagattacgtttggttaacgggggttattgatttagaaagacaatctatcgattactactgccgtcaaattaatgaagccgtgactaaatatgagtgtcgtctgctccctcctttcttcaagcaattaacgcactacgttgagatgggtaactcggcgtttgactgtccagggcaccaaggtggtcagttcttcaaaaaacaccctgctggtaaacaattctacgatttctttggcgaaaacctattccgtagcgacttgtgtaacgcggacgtggacttaggtgacttactgatccacgaaggttctgcacaccaagcgcaagcacacgctgcaaaagtatttaacgctgacaaaacttacttcgtactcaacggtacttctgcttcaaacaaagttgtgtgtaacgcgctagtaactgaaggcgatttggtattgttcgaccgcaataaccacaagtcgaatcaccacggcgcgttaatccaagcgggtggtatgccagtttatctagaaacggcgcgtaacccttggggcttcattggtggtatggatgagcactgtttcgatgaagagtatattcgtgctcaaatcgcgaaagtatctccagagcgtgcacgagatgaacgtccgttccgtctggccatcatccagttgggtacttacgacggtacaatttataacgctcgttacgtcatggataagattggccacctttgtgactacatcttgtttgactcggcatgggtaggctatgagcagttcatccctatgatgaaagactgttcgccactgctactggatctgaaaccagaagatgcgggtgtgatcgtgactcagtctgttcacaagcaacaagctggcttctctcaaacgtcgcaaatccacaaaaaagaccgccatatcaaaggccaagctcgttactgcaatcacaaacgctttaacaacgcgtttatgatgcacgcatcgacatctcctttctatgcgttgtttgctgcattggatgtgaacgcgaagatccacgatggtgaagcaggcttacgtttatggagcgacgcggttaagaccggtatcgaagcgcgtaaagaaattctcaaaagttgtgagttaattcgtccgttcattccaaatgaaattgaaggtcaaccttggggcagttacgacactgatgtgatcgcgaccaacaagaagttcttcatgttcgagccagatgcaaactggcacaagtttgaaggttatggcgaaggtcaatactttgttgacccatgtaaattgttgctaaccacggcaggtattgcagaagacggcagctacgcagatttcggtattccggcaacgctattggcgaacttccttcgagaaaacggcatcatccctgagaagtgtgacttgaactccatcttgttcctactcactcctgctgaagatatgggtaagatccgtcaccttgtcgcgcaaatcaaccgatttgaaaaattcattcgtgatgatgcacctctcagtatcgtgctaccaggcgtctacgaagcgaacaaagagcgctaccgtggttacaccatccgtcagctatgtcaggaaatgcatgacatgtacaaagagctgaacgtgaaacagctacaaaaagcgatgttccgcagtgaatacttcccacaaatggttcacaaaccagacgtggcaacacgcaaatacttccgcggtgaatgcgattacctaccacttaaagaggccgtcggccgcgtagccgccgaaggtgcgctgccttaccctccaggcattatctgtgtgatcactggtgaaatctggacccaacaggtggtggattacttcttatctctagaagaaggcatcaaccgattcccaggcttcgcgccagaaattcaaggtgtgtaccttgaagatgtcgacggtcgcactaccgcacattgctatgtcctaaaagattaa

SEQ ID NO: 4313 - protein, 715 aa, Vibrio sp. Ex25
MPEDFSLLAESLDEQFNRHLLPLEQVELTDVGAAIITSTDIKAGLHRMISETGYGIPVFLVTDETPVSAEDYVWLTGVIDLERQSIDYYCRQINEAVTKYECRLLPPFFKQLTHYVEMGNSAFDCPGHQGGQFFKKHPAGKQFYDFFGENLFRSDLCNADVDLGDLLIHEGSAHQAQAHAAKVFNADKTYFVLNGTSASNKVVCNALVTEGDLVLFDRNNHKSNHHGALIQAGGMPVYLETARNPWGFIGGMDEHCFDEEYIRAQIAKVSPERARDERPFRLAIIQLGTYDGTIYNARYVMDKIGHLCDYILFDSAWVGYEQFIPMMKDCSPLLLDLKPEDAGVIVTQSVHKQQAGFSQTSQIHKKDRHIKGQARYCNHKRFNNAFMMHASTSPFYALFAALDVNAKIHDGEAGLRLWSDAVKTGIEARKEILKSCELIRPFIPNEIEGQPWGSYDTDVIATNKKFFMFEPDANWHKFEGYGEGQYFVDPCKLLLTTAGIAEDGSYADFGIPATLLANFLRENGIIPEKCDLNSILFLLTPAEDMGKIRHLVAQINRFEKFIRDDAPLSIVLPGVYEANKERYRGYTIRQLCQEMHDMYKELNVKQLQKAMFRSEYFPQMVHKPDVATRKYFRGECDYLPLKEAVGRVAAEGALPYPPGIICVITGEIWTQQVVDYFLSLEEGINRFPGFAPEIQGVYLEDVDGRTTAHCYVLKD

SEQ ID NO: 4314 - DNA, 2163 bp, Shewanella sp. ANA-3
  CDS (1)..(2163): transl_table=11
atgaaatcattaaaagttgccgccagcttatctgttagatcatgttttgaaatagacagagaagttgtcaatgtattaaccacagatttttgcgatgtgggcgcggctgtagtctctgttgatgatgttaaaaatggtattgttgaaaaaattaaaaataccggattaaaactgcctattttcgtatcagtttgttgtgaagaaaccttcccagatgatatttgctcttctattaccggggtatttgagctctgcggtagcaataccgatttctatggtaaacaggtcgaaaccgccgtccaaaaatatgaacaagccctattaccgcctttctttggcacactgaaaaaatacgtggaaatgggcaactccaccttcgcctgtccaggccatcagggtggtcaattcttccgtaaacatcctgtgggtcgccaatttttcgatttctttggcgaaaccattttccgctcagatatgtgtaatgccgacgttaaactcggcgatctattaatccacgaaggcgcgccgctggatgcacaaaaatacgcggctaaggtctttaacgccgataaaacctactttgtgctcaacggcacttcttcttcaaacaaagtggcgaccaacgcactgctggcgaagggcgacctggtattattcgaccgtaacaaccataaatccaaccaccatggcgcgttaattcaagccggtgcaacaccgatttatttagaaaccgcccgtaaccccttcggctttattggtggtatcgacgcccactgcttccaagagtcttatttaagggaacaaatccgcgccgttgcacctgagcgtgccgatgaacaacgtccattccgcttagccattatccaactaggcacctacgacggtactatctacaatgctcgccaagtcgttgatcgtattggacatctatgtgattacatcctgtttgactcagcttgggttggctacgagcaatttattcctatgatgaatgactgctcgcctctgctgctcgaactgacgcctgaagatcccggtattatcgtgactcagtcagtgcacaaacagcaggcaggcttctcacaaacctcgcaaattcacaaaaaagactcacatatcaaaggccaagccagatactgcaaccataaacgcttcaacaacgcctttatgatgcatgcctctaccagccccttctatccgctgtttgccgcattggatgtgaacgctaaaatgcacgaaggcgccagcggccgttatctatggcgtgaggcggttaaagctggtattgaagctcgcaagttactgctcaaaaaatgtaaatatatcaagccatttatcccaagcatgatcgagggacgcccatggcaggattatccaaccgaacaaatggccgatgatttacgtttcttcgagtttgaacccggacaaaaatggcactccttcgacggttacgaaaaaggccaatatttcgtagacccttgtaagttcctattaaccacgcctggtatcgatgccgaaaccggtaaatatactgagttcggtattcctgcaactattctggctaacttcttacgtgaaaataatattattcccgagaagtgcgacttaaattcgattttattcctgatgacacctgcggaagatatggcgaagatgcaacacttagtgtcgcaaatatctcgcttcgagaaattagtcgatgaagatgcgccattatctgaagtattacctaacgtctataacgctaataaagcccgttataaagactataccattcgtcaactctgccaagaaatgcacaacctttatgtcagccatgacgtaaaacaactgcaaaaagaaatgttccgccaggcgcatttcccaacaaaagtgatggatccacaggaagccaacctcgagtttatccgtggcaaagtggagttagtgccactgtcacaaattgagggacgcattgctgcagaaggtgcattgccttatccacctggagtgttatgtgtggtcccaggtgaaatatggggcggcgcggtacaacgttatttcttagcccttgaagaaggcatcaacttattacccggattctcccctgaattacaaggtgtttacctcgaaacccccccagacggaaaaatccaagccctaggttatgtattaaataaataa

SEQ ID NO: 4315 - protein, 720 aa, Shewanella sp. ANA-3
MKSLKVAASLSVRSCFEIDREVVNVLTTDFCDVGAAVVSVDDVKNGIVEKIKNTGLKLPIFVSVCCEETFPDDICSSITGVFELCGSNTDFYGKQVETAVQKYEQALLPPFFGTLKKYVEMGNSTFACPGHQGGQFFRKHPVGRQFFDFFGETIFRSDMCNADVKLGDLLIHEGAPLDAQKYAAKVFNADKTYFVLNGTSSSNKVATNALLAKGDLVLFDRNNHKSNHHGALIQAGATPIYLETARNPFGFIGGIDAHCFQESYLREQIRAVAPERADEQRPFRLAIIQLGTYDGTIYNARQVVDRIGHLCDYILFDSAWVGYEQFIPMMNDCSPLLLELTPEDPGIIVTQSVHKQQAGFSQTSQIHKKDSHIKGQARYCNHKRFNNAFMMHASTSPFYPLFAALDVNAKMHEGASGRYLWREAVKAGIEARKLLLKKCKYIKPFIPSMIEGRPWQDYPTEQMADDLRFFEFEPGQKWHSFDGYEKGQYFVDPCKFLLTTPGIDAETGKYTEFGIPATILANFLRENNIIPEKCDLNSILFLMTPAEDMAKMQHLVSQISRFEKLVDEDAPLSEVLPNVYNANKARYKDYTIRQLCQEMHNLYVSHDVKQLQKEMFRQAHFPTKVMDPQEANLEFIRGKVELVPLSQIEGRIAAEGALPYPPGVLCVVPGEIWGGAVQRYFLALEEGINLLPGFSPELQGVYLETPPDGKIQALGYVLNK

SEQ ID NO: 4316 - DNA, 2163 bp, Shewanella sp. MR-7
  CDS (1)..(2163): transl_table=11
atgaaatcattaaaagttgccgccagcttatctgttagatcatgttttgaaatagacagagaggtagtcaatgtattaaccacagatttttgcgatgtgggtgcggctgtagtctctgttgatgatgttagaaatggtattgttgaaaaaattaaaaataccggattaaaactgcctatttttgtatcagtttgctgtgaagaaaccttcccagatgatatttgttcctctattaccggagtatttgaactctgtggtagcaataccgatttctatggtaaacaggtcgaaaccgccattcaaaaatatgagcaagccctattaccgccgttctttggcacactgaaaaaatacgtggaaatgggcaactccaccttcgcctgcccaggccatcagggtggtcaattctttcgtaaacatcctgtgggtcgccaatttttcgatttctttggcgaaaccattttccgctcagatatgtgtaatgccgacgttaagctcggcgatctgttaatccatgaaggcgcgccactggatgcacaaaaatacgcggctaaggtctttaacgccgataaaacctactttgtgcttaacggcacttcttcttcaaataaagtggcgaccaacgcactgctggcgaagggtgatctggtattattcgaccgtaacaaccataaatccaaccaccatggcgcgttaattcaagccggtgcgacaccgatttatttagaaaccgcccgtaaccccttcggctttattggcggtatcgacgcccactgcttccaagagtcttatttaagggagcagatccgcgccgttgcacctgagcgtgccgatgaacaacgtccattccgtttagctattatccagctgggcacctacgatggcactatctacaacgctcgccaagtagttgatcgcatcggacatctatgtgattacattctgtttgactcagcttgggttggctatgagcaatttattcccatgatgaatgactgctcgcctctgctgctcgaactgacgcctgaagatcccggtattatcgtgactcagtcagtgcacaaacagcaggctggcttctcacaaacctcgcaaattcacaaaaaagactcacatatcaaaggccaagccagatactgcaaccataaacgcttcaacaacgcctttatgatgcacgcctctaccagccccttctatccgctgtttgccgcattggatgtgaacgctaaaatgcacgaaggcgccagcggccgttatctgtggcgtgaggcggtaaaagccggtattgaagctcgcaagttactgctcaaaaaatgtaaatatatcaagccatttatcccaagcatgatcgagggacgcccatggcaggattatccaaccgaacaaatggccgatgatttacgtttcttcgagtttgaacccggacaaaaatggcactccttcgacggttacgaaaaaggccaatatttcgttgacccttgtaagttcctattaaccacgcctggtatcgatgccgaaacgggtaaatatactgagtttggtatcccagcaactattctggctaacttcttacgtgaaaataatattattcccgagaagtgcgacttaaattcgattttattcctgatgacgcctgcggaagatatggcgaagatgcaacacttagtgtcgcaaatatcccgtttcgaaaagttagtcgatgaagatgcgccattatctgaagtactacctaacgtctataacgctaataaagcccgttataaagactataccattcgtcaactctgccaagaaatgcacaacctttatgtcagccatgacgtaaaacaactgcaaaaagaaatgttccgtcaggcgcatttcccaacaaaagtgatggatccacaggaagccaacctcgaatttatccgtggcaaagtggagttagtgccactgtcacaaattgagggacggattgctgcagaaggtgcattgccttacccaccaggggtgctatgtgtggtcccaggtgaaatatggggcggtgcggtacaacgttatttcttagcccttgaagaaggcatcaacttattacccggattctcccctgaattacaaggtgtttacctcgaaaacaccccagacggaaaaatccaagccctaggttatgtattaaataaataa

SEQ ID NO: 4317 - protein, 720 aa, Shewanella sp. MR-7
MKSLKVAASLSVRSCFEIDREVVNVLTTDFCDVGAAVVSVDDVRNGIVEKIKNTGLKLPIFVSVCCEETFPDDICSSITGVFELCGSNTDFYGKQVETAIQKYEQALLPPFFGTLKKYVEMGNSTFACPGHQGGQFFRKHPVGRQFFDFFGETIFRSDMCNADVKLGDLLIHEGAPLDAQKYAAKVFNADKTYFVLNGTSSSNKVATNALLAKGDLVLFDRNNHKSNHHGALIQAGATPIYLETARNPFGFIGGIDAHCFQESYLREQIRAVAPERADEQRPFRLAIIQLGTYDGTIYNARQVVDRIGHLCDYILFDSAWVGYEQFIPMMNDCSPLLLELTPEDPGIIVTQSVHKQQAGFSQTSQIHKKDSHIKGQARYCNHKRFNNAFMMHASTSPFYPLFAALDVNAKMHEGASGRYLWREAVKAGIEARKLLLKKCKYIKPFIPSMIEGRPWQDYPTEQMADDLRFFEFEPGQKWHSFDGYEKGQYFVDPCKFLLTTPGIDAETGKYTEFGIPATILANFLRENNIIPEKCDLNSILFLMTPAEDMAKMQHLVSQISRFEKLVDEDAPLSEVLPNVYNANKARYKDYTIRQLCQEMHNLYVSHDVKQLQKEMFRQAHFPTKVMDPQEANLEFIRGKVELVPLSQIEGRIAAEGALPYPPGVLCVVPGEIWGGAVQRYFLALEEGINLLPGFSPELQGVYLENTPDGKIQALGYVLNK

SEQ ID NO: 4318 - DNA, 2163 bp, Shewanella sp. MR-4
  CDS (1)..(2163): transl_table=11
atgaaatcattaaaagttgccgccagcttatctgttagatcatgttttgaaatagacagagaagtcgtcaatgtattaaccacagatttttgcgatgtgggtgcggctgtagtctctgttgatgatgttagaaatggtattgttgaaaaaattaaaaataccggattgaaactgcctattttcgtatcagtttgttgtgaagaaaccttcccagatgatatttgctcttctattaccggggtatttgaactctgcggtagcaataccgatttctatggcaaacaggtcgaaaccgccgtccaaaaatatgagcaagccctattaccgccgttctttggcacactgaaaaaatacgtggaaatgggcaactccaccttcgcctgcccaggccatcagggtgggcaattcttccgtaaacatcctgtgggtcgccaatttttcgatttctttggcgaaaccattttccgctccgatatgtgtaatgccgacgttaaactcggcgatctgttaatccatgaaggcgcgccactggatgcacaaaaatacgcggccaaagtctttaacgccgataaaacctactttgtgctcaacggaacttcttcttcaaataaagtggcgaccaacgcactgctggcgaagggagacttggtattattcgaccgtaacaaccataaatccaaccaccatggcgcgttaattcaagccggtgcgacaccgatttatttagaaaccgcccgtaaccccttcggctttattggtggcatcgacgcccactgcttccaagagtcttatttaagggagcagatccgcgccgttgcacctgagcgtgccgatgaacaacgtccattccgtttagccattatccagctgggcacctacgatggcactatctacaacgctcgccaagtagttgatcgtattggacatctatgtgattacatcctgtttgactcggcttgggttggctatgagcaatttattcctatgatgaatgactgctcgcctctgctgctcgaactgacgcctgaagatcccggtattatcgtgactcagtcagtacacaaacagcaggcaggcttctcacaaacctcgcaaattcacaaaaaagactcacatatcaaaggccaagccagatactgcaaccataaacgcttcaacaacgcctttatgatgcacgcctctaccagccccttctatccgctgtttgccgcattggatgtgaacgctaaaatgcacgaaggcgccagcggccgttatctgtggcgtgaggcggttaaagccggtattgaagctcgcaagttactgctcaaaaaatgtaaatatatcaagccatttatcccaagcatgatcgagggacgcccatggcaggattatccaaccgaacaaatggccgatgatttacgtttcttcgagtttgaacccggacaaaaatggcactccttcgacggttacgaaaaaggccaatatttcgtagacccttgtaagttcctattaaccacgcctggtatcgatgccgaaacgggtaaatatactgagtttggtattccagcaactattctggctaacttcttacgtgaaaataatattattcccgagaagtgcgacttaaattcgattttattcctgatgacacctgcggaagatatggcgaagatgcaacacttagtgtcgcaaatatctcgcttcgaaaaattagtcgacgaagatgcgccattatctgaagtattacctaacgtctataacgccaataaagcccgttataaagactataccattcgtcaactctgccaagaaatgcacaacctttatgtcagccatgacgtaaaacaactgcaaaaagaaatgttccgtcaggcgcatttcccaacaaaagtgatggacccacaggaagccaacctcgagtttatccgtggcaaagtggagttagtaccactgtcacaaattgagggacgcattgccgcagaaggtgcattgccttatccacctggagtgttatgtgtggtcccaggtgaaatatggggtggcgctgtacaacgttatttcttagcccttgaagaaggcatcaacttattacccggattctcccctgaattacaaggtgtttacctcgaaaacaccccagacggaaaaatccaagccctaggttatgtattaaataaataa

SEQ ID NO: 4319 - protein, 720 aa, Shewanella sp. MR-4
MKSLKVAASLSVRSCFEIDREVVNVLTTDFCDVGAAVVSVDDVRNGIVEKIKNTGLKLPIFVSVCCEETFPDDICSSITGVFELCGSNTDFYGKQVETAVQKYEQALLPPFFGTLKKYVEMGNSTFACPGHQGGQFFRKHPVGRQFFDFFGETIFRSDMCNADVKLGDLLIHEGAPLDAQKYAAKVFNADKTYFVLNGTSSSNKVATNALLAKGDLVLFDRNNHKSNHHGALIQAGATPIYLETARNPFGFIGGIDAHCFQESYLREQIRAVAPERADEQRPFRLAIIQLGTYDGTIYNARQVVDRIGHLCDYILFDSAWVGYEQFIPMMNDCSPLLLELTPEDPGIIVTQSVHKQQAGFSQTSQIHKKDSHIKGQARYCNHKRFNNAFMMHASTSPFYPLFAALDVNAKMHEGASGRYLWREAVKAGIEARKLLLKKCKYIKPFIPSMIEGRPWQDYPTEQMADDLRFFEFEPGQKWHSFDGYEKGQYFVDPCKFLLTTPGIDAETGKYTEFGIPATILANFLRENNIIPEKCDLNSILFLMTPAEDMAKMQHLVSQISRFEKLVDEDAPLSEVLPNVYNANKARYKDYTIRQLCQEMHNLYVSHDVKQLQKEMFRQAHFPTKVMDPQEANLEFIRGKVELVPLSQIEGRIAAEGALPYPPGVLCVVPGEIWGGAVQRYFLALEEGINLLPGFSPELQGVYLENTPDGKIQALGYVLNK

SEQ ID NO: 4320 - DNA, 2358 bp, Xanthobacter autotrophicus Py2
  CDS (1)..(2358): transl_table=11
atggactatttcaagcgattcaacttcctgttcgcgaccccggtgttcgacgccgaggatctggagggcgcccgctacaaccagatcgtcgcggagatcgagcgttccggcttcgaggtggtgaaggcgcgcaacctcgaagacgccgagatcgcggtgcagaccgatgccgccatcggctgcatgctggtggactggggcaagaaggggctggagggcaagaccgccgccctcatcaacctgatgcgccggcgcggcctcgacttccccatcctcctgctgatccgccgcaagcgcttcgaggatgtgccggtggaggtgctggacttcatcgacggctacgtcttcctctccgaggaaacccccgccttcatcgccaagaacctcatcagccggctcaagcaatatgccgagacgctgaagacccccttcttcggcgcgctggtggactatgccgaagagggcaaccagctgtggacctgccccgggcacaatggcggcgtgttctattcccgcagccccatcggccgggtgttcatggagcatctgggcgaggcggtgttccgcgacgacctcgacaattccgtgctcgacctcggcgacctcctgacccacgagggcccggcgctggcggcgcagaaggaggcggcgaagatcttcggcgccgagaagacctatttcgtcctcaacggcacctccacctccaacaaggttgcgctttcggccctcgtcaccgacggcgacctggtgctgttcgaccgcaacaaccacaaggccgcccaccacggcgcgctgatgatctccggcggcatcccggtctatgtgcccaccgtgcgcaacgcccatggcctcatcggccccatggacttcgccgcgctggacgagaccgccctgcgcgagcgcatccgcacccatcccctggtgaaggatccggacgcgtggcagaaaccgcgcccgttccgggtggcggtggtggagcagtgcacctatgacggcaccatccacaatgccgagatgatcctcaaggccatcggccacctcaccgactacatcctgttcgacgaggcctgggcgggcttcatgaagttccacccgctctatgccggccgcttcgccatgggccttgccgacctcggccccgacgcgccgggcatcatcgccacccagtcgacccacaagcagctggcgagcttctcgcaggcctcccagatccacatgaaggaccggcacatcaccggccagaagcggcgggtggagcaccggcgcttcaacgagagcttcatgcagcacgcctccacctcgcccttctatcccttgttcgcctccctcgacgtgggcgcgcagatgatgaagggccggtccggtgaagtgctgtgggacgacaccatccgcctcggcatcgagctcaggaagaagatccgagccgtgcgccgcgagttcgaggagaaggagcttcgccccgagcgccgctggttcttcgagccgttcgtgccggaccgggtggccatccccgacgtgtcgagccccggcgcggtgcatgaggtgccgtgggaaagcgtcgccaccgatctcctcgccaccaaccccgccttctggcacctgacccccggcgcgtcctggcatggcttcgagggcatggcggcgggtttcgccatgaccgaccccaacaagctgacccttctgacccccggcttcgaccgcgccaccggcgcctatgccgagcacggcatcccggcgcccgtggtggcgcaatatctgcgcgagaaccgcatcgtcgccgagaagaacgaccttaattccctgctgttcctgctcacccctggggtggaggcatcgaaggcgggcacgctcatctccggcctcgtcgccttcaagaagctgcatgacgagaatgcgcttctggaagaggcgatcccggaatttttccgccgtcgtcccgcccgctatgggggcgtgcggctgcgcgacctgtgcggggagatgcaccgcttcttccgcgccgcgaatgtgagcgcactccaggccatgcaattttccgccgcgcacctgccggacatcgcgctgtcgccccacgacgcggcccgctgcctggtgcgcaacgacgtggactacctgcccatcgacgccatctccggccgcatcgcgaccacgcccttcgtggtctatccgccgggcatcgccaccatcgtgccgggcgagcggctgaccgagcgggccaagcccatgatcgactatctcaagatgttcgaagcgagcttcaacaccttccccggcttcgacgtggagatccagggcctgtatcgcgagacggatgcatccggccgcgtgcggctccatacttacgtcgtcgcggaatag

SEQ ID NO: 4321 - protein, 785 aa, Xanthobacter autotrophicus Py2
MDYFKRFNFLFATPVFDAEDLEGARYNQIVAEIERSGFEVVKARNLEDAEIAVQTDAAIGCMLVDWGKKGLEGKTAALINLMRRRGLDFPILLLIRRKRFEDVPVEVLDFIDGYVFLSEETPAFIAKNLISRLKQYAETLKTPFFGALVDYAEEGNQLWTCPGHNGGVFYSRSPIGRVFMEHLGEAVFRDDLDNSVLDLGDLLTHEGPALAAQKEAAKIFGAEKTYFVLNGTSTSNKVALSALVTDGDLVLFDRNNHKAAHHGALMISGGIPVYVPTVRNAHGLIGPMDFAALDETALRERIRTHPLVKDPDAWQKPRPFRVAVVEQCTYDGTIHNAEMILKAIGHLTDYILFDEAWAGFMKFHPLYAGRFAMGLADLGPDAPGIIATQSTHKQLASFSQASQIHMKDRHITGQKRRVEHRRFNESFMQHASTSPFYPLFASLDVGAQMMKGRSGEVLWDDTIRLGIELRKKIRAVRREFEEKELRPERRWFFEPFVPDRVAIPDVSSPGAVHEVPWESVATDLLATNPAFWHLTPGASWHGFEGMAAGFAMTDPNKLTLLTPGFDRATGAYAEHGIPAPVVAQYLRENRIVAEKNDLNSLLFLLTPGVEASKAGTLISGLVAFKKLHDENALLEEAIPEFFRRRPARYGGVRLRDLCGEMHRFFRAANVSALQAMQFSAAHLPDIALSPHDAARCLVRNDVDYLPIDAISGRIATTPFVVYPPGIATIVPGERLTERAKPMIDYLKMFEASFNTFPGFDVEIQGLYRETDASGRVRLHTYVVAE

SEQ ID NO: 4322 - DNA, 2181 bp, Vibrio harveyi
  CDS (1)..(2181): transl_table=11
atgaaacgtttaattatcggtgttagtaattacatgccagaagacttcagtttattatctgaatctttggatgagcaatttaaccgaactttaaaaccacttgagcacgtcgaattaactgacgttggcgctgcaattattacttctgcagatattaaggctggtctacacaaaattatttctgaaacgggttatggcattccggttttcttggtcacagatgaaaacccagtttcagcagaagattacgtatggttaaccggcgttatcgatttggaaagacagtcaattgaatactacggtcgccaaatcaatgaggctgtcaccaaatacgaatgtcgcctacttccacctttcttcaaacaattgactcactacgtggaaatgggcaactctgcattcgactgtccaggacaccaaggcggccagttcttcaaaaaacacccagcaggtaaacagttctacgatttcttcggtgaaaacctattccgtagtgacttgtgtaacgcggacgttgatttaggtgacttgctgatccacgaaggttctgctcaccaagctcaagcacacgcagcaaaagtgttcaactcagacaaaacctacttcgtacttaacggcacttcggcttcaaacaaagtggtttgtaacgcgttagtgaccgaaggtgacttggtgatgtttgaccgtaacaaccacaaatcaaaccaccacggtgcattgatccaagcgggcggtatgccggtttacctagaaacggcacgtaacccttggggttttatcggtggtatggatgagcactgttttgatgaagaatacatccgtgctcaaattgcgaaagtgtcaccagagcgtgctcgtgatgaacgtccattccgtcttgcgatcatccaattaggtacttacgacggtaccatctacaacgcacgttacgtgatggataagattggtcatctatgtgactacatcctattcgactcggcatgggtgggctacgagcagttcattcctatgatgaaagactgttctccactgctactggatctgaaaccagaagatgcgggtgtgattgtgactcagtctgttcacaagcaacaagcaggcttctctcaaacctcgcaaatccacaaaaaagaccaccatatcaaaggtcaagctcgctactgtaaccacaaacgcttcaacaacgcgtttatgatgcacgcgtcaacttcaccattctacgcgctgttctcagcattggatgtgaacgcgaagattcacgacggtgaagcgggtctgcgcctatggcgtgatgcggttaagacgggtatcgaagcacgtaaagaaatcctgaaaagctgtgagttgattcgtccgttcattcctgaccaagttgatggtcaaccatggggcagttacgacaccgatcttatcgcaactaataagaagttcttcatgttcgagccagacgcaagctggcataaatttgaaggctacggcgaaggtcagtacttcgttgacccatgtaaattgctactcactacagcaggtattgctgaagatggtagctacgcagactttggtattcctgcaacgttattggctaacttcctacgtgagaacggcatcatccctgagaagtgtgacttgaactctatcttgttccttctcactccagcagaggacatgggtaagatccgtcatcttgtggcgcaaattaaccgtttcgagaaattcattcgtgatgatgcgccgctaaacatcgtgcttcctcgcgtttacgaagcgaacaaagaacgctaccgcggttacaccatccgtcagctatgtcaggaaatgcatgacatgtacaaagagctgaacgtgaaacagctacaaaaagcgatgttccgtagcgaatacttcccaactatggtgcacaaaccagatgtggcaacacgcaaatacttccgcggcgagtgtgattacttgcctctgaaagaagcggtaggtcgtgtcgcagcagaaggtgcgcttccttaccctccaggcattatctgtgtgatcacgggcgaaatctggactcaacaagtggtcgattacttcttatctctagaagaaggcatcaaccgattcccaggcttcgcaccagagattcaaggtgtgtacctagaagacgtcaatggtcgcaccaccgcccattgctacgcccttaaagattaa

SEQ ID NO: 4323 - protein, 726 aa, Vibrio harveyi
MKRLIIGVSNYMPEDFSLLSESLDEQFNRTLKPLEHVELTDVGAAIITSADIKAGLHKIISETGYGIPVFLVTDENPVSAEDYVWLTGVIDLERQSIEYYGRQINEAVTKYECRLLPPFFKQLTHYVEMGNSAFDCPGHQGGQFFKKHPAGKQFYDFFGENLFRSDLCNADVDLGDLLIHEGSAHQAQAHAAKVFNSDKTYFVLNGTSASNKVVCNALVTEGDLVMFDRNNHKSNHHGALIQAGGMPVYLETARNPWGFIGGMDEHCFDEEYIRAQIAKVSPERARDERPFRLAIIQLGTYDGTIYNARYVMDKIGHLCDYILFDSAWVGYEQFIPMMKDCSPLLLDLKPEDAGVIVTQSVHKQQAGFSQTSQIHKKDHHIKGQARYCNHKRFNNAFMMHASTSPFYALFSALDVNAKIHDGEAGLRLWRDAVKTGIEARKEILKSCELIRPFIPDQVDGQPWGSYDTDLIATNKKFFMFEPDASWHKFEGYGEGQYFVDPCKLLLTTAGIAEDGSYADFGIPATLLANFLRENGIIPEKCDLNSILFLLTPAEDMGKIRHLVAQINRFEKFIRDDAPLNIVLPRVYEANKERYRGYTIRQLCQEMHDMYKELNVKQLQKAMFRSEYFPTMVHKPDVATRKYFRGECDYLPLKEAVGRVAAEGALPYPPGIICVITGEIWTQQVVDYFLSLEEGINRFPGFAPEIQGVYLEDVNGRTTAHCYALKD

SEQ ID NO: 4324 - DNA, 2145 bp, Erwinia amylovora
  CDS (1)..(2145): transl_table=11
atgactcctttaaaaattgcagccagtactaccgtggctattcaccttcgcaccgggcgtgaagttgttacgctggataacactgattttaccgacgtggcggcagtggtgctttccgtcagtgactctcgatccggcatgttggcgctgttgcgccataccggttttaagctgccggtatttattgcgttggacgatatctcgcaggcggtggacttaccgcaggttgatggcgtgctggacggtgatgctaatgatgctgcgctgctggaatccgcggctgcggagtaccagtcaaagctgctgccaccgttttttcagacgctgactaaatatgtcgcgatggagaacagcacgtttgcctgcccgggccaccagggcggtgcctttttcaaaaagcatccggcgggacgccagtttttcgacttcttcggtgaaaatgtttttcgtgccgatatgtgcaacgccgatgtgaaactgggtgatttactgatccacgaaggttcggctaaacatgcgcagaagtttgccgcacgggtatttaatgccgataagacctactttgtgctgaacgggacttccagcgctaacaaagtggtgaccaatgcgctgctgacgcgtggcgatctggtattgtttgaccgcaacaaccacaaatccaaccatcatggtgcgctaatccaggcgggagccacacctgtttatcttgaaaccgcacgcaatccgttcggttttatcggtggtatcgatgcgcactgctttgatgaaacctggatccgtcagcaaattgcccgggtagcagcggatcgtgccgatgatgcacgcccgttccgcctggcggtgatccagcttggcacctatgacggtacggtatataacgcacgtaaggtgatcgacagcattggccacctgtgcgactacattctgtttgactcggcatgggtcggttatgagcagtttattccggtgatggaagcctgttccccgttgctgctcgacctgcaacccgccgatcccggtattttcgtcacgcaatcggtgcacaagcagcaggccgggttctcacagacctctcagatccataaaaaagataatcatatacgcgggcagcgacgtttttgcagccataagcgcctgaataacgcctttatgctgcatgcctctaccagccctttctatccgctgtttgccgcgctggatattaacgccaaaatacatcagggtgaggctggccggcgcttgtggcatgaatgtgtgatgctgggtattgatacgcgtaaagccattcttgagcactgcgcaatgattaagccgtttatacctgacgaagttgacgggcagccttggcaaaacgcgcctggcgcgataatcgccagcgatgcgcgctattttagctttgccccaggcgcgcagtggcatggttttgctggctatgaaaaggatcagtacatggtcgatccctgtaagctgctgctaaccacgccgggcattaacgccgccagcggtgaatacgcgtcgtttggtattccggccactattctggccaactatctgcgcgagaatggcgtggtaccggagaagtgcgatctgaactccattctgttcctgctaaccccggcggagagcgcagagaagatggcccggctggtggcgaagctggcgcagtttgagcagcacatcaaagaggatgcgttgctacgcgatgtgctgccgaccatctatcgtaaaaatgcggcgcgttatgaaggttacaccttgcgccgtctgtgccaggagatgcacgacctgtatgtcagccacaaggtaaaagacctgcaaaaggcgatgttccgccaacaaagtctgccccaaattgccatgaacccgcaggacgccaatatcgaatttatccgcggcaacgtcgaactggtacccatttcacaggctgcggggcgtgttgcggcagaaggcgcactgccttatccaccgggcgtgctgtgtgtggtacctggcgagatatggggcggggcggttcagcgttactttttggcgttggaagaggggctaaatctgctgccgggcttctcaccggagttgcagggcgtctatgcggtagccgatgaaaagggcattaagcacctgcagggttatgtgatcgttgaatag

SEQ ID NO: 4325 - protein, 714 aa, Erwinia amylovora
MTPLKIAASTTVAIHLRTGREVVTLDNTDFTDVAAVVLSVSDSRSGMLALLRHTGFKLPVFIALDDISQAVDLPQVDGVLDGDANDAALLESAAAEYQSKLLPPFFQTLTKYVAMENSTFACPGHQGGAFFKKHPAGRQFFDFFGENVFRADMCNADVKLGDLLIHEGSAKHAQKFAARVFNADKTYFVLNGTSSANKVVTNALLTRGDLVLFDRNNHKSNHHGALIQAGATPVYLETARNPFGFIGGIDAHCFDETWIRQQIARVAADRADDARPFRLAVIQLGTYDGTVYNARKVIDSIGHLCDYILFDSAWVGYEQFIPVMEACSPLLLDLQPADPGIFVTQSVHKQQAGFSQTSQIHKKDNHIRGQRRFCSHKRLNNAFMLHASTSPFYPLFAALDINAKIHQGEAGRRLWHECVMLGIDTRKAILEHCAMIKPFIPDEVDGQPWQNAPGAIIASDARYFSFAPGAQWHGFAGYEKDQYMVDPCKLLLTTPGINAASGEYASFGIPATILANYLRENGVVPEKCDLNSILFLLTPAESAEKMARLVAKLAQFEQHIKEDALLRDVLPTIYRKNAARYEGYTLRRLCQEMHDLYVSHKVKDLQKAMFRQQSLPQIAMNPQDANIEFIRGNVELVPISQAAGRVAAEGALPYPPGVLCVVPGEIWGGAVQRYFLALEEGLNLLPGFSPELQGVYAVADEKGIKHLQGYVIVE

SEQ ID NO: 4326 - DNA, 2238 bp, Oenococcus oeni
  CDS (1)..(2238): transl_table=11
atggatagcgaaataaatgatgattcagttcaccaaaccaacttaccgcataagttttcaacggatgagttaaagattgcttctacagcgcatgccacagcgtattttgatacgaatcgtacagttgttgatgctgacaattctgactttgtggatgttgcggctgttgtcgtaatggatgatgaaaaagccatcattaataaggctgatgaaacaaagttcaatattccaatctttatcattacagacgacagttcaaaagtcgacggggagacaatgtcaaagatttttcacatcattgattggcataataattatgatcgccgattatatgatagagaaattgaagcagcagctaaaaaatatgaagatggtgttttacctccattctttaaagctttaaaagcttatgttgaacgagggaacattcaatttgattgtcctggacaccaaggtggacaatatttccgtaagtcaccagcgggacgagaattttataacttttatggggaaaatatttttcgatctgacatttgtaatgccgatgttgatttaggcgatcttttaattcatgaaggaccagcaatggatgctgaaaaacatgcagcacgagtgttcaatgctgacaaaacatattttgttatgaatggaaccacaacttctaataacattgccattacggccgctgttgcaccaggtgatttggtattatttgatcgtaataatcataagtcagtatacaatgcagctttggtacaagcaggtggcagaccagtttatttagagacatctcgtgattcctacggatttattggtggcatctactctaaagattttgatgaaaagtctattcgtgaaaagattgcaaaagttgaccctgaaaaagctaaggctaagagaccattcagattggctgttattcaattaggaacttatgatggcacaatttataatgccaaacaagttgttgaacggataggtcatttatgcgattacattctttttgattcagcttgggttggatatgaacaatttattcctatgatgaaagattcttcgccattattactaaacttggggcccgatgatcctggaattcttgttacgcagtctacacataaacaacaagctggattttcacaagcttcccagattcataaaaaagattcacacattaaagggcagaaacgctacatcaaccacaaacagtttaacaacgcatatatgaagttttcttcaacttcaccattttacccactatttgcaactctagatattaatgcaaagatgcaggagggtgaagctggtaaaaagctatggcatgatgcactggtcacttctgtaaatgctcgtaagaatttattaaaaaatgccacgatgattaaaccatttcttccacctgttgttcatggtaaaccttggcaggatgcggatacggaaaagattgttagcgacattgattattggaaatttgaaaaaggtgctaaatggcatggatttgatggatatgctgacaatcagtattttgttgatccaaataagtttatgttaacaacccctgggattgatgttgaaactggtgaatatgaagattttggtattccagcagttattttagcaaattatttgcgtgaacatggtattattccagaaaaaaatgatttgaattcaattttattcttaatgacacctgcagaaactcaagcaaaaatggataatttggttacacaaattgttaaatttgaatcattagtaaaagctgatgctccgttagatgaagtcctaccacgtctatattcagaacaccaggatagatatgaaggatataccattaagcaactttgccaagaggttcatgacttttataagaacaataatactaaagaatatcagaaggagatgttcttgggtaagtatttcccagaacaagcaatgacaccatatcaagctaatgttgagttgcttaaaaacaatgctaagttagttccgttaactgatattgaaggcttggcagctcttgaaggtgcacttccatatcctccaggaattttctgcatcgtaccaggtgaaaaatggacgaaggttgctcaaaaatactttttaattcttgaagaaagcattaatcgattccctggatttgctccagaaattcaaggggtttacttcgaaaaagaaaacggaaagtcagttgcgtatggttatgtttacgacaagtcaaaagatgaagaaaaaagatga

SEQ ID NO: 4327 - protein, 745 aa, Oenococcus oeni
MDSEINDDSVHQTNLPHKFSTDELKIASTAHATAYFDTNRTVVDADNSDFVDVAAVVVMDDEKAIINKADETKFNIPIFIITDDSSKVDGETMSKIFHIIDWHNNYDRRLYDREIEAAAKKYEDGVLPPFFKALKAYVERGNIQFDCPGHQGGQYFRKSPAGREFYNFYGENIFRSDICNADVDLGDLLIHEGPAMDAEKHAARVFNADKTYFVMNGTTTSNNIAITAAVAPGDLVLFDRNNHKSVYNAALVQAGGRPVYLETSRDSYGFIGGIYSKDFDEKSIREKIAKVDPEKAKAKRPFRLAVIQLGTYDGTIYNAKQVVERIGHLCDYILFDSAWVGYEQFIPMMKDSSPLLLNLGPDDPGILVTQSTHKQQAGFSQASQIHKKDSHIKGQKRYINHKQFNNAYMKFSSTSPFYPLFATLDINAKMQEGEAGKKLWHDALVTSVNARKNLLKNATMIKPFLPPVVHGKPWQDADTEKIVSDIDYWKFEKGAKWHGFDGYADNQYFVDPNKFMLTTPGIDVETGEYEDFGIPAVILANYLREHGIIPEKNDLNSILFLMTPAETQAKMDNLVTQIVKFESLVKADAPLDEVLPRLYSEHQDRYEGYTIKQLCQEVHDFYKNNNTKEYQKEMFLGKYFPEQAMTPYQANVELLKNNAKLVPLTDIEGLAALEGALPYPPGIFCIVPGEKWTKVAQKYFLILEESINRFPGFAPEIQGVYFEKENGKSVAYGYVYDKSKDEEKR

SEQ ID NO: 4328 - DNA, 2163 bp, Haemophilus influenzae
  CDS (1)..(2163): transl_table=11
atgccaaatttaaaaattgcatatagtccaaaagttgaacaatatttctctacaaatagagaattagttgagattgctaaaacagactttacagatgttgcagctatcgtattaagttcaagtgatgtaggtgaatacctcgatagaattaaagcaacgaaatttgatgttccagtgtttattgttcaaaccgacgaacaacaggtggatccaaaattctatgattctatttaccatatccaagatttaaacggttatgacatcaaactttatagccgccaaatcgaaactgcagcaaaactttatgaagaaaaaatgttaccgccattcttcaaaatgttaagtgaatatgtggaaatgggtaatatcgctttcgactgtccgggacatcaaggtggtcaatactatcgtaaacatccagctggtcgtttcctttatgacttctacggtgaaaacattttccgttcggacatttgtaatgcggacgtgaaattaggtgacttgttaattcacgaaggggcagcttgtgatgcacaaaaatatgcggctcaagtattcaatgcagataaaacttacttcgtattgaatggtacatcttcttcaaacaaagttgcgttaaatgctgtacttgctcctggcgatttagtgttatttgatcgtaataaccataaatcaaaccaccatggtgcattaattcaagcgggtgctaccccaatttacttagaaactgcacgtaacccatttggtttcattggtggtattgatagtcactgcttcgaagaagattatctgaaatcattaattaaagaagttgcacctgaaaaattaaaccaaaaacgtccattccgtttggcagtgattcaattaggtacttatgacggtacaatttataacgcacgccaagtagtggataaaataggtcacctttgtgattacatcttattcgactctgcatgggtaggttatgaacaattcattccaatgatgaaagactgctcgccattattgcttgaattaaatgaaaatgacccaggtattttagtgacacaatctgttcataaacaacaagcaggtttctcacaaacttcacaaattcacaaaaaagataaacacattaaaggtcaagatcgttatgtaaatcacaaacgtttcaataatgcctttatgttacatgcgtcaactagtccgttctatccgttatttgctacgttagatgtgaatgcgaaaattcaaggtagtgaagctggtcgtcgattatggcatgaatgtgtgaaagtaggtatcgaagcgcgtaaattagtgttaaaccactgtgaattaattcgtccatttattccaaccacaattaaaggtaaaaaatggcaagattatgacacagaggaaatcgcaactaatctcgagttcttcaaattccacccaacagatacatggcataaatttgaaggttatgctgatgaacaatacttcgttgatccatgtaaattcttgcttaccacaccgggtattagcttagaaacaggtgaatatgaagaatttggtgtaccagcaaccattcttgctaactacttacgtgaaaacggtattattccggaaaaatgtgacttgaactcaatcttattcttgctcactccagcagaaaccatcaccaaaatgcaaactttagttgctcaaatcgccttgtttgaaaaacacattaaacaagactctttattaaaatatgtcttaccaactgtgtataaaaacaatgaagatcgttacaaaggttacaccattcgtcaattatgccaagaaatgcatgatctttatgtaagccgaaatgtaaaacaacttcaaaaagatttgttccgcaaagcgacattaccagaatatgtattaaatccacatgatgcaaatattgagttaatacgtaacaaagttgaactcgttccgttgactgatattgttggtcgtgtggctgcggaaggtgcgttaccttaccctccaggtgtgttatgtgtagtgccaggagaaaaatggagcactacagcacaccaatatttccttgcgttagaagaagggatcaacacattacctggtttcgcacctgaaatccaaggggtttacttacaaaaagaccctgatggacgtactcgtgcatatggctatgttttaactgactattaa

SEQ ID NO: 4329 - protein, 720 aa, Haemophilus influenzae
MPNLKIAYSPKVEQYFSTNRELVEIAKTDFTDVAAIVLSSSDVGEYLDRIKATKFDVPVFIVQTDEQQVDPKFYDSIYHIQDLNGYDIKLYSRQIETAAKLYEEKMLPPFFKMLSEYVEMGNIAFDCPGHQGGQYYRKHPAGRFLYDFYGENIFRSDICNADVKLGDLLIHEGAACDAQKYAAQVFNADKTYFVLNGTSSSNKVALNAVLAPGDLVLFDRNNHKSNHHGALIQAGATPIYLETARNPFGFIGGIDSHCFEEDYLKSLIKEVAPEKLNQKRPFRLAVIQLGTYDGTIYNARQVVDKIGHLCDYILFDSAWVGYEQFIPMMKDCSPLLLELNENDPGILVTQSVHKQQAGFSQTSQIHKKDKHIKGQDRYVNHKRFNNAFMLHASTSPFYPLFATLDVNAKIQGSEAGRRLWHECVKVGIEARKLVLNHCELIRPFIPTTIKGKKWQDYDTEEIATNLEFFKFHPTDTWHKFEGYADEQYFVDPCKFLLTTPGISLETGEYEEFGVPATILANYLRENGIIPEKCDLNSILFLLTPAETITKMQTLVAQIALFEKHIKQDSLLKYVLPTVYKNNEDRYKGYTIRQLCQEMHDLYVSRNVKQLQKDLFRKATLPEYVLNPHDANIELIRNKVELVPLTDIVGRVAAEGALPYPPGVLCVVPGEKWSTTAHQYFLALEEGINTLPGFAPEIQGVYLQKDPDGRTRAYGYVLTDY

SEQ ID NO: 4330 - DNA, 2199 bp, Escherichia coli
  CDS (1)..(2199): transl_table=11
atgtcaaaattaaaaattgcggttagtgattcttgcccggactgttttaccacgcagcgagaatgtatctacattaatgaaagtcgtaatatcgatgtggcggcaatagttttatcgctcaacgatgttacatgcggaaaactcgatgaaatcgatgccacgggttatggcatcccggtatttattgctactgaaaatcaagaacgtgtacccgcagagtatttgccccgtatttcgggtgtctttgagaattgcgaatcgcgacgagaattttatggtcgccagttagaaaccgctgccagccattatgaaactcaactgcgcccacctttcttccgcgcactggtcgattatgtcaatcaaggtaacagcgcgtttgattgccctggtcatcagggcggcgaatttttccgtcgccatccggcggggaatcagtttgtggaatactttggtgaggcgctgttccgtgccgacttgtgcaacgccgacgtagcgatgggcgatctgctgattcacgaaggcgcgccatgcattgcacagcaacatgcggcaaaagtgtttaatgccgataaaacctacttcgttttaaatggcacttcatcttctaacaaagtggttttaaacgccctgctaacaccgggtgatctggtgctgtttgatcgcaataaccacaaatctaaccaccacggagcgttgctacaggctggtgcaacaccggtttatctggaaacggcacgtaacccgtatggctttatcggtggcattgatgcgcactgttttgaagaaagttacctgcgtgagctgatcgcggaagtcgcaccgcagcgggcaaaagaggctcgtcctttccgcctcgctgtgattcagttaggcacctacgacggtacgatttataacgcccgccaagtggtggataaaattggtcatctgtgtgactacatcctgtttgactcagcatgggtcggctatgaacagtttattccgatgatggcggactgttcgccgctgttgctggatcttaatgagaacgatccgggtattctggttacgcaatctgtgcataaacaacaggctggtttttctcagacttcacaaattcataaaaaagacagccacatcaaagggcaacagcgttatgtaccgcacaaacgcatgaacaacgcctttatgatgcacgcctccaccagcccgttctatccgctgtttgccgcactgaatatcaacgccaaaatgcatgaaggtgtcagcggtcgtaatatgtggatggattgtgtggtaaatggcattaatgcccgcaaactgatcctcgataactgtcagcatattcgtccgttcgtacctgaactggtggatggtaaaccctggcagtcgtatgaaacagcgcaaattgcggttgatctgcgcttcttccagtttgtaccaggggaacactggcattcttttgaaggctatgcagagaatcaatactttgtcgatccatgcaaactgttgctgacaaccccaggtattgatgcacgtaacggcgaatatgaagcgttcggtgtacccgcgacgattcttgctaacttcctgcgcgaaaatggcgtagtgccggaaaaatgcgatcttaactccatcctcttcctgctgactccggcagaagatatggccaaacttcagcaacttgttgccctgctggtacgcttcgaaaaactgcttgagtccgacgcgccattagcagaagtgctaccttccatctacaaacagcatgaagagcgctacgccggttataccctgcgtcagttgtgtcaggaaatgcatgatttgtatgcccgccacaacgtgaaacaactgcaaaaagagatgttccgtaaggagcacttcccacgcgtcagcatgaatccgcaagaagccaactacgcctatttacgcggtgaagtggaactggttcgtctgccggatgcagaaggccgtatcgctgccgaaggtgcgcttccttatcctccgggtgtgctgtgtgttgttccgggtgaaatctggggtggtgctgttctgcgttacttcagcgctctggaagaagggatcaacctgctgccaggttttgcaccggagctgcagggtgtctatatcgaagaacatgatggtcgtaagcaagtttggtgctatgtcatcaagcctcgtgatgcgcaaagcaccctgttgaaaggggaaaaattatga

SEQ ID NO: 4331 - protein, 732 aa, Escherichia coli
MSKLKIAVSDSCPDCFTTQRECIYINESRNIDVAAIVLSLNDVTCGKLDEIDATGYGIPVFIATENQERVPAEYLPRISGVFENCESRREFYGRQLETAASHYETQLRPPFFRALVDYVNQGNSAFDCPGHQGGEFFRRHPAGNQFVEYFGEALFRADLCNADVAMGDLLIHEGAPCIAQQHAAKVFNADKTYFVLNGTSSSNKVVLNALLTPGDLVLFDRNNHKSNHHGALLQAGATPVYLETARNPYGFIGGIDAHCFEESYLRELIAEVAPQRAKEARPFRLAVIQLGTYDGTIYNARQVVDKIGHLCDYILFDSAWVGYEQFIPMMADCSPLLLDLNENDPGILVTQSVHKQQAGFSQTSQIHKKDSHIKGQQRYVPHKRMNNAFMMHASTSPFYPLFAALNINAKMHEGVSGRNMWMDCVVNGINARKLILDNCQHIRPFVPELVDGKPWQSYETAQIAVDLRFFQFVPGEHWHSFEGYAENQYFVDPCKLLLTTPGIDARNGEYEAFGVPATILANFLRENGVVPEKCDLNSILFLLTPAEDMAKLQQLVALLVRFEKLLESDAPLAEVLPSIYKQHEERYAGYTLRQLCQEMHDLYARHNVKQLQKEMFRKEHFPRVSMNPQEANYAYLRGEVELVRLPDAEGRIAAEGALPYPPGVLCVVPGEIWGGAVLRYFSALEEGINLLPGFAPELQGVYIEEHDGRKQVWCYVIKPRDAQSTLLKGEKL

SEQ ID NO: 4332 - DNA, 20 bp, Artificial sequence
  primer
atggggcagggttttccacc

SEQ ID NO: 4333 - DNA, 25 bp, Artificial sequence
  primer
ttacttcaacacataaccgtacaac

SEQ ID NO: 4334 - protein, 735 aa, Artificial sequence
  consensus sequence
  Variant (2)..(12): Xaa in position 2 to 12 is any amino acid
  Variant (15)..(15): Xaa in position 15 is any amino acid
  Variant (17)..(20): Xaa in position 17 to 20 is any amino acid
  Variant (21)..(22): Xaa in position 21 to 22 is any or no amino acid
  Variant (24)..(33): Xaa in position 24 to 33 is any amino acid
  Variant (34)..(37): Xaa in position 34 to 37 is any or no amino acid
  Variant (39)..(41): Xaa in position 39 to 41 is any amino acid
  Variant (43)..(43): Xaa in position 43 is any amino acid
  Variant (45)..(61): Xaa in position 45 to 61 is any amino acid
  Variant (62)..(84): Xaa in position 62 to 84 is any or no amino acid
  Variant (86)..(88): Xaa in position 86 to 88 is any amino acid
  Variant (90)..(94): Xaa in position 90 to 94 is any amino acid
  Variant (99)..(100): Xaa in position 99 to 100 is any amino acid
  Variant (102)..(103): Xaa in position 102 to 103 is any amino acid
  Variant (106)..(107): Xaa in position 106 to 107 is any amino acid
  Variant (110)..(111): Xaa in position 110 to 111 is any amino acid
  Variant (113)..(113): Xaa in position 113 is any amino acid
  Variant (121)..(125): Xaa in position 121 to 125 is any amino acid
  Variant (128)..(128): Xaa in position 128 is any amino acid
  Variant (130)..(131): Xaa in position 130 to 131 is any amino acid
  Variant (133)..(136): Xaa in position 133 to 136 is any amino acid
  Variant (139)..(140): Xaa in position 139 to 140 is any amino acid
  Variant (143)..(143): Xaa in position 143 is any amino acid
  Variant (145)..(145): Xaa in position 145 is any amino acid
  Variant (151)..(151): Xaa in position 151 is any amino acid
  Variant (161)..(164): Xaa in position 161 to 164 is any amino acid
  Variant (167)..(168): Xaa in position 167 to 168 is any amino acid
  Variant (171)..(171): Xaa in position 171 is any amino acid
  Variant (174)..(174): Xaa in position 174 is any amino acid
  Variant (187)..(188): Xaa in position 187 to 188 is any amino acid
  Variant (192)..(194): Xaa in position 192 to 194 is any amino acid
  Variant (197)..(199): Xaa in position 197 to 199 is any amino acid
  Variant (213)..(213): Xaa in position 213 is any amino acid
  Variant (219)..(219): Xaa in position 219 is any amino acid
  Variant (223)..(224): Xaa in position 223 to 224 is any amino acid
  Variant (231)..(231): Xaa in position 231 is any amino acid
  Variant (234)..(235): Xaa in position 234 to 235 is any amino acid
  Variant (241)..(241): Xaa in position 241 is any amino acid
  Variant (243)..(245): Xaa in position 243 to 245 is any amino acid
  Variant (247)..(247): Xaa in position 247 is any amino acid
  Variant (249)..(251): Xaa in position 249 to 251 is any amino acid
  Variant (253)..(254): Xaa in position 253 to 254 is any amino acid
  Variant (256)..(257): Xaa in position 256 to 257 is any amino acid
  Variant (258)..(261): Xaa in position 258 to 261 is any or no amino acid
  Variant (263)..(263): Xaa in position 263 is any amino acid
  Variant (265)..(270): Xaa in position 265 to 270 is any amino acid
  Variant (277)..(277): Xaa in position 277 is any amino acid
  Variant (291)..(292): Xaa in position 291 to 292 is any amino acid
  Variant (294)..(296): Xaa in position 294 to 296 is any amino acid
  Variant (321)..(323): Xaa in position 321 to 323 is any amino acid
  Variant (327)..(327): Xaa in position 327 is any amino acid
  Variant (329)..(329): Xaa in position 329 is any amino acid
  Variant (330)..(330): Xaa in position 330 is any or no amino acid
  Variant (332)..(334): Xaa in position 332 to 334 is any amino acid
  Variant (339)..(339): Xaa in position 339 is any amino acid
  Variant (354)..(354): Xaa in position 354 is any amino acid
  Variant (362)..(362): Xaa in position 362 is any amino acid
  Variant (365)..(365): Xaa in position 365 is any amino acid
  Variant (368)..(368): Xaa in position 368 is any amino acid
  Variant (370)..(372): Xaa in position 370 to 372 is any amino acid
  Variant (376)..(376): Xaa in position 376 is any amino acid
  Variant (382)..(382): Xaa in position 382 is any amino acid
  Variant (395)..(395): Xaa in position 395 is any amino acid
  Variant (401)..(404): Xaa in position 401 to 404 is any amino acid
  Variant (406)..(407): Xaa in position 406 to 407 is any amino acid
  Variant (409)..(411): Xaa in position 409 to 411 is any amino acid
  Variant (413)..(418): Xaa in position 413 to 418 is any amino acid
  Variant (421)..(422): Xaa in position 421 to 422 is any amino acid
  Variant (425)..(434): Xaa in position 425 to 434 is any amino acid
  Variant (435)..(447): Xaa in position 435 to 447 is any or no amino acid
  Variant (450)..(450): Xaa in position 450 is any amino acid
  Variant (452)..(453): Xaa in position 452 to 453 is any amino acid
  Variant (454)..(455): Xaa in position 454 to 455 is any or no amino acid
  Variant (457)..(458): Xaa in position 457 to 458 is any amino acid
  Variant (459)..(469): Xaa in position 459 to 469 is any or no amino acid
  Variant (471)..(474): Xaa in position 471 to 474 is any amino acid
  Variant (476)..(478): Xaa in position 476 to 478 is any amino acid
  Variant (480)..(483): Xaa in position 480 to 483 is any amino acid
  Variant (485)..(486): Xaa in position 485 to 486 is any amino acid
  Variant (488)..(488): Xaa in position 488 is any amino acid
  Variant (490)..(492): Xaa in position 490 to 492 is any amino acid
  Variant (495)..(495): Xaa in position 495 is any amino acid
  Variant (497)..(497): Xaa in position 497 is any amino acid
  Variant (500)..(502): Xaa in position 500 to 502 is any amino acid
  Variant (505)..(505): Xaa in position 505 is any amino acid
  Variant (509)..(509): Xaa in position 509 is any amino acid
  Variant (511)..(512): Xaa in position 511 to 512 is any amino acid
  Variant (519)..(521): Xaa in position 519 to 521 is any amino acid
  Variant (522)..(522): Xaa in position 522 is any or no amino acid
  Variant (524)..(524): Xaa in position 524 is any amino acid
  Variant (526)..(527): Xaa in position 526 to 527 is any amino acid
  Variant (530)..(530): Xaa in position 530 is any amino acid
  Variant (533)..(534): Xaa in position 533 to 534 is any amino acid
  Variant (537)..(538): Xaa in position 537 to 538 is any amino acid
  Variant (543)..(543): Xaa in position 543 is any amino acid
  Variant (545)..(545): Xaa in position 545 is any amino acid
  Variant (549)..(549): Xaa in position 549 is any amino acid
  Variant (563)..(565): Xaa in position 563 to 565 is any amino acid
  Variant (567)..(569): Xaa in position 567 to 569 is any amino acid
  Variant (571)..(576): Xaa in position 571 to 576 is any amino acid
  Variant (579)..(583): Xaa in position 579 to 583 is any amino acid
  Variant (585)..(586): Xaa in position 585 to 586 is any amino acid
  Variant (588)..(589): Xaa in position 588 to 589 is any amino acid
  Variant (593)..(594): Xaa in position 593 to 594 is any amino acid
  Variant (596)..(600): Xaa in position 596 to 600 is any amino acid
  Variant (603)..(604): Xaa in position 603 to 604 is any amino acid
  Variant (607)..(607): Xaa in position 607 is any amino acid
  Variant (609)..(609): Xaa in position 609 is any amino acid
  Variant (616)..(617): Xaa in position 616 to 617 is any amino acid
  Variant (619)..(622): Xaa in position 619 to 622 is any amino acid
  Variant (625)..(625): Xaa in position 625 is any amino acid
  Variant (628)..(630): Xaa in position 628 to 630 is any amino acid
  Variant (633)..(636): Xaa in position 633 to 636 is any amino acid
  Variant (638)..(642): Xaa in position 638 to 642 is any amino acid
  Variant (644)..(645): Xaa in position 644 to 645 is any amino acid
  Variant (647)..(651): Xaa in position 647 to 651 is any amino acid
  Variant (653)..(664): Xaa in position 653 to 664 is any amino acid
  Variant (667)..(667): Xaa in position 667 is any amino acid
  Variant (679)..(680): Xaa in position 679 to 680 is any amino acid
  Variant (687)..(687): Xaa in position 687 is any amino acid
  Variant (689)..(694): Xaa in position 689 to 694 is any amino acid
  Variant (695)..(697): Xaa in position 695 to 697 is any or no amino acid
  Variant (700)..(701): Xaa in position 700 to 701 is any amino acid
  Variant (704)..(704): Xaa in position 704 is any amino acid
  Variant (706)..(706): Xaa in position 706 is any amino acid
  Variant (708)..(709): Xaa in position 708 to 709 is any amino acid
  Variant (713)..(713): Xaa in position 713 is any amino acid
  Variant (716)..(716): Xaa in position 716 is any amino acid
  Variant (721)..(725): Xaa in position 721 to 725 is any amino acid
  Variant (726)..(726): Xaa in position 726 is any or no amino acid
  Variant (728)..(733): Xaa in position 728 to 733 is any amino acid
RXXXXXXXXXXXDVXAXXXXXXDXXXXXXXXXXXXXXGXXXPXFXXXXXXXXXXXXXXXXXXXXXXXXXXXXXXXXXXXXXXXXAXXXYXXXXXPPFFXXLXXYVXXGNXXFXCPGHQGGXXXXXHPXGXXFXXXXGEXXFRXDXCNADVXLGDLLIHEGXXXXAQXXAAXVFXADKTYFVLNGTSXXNKVXXXALXXXGDLVLFDRNNHKSXHHGALXQAGXXPVYLETXRNXXGFIGGXDXXXFXEXXXRXXIXXXXXXVXPXXXXXXRPFRLAXIQLGTYDGTIYNAXXVXXXIGHLCDYILFDSAWVGYEQFIPMMXXXSPLXLXXLXXXDPGIXVTQSVHKQQAGFSQXSQIHKKDXHIXGQXRXXXHKRXNNAFMXHASTSPFYPLFAXLDVNAXXXXGXXGXXXWXXXXXXGIXXRKXXXXXXXXXXXXXXXXXXXXXXXPFXPXXXXGXXXXXXXXXXXXXWXXXXTXXXAXXXXFXXFXPXXXWHXFXGYXXXQYXVDPXKXXLTTPGIXXXXGXYXXFGXPAXXLAXXLRENXIXPEKXDLNSILFLLTPAEXXXKXXXLXXXXXXFEXXXXXDXXLXXVLPXXYXXXXXRYXXYTXRXLCQEMHXXYXXXXVKXLQXXXFRXXXXPXXXXXPXXAXXXXXRXXXXXXXXXXXXGRXAAEGALPYPPGXXCVVPGEXWXXXXXXXXXYFXXLEXGXNXXPGFXPEXQGVYXXXXXXGXXXXXXYV

SEQ ID NO: 4335 - protein, 61 aa, Artificial sequence
  protein pattern
  Variant (8)..(8): Xaa in position 8 is Gly or Gln
  Variant (14)..(14): Xaa in position 14 is Ala or Thr
  Variant (17)..(17): Xaa in position 17 is Ile or Val
  Variant (20)..(20): Xaa in position 20 is Lys or Arg
  Variant (22)..(22): Xaa in position 22 is any or no amino acid
  Variant (24)..(24): Xaa in position 24 is any or no amino acid
  Variant (26)..(26): Xaa in position 26 is Glu, Lys or Arg
  Variant (27)..(27): Xaa in position 27 is Asp or Gly
  Variant (29)..(29): Xaa in position 29 is any amino acid
  Variant (31)..(31): Xaa in position 31 is Phe, His or Tyr
  Variant (32)..(32): Xaa in position 32 is Cys or Val
  Variant (33)..(33): Xaa in position 33 is Asp, Glu, Asn, Pro or Ser
  Variant (35)..(35): Xaa in position 35 is Lys or Arg
  Variant (36)..(36): Xaa in position 36 is Gln or Arg
  Variant (37)..(37): Xaa in position 37 is Phe, Leu or Met
  Variant (39)..(39): Xaa in position 39 is Glu or Asn
  Variant (40)..(40): Xaa in position 40 is Ala or Ser
  Variant (41)..(41): Xaa in position 41 is any amino acid
  Variant (42)..(42): Xaa in position 42 is Leu or Met
  Variant (43)..(43): Xaa in position 43 is Ile, Leu or Met
  Variant (45)..(45): Xaa in position 45 is Ala or Val
  Variant (49)..(50): Xaa in position 49 to 50 is any amino acid
  Variant (52)..(52): Xaa in position 52 is Ala or Pro
  Variant (53)..(53): Xaa in position 53 is Leu or Met
  Variant (55)..(55): Xaa in position 55 is Ala or Ser
  Variant (56)..(56): Xaa in position 56 is Ala, Ser or Thr
  Variant (58)..(58): Xaa in position 58 is Asp or Asn
  Variant (59)..(59): Xaa in position 59 is Ile or Val
TQSVHKQXAGFSQXSQXHKXDXHXIXXQXRXXXHXXXNXXXXXHXSTSXXYXXFXXLXXNA

SEQ ID NO: 4336 - protein, 60 aa, Artificial sequence
  protein pattern
  Variant (2)..(3): Xaa in position 2 to 3 is any amino acid
  Variant (7)..(7): Xaa in position 7 is any or no amino acid
  Variant (9)..(9): Xaa in position 9 is any or no amino acid
  Variant (18)..(18): Xaa in position 18 is Ile or Val
  Variant (22)..(22): Xaa in position 22 is His, Lys or Arg
  Variant (23)..(23): Xaa in position 23 is any amino acid
  Variant (25)..(25): Xaa in position 25 is Ile, Met or Val
  Variant (26)..(26): Xaa in position 26 is Asp, Glu or Lys
  Variant (27)..(27): Xaa in position 27 is any amino acid
  Variant (28)..(28): Xaa in position 28 is Ile or Val
  Variant (36)..(36): Xaa in position 36 is any amino acid
  Variant (49)..(49): Xaa in position 49 is Asn or Pro
  Variant (50)..(50): Xaa in position 50 is Met or Val
  Variant (52)..(52): Xaa in position 52 is any amino acid
  Variant (53)..(53): Xaa in position 53 is Ala, Asp, Asn or Gln
  Variant (54)..(54): Xaa in position 54 is any amino acid
  Variant (58)..(58): Xaa in position 58 is any amino acid
  Variant (59)..(59): Xaa in position 59 is Ile or Leu
  Variant (60)..(60): Xaa in position 60 is Asp, Glu or Asn
RXXRLAXIXQLGTYDGTXYNAXXVXXXXGHLCDYIXFDSAWVGYEQFIXXMXXXSPLXXX

SEQ ID NO: 4337 - protein, 57 aa, Artificial sequence
  protein pattern
  Variant (11)..(11): Xaa in position 11 is Ala, Ser or Thr
  Variant (12)..(12): Xaa in position 12 is Ala or Ser
  Variant (16)..(16): Xaa in position 16 is Ala or Val
  Variant (17)..(17): Xaa in position 17 is any amino acid
  Variant (18)..(18): Xaa in position 18 is Gly, Asn or Ser
  Variant (21)..(21): Xaa in position 21 is Leu or Val
  Variant (22)..(22): Xaa in position 22 is Ala, Ser or Thr
  Variant (23)..(23): Xaa in position 23 is any amino acid
  Variant (24)..(24): Xaa in position 24 is Asp or Gly
  Variant (27)..(27): Xaa in position 27 is Ile or Val
  Variant (28)..(28): Xaa in position 28 is Leu or Met
  Variant (36)..(36): Xaa in position 36 is Ala or Ser
  Variant (37)..(37): Xaa in position 37 is any amino acid
  Variant (39)..(39): Xaa in position 39 is any amino acid
  Variant (43)..(43): Xaa in position 43 is Ile, Leu, Met or Val
  Variant (44)..(44): Xaa in position 44 is any amino acid
  Variant (45)..(45): Xaa in position 45 is Ala, Gly, Asn or Ser
  Variant (47)..(47): Xaa in position 47 is Ala or Gly
  Variant (48)..(48): Xaa in position 48 is any amino acid
  Variant (50)..(50): Xaa in position 50 is Ile or Val
  Variant (52)..(52): Xaa in position 52 is Ile, Leu or Val
  Variant (53)..(53): Xaa in position 53 is Glu or Pro
  Variant (54)..(54): Xaa in position 54 is Ala or Thr
  Variant (55)..(55): Xaa in position 55 is any amino acid
KTYFVLNGTSXXNKVXXXALXXXXDLXXFDRNNHKXXHXGALXXXGXXPXYXXXXRN

SEQ ID NO: 4338 - protein, 56 aa, Artificial sequence
  protein pattern
  Variant (2)..(3): Xaa in position 2 to 3 is any amino acid
  Variant (4)..(4): Xaa in position 4 is any or no amino acid
  Variant (6)..(6): Xaa in position 6 is Ala or Asp
  Variant (12)..(12): Xaa in position 12 is any or no amino acid
  Variant (14)..(19): Xaa in position 14 to 19 is any amino acid
  Variant (20)..(20): Xaa in position 20 is any or no amino acid
  Variant (22)..(22): Xaa in position 22 is Ala or Val
  Variant (24)..(25): Xaa in position 24 to 25 is any amino acid
  Variant (26)..(26): Xaa in position 26 is Phe or Leu
  Variant (27)..(27): Xaa in position 27 is any amino acid
  Variant (28)..(28): Xaa in position 28 is Asp, Glu or Asn
  Variant (29)..(30): Xaa in position 29 to 30 is Phe or Tyr
  Variant (33)..(33): Xaa in position 33 is any amino acid
  Variant (34)..(34): Xaa in position 34 is Ile, Leu or Val
  Variant (37)..(37): Xaa in position 37 is Ala or Ser
  Variant (39)..(39): Xaa in position 39 is Ile, Leu or Met
  Variant (45)..(45): Xaa in position 45 is any amino acid
  Variant (46)..(46): Xaa in position 46 is Leu or Met
  Variant (55)..(55): Xaa in position 55 is Ala, Pro or Ser
  Variant (56)..(56): Xaa in position 56 is Ala or Pro
NXXXFXCPGHQXGXXXXXXXPXGXXXXXXXGEXXFRXDXCNADVXXGDLLIHEGXX

SEQ ID NO: 4339 - protein, 40 aa, Artificial sequence
  protein pattern
  Variant (2)..(5): Xaa in position 2 to 5 is any amino acid
  Variant (8)..(8): Xaa in position 8 is Ile or Val
  Variant (11)..(11): Xaa in position 11 is Ala, Thr or Val
  Variant (12)..(12): Xaa in position 12 is Ile, Leu or Met
  Variant (13)..(13): Xaa in position 13 is Leu or Val
  Variant (15)..(15): Xaa in position 15 is any amino acid
  Variant (16)..(16): Xaa in position 16 is Phe or Tyr
  Variant (20)..(21): Xaa in position 20 to 21 is any amino acid
  Variant (22)..(23): Xaa in position 22 to 23 is Ile or Val
  Variant (27)..(27): Xaa in position 27 is Cys or Asn
  Variant (29)..(29): Xaa in position 29 is Leu or Met
  Variant (36)..(36): Xaa in position 36 is Leu or Met
GXXXXFGXPAXXXAXXLREXXXXPEKXDXNSILFLXTPAE

SEQ ID NO: 4340 - protein, 37 aa, Artificial sequence
  protein pattern
  Variant (3)..(3): Xaa in position 3 is any amino acid
  Variant (4)..(4): Xaa in position 4 is Asp or Gly
  Variant (7)..(7): Xaa in position 7 is Ile or Leu
  Variant (8)..(8): Xaa in position 8 is Lys or Arg
  Variant (9)..(9): Xaa in position 9 is Glu, Gln or Arg
  Variant (14)..(14): Xaa in position 14 is Leu, Met or Val
  Variant (16)..(16): Xaa in position 16 is Asp, Glu or Asn
  Variant (17)..(17): Xaa in position 17 is any amino acid
  Variant (19)..(22): Xaa in position 19 to 22 is any amino acid
  Variant (23)..(23): Xaa in position 23 is Thr or Val
  Variant (24)..(24): Xaa in position 24 is any amino acid
  Variant (25)..(25): Xaa in position 25 is Asp, Glu, Gln or Thr
  Variant (26)..(26): Xaa in position 26 is any amino acid
  Variant (28)..(29): Xaa in position 28 to 29 is any amino acid
  Variant (30)..(30): Xaa in position 30 is Leu or Met
  Variant (32)..(35): Xaa in position 32 to 35 is any amino acid
  Variant (36)..(36): Xaa in position 36 is Phe, Leu or Met
  Variant (37)..(37): Xaa in position 37 is Pro or Gln
RYXXYTXXXLCQEXHXXYXXXXXXXXQXXXFXXXXXX

SEQ ID NO: 4341 - protein, 27 aa, Artificial sequence
  protein pattern
  Variant (2)..(2): Xaa in position 2 is any amino acid
  Variant (3)..(4): Xaa in position 3 to 4 is any or no amino acid
  Variant (6)..(6): Xaa in position 6 is Ala, Asp or Glu
  Variant (9)..(11): Xaa in position 9 to 11 is any amino acid
  Variant (14)..(14): Xaa in position 14 is Phe, Leu or Met
  Variant (15)..(15): Xaa in position 15 is Ile or Val
  Variant (18)..(18): Xaa in position 18 is Cys or Asn
  Variant (20)..(21): Xaa in position 20 to 21 is any or no amino acid
  Variant (25)..(25): Xaa in position 25 is Ala or Pro
HXXXFXGYXXXQYXXDPXKXXLTTXGI

SEQ ID NO: 4342 - protein, 26 aa, Artificial sequence
  protein pattern
  Variant (2)..(2): Xaa in position 2 is any or no amino acid
  Variant (4)..(4): Xaa in position 4 is Ile or Val
  Variant (6)..(6): Xaa in position 6 is Ala or Thr
  Variant (7)..(7): Xaa in position 7 is Glu or Thr
  Variant (8)..(8): Xaa in position 8 is Gly or Leu
  Variant (11)..(11): Xaa in position 11 is Pro or Val
  Variant (16)..(16): Xaa in position 16 is Ile or Val
  Variant (17)..(18): Xaa in position 17 to 18 is any amino acid
  Variant (19)..(19): Xaa in position 19 is Ile, Met or Val
  Variant (20)..(20): Xaa in position 20 is Ala, Ile or Val
  Variant (21)..(21): Xaa in position 21 is Pro or Thr
  Variant (24)..(24): Xaa in position 24 is any amino acid
  Variant (25)..(25): Xaa in position 25 is Trp or Tyr
  Variant (26)..(26): Xaa in position 26 is Asp, Gly, Ser or Thr
GXRXAXXXALXYPPGXXXXXXGEXXX

SEQ ID NO: 4343 - protein, 23 aa, Artificial sequence
  protein pattern
  Variant (3)..(4): Xaa in position 3 to 4 is any amino acid
  Variant (6)..(6): Xaa in position 6 is Glu or Gln
  Variant (7)..(7): Xaa in position 7 is Ala, Asp or Glu
  Variant (9)..(9): Xaa in position 9 is Ile, Leu or Val
  Variant (11)..(11): Xaa in position 11 is any amino acid
  Variant (12)..(12): Xaa in position 12 is Phe or Leu
  Variant (16)..(16): Xaa in position 16 is Ala, Glu or Ser
  Variant (19)..(19): Xaa in position 19 is Ile or Leu
YFXXLXXGXNXXPGFXPEXQGVY

SEQ ID NO: 4344 - protein, 26 aa, Artificial sequence
  protein pattern
  Variant (6)..(6): Xaa in position 6 is Ile, Met or Val
  Variant (7)..(7): Xaa in position 7 is any amino acid
  Variant (8)..(8): Xaa in position 8 is Ala, Asp, Glu, Asn, Ser or Thr
  Variant (9)..(9): Xaa in position 9 is any amino acid
  Variant (10)..(10): Xaa in position 10 is Cys or Asp
  Variant (12)..(12): Xaa in position 12 is any amino acid
  Variant (14)..(15): Xaa in position 14 to 15 is any amino acid
  Variant (16)..(16): Xaa in position 16 is Ile or Leu
  Variant (17)..(17): Xaa in position 17 is Lys or Arg
  Variant (18)..(19): Xaa in position 18 to 19 is any amino acid
  Variant (20)..(20): Xaa in position 20 is Ala, Ile, Leu or Val
  Variant (21)..(22): Xaa in position 21 to 22 is any amino acid
  Variant (24)..(24): Xaa in position 24 is any amino acid
  Variant (25)..(25): Xaa in position 25 is Ala or Pro
  Variant (26)..(26): Xaa in position 26 is Asp, Glu, Gln or Ser
GFIGGXXXXXFXEXXXXXXXXXVXXX

SEQ ID NO: 4345 - protein, 28 aa, Artificial sequence
  protein pattern
  Variant (2)..(3): Xaa in position 2 to 3 is any amino acid
  Variant (4)..(4): Xaa in position 4 is any or no amino acid
  Variant (6)..(6): Xaa in position 6 is any or no amino acid
  Variant (8)..(8): Xaa in position 8 is any amino acid
  Variant (9)..(9): Xaa in position 9 is any or no amino acid
  Variant (11)..(11): Xaa in position 11 is any amino acid
  Variant (12)..(12): Xaa in position 12 is Asp or Glu
  Variant (13)..(13): Xaa in position 13 is any amino acid
  Variant (14)..(14): Xaa in position 14 is Leu or Val
  Variant (15)..(16): Xaa in position 15 to 16 is any amino acid
  Variant (17)..(17): Xaa in position 17 is Gly or Thr
  Variant (18)..(18): Xaa in position 18 is Ile or Val
  Variant (19)..(19): Xaa in position 19 is Asp, Glu or Asn
  Variant (20)..(20): Xaa in position 20 is Ala or Thr
  Variant (23)..(24): Xaa in position 23 to 24 is any amino acid
  Variant (25)..(25): Xaa in position 25 is Ile, Leu or Met
  Variant (26)..(27): Xaa in position 26 to 27 is any amino acid
  Variant (28)..(28): Xaa in position 28 is Cys or Gly
GXXXGXRXXWXXXXXXXXXXRKXXXXXX

SEQ ID NO: 4346 - protein, 29 aa, Artificial sequence
  protein pattern
  Variant (2)..(2): Xaa in position 2 is Ile, Leu or Met
  Variant (3)..(4): Xaa in position 3 to 4 is any amino acid
  Variant (6)..(6): Xaa in position 6 is Ile or Val
  Variant (7)..(7): Xaa in position 7 is Ala, Asp, Ser or Thr
  Variant (8)..(8): Xaa in position 8 is any amino acid
  Variant (9)..(9): Xaa in position 9 is Ile or Leu
  Variant (10)..(11): Xaa in position 10 to 11 is any amino acid
  Variant (12)..(12): Xaa in position 12 is Phe or Leu
  Variant (13)..(16): Xaa in position 13 to 16 is any amino acid
  Variant (17)..(17): Xaa in position 17 is Asp, Glu, Lys or Arg
  Variant (18)..(18): Xaa in position 18 is any amino acid
  Variant (19)..(19): Xaa in position 19 is Asp or Asn
  Variant (20)..(20): Xaa in position 20 is Ala, Ser or Thr
  Variant (21)..(21): Xaa in position 21 is any amino acid
  Variant (23)..(24): Xaa in position 23 to 24 is any amino acid
  Variant (28)..(28): Xaa in position 28 is any amino acid
  Variant (29)..(29): Xaa in position 29 is Ile, Leu or Val
KXXXLXXXXXXXXXXXXXXXXLXXVLPXX

SEQ ID NO: 4347 - protein, 29 aa, Artificial sequence
  protein pattern
  Variant (3)..(3): Xaa in position 3 is Ile, Leu or Val
  Variant (5)..(6): Xaa in position 5 to 6 is any amino acid
  Variant (7)..(7): Xaa in position 7 is Ile or Val
  Variant (8)..(8): Xaa in position 8 is any amino acid
  Variant (10)..(11): Xaa in position 10 to 11 is any amino acid
  Variant (13)..(13): Xaa in position 13 is Ala, Glu, Gly or Gln
  Variant (14)..(14): Xaa in position 14 is Ala, Asp or Ser
  Variant (15)..(16): Xaa in position 15 to 16 is any amino acid
  Variant (18)..(19): Xaa in position 18 to 19 is any amino acid
  Variant (20)..(20): Xaa in position 20 is Ile, Leu or Met
  Variant (21)..(21): Xaa in position 21 is Ala or Val
  Variant (22)..(22): Xaa in position 22 is any amino acid
  Variant (23)..(23): Xaa in position 23 is Asp or Asn
  Variant (24)..(25): Xaa in position 24 to 25 is any amino acid
  Variant (26)..(26): Xaa in position 26 is Phe or Tyr
  Variant (27)..(27): Xaa in position 27 is Phe or Trp
  Variant (28)..(28): Xaa in position 28 is any amino acid
PFXPXXXXGXXWXXXXTXXXXXXXXXXXF

SEQ ID NO: 4348 - protein, 19 aa, Artificial sequence
  protein pattern
  Variant (2)..(2): Xaa in position 2 is any amino acid
  Variant (3)..(6): Xaa in position 3 to 6 is any or no amino acid
  Variant (8)..(8): Xaa in position 8 is Glu, Gly or Gln
  Variant (9)..(10): Xaa in position 9 to 10 is any amino acid
  Variant (11)..(11): Xaa in position 11 is Ile, Leu, Met or Val
  Variant (12)..(12): Xaa in position 12 is any amino acid
  Variant (16)..(16): Xaa in position 16 is Phe or Tyr
  Variant (17)..(18): Xaa in position 17 to 18 is any amino acid
EXXXXXYXXXXXPPFXXXL

SEQ ID NO: 4349 - protein, 18 aa, Artificial sequence
  protein pattern
  Variant (2)..(5): Xaa in position 2 to 5 is any amino acid
  Variant (6)..(6): Xaa in position 6 is Ala, Ile, Leu or Val
  Variant (7)..(8): Xaa in position 7 to 8 is any amino acid
  Variant (9)..(9): Xaa in position 9 is Ser, Thr or Val
  Variant (10)..(10): Xaa in position 10 is Asp, Glu, Asn or Arg
  Variant (11)..(12): Xaa in position 11 to 12 is any amino acid
  Variant (14)..(14): Xaa in position 14 is Ile or Val
  Variant (15)..(15): Xaa in position 15 is Ala or Gly
  Variant (17)..(17): Xaa in position 17 is Ala, Ile or Val
  Variant (18)..(18): Xaa in position 18 is Ile or Val
RXXXXXXXXXXXDXXAXX

SEQ ID NO: 4350 - DNA, 1500 bp, Escherichia coli K12
  CDS (1)..(1500): transl_table=11
atgctaaatttatttgttggccttgatatatacacagggcttttgttattgcttgctctggcatttgtgttgttctacgaagcaatcaatggttttcatgacacggcgaatgcggtggcagccgttatttatactcgtgccatgcaaccacaacttgctgtggtgatggcggcattttttaacttttttggcgtgttattgggcggacttagcgttgcctatgccattgtccatatgttgccaaccgatttgttgctgaatatggggtcaacccacggcctggcgatggtcttttccatgctgctggcggcgattatctggaacctgggaacgtggttcttcggtttaccggcctccagttcgcacaccttgattggtgcgattatcggcatcggtttaaccaacgcgctgttaaccggctcatcggtgatggatgcgttaaacctgcgtgaagtgaccaaaattttctcctcgctgattgtttcccctatcgtcggcctggtcattgcgggaggcctgatattcctgctgcgacgctactggagcgggacgaaaaagcgtgaccgtattcaccgcattccggaagatcgcaaaaagaaaaaaggcaaacgtaaaccgccattctggacgcgtattgcgctgattgtttccgctgcgggcgtggcgttttcgcacggcgcgaacgacggacaaaaagggatcggcctggtaatgctggtactggtggggattgcccctgctggcttcgtcgtcaatatgaatgcgtccggctatgaaattacccgtacccgcgatgccgttaccaacttcgaacactacctgcaacagcatcctgaactgccgcagaagttgattgcgatggaacctccattgcctgcagcatcgactgatggcacgcaagtaacagagtttcactgtcatccggcaaatacctttgatgctattgcgcgcgttaaaacgatgctgccaggcaatatggaaagttacgagccgttaagcgtgagtcagcgcagccagctgcgccgcattatgctgtgcatctctgatacctccgcgaagctagcgaaactgccaggcgtcagtaaagaagaccagaacctgctgaaaaaacttcgcagcgatatgttaagcaccattgagtacgctccggtgtggatcatcatggcggtagcactggcgctcggcattggcaccatgattggctggcgtcgtgtagcgatgaccatcggtgagaagattggtaagcgcggcatgacgtatgcgcaaggcatggcggcacaaatgacggcggcagtgtctatcggtcttgccagttatattgggatgcccgtctccacaacacacgtcctctcgtctgcagttgcagggacgatggtggtggacggcggtgggttacagcgtaaaacggtaaccagcatcctgatggcgtgggtatttactttaccggcggcaatttttctttctggtgggctgtactggatagcattgcagttgatttaa

SEQ ID NO: 4351 - protein, 499 aa, Escherichia coli K12
MLNLFVGLDIYTGLLLLLALAFVLFYEAINGFHDTANAVAAVIYTRAMQPQLAVVMAAFFNFFGVLLGGLSVAYAIVHMLPTDLLLNMGSTHGLAMVFSMLLAAIIWNLGTWFFGLPASSSHTLIGAIIGIGLTNALLTGSSVMDALNLREVTKIFSSLIVSPIVGLVIAGGLIFLLRRYWSGTKKRDRIHRIPEDRKKKKGKRKPPFWTRIALIVSAAGVAFSHGANDGQKGIGLVMLVLVGIAPAGFVVNMNASGYEITRTRDAVTNFEHYLQQHPELPQKLIAMEPPLPAASTDGTQVTEFHCHPANTFDAIARVKTMLPGNMESYEPLSVSQRSQLRRIMLCISDTSAKLAKLPGVSKEDQNLLKKLRSDMLSTIEYAPVWIIMAVALALGIGTMIGWRRVAMTIGEKIGKRGMTYAQGMAAQMTAAVSIGLASYIGMPVSTTHVLSSAVAGTMVVDGGGLQRKTVTSILMAWVFTLPAAIFLSGGLYWIALQLI

SEQ ID NO: 4352 - DNA, 1611 bp, Mesorhizobium loti MAFF303099
  CDS (1)..(1611): transl_table=11
atggtggacgtagtttctagtgaagcgggcattccgagaccggatcatccgctgcacagttcgggtagcgcgaagtggttcctgccggccttcggcgtgctggtgctcgtcggcgtcgtttatgtcggctacgcgctcagccaggatctggccgaggccaagaccgtgccgtggatcctgctcggcatcgccttgctcatcgcgctcggcttcgaattcgtcaacggcttccatgatacggccaatgcggtggcgacggtcatctacacacgctccatgccggccgaattcgctgtcatgtggtcgggtgccttcaatttcctcggggttctcacttccagcggcgcggtcgctttcggtatcctgtcgctgctgccggtcgagctgatcctgcaggtcggctcgtcctccggctttgccatggtgttcgcgctgctcgtcgccgccatcctgtggaacctcggcacctggttcctcggcctgccggcgtcgagctcacacacgatggtcggctcgatcatcggcgtcggcctcgccaaccagttcatggcgcctgccggcagtgccaccagcggtgtcgactggtcgcaggcaaccaatgtcggcatcaccttgctggtgtcgccgatcatcggcttcttcgccgcggcgatcttgctctatgcgatgaagctgctcgtccgcaatccggccctctacgaagcaccgaaaggcaacacgccgccgccatggtggatccgtgggctgctgatcttcacctgcaccggcgtcagcttcgcgcacggctccaacgatgggcagaaaggcatgggcctgatcatgctgatcctgatcggtgtcgtgccgacggccttcgcgctgaaccggacgcccgacatcaactatctcgaggcctacaaggcggcttcggtcaacgtcgagaccgcgctgggcaaatatgtcaagccgggagtcaccgtcaccgatgccaaggatgccaaggcagccgtgcaggatgccgtgcgcacccggacctggaacgaccagacgacggccgcgctgcagacctatatccacaatacgacagcgggcctgcagccctatgccactgtcgacaacgtgccgaccgatctagtcagcaacgcccgcaacgacatctacctgatcggcgaggcactcaagctgatcgacaagaagaagttgctgccgatggaggctgccgatctcaaggcggtcaccgactatcataaggccgtcgacaacgcgacgaagttcatcccgatctgggttaaggtcgcggtggcgctggcgcttggcctcggcaccatggtcggctggaaacgcatcgtcgtcacggtcggcgagaagatcggcaagagccatctgacctatggccagggtgccgccgccgaactcgtcgccatggtgaccatcggcatggccgaccggctcggcctgccggtgtcgaccacccatgtgctgtcgtccggcgtcgccggaacgatggccgccaatggctcgggcctgcaatggtcgacggtgcgcaacctgctgctggcctgggtgttgaccctgccgtgctcgatcacgctcgccttcgtgctgttcatcgttttccgccaggtgttctga

SEQ ID NO: 4353 - protein, 536 aa, Mesorhizobium loti MAFF303099
MVDVVSSEAGIPRPDHPLHSSGSAKWFLPAFGVLVLVGVVYVGYALSQDLAEAKTVPWILLGIALLIALGFEFVNGFHDTANAVATVIYTRSMPAEFAVMWSGAFNFLGVLTSSGAVAFGILSLLPVELILQVGSSSGFAMVFALLVAAILWNLGTWFLGLPASSSHTMVGSIIGVGLANQFMAPAGSATSGVDWSQATNVGITLLVSPIIGFFAAAILLYAMKLLVRNPALYEAPKGNTPPPWWIRGLLIFTCTGVSFAHGSNDGQKGMGLIMLILIGVVPTAFALNRTPDINYLEAYKAASVNVETALGKYVKPGVTVTDAKDAKAAVQDAVRTRTWNDQTTAALQTYIHNTTAGLQPYATVDNVPTDLVSNARNDIYLIGEALKLIDKKKLLPMEAADLKAVTDYHKAVDNATKFIPIWVKVAVALALGLGTMVGWKRIVVTVGEKIGKSHLTYGQGAAAELVAMVTIGMADRLGLPVSTTHVLSSGVAGTMAANGSGLQWSTVRNLLLAWVLTLPCSITLAFVLFIVFRQVF

SEQ ID NO: 4354 - DNA, 1623 bp, Pseudomonas aeruginosa PAO1
  CDS (1)..(1623): transl_table=11
atgacctccgatgtccttcccgccgacgccgtcgccagtgccgccggcaacgcgcgcaagccccatctcgagcagcgtcccggccgcctcaccgccctcgtattcttcgccgtgctcgccaccggactgctgttcagcgcctacagcctgatgcaggacgtcgatgacgtcggttccacgatcaccacctggacgcccttcctgctgctcggcgtggccctgctgatcgccctcggcttcgagttcgtcaacggcttccacgacaccgccaacgcggtggccacggtgatctacagccactcgctgccgccgcacttcgcggtggtctggtcgggttgcttcaactttctcggcgtattgctctccagcggcgcggtggccttcggcatcatcgccctgctgccggtggaactgatcctgcaggtcggttcctcggccggcttcgccatggtcttcgccctgctgatcgccgccatcctgtggaacctcgggacctggtggctgggcctgccggcgtcgtcctcgcacaccctgatcggctcgatcatcggcgtcggcgtggccaacgcgctgatgcatgggcgcgacggcaccagcggggtggactggggccaggcgaccaaggtcggctactccctgctgctctcgccgctgatcggcttcgcctgcgccgccctgttgctcctggcgctgcgcctgctggtgaagaaccgcgcgctgtacaaggcgccgaagggcaaggcgccgccgccctggtggatacgcggcctgctgatcctgacctgtaccggggtgtccttcgcccacggctccaacgacggacagaaaggcatgggcctgatcatgctgatcctggtcggcaccctgccgatggcctacgccctgaaccgcaccatgccggcggaccaggcggtgcagttcgccgccgtcgccgatgtcacccagcaagcgctggtgaagagcgcgccgcaaccggcgccggccgatccgcgccaggtactctccgactacgtgcgcagcaagcaggcatcgcctgagctgatcccggcgctggccgccctgaccggctcgatcggccaggaagtgaaaggctatggcgcgttctcgcgggtaccggcggaagccatgggcaacgtgcgcaacgacatgtacctgacctccgaggcgatccgcctgatggacaaggacggcgtcggccgcttcgacgccgacacccgcggcaaattgcaggcgttcaagcagaagatcgacgacgccaccaagttcatcccgctatgggtgaagatcgccgtggccatcgccctcggcctgggcaccatggtcggctggaaacgcatcgtggtgacggtcggcgagaagatcggcaagacccacctgacctacgcccagggcgcctcggcggaaaccgtggcgatgctgaccattggcgcggcggacctgtatggcttgccggtatccaccacccatgtactgtcttccggggtggccgggaccatggcggcgaacggttcgggactacagtggaagaccatccgcaacctgctgatggcctgggtgctgacgctgccggcggcgatcctgctctcggcctcgctctactggctgctcacccggctgttctga

SEQ ID NO: 4355 - protein, 540 aa, Pseudomonas aeruginosa PAO1
MTSDVLPADAVASAAGNARKPHLEQRPGRLTALVFFAVLATGLLFSAYSLMQDVDDVGSTITTWTPFLLLGVALLIALGFEFVNGFHDTANAVATVIYSHSLPPHFAVVWSGCFNFLGVLLSSGAVAFGIIALLPVELILQVGSSAGFAMVFALLIAAILWNLGTWWLGLPASSSHTLIGSIIGVGVANALMHGRDGTSGVDWGQATKVGYSLLLSPLIGFACAALLLLALRLLVKNRALYKAPKGKAPPPWWIRGLLILTCTGVSFAHGSNDGQKGMGLIMLILVGTLPMAYALNRTMPADQAVQFAAVADVTQQALVKSAPQPAPADPRQVLSDYVRSKQASPELIPALAALTGSIGQEVKGYGAFSRVPAEAMGNVRNDMYLTSEAIRLMDKDGVGRFDADTRGKLQAFKQKIDDATKFIPLWVKIAVAIALGLGTMVGWKRIVVTVGEKIGKTHLTYAQGASAETVAMLTIGAADLYGLPVSTTHVLSSGVAGTMAANGSGLQWKTIRNLLMAWVLTLPAAILLSASLYWLLTRLF

SEQ ID NO: 4356 - DNA, 1470 bp, Pseudomonas aeruginosa PAO1
  CDS (1)..(1470): transl_table=11
atgttcgatcttttcagcgggctcgatgcctgggtgggtatcagcctggtgctggccctggccttcgtcctcaccttcgagttcatcaacggcttccacgacactgccaacgcggtggccaccgtcatctacaccaaagcgatgtccccctaccgggcggtgatgctctccggtgtgttcaacttcctcggcgtgctgctcggcggtgtcggtgtagcctacgccatcgttcacctgctgccggtggagctgctgatcaacgtgaacaccggccatggtctggcgatggtcttctccctgctcgccgccgccatcgcctggaacctcggcacctggtacttcggcatcccggcctccagctcgcacaccctgatcggctcgatcctcggcgtcggcctggccaatgcgctgatcaccgacgtgccgctggccgaagggatcaactggcagaaggcgatcgacatcggcctgtcgctgatcttctcgccgctggccggcttcatggtcgccgcgttggtcctgctcggactgaaatggtggcgtccgctgtcgaagatgcacaaaaccccggaaacccgtcgcgaactcgacgagaagaagcacccgccgttctggaaccgcctggtgctggtgctttccgccatggcggtaagcttcgtccatggctccaacgacggccagaagggtatcggcctgatcatgctggtactgatcggcatcgtcccggccaagttcgtcctcgacctgaacagcaccacctaccagatcgagcgcacccgcgacgccgccctgcacctcagtcagttctaccagcgccacaccgataccctcggcgacatgctggccctgggcaagagcaatggcagcgagatgccgcagttctaccgctgcgatccgaaacagaccgagccgaccatcaacgcgctgctccgcgacctgcgcggcgtgcccagctacaacgacctggacgccgacgagcgcgtgcaggtgcgtcgctacctgctgtgcctggacgacaccgcgaagaaggtcggcaagctgtccgacctgccggcgcgggagaaggccgacctcgagaagctacgcaaggacctgaccgcgaccaccgaatacgcgccgttctgggtcatcatcgcggtggccctggctctcggcatcggcaccatggtcggctggaagcgcgtagtgctcaccgtcggcgagaagatcggcaagcagggcatgacctacgcccagggcatgagcgcgcagatcaccgccgccgccgccatcggcatggccaacatctacagcctgccggtgtccaccacccatgtactgtcctccggcgtggccgggaccatggtggcgaacaaaagcggcctgcacggcggcaccgtgcgcaacatcctgatggcctgggtgctcaccctgccgacttcgatggcgctgtccgccggcctgttctggctggcctcgcaattcatctga

SEQ ID NO: 4357 - protein, 489 aa, Pseudomonas aeruginosa PAO1
MFDLFSGLDAWVGISLVLALAFVLTFEFINGFHDTANAVATVIYTKAMSPYRAVMLSGVFNFLGVLLGGVGVAYAIVHLLPVELLINVNTGHGLAMVFSLLAAAIAWNLGTWYFGIPASSSHTLIGSILGVGLANALITDVPLAEGINWQKAIDIGLSLIFSPLAGFMVAALVLLGLKWWRPLSKMHKTPETRRELDEKKHPPFWNRLVLVLSAMAVSFVHGSNDGQKGIGLIMLVLIGIVPAKFVLDLNSTTYQIERTRDAALHLSQFYQRHTDTLGDMLALGKSNGSEMPQFYRCDPKQTEPTINALLRDLRGVPSYNDLDADERVQVRRYLLCLDDTAKKVGKLSDLPAREKADLEKLRKDLTATTEYAPFWVIIAVALALGIGTMVGWKRVVLTVGEKIGKQGMTYAQGMSAQITAAAAIGMANIYSLPVSTTHVLSSGVAGTMVANKSGLHGGTVRNILMAWVLTLPTSMALSAGLFWLASQFI

SEQ ID NO: 4358 - DNA, 1317 bp, Escherichia coli O157:H7 EDL933
  CDS (1)..(1317): transl_table=11
atgctaaatttatttgttggccttgatatatacacagggcttttgttattacttgctctggcatttgtgttgttctacgaagcaatcaatggttttcatgacacggcgaatgcggtggcaaccgttatttatactcgtgccatgcagccacagcttgccgtggtgatggcggcattttttaacttttttggcgtgttattgggcggacttagcgttgcctatgccattgtccatatgttgccaaccgatttgttgctgaatatggggtcaacccacggcctggcgatggtcttttccatgctgctggcggcgattatctggaacctgggaacgtggttctttggtttaccggcctccagttcgcataccttgattggcgcgattatcggcatcggtttaaccaacgcgctgttaaccggctcatcggtgatggatgcgttaaacctgcgtgaagtgaccaaaattttctcctcgctgattgtttcccctatcgtcggcctggtcattgcgggaggcctgatattcctgctgcgacgctactggagcggaacgaaaaagcgtgaccgtattcaccgcattccggaagatcgcaaaaagaaaaaaggcaaacgtaagccgccattctggacgcgtattgcgctgattgtttccgctgcgggcgtggcgttttcgcacggcgcgaacgacggacaaaaagggatcggcctggtgatgctggtactggtggggattgcccctgctggcttcgtcgtcaatatgaacgcgtccggctatgaaattacccgtacccgcgatgccgttaccaacttcgaacactacctgcaacagcatcctgaactgccgcagaagttgattgcgatggaacctccattgcctgcggcatctactgatggcgcgcaagtgacggagtttcactgtcatccgggaaatacctttgatgcgattgcgcgcgttaaaacgatgctgccaggcaatatggaaagttacgagccgttaagcgtgagtcagcgcagccagctgcgccgcattatgctgtgcatctctgatacttccgcgaagctggcgaaactgccaggcgtcagtaaagaagaccagaacctgctgaaaaaactgcgcagcgatatgttaagcaccattgagtacgctccggtgtggatcatcatggcagtagcactggcgctcggcattggcaccatgattggctggcgtcgtgttgcgatgaccatcggtgagaagccttttttaatatcgtattgtgttcctccaggcggcgaacctgcttttccagttcgcggatacgttgctggtctggagtaa

SEQ ID NO: 4359 - protein, 438 aa, Escherichia coli O157:H7 EDL933
MLNLFVGLDIYTGLLLLLALAFVLFYEAINGFHDTANAVATVIYTRAMQPQLAVVMAAFFNFFGVLLGGLSVAYAIVHMLPTDLLLNMGSTHGLAMVFSMLLAAIIWNLGTWFFGLPASSSHTLIGAIIGIGLTNALLTGSSVMDALNLREVTKIFSSLIVSPIVGLVIAGGLIFLLRRYWSGTKKRDRIHRIPEDRKKKKGKRKPPFWTRIALIVSAAGVAFSHGANDGQKGIGLVMLVLVGIAPAGFVVNMNASGYEITRTRDAVTNFEHYLQQHPELPQKLIAMEPPLPAASTDGAQVTEFHCHPGNTFDAIARVKTMLPGNMESYEPLSVSQRSQLRRIMLCISDTSAKLAKLPGVSKEDQNLLKKLRSDMLSTIEYAPVWIIMAVALALGIGTMIGWRRVAMTIGEKPFLISYCVPPGGEPAFPVRGYVAGLE

SEQ ID NO: 4360 - DNA, 1497 bp, Yersinia pestis CO92
  CDS (1)..(1497): transl_table=11
atgctacatcttttcgctggcctggatttccataccggccttatgttagttcttgctttgttgttcgtgctgttttacgaagccatcaatggttttcatgatacagccaatgcggttgcgaccgtaatctatacccgtgccatgcgttcacagatcgcagttgtgatggcaggggtgtttaacttcctcggcgtgatgctgggtggtttgagcgtggcctacgccattgttcacttactgcctactgatctgctgttaaacgtcagttccacgcatgggttggcaatggtcttctccatgttactggccgcgattatctggaatttgggtacttggtattttggtattccagcctccagttctcatacgctgattggtgctatcatcggtattggtctaaccaatgcattaatgaccagtacatccgttgtggatgcgctgaacgttcctaagatgatacaaatctttctgtcgctgatcttatccccgattgtgggtctggttatcgccggtttgatggtattcctgctacgtcgttactggagcagtaccaaaaagcagcaacgtattcacctgacgcctgctgaacgtgaaaagaaagacggtaaacgtaaaccgccattctggacccgtacggcgctgatcctctccgctatcggtgtgagtttctctcacggcgctaacgatggtcagaaagggattggcttgatcatgctggtattaatcggtgtggctccggctggttttgtcgtgaatatgaatgcgaccggctatgatattgcccgcacccgcgatgcagtcactcatgtgcaactctattatcagcaacatgctgaggcattgcctcatgccatcgcgctgaaaccactggtgccagccccagaaaccttgccaggtacacctgcgcaattccactgtgacacttcacgcgcgatggtcgccattaaccatgcacaagcgctgctgaccgatctgaaaagctatgatgacctaaccgttgatcaacgcagccaaatgcgtcgcttgctgatgtgtgtcgcagaaaccgcaggagccgttgccaaactgccagaaaccagtgccgaaaaccgccgtttcctcaacaatctgcgtaccgatttgttggataccgtggaatatgcaccaacctggattatcgtagcggttgctctggctctgtctctcgggacaatggtcggttggagacgcgttgccgtcactatcggtgagaagatcggcaaaaaaggcatgacctatgctcaaggggtttcagcccagatgaccgcggcggtctctatcggtattgccagttataccggcatgccagtatcgaccactcaagtgctctcttctgctgttgccgggaccatgttggtcgatggcggtggcgtgcagagtaaaacggtgaagagcattatgttggcctgggtcttaaccctgccaatctctatcttcctttccggtgcactgtattggatagccttaaagttcatttaa

SEQ ID NO: 4361 - protein, 498 aa, Yersinia pestis CO92
MLHLFAGLDFHTGLMLVLALLFVLFYEAINGFHDTANAVATVIYTRAMRSQIAVVMAGVFNFLGVMLGGLSVAYAIVHLLPTDLLLNVSSTHGLAMVFSMLLAAIIWNLGTWYFGIPASSSHTLIGAIIGIGLTNALMTSTSVVDALNVPKMIQIFLSLILSPIVGLVIAGLMVFLLRRYWSSTKKQQRIHLTPAEREKKDGKRKPPFWTRTALILSAIGVSFSHGANDGQKGIGLIMLVLIGVAPAGFVVNMNATGYDIARTRDAVTHVQLYYQQHAEALPHAIALKPLVPAPETLPGTPAQFHCDTSRAMVAINHAQALLTDLKSYDDLTVDQRSQMRRLLMCVAETAGAVAKLPETSAENRRFLNNLRTDLLDTVEYAPTWIIVAVALALSLGTMVGWRRVAVTIGEKIGKKGMTYAQGVSAQMTAAVSIGIASYTGMPVSTTQVLSSAVAGTMLVDGGGVQSKTVKSIMLAWVLTLPISIFLSGALYWIALKFI

SEQ ID NO: 4362 - DNA, 1497 bp, Salmonella typhimurium LT2
  CDS (1)..(1497): transl_table=11
atgctacatttgtttgctggcctggatttacataccgggcttttattattgcttgctctggcttttgtgctgttctacgaagcgattaacggcttccatgacacagccaatgcagtcgcaaccgtgatttacacccgtgcgatgcgttcgcagctggcggttgtcatggcggcggtgtttaacttttttggcgttttgctggggggtctcagcgtggcgtatgccattgtgcatatgctaccgacggatctcctgctcaacatgggttccgcgcacggcctcgctatggtcttttccatgttgctggcggcgattatctggaacctcggtacctggtatttcgggttgccggcgtccagttcccacacgctgattggcgccattatcggcatcggtttaaccaatgcgatgatgaccggcacgtcagtggtggatgcgcttaacatcccgaaagttatcaatattttcggttcactcattatctcccctattgtcggtctggtattcgccggcggtctgattttcttgctgcgccgctactggagcggtactaagaaacgcgcccgtatccacctgacgccagccgaacgtgaaaagaaagacggcaagaaaaagccgccgttctggacgcgtatcgcgctgatcctctccgctatcggcgtggcgttttcgcatggcgcgaacgatggtcagaaaggcattggcctggtcatgctggtgctgattggcgtcgcgcctgcgggtttcgtggtcaatatgaatgcctccagctacgaaatcacccgtacgcgcgatgctatcaacaatgtcgaaacgtactttgagcagcgtcctgacctgctgaaagccgtcaccggcgttgaccaactgattccctctccggaaccgggcgcgactgaaccgactgaattccactgccatccggctaacaccattaacgcgcttaaccgtgcgaaagggatgctggcaaacgtggaaagctacgacaagttaagcgttgaacagcgtagtcagttgcgtcgcattatgctgtgcatttccgacacgaccgacaaagtcgtgaaattgcctggcgtaagcagcgatgaccagcgcctgctgaaaaagctgaagaccgatatgttaagcaccattgagtatgcgccagtgtggatcattatggcagtggcgttggcgctgggtattggtacgatgatcggctggcgtcgcgtggcgaccactatcggcgagaaaattggtaaaaaaggcatgacgtatgcgcagggaatgtcggcgcagatgacggcggcagtctctatcggtcttgccagctacaccggtatgccagtttctaccactcacgtactctcctcttcagtggcgggaaccatggtcgttgatggcggcgggttgcagcgtaaaaccgtgaccagcattctgatggcctgggtatttacgttaccggcggcgattattctttccggcgtgctgtactggctttccctgaagattatttaa

SEQ ID NO: 4363 - protein, 498 aa, Salmonella typhimurium LT2
MLHLFAGLDLHTGLLLLLALAFVLFYEAINGFHDTANAVATVIYTRAMRSQLAVVMAAVFNFFGVLLGGLSVAYAIVHMLPTDLLLNMGSAHGLAMVFSMLLAAIIWNLGTWYFGLPASSSHTLIGAIIGIGLTNAMMTGTSVVDALNIPKVINIFGSLIISPIVGLVFAGGLIFLLRRYWSGTKKRARIHLTPAEREKKDGKKKPPFWTRIALILSAIGVAFSHGANDGQKGIGLVMLVLIGVAPAGFVVNMNASSYEITRTRDAINNVETYFEQRPDLLKAVTGVDQLIPSPEPGATEPTEFHCHPANTINALNRAKGMLANVESYDKLSVEQRSQLRRIMLCISDTTDKVVKLPGVSSDDQRLLKKLKTDMLSTIEYAPVWIIMAVALALGIGTMIGWRRVATTIGEKIGKKGMTYAQGMSAQMTAAVSIGLASYTGMPVSTTHVLSSSVAGTMVVDGGGLQRKTVTSILMAWVFTLPAAIILSGVLYWLSLKII

SEQ ID NO: 4364 - DNA, 1596 bp, Yersinia pestis KIM
  CDS (1)..(1596): transl_table=11
atgatgttatgtcaaaaaaaggtcatattttccttttaccaaccccccattgtcactgataatgcgccgcgttcatgtccacaaactggcgtaacgcttatgctacatcttttcgctggcctggatttccataccggccttatgttagttcttgctttgttgttcgtgctgttttacgaagccatcaatggttttcatgatacagccaatgcggttgcgaccgtaatctatacccgtgccatgcgttcacagatcgcagttgtgatggcaggggtgtttaacttcctcggcgtgatgctgggtggtttgagcgtggcctacgccattgttcacttactgcctactgatctgctgttaaacgtcagttccacgcatgggttggcaatggtcttctccatgttactggccgcgattatctggaatttgggtacttggtattttggtattccagcctccagttctcatacgctgattggtgctatcatcggtattggtctaaccaatgcattaatgaccagtacatccgttgtggatgcgctgaacgttcctaagatgatacaaatctttctgtcgctgatcttatccccgattgtgggtctggttatcgccggtttgatggtattcctgctacgtcgttactggagcagtaccaaaaagcagcaacgtattcacctgacgcctgctgaacgtgaaaagaaagacggtaaacgtaaaccgccattctggacccgtacggcgctgatcctctccgctatcggtgtgagtttctctcacggcgctaacgatggtcagaaagggattggcttgatcatgctggtattaatcggtgtggctccggctggttttgtcgtgaatatgaatgcgaccggctatgatattgcccgcacccgcgatgcagtcactcatgtgcaactctattatcagcaacatgctgaggcattgcctcatgccatcgcgctgaaaccactggtgccagccccagaaaccttgccaggtacacctgcgcaattccactgtgacacttcacgcgcgatggtcgccattaaccatgcacaagcgctgctgaccgatctgaaaagctatgatgacctaaccgttgatcaacgcagccaaatgcgtcgcttgctgatgtgtgtcgcagaaaccgcaggagccgttgccaaactgccagaaaccagtgccgaaaaccgccgtttcctcaacaatctgcgtaccgatttgttggataccgtggaatatgcaccaacctggattatcgtagcggttgctctggctctgtctctcgggacaatggtcggttggagacgcgttgccgtcactatcggtgagaagatcggcaaaaaaggcatgacctatgctcaaggggtttcagcccagatgaccgcggcggtctctatcggtattgccagttataccggcatgccagtatcgaccactcaagtgctctcttctgctgttgccgggaccatgttggtcgatggcggtggcgtgcagagtaaaacggtgaagagcattatgttggcctgggtcttaaccctgccaatctctatcttcctttccggtgcactgtattggatagccttaaagttcatttaa

SEQ ID NO: 4365 - protein, 531 aa, Yersinia pestis KIM
MMLCQKKVIFSFYQPPIVTDNAPRSCPQTGVTLMLHLFAGLDFHTGLMLVLALLFVLFYEAINGFHDTANAVATVIYTRAMRSQIAVVMAGVFNFLGVMLGGLSVAYAIVHLLPTDLLLNVSSTHGLAMVFSMLLAAIIWNLGTWYFGIPASSSHTLIGAIIGIGLTNALMTSTSVVDALNVPKMIQIFLSLILSPIVGLVIAGLMVFLLRRYWSSTKKQQRIHLTPAEREKKDGKRKPPFWTRTALILSAIGVSFSHGANDGQKGIGLIMLVLIGVAPAGFVVNMNATGYDIARTRDAVTHVQLYYQQHAEALPHAIALKPLVPAPETLPGTPAQFHCDTSRAMVAINHAQALLTDLKSYDDLTVDQRSQMRRLLMCVAETAGAVAKLPETSAENRRFLNNLRTDLLDTVEYAPTWIIVAVALALSLGTMVGWRRVAVTIGEKIGKKGMTYAQGVSAQMTAAVSIGIASYTGMPVSTTQVLSSAVAGTMLVDGGGVQSKTVKSIMLAWVLTLPISIFLSGALYWIALKFI

SEQ ID NO: 4366 - DNA, 1500 bp, Shigella flexneri 2a str. 301
  CDS (1)..(1500): transl_table=11
atgctacatttgtttgctggcctggatttgcataccgggctgttattattgcttgcactggcttttgtgctgttctacgaagccatcaatggtttccatgacacagccaacgccgtggcaaccgttatctatacccgcgcgatgcgttctcagctcgccgtggttatggcggcggtgttcaactttttgggtgttttgctgggtggtctgagtgttgcctatgccattgtgcatatgctgccgacggatctgctgcttaatatgggatcgtctcatggccttgccatggtgttctctatgttgctggcggcgattatctggaacctgggtacctggtactttggtttacctgcatccagctctcatacgctgattggcgcgatcatcgggattggtttaaccaatgcgttgatgaccgggacgtcagtggtggatgcactcaatatcccgaaagtattaagtattttcggttctctgatcgtttcccctattgtcggcctggtgtttgctggcggtctgattttcttgctgcgtcgctactggagcggcaccaagaaacgcgcccgtatccacctgaccccagcggagcgtgaaaagaaagacggcaagaaaaagccgccgttctggacgcgtatcgcgctgatcctttccgctatcggcgtggcgttttcgcacggcgcgaacgatggtcagaaaggcattggtctggttatgttggtattgattggcgtcgcgccagcaggcttcgtggtgaacatgaatgccactggctacgaaatcacccgtacccgtgatgccatcaacaacgtcgaagcttactttgagcagcatcctgcgctgctcaaacaggctaccggtgctgatcagttagtaccggctccggaagctggcgcaacgcaacctgcggagttccactgccatccgtcgaataccattaacgcgctcaaccgcctgaaaggtatgttgaccaccgatgtggaaagctacgacaagctgtcgcttgatcaacgtagccagatgcgccgcattatgctgtgcgtttctgacactatcgacaaagtggtgaagatgcctggtgtgagtgctgacgatcagcgcctgttgaagaaactgaagtccgacatgcttagcaccatcgagtatgcgcgggtgtggatcatcatggcggtcgcgctggcgttaggtatcggtacgatgattggctggcgtcgtgtggcaacgactatcggtgagaaaatcggtaagaaaggcatgacctacgctcaggggatgtctgcccagatgacggcggcagtgtcaatcggcctggcgagttataccgggatgccggtttccaccactcacgtactctcctcttctgtcgcggggacgatggtggtagatggcggcggcttacagcgtaaaaccgtaaccagtattctgatggcctgggtgtttacccttccggctgcggtactactttccggcgggctgtactggttctccttgcagttcctgtaa

SEQ ID NO: 4367 - protein, 499 aa, Shigella flexneri 2a str. 301
MLHLFAGLDLHTGLLLLLALAFVLFYEAINGFHDTANAVATVIYTRAMRSQLAVVMAAVFNFLGVLLGGLSVAYAIVHMLPTDLLLNMGSSHGLAMVFSMLLAAIIWNLGTWYFGLPASSSHTLIGAIIGIGLTNALMTGTSVVDALNIPKVLSIFGSLIVSPIVGLVFAGGLIFLLRRYWSGTKKRARIHLTPAEREKKDGKKKPPFWTRIALILSAIGVAFSHGANDGQKGIGLVMLVLIGVAPAGFVVNMNATGYEITRTRDAINNVEAYFEQHPALLKQATGADQLVPAPEAGATQPAEFHCHPSNTINALNRLKGMLTTDVESYDKLSLDQRSQMRRIMLCVSDTIDKVVKMPGVSADDQRLLKKLKSDMLSTIEYARVWIIMAVALALGIGTMIGWRRVATTIGEKIGKKGMTYAQGMSAQMTAAVSIGLASYTGMPVSTTHVLSSSVAGTMVVDGGGLQRKTVTSILMAWVFTLPAAVLLSGGLYWFSLQFL

SEQ ID NO: 4368 - DNA, 1470 bp, Shewanella oneidensis MR-1
  CDS (1)..(1470): transl_table=11
atgtttgagatatttacttctatcggtcttggttggtcggtagctttagtgcttgccgtgttatttgtgctggcctacgagtttatcaatggcttccacgataccgccaacgcggtcgcaacagtcatctacaccaaggcgatgccagcgaatttagcggtggtttcttcagcactttttaactttgctggcgtgctactcggtgggcttggtgtcgcttatgccatagtgcatctacttcccgttgactccttgttggggatggactctacccaagggctgttgatggtcttttcgctattattttccgcgattatttggaatttaggcacttggtactttggcattccagcctctagctcccataccttaattggctcaattatgggcgttggcggtgcattcgcttggatacataatcagcccattttgcatggtattaacctcaccaaagccacgcagattatgttatccctgattatttcgcccacgcttggttttgtgttggcggggatatttttattgctgatgaagtttatttgggcaaagcataagatccatcgcacccctgatgagcagtttcagattaatggtaaaaggcatccgcctttctgggcgcgagtgagtttgattgcttctgccatgggggttagttttgcccatggttctaacgatggacagaaaggcattggcttagtgatgctcgtgcttatttgtatggcccctgcgtattttgccctcgatatgagcactcaatcctatgatttagcacgaacacaggatgcaaaccgtcgtatcatggctatctacagccgtaatcaagcggtgattagcgatttagtggatgtaaaagcaaaggttgatgctagtgatacactgctaagtcattgctcggcacaaaccgtattgcctgcaatgtcgtcacttgatcgtcgtttggaacaggtcaatagttttcaggatatgactatagaagagcgccgtgaagtgcgacgtttgttactgtgtattgatgacactgcgcgcaaggtggctaaattagagttacccgctaaggaattaagttctctcgctaagtggcgtaaagacctgactaaaccgacagaatacgcgcccctttgggtgattgtggcgattgcgaccgcgttaggttgtggcacgctcgtggggtggcggcgaattgtgtataccgtaggagaaaaaattggctcctcgggaatgacctatagccaaggtattgccgcgcaggtgactgctgctgtgtcgattggcatcgcgagcgtcactgggatgccggtatcgactacgcatattttgtcatcggcggtggcggggactatggtagccaatcgctctgggctacaaagtcaaaccattaagcaaattctactggcttgggtgctaacactccctattactatgttgctctccgcgtgtgtgtttatccttgccaatacactttggggttag

SEQ ID NO: 4369 - protein, 489 aa, Shewanella oneidensis MR-1
MFEIFTSIGLGWSVALVLAVLFVLAYEFINGFHDTANAVATVIYTKAMPANLAVVSSALFNFAGVLLGGLGVAYAIVHLLPVDSLLGMDSTQGLLMVFSLLFSAIIWNLGTWYFGIPASSSHTLIGSIMGVGGAFAWIHNQPILHGINLTKATQIMLSLIISPTLGFVLAGIFLLLMKFIWAKHKIHRTPDEQFQINGKRHPPFWARVSLIASAMGVSFAHGSNDGQKGIGLVMLVLICMAPAYFALDMSTQSYDLARTQDANRRIMAIYSRNQAVISDLVDVKAKVDASDTLLSHCSAQTVLPAMSSLDRRLEQVNSFQDMTIEERREVRRLLLCIDDTARKVAKLELPAKELSSLAKWRKDLTKPTEYAPLWVIVAIATALGCGTLVGWRRIVYTVGEKIGSSGMTYSQGIAAQVTAAVSIGIASVTGMPVSTTHILSSAVAGTMVANRSGLQSQTIKQILLAWVLTLPITMLLSACVFILANTLWG

SEQ ID NO: 4370 - DNA, 1473 bp, Pseudomonas putida KT2440
  CDS (1)..(1473): transl_table=11
atgatcgatttattcagcggactggatgcctgggtgttggtgagcctgctgctcgccttgaccttcgtactcgccttcgagttcatcaatggctttcatgacaccgccaacgcggtagctaccgtcatctataccaaagccatgccgccgcacctcgccgtgttcttctccggcgtgttcaacttccttggcgttctgctcggcggtgtaggggtggcctatgccatcgtgcacctgttgccggtagagctgctgatcaatgtgaacaccggccacggcctggccatggtcttctcgttgctggctgcggccatcacctggaacctgggcacctggtactttggcatccccgcctccagttcgcacacgctgatcggttccatcctcggtgttggcctggccaacgccctgatcaacgacattccgctgggcgacggcgtcaactggcagaaagcgatcgatatcgccatgtcgctggtggtctcgccaatggccggcttcgccgttgctgccctggtgctgatcggcctgaaatggtggcgcccgctgtcgaagatgcacaaaaccccggaacagcgccgcaagctcgacgacaagaagcacccgcccttctggaaccgtctggtcctggtggtttccgccatgggcgtgagcttcgtgcacggctccaacgacggccagaaaggcatcggcctgatcatgctggtgctgatcggtattgtcccggccaagttcgtactcgacctgaacagcaccacctaccagatcgaacgtacgcgcgacgccaccctgcacatgagccagttctaccagcgtaacgccgccaccctgggcgagttcctggcactgggcaaggccaaggccagcgacctgccggagcagttcagttgcaacccgcagcagaccgagccgaccattgctgcgctgcagacctcgctgaagggcgtgacggactaccacagcctcgatgccgagaagcgcgttgaagtgcgccgctatctgttgtgcctggatgacacggcgaagaaggttggcaagctgccaggcctggacgcccgtgaaaagtccgaccttgaaaaactgcgcaaagacctcaccgccaccaccgaatacgccccgttctgggtgatcgtggccgtcgcactggcccttggcctgggtaccatggttggctggaagcgcgtggtgttgacggtgggcgagaagatcggcaaacaaggcatgacctatgcccaaggcatgtcggcacagatcaccgcagcctgcgccatcggcatggccaacgtattcgccctgccggtatcgaccacccacgtgctgtcgtctggcgtggccggcaccatggtcgccaacaaaagtggcctgcaaggcggcactgtgaaaaccatcctgctggcatgggtcctgaccctgcctgcctcgatgggcctggcggccggcctgttctggctggcgtccaaagccattggctga

SEQ ID NO: 4371 - protein, 490 aa, Pseudomonas putida KT2440
MIDLFSGLDAWVLVSLLLALTFVLAFEFINGFHDTANAVATVIYTKAMPPHLAVFFSGVFNFLGVLLGGVGVAYAIVHLLPVELLINVNTGHGLAMVFSLLAAAITWNLGTWYFGIPASSSHTLIGSILGVGLANALINDIPLGDGVNWQKAIDIAMSLVVSPMAGFAVAALVLIGLKWWRPLSKMHKTPEQRRKLDDKKHPPFWNRLVLVVSAMGVSFVHGSNDGQKGIGLIMLVLIGIVPAKFVLDLNSTTYQIERTRDATLHMSQFYQRNAATLGEFLALGKAKASDLPEQFSCNPQQTEPTIAALQTSLKGVTDYHSLDAEKRVEVRRYLLCLDDTAKKVGKLPGLDAREKSDLEKLRKDLTATTEYAPFWVIVAVALALGLGTMVGWKRVVLTVGEKIGKQGMTYAQGMSAQITAACAIGMANVFALPVSTTHVLSSGVAGTMVANKSGLQGGTVKTILLAWVLTLPASMGLAAGLFWLASKAIG

SEQ ID NO: 4372 - DNA, 1617 bp, Pseudomonas putida KT2440
  CDS (1)..(1617): transl_table=11
atggcaaccccgtcagtggccagcagcccactactggccaaacacgacgctcgcccgcagctctcccacaaacctgggcgtgccaccttaacgttgttcttcagcctgctgctggctggtatcgcctacaccgcctggagcctcaagcaggatgtgaccgcaagcggtacggtcatcaccacggccacaccgttccttctgctgggcctggcgctgctgattgccctgggcttcgagttcgtcaacggcttccacgacaccgccaacgcggtagccaccgtgatatacacccattcgttgccggcgccggtcgcagtggtgtggtctgggctgtgcaacttcctgggcgtgcttttttccagtggcgcggtggccttcggcatcatcgccttgctaccggtagaactgattctacaggtgggttcttcggccggcttcgccatggtcttcgccctgctgctggcggcgatcatctggaaccttggcacttggtggctgggcctgccggcatcgtcctcgcacaccctgattggctcgatcatcggcgtgggcgtggccaatgcgctgatgcatgggcgtgacggcaccagcggcgtggactgggcccaggccagcaaggtgggttatgccctgctgttctcaccgctgattggttttgcttgcgcagccctgttgctgctggccctgcgcgcgctggtcaaacgcaaggcgctgtaccaggcaccggaaggccagacaccgccaccgtggtggatccgcagcctactgattctgacctgcaccggggtctcttttgcccacggttccaacgatggccagaaaggcatgggcctgatcatgctgattctggtcggcaccctgccgatggcttatgcgctgaacaagaccatgcccaacgggcaggccctgcagttttccgctgtcgccgaggtgacccgccaggcactggtacgcagcgacccgcaagcggccccggctgacccgcgccaggtactgaccctgttcattgccgagcccaaggccagcccgcacctggtaccggcgttggcggcgctgaccgggatgatcggcgaagaggtcaaaggctatggctcgctcaagcgcgtaccggctgaagccatggccaacgtgcgcaacgacatgtatctgaccagtgaagccatccgcctcatggagaaaaaccacctggtgacattcgatgccgacacccgcagccaagtgcagttgttcaaggcccagctggacgacgccacccgctatattccgttgtgggtgaaggtggctgtagccatcgcgctggggctggggaccatggttggctggcgacgtattgtagtcaccgttggcgagaagatcggcaagacccacctcagctatgcccaaggcgcatcggccgaagtggtggcgatgtgcaccattggcgcggcggatatgttcgggctgccggtgtcgaccacgcatgtgctgagttcgggggtggccggcgccatggtggccaatgggtcggggattcagaaacgcactttgttcaatctgctgatggcctgggtgctgaccctgccagcggcaatgctgttggctggcagcctgtactggctgctgaaccacatcttctga

SEQ ID NO: 4373 - protein, 538 aa, Pseudomonas putida KT2440
MATPSVASSPLLAKHDARPQLSHKPGRATLTLFFSLLLAGIAYTAWSLKQDVTASGTVITTATPFLLLGLALLIALGFEFVNGFHDTANAVATVIYTHSLPAPVAVVWSGLCNFLGVLFSSGAVAFGIIALLPVELILQVGSSAGFAMVFALLLAAIIWNLGTWWLGLPASSSHTLIGSIIGVGVANALMHGRDGTSGVDWAQASKVGYALLFSPLIGFACAALLLLALRALVKRKALYQAPEGQTPPPWWIRSLLILTCTGVSFAHGSNDGQKGMGLIMLILVGTLPMAYALNKTMPNGQALQFSAVAEVTRQALVRSDPQAAPADPRQVLTLFIAEPKASPHLVPALAALTGMIGEEVKGYGSLKRVPAEAMANVRNDMYLTSEAIRLMEKNHLVTFDADTRSQVQLFKAQLDDATRYIPLWVKVAVAIALGLGTMVGWRRIVVTVGEKIGKTHLSYAQGASAEVVAMCTIGAADMFGLPVSTTHVLSSGVAGAMVANGSGIQKRTLFNLLMAWVLTLPAAMLLAGSLYWLLNHIF

SEQ ID NO: 4374 - DNA, 1629 bp, Bradyrhizobium japonicum USDA 110
  CDS (1)..(1629): transl_table=11
atgaccgatgtagcattcgaccgcgcggtagccgatcccgcgccgatccagccggcctcacggcccaatctcgacaagggcttcaatccgctgacgatgatcctgttcttcggcatcctcgccgcgggtctgctgttcgtcgcctacagcatctatgccgacgtcaacgcgaccggcacgcgggtcacgaccttcctgccctacatcctcttgttcgttgcgctgctgatcgcgctcggcttcgagttcgtcaacggcttccacgacaccgccaatgcggtggcgaccgtgatctacacccattcgctcccggctgaagtcgccgtgatgtggtcgggcttcttcaacttcctcggcgtgctgctgtcctccggcgcggtcgccttcggcatcgtctcgctgctgccggtcgagctgatcctccaggtcggctccagcgccggcttcgcaatggtgttcgctctgctgatcgccgcgatcctgtggaatctcggcacctggtatttcggcctgcccgcctcctcctcgcacacgctgatcggctccatcatcggcgtcggcatcgccaacgccgtgatgcgcggccgcgacggcacctcgggcgtggactggagcaaggctaccgagatcggctacgcgctgctgctgtcgccgctggtcggcttcgcctgcgccgccgtgctgctgctggtgctcaagttcatcgtgcgcaacccggctctgtacgccgcgcccgaaggcaacaaggcgccgccgctctggatccgcggcctcctgatcctgacctgcaccggcgtcagcttcgcgcacggctcgaacgacggccagaagggcatgggcctgatcatgctgatcctgatcggcaccgttccaaccgcttacgcgctcaaccgcgctctgccggaatcccaggtcgcccagttccagaagacctcggaggccgccgccagggtgatctcggccaagggcgccgggcacagcatcatcggcgatccccgtccggcggtgacgcagtacatcgcactgcatcagatcaacgagggcacctatccctcgctcgccgtgctggtgaaggatgtcggcgaccaggtcgccaaatacggcacgctgaacaaggtgccggcggaagccgtcggcaacacccgcaacgacatgtacctgacctcggaagcgatccgcttcctgatgaaggacaaggagaacgatctcaacaaggacgaggtcgcgaccctgaacgcctacaagggctcgctcgacgccgccacgaagttcatcccgaactgggtgaagatcgcggtcgccatcgcgctcggcctcggcaccatgatcggctggaagcgcatcgtcgtcacggtcggtgagaagatcggcaagacccatctcacctacgcacagggcgcctccgccgagctcgtcgccgccgccacgatcggtgccgccgacgtgttcggcctgccggtctcgaccacccacgtgctgtcgtccggcgtcgccggcaccatggccgcgaacggctcgggcctgcagatggcgaccatccgcaacctgctgatggcctgggtgctgacgctgccctgcgcgatcatgctgtcggccacgctctacgtgatcttctcgcgaatcttctga

SEQ ID NO: 4375 - protein, 542 aa, Bradyrhizobium japonicum USDA 110
MTDVAFDRAVADPAPIQPASRPNLDKGFNPLTMILFFGILAAGLLFVAYSIYADVNATGTRVTTFLPYILLFVALLIALGFEFVNGFHDTANAVATVIYTHSLPAEVAVMWSGFFNFLGVLLSSGAVAFGIVSLLPVELILQVGSSAGFAMVFALLIAAILWNLGTWYFGLPASSSHTLIGSIIGVGIANAVMRGRDGTSGVDWSKATEIGYALLLSPLVGFACAAVLLLVLKFIVRNPALYAAPEGNKAPPLWIRGLLILTCTGVSFAHGSNDGQKGMGLIMLILIGTVPTAYALNRALPESQVAQFQKTSEAAARVISAKGAGHSIIGDPRPAVTQYIALHQINEGTYPSLAVLVKDVGDQVAKYGTLNKVPAEAVGNTRNDMYLTSEAIRFLMKDKENDLNKDEVATLNAYKGSLDAATKFIPNWVKIAVAIALGLGTMIGWKRIVVTVGEKIGKTHLTYAQGASAELVAAATIGAADVFGLPVSTTHVLSSGVAGTMAANGSGLQMATIRNLLMAWVLTLPCAIMLSATLYVIFSRIF

SEQ ID NO: 4376 - DNA, 1455 bp, Pseudomonas syringae pv. tomato str. DC3000
  CDS (1)..(1455): transl_table=11
atgggcacggtggtcaccacttggaccccgttcgtgctgttgggcgtggccttgctgattgcgctggcatttgaattcgtcaacggctttcatgacaccgccaacgccgtcgcaacggtgatctatacccactcgctgccgcctggctttgcggtggtctggtcgggctttttcaactttctcggcgtgatgctctccagtggtgccgtggcgttcggcatcatcgcgttgttgccggtggagctgatcctgcagactggctcgtcggcaggcttcgccatgattttcgcgctgctgatcgcggccatcatctggaacctcggcacctggtggctgggcctgccggcctcctcttcgcacaccttgatcggctcgatcatcggtgtcggcattgccaacgcattgatgcatgggcgtgacggcaccagcggcgtggactggtctcaggccaccaagatcggttactccttactgctctcgccgctggtcggctttggctgtgccgccctgttgttgctggcgatgcgcatgttcatcaagaatcgcgcactgtacaaggcacctgaaggcagcgcgccgccgcccttgtggattcgcgccatgctgatcgtgacctgcaccggcgtgtcgttcgcgcacggctccaacgatggacagaaaggcatggggctgatcatgctgattctggtcggcaccctgccgatggcctacgcgctaaaccgcaccatgccggccgatcaggccactcagttcgctgctgtggccgaagtcacccagcaggcgctgattcgcagtgtgccgcagcccgccccaagtgattcgcgccagacgctgtcggattatctggtcagcaggcaggcgggccctgacctgatcccggcgctggcggtgatgaccggcaagatcggcaatcaggttgccagctatgggtcgctgtcgaaggtgcctgcggaagcggtgaccaacgtgcgaaacgacatgtacctgacctcggaaaccatccgcttgatggataaaaacaaggtgggcaatttcgacgcagatacccagaccaagctcgatgcgttcaaagggcagatcgacagcgcgacgcgttttattccgacctgggtcaagattgtcgtggccatcgccctggggctgggcacgatggtcggctggaagcgtatcgtcgtgaccgtcggcgagcggatcggcaagacgcacatgacctacgcccaaggggcgtcggcagaggtggtggcgatgttcaccattggcgcagcggacatgtacgggctgccggtgtcgacgactcatgtgttgtcgtccggtgtggcaggttcaatggtcgccaacggctcgggactgcaaatgcgcaccctgcgcaacctggccaccgcctgggtgttgaccctgccggcagctattttgctgtcaggctcgctgtactgggtgttcagcaaactgttttga

SEQ ID NO: 4377 - protein, 484 aa, Pseudomonas syringae pv. tomato str. DC3000
MGTVVTTWTPFVLLGVALLIALAFEFVNGFHDTANAVATVIYTHSLPPGFAVVWSGFFNFLGVMLSSGAVAFGIIALLPVELILQTGSSAGFAMIFALLIAAIIWNLGTWWLGLPASSSHTLIGSIIGVGIANALMHGRDGTSGVDWSQATKIGYSLLLSPLVGFGCAALLLLAMRMFIKNRALYKAPEGSAPPPLWIRAMLIVTCTGVSFAHGSNDGQKGMGLIMLILVGTLPMAYALNRTMPADQATQFAAVAEVTQQALIRSVPQPAPSDSRQTLSDYLVSRQAGPDLIPALAVMTGKIGNQVASYGSLSKVPAEAVTNVRNDMYLTSETIRLMDKNKVGNFDADTQTKLDAFKGQIDSATRFIPTWVKIVVAIALGLGTMVGWKRIVVTVGERIGKTHMTYAQGASAEVVAMFTIGAADMYGLPVSTTHVLSSGVAGSMVANGSGLQMRTLRNLATAWVLTLPAAILLSGSLYWVFSKLF

SEQ ID NO: 4378 - DNA, 1473 bp, Pseudomonas syringae pv. tomato str. DC3000
  CDS (1)..(1473): transl_table=11
atgatcgatttattcagcgggcttgatgcctgggtgcttgtgagcctgctgctcgccctggcgttcgtcctcaccttcgagttcatcaacggctttcatgacaccgccaacgcggtggcgacagtcatttacaccaaagccatgccgcctcatctggcagtattcttctccggtgtattcaacttccttggcgtgttgctgggcggcgtgggcgttgcctatgcgattgtccatcttttgccggtcgaactgctcatcaacgtcaacaccggacacggcctggccatggtgttttcgctgctggcggcggccattacctggaacctcgggacctggtacttcggcattccggcctccagttcacacaccctgatcggctcgattctcggtgtgggcctggccaatgcgctgatcaacggcattccgctggccgatggcgtcaactggcagaaagcgatcgatatcggcgcctcgctggtattctcgccactggccggctttatcgttgccggcctggtcctgctggcgctgaaatggtggcgcccgctgtcgaagatgcacaagacgccagaccagcgccgcaagctggatgacaaaaagcatccgccgttctggaatcgtctggtgctggtcatctccgccatggcggtcagcttcgtgcatggttccaatgatggccagaaaggcatcggcctgatcatgctggtgctgatcggcatcgtgccgagccagtttgtactcgacctcaccagcacgacctatcagatcgaacgcacccgtgatgcaacccagcatctgagccagttttatcagcgcaacagcagcacgctgggcgagtatctggcgatgggcaaagctgaaaaaggcgacctgccgtccagttccgcgtgcaacccgaaacagaccgaaccgaccatcgacgcgttgctcgatcgccttaaaggtgtgtccgactaccactcgctggcacctgaaagccgcatcgaagtgcgtcgctatctgttatgcctggacgataccgcacgcaaggtcggcaaacttccagacctgtcagcgcgtgaaaaatccgatctggacaaactgcgcaaggacctgaccaccactaccgaatacgccccgttctgggtaattctcgcggtcgccctggcactgggcatcggcaccatggtcggctggaagcgcgtagtcctgaccatcggcgagaagatcggcaagcaaggcatgacctacgcacaaggcatgtcggcgcagatcaccaccgcctgcgccatcggcctggccaacgtgttcagcctgccggtttccaccacccacattctgtcatcgggtgttgcgggaaccatggtcgccaacaagagcggcctgcaaggcggaaccgttcgcaccatcctgctggcctgggtactgaccctgccagcgacagtcgccttgtccgccgccctgttctggctggcgtccaaagctctgtcctga

SEQ ID NO: 4379 - protein, 490 aa, Pseudomonas syringae pv. tomato str. DC3000
MIDLFSGLDAWVLVSLLLALAFVLTFEFINGFHDTANAVATVIYTKAMPPHLAVFFSGVFNFLGVLLGGVGVAYAIVHLLPVELLINVNTGHGLAMVFSLLAAAITWNLGTWYFGIPASSSHTLIGSILGVGLANALINGIPLADGVNWQKAIDIGASLVFSPLAGFIVAGLVLLALKWWRPLSKMHKTPDQRRKLDDKKHPPFWNRLVLVISAMAVSFVHGSNDGQKGIGLIMLVLIGIVPSQFVLDLTSTTYQIERTRDATQHLSQFYQRNSSTLGEYLAMGKAEKGDLPSSSACNPKQTEPTIDALLDRLKGVSDYHSLAPESRIEVRRYLLCLDDTARKVGKLPDLSAREKSDLDKLRKDLTTTTEYAPFWVILAVALALGIGTMVGWKRVVLTIGEKIGKQGMTYAQGMSAQITTACAIGLANVFSLPVSTTHILSSGVAGTMVANKSGLQGGTVRTILLAWVLTLPATVALSAALFWLASKALS

SEQ ID NO: 4380 - DNA, 1500 bp, Shigella flexneri 2a str. 2457T
  CDS (1)..(1500): transl_table=11
atgctacatttgtttgctggcctggatttgcataccgggctgttattattgcttgcactggcttttgtgctgttctacgaagccatcaatggtttccatgacacagccaacgccgtggcaaccgttatctatacccgcgcgatgcgttctcagctcgccgtggttatggcggcggtgttcaactttttgggtgttttgctgggtggtctgagtgttgcctatgccattgtgcatatgctgccgacggatctgctgcttaatatgggatcgtctcatggccttgccatggtgttctctatgttgctggcggcgattatctggaacctgggtacctggtactttggtttacctgcatccagctctcatacgctgattggcgcgatcatcgggattggtttaaccaatgcgttgatgaccgggacgtcagtggtggatgcactcaatatcccgaaagtattaagtattttcggttctctgatcgtttcccctattgtcggcctggtgtttgctggcggtctgattttcttgctgcgtcgctactggagcggcaccaagaaacgcgcccgtatccacctgaccccagcggagcgtgaaaagaaagacggcaagaaaaagccgccgttctggacgcgtatcgcgctgatcctttccgctatcggcgtggcgttttcgcacggcgcgaacgatggtcagaaaggcattggtctggttatgttggtattgattggcgtcgcgccagcaggcttcgtggtgaacatgaatgccactggctacgaaatcacccgtacccgtgatgccatcaacaacgtcgaagcttactttgagcagcatcctgcgctgctcaaacaggctaccggtgctgatcagttagtaccggctccggaagctggcgcaacgcaacctgcggagttccactgccatccgtcgaataccattaacgcgctcaaccgcctgaaaggtatgttgaccaccgatgtggaaagctacgacaagctgtcgcttgatcaacgtagccagatgcgccgcattatgctgtgcgtttctgacactatcgacaaagtggtgaagatgcctggtgtgagtgctgacgatcagcgcctgttgaagaaactgaagtccgacatgcttagcaccatcgagtatgcgccggtgtggatcatcatggcggtcgcgctggcgttaggtatcggtacgatgattggctggcgtcgtgtggcaacgactatcggtgagaaaatcggtaagaaaggcatgacctacgctcaggggatgtctgcccagatgacggcggcagtgtcaatcggcctggcgagttataccgggatgccggtttccaccactcacgtactctcctcttctgtcgcggggacgatggtggtagatggcggcggcttacagcgtaaaaccgtaaccagtattctgatggcctgggtgtttacccttccggctgcggtactactttccggcgggctgtactggttctccttgcagttcctgtaa

SEQ ID NO: 4381 - protein, 499 aa, Shigella flexneri 2a str. 2457T
MLHLFAGLDLHTGLLLLLALAFVLFYEAINGFHDTANAVATVIYTRAMRSQLAVVMAAVFNFLGVLLGGLSVAYAIVHMLPTDLLLNMGSSHGLAMVFSMLLAAIIWNLGTWYFGLPASSSHTLIGAIIGIGLTNALMTGTSVVDALNIPKVLSIFGSLIVSPIVGLVFAGGLIFLLRRYWSGTKKRARIHLTPAEREKKDGKKKPPFWTRIALILSAIGVAFSHGANDGQKGIGLVMLVLIGVAPAGFVVNMNATGYEITRTRDAINNVEAYFEQHPALLKQATGADQLVPAPEAGATQPAEFHCHPSNTINALNRLKGMLTTDVESYDKLSLDQRSQMRRIMLCVSDTIDKVVKMPGVSADDQRLLKKLKSDMLSTIEYAPVWIIMAVALALGIGTMIGWRRVATTIGEKIGKKGMTYAQGMSAQMTAAVSIGLASYTGMPVSTTHVLSSSVAGTMVVDGGGLQRKTVTSILMAWVFTLPAAVLLSGGLYWFSLQFL

SEQ ID NO: 4382 - DNA, 1557 bp, Wigglesworthia glossinidia endosymbiont of Glossina brevipalpis
  CDS (1)..(1557): transl_table=11
atgttatatttaaatttatttcaagaattaggtttatatacagcttgtatgctatgtatagcaatactatttgtattgctatatgaatttataaatggattccatgatacagctaatgctgtagttacagtgatttacacaaaggctttacctcctaatttagcggttattttttctggtttttttaattttttaggagtaattttaggaggtttgagtgtagcttatacaatagtacatttattaccatctagtttattattaaatacaagttctataaatggattaaaaatgatgttttctatattattagctgcaataatgtggaattttggaacatggtattttagacttcctgtgtctagttctcacaccctaataggggcaattataggagttggtttatcaagccaaatatttacaaatacatcaataaatcaaaacctaaatatttcaaaattgtatgaagtttttttttctttaataatttcacctattatagggtttctgatttcaggaacatttataattattttacgtaaaatttggaaagataaaaaaataaataaaaaaattcatttcactccatctgaaacagaaaaaatttatggaaataaaaaacctcctttttggataagagtttctttaattttttctgctgcaagtattagtttttcacatggagcaaatgatggacaaaaaggaattggattaattatgttgattttaataggtgtatttcctgctggatttgttatcaatatggatactaattcatataatataaatacatcaagaaatgcaataaataatgtatatgaatatttttctaaaaataaaaatattttgtttaatctgatagaaaataaagaagaaaaaaaatttcttaaagaaaaaaaaataaatgatttgaacagttttattccaaataaatataaaaacaaattttgcatttcagaaaatattgaagatactttttgtaaaagcgttaatgtctttattataataaaatatacttctgatttactttcagaaaaagataacttttatcaattaagctcagatcaaagattttatttgaggaaactaatactgtatatatcagatattattaatgaaactattcatttaccaaatatatcaaatgaagataaaaaatttttaaaaaatttaaataaagatattatatatatagtagaatattcacctatttggataactattataatagctttatctttggcttgcggaacaataatatcttggaagagagttgcacaaactattggagaaaaaataggcaaaagagaaatgacttatgcgcaaagcttatcagctcaatttacttctgcgctatctattggtatagccagttatactggaatgccagtatctactactcatgttttatcttccgccgttgcaggggcagttttaacagatcatggagaaatacaatggaaaactgtaaaaaatatattaatggcttggattttaactcttccaattactatggttttgtctggtattttatatatatcgatatataaaatttaa

SEQ ID NO: 4383 - protein, 518 aa, Wigglesworthia glossinidia endosymbiont of Glossina brevipalpis
MLYLNLFQELGLYTACMLCIAILFVLLYEFINGFHDTANAVVTVIYTKALPPNLAVIFSGFFNFLGVILGGLSVAYTIVHLLPSSLLLNTSSINGLKMMFSILLAAIMWNFGTWYFRLPVSSSHTLIGAIIGVGLSSQIFTNTSINQNLNISKLYEVFFSLIISPIIGFLISGTFIIILRKIWKDKKINKKIHFTPSETEKIYGNKKPPFWIRVSLIFSAASISFSHGANDGQKGIGLIMLILIGVFPAGFVINMDTNSYNINTSRNAINNVYEYFSKNKNILFNLIENKEEKKFLKEKKINDLNSFIPNKYKNKFCISENIEDTFCKSVNVFIIIKYTSDLLSEKDNFYQLSSDQRFYLRKLILYISDIINETIHLPNISNEDKKFLKNLNKDIIYIVEYSPIWITIIIALSLACGTIISWKRVAQTIGEKIGKREMTYAQSLSAQFTSALSIGIASYTGMPVSTTHVLSSAVAGAVLTDHGEIQWKTVKNILMAWILTLPITMVLSGILYISIYKI

SEQ ID NO: 4384 - DNA, 1620 bp, Candidatus Blochmannia floridanus
  CDS (1)..(1620): transl_table=11
atgtcatatttattctctgatttagaaatacatattagaatgatgttagtattagcattatgctttatatttatttatgaagctattaatggatttcacgatactgctaattctgtcgttcctgttatttacacctgtgcattacgttcacataatgcagtaataatgtcaggaatatttaatttcctaggagtaatattaggaggagttagtgtaacatacactattattcatttaatccctacatatttctttatgaataccagtgccaatcatattttaattatgatcttctctatattatttgcagccatcctatggaacttaggcacttggtatttcggattacctacatctagttctcatactttaattggagctttaattggaattggatttgctaattcatttatcactaactatccaataaaccaagaattaaatattactcaattaattaatatttttctatccttgcttatatcacctataattggattaatactagcccgtacaataatgctattactatttcgatatcgaaagaataatacatatcaagaaatacatataaccccatccgaacaggaattattaagaggtcgaaaacaaccatcattatggattcgaataattcttattatatcagcggccggagttagcttttcacatggagcaaacgatggtcaaaaaggtattggacttatcatgttacttttagtaggagtagctccagataatttcatgttaaacatgtattcaaataccgaagatattatcaatactcgtaatgcagtaaataattttcaggaatattatactcaatattataatgattataaaaatattattccatcagaaattatatctatgcctcaatccatagcattacaccaacttactgttattgatccatctatacaagatttaatacatacttttattcataaccatgaaaatcattcatcaaattacaattgtgaaatatcacaattgtattcttcagaacaaataaaaaaattctttcatgatttttcattaaatttcattattatacacaatactttatcattactcgaaaatttaaacagttatgaacaattaacttccagtcaacgctttagaatgagacaattattaatatatatagcagatatattagatcaaataacaaaatacccagatattcctcactcaaataaaaaattcttaaaaaatataaaaacacacctattgaacactgtagaatatgctccaacctggattatcataactgttgctatatcactatctttaggtacaacgataggatggaaaagagtagccattaccattggcgaaaaaataggaaaaaagaaaatgacttatgcacaaggtttatcagcgcaattaactactgctatatctataggaatagcaagttatatagggatgcctgtttctactacacatgttctatcttcatctattactggaagtatgttaatacgaggatggggagttcaaataaaaataattaaaaatataataatgacctggactttaactgtccctgctactattatattaagtagcattttttatttatcaatattaaaattattgcataaatatatctaa

SEQ ID NO: 4385 - protein, 539 aa, Candidatus Blochmannia floridanus
MSYLFSDLEIHIRMMLVLALCFIFIYEAINGFHDTANSVVPVIYTCALRSHNAVIMSGIFNFLGVILGGVSVTYTIIHLIPTYFFMNTSANHILIMIFSILFAAILWNLGTWYFGLPTSSSHTLIGALIGIGFANSFITNYPINQELNITQLINIFLSLLISPIIGLILARTIMLLLFRYRKNNTYQEIHITPSEQELLRGRKQPSLWIRIILIISAAGVSFSHGANDGQKGIGLIMLLLVGVAPDNFMLNMYSNTEDIINTRNAVNNFQEYYTQYYNDYKNIIPSEIISMPQSIALHQLTVIDPSIQDLIHTFIHNHENHSSNYNCEISQLYSSEQIKKFFHDFSLNFIIIHNTLSLLENLNSYEQLTSSQRFRMRQLLIYIADILDQITKYPDIPHSNKKFLKNIKTHLLNTVEYAPTWIIITVAISLSLGTTIGWKRVAITIGEKIGKKKMTYAQGLSAQLTTAISIGIASYIGMPVSTTHVLSSSITGSMLIRGWGVQIKIIKNIIMTWTLTVPATIILSSIFYLSILKLLHKYI

SEQ ID NO: 4386 - DNA, 1476 bp, Bordetella pertussis Tohama I
  CDS (1)..(1476): transl_table=11
atgctccaccttttctccggcctagacctctgggtaggtctcagcctcgtcctggcgttgacattcgttctcgccttcgaattcatcaacggctttcacgacaccgccaatgcggtggccacggtcatctacaccaaggccatgccgccgcacctggccgtcattctctccggcatcttcaacttcctcggcgtgctgctgggcggggtgggcgtggcctacgccatcgtgcacctgctgccggtcgaactgctgatcaacgtcgataccgggcgcggcctggccatggtcttcgccatgctgtcggcggccatcgcctggaacctgggcacctggtatttcggcatcccggcctccagctcgcacaccctgatcggctcgatcctgggcgtgggcatggccaacgccttgctgaccgacatctcgctggccgaaggcgtgaactggggcaaggcgatcgatatcggcctgtcgctggtggtctcgccggtggccgggttcatggtggccggcggcatcctgctgctgctcaagcgctggctgccgctgtcgaaaatgcacaagacgcccgagcagcgccgcgccatcgacgccaagaaacacccgcccttctggaaccgcctggtgctggtcctgtcggccatgggcgtcagcttcgtgcacggttccaacgacggccagaaaggcatcgggctgatcatgctggtgctgatcggcatcgtgcccgccaagttcgtgctcgacgtcaacagcaccacctaccagatcgaccgcacccgcgatgccgccagccacctgagcgcgttctaccaccgcaacgaagccacgctgggcgagttcctggccctgtcgcgcggcggcaacggcgccgacctgcccaagacgttccgctgcgatcccaagctaaccatgcccaccatcgccgccctgcaggacgacctgcgcggcgtgaccaactacgccgatctctcggccgacaagcgcatcgatgtgcggcgctacctgctgtgcctggacgacacggccaagaaggtcgcgcggctggaaggcctgccggcgcgcgagcgcgccgacttgcagcgattgcgcggcgatctcaccaccaccaccgaatacgcgccgctgtgggtcatcgtggcggtggcgctggcgctgggcatcggcaccatggtgggctggcgccgcgtggtgctgaccgtgggcgagaaaatcggcaagcagggcatgacctacgcccagggcatggcggcccaggtcaccgcggtcggcgccatcggcctggccaacgtgttcagcctgccggtctcgaccacccacgtgctgtcgtccggcgtggccggcaccatggtcgccaacaacagcggcctgcagggcggcaccgtgcgcaccatcctgatggcctgggtgctgacgctgccggcctcgatgctgctgtcggccggcctgttctgggtgggcacgctgctcgccgcgtag

SEQ ID NO: 4387 - protein, 491 aa, Bordetella pertussis Tohama I
MLHLFSGLDLWVGLSLVLALTFVLAFEFINGFHDTANAVATVIYTKAMPPHLAVILSGIFNFLGVLLGGVGVAYAIVHLLPVELLINVDTGRGLAMVFAMLSAAIAWNLGTWYFGIPASSSHTLIGSILGVGMANALLTDISLAEGVNWGKAIDIGLSLVVSPVAGFMVAGGILLLLKRWLPLSKMHKTPEQRRAIDAKKHPPFWNRLVLVLSAMGVSFVHGSNDGQKGIGLIMLVLIGIVPAKFVLDVNSTTYQIDRTRDAASHLSAFYHRNEATLGEFLALSRGGNGADLPKTFRCDPKLTMPTIAALQDDLRGVTNYADLSADKRIDVRRYLLCLDDTAKKVARLEGLPARERADLQRLRGDLTTTTEYAPLWVIVAVALALGIGTMVGWRRVVLTVGEKIGKQGMTYAQGMAAQVTAVGAIGLANVFSLPVSTTHVLSSGVAGTMVANNSGLQGGTVRTILMAWVLTLPASMLLSAGLFWVGTLLAA

SEQ ID NO: 4388 - DNA, 1668 bp, Bordetella parapertussis 12822
  CDS (1)..(1668): transl_table=11
gtggacatggcgggcatcgcgggcggcggcgggggaacggaacgggccgcgcgggccgggccgccgcaggccggccccgggacggccgcgccggaggatctctcgcggcattctaacgcgccgcgcggcgcgcccggggcgggtcacaaatctgcaataattccgccacacgacacccctctcctggctcccatgctccaccttttctccggcctagacctctgggtaggtctcagcctcgtcctggcgttgacattcgttctcgccttcgaattcatcaatggctttcacgacaccgccaacgcggtggccacggtcatctacaccaaggccatgccgccgcacctggccgtcattctctccggcatcttcaacttcctcggcgtgctgctgggcggggtgggcgtggcctacgccatcgtgcacctgctgccggtcgaactgctgatcaacgtcgataccgggcgcggcctggccatggtcttcgccatgctgtcggcggccatcgcctggaacctgggcacctggtatttcggcatcccggcctccagctcgcacaccctgatcggctccatcctgggcgtgggcatggccaatgccctgctgaccgacatctcgctggccgaaggcgtgaactggggcaaggcgatcgatatcggcctgtcgctggtggtctcgccggtggccggcttcatggtggccggcggcatcctgctgctgctcaagcgctggctgccgctgtcgaaaatgcacaagacgcccgagcagcgccgcgccatcgacgccaagaagcacccgcccttctggaaccgcctggtgctggtcctgtcggccatgggcgtcagcttcgtgcacggctccaacgacggccagaaaggcatcgggctgatcatgctggtgttgatcggcatcgtgcccgccaagttcgtgctcgacgtcaacagcaccacctaccagatcgaccgcacccgcgatgccgccagccacctgagcgcgttctaccaccgcaacgaagccacgctgggcgagttcctggccctgtcgcgcggcggcaacggcgccgacctgcccaagacgttccgctgcgatcccaagctgaccatgcccaccatcgccgccctgcaggacgacctgcgcggcgtgaccaactacgccgacctctcggccgacaagcgcatcgatgtgcggcgctacctgctgtgcctggacgacacggccaagaaggtcgcgcggctggaaggcctgccggcgcgcgagcgcgccgacctgcagcgattgcgcggcgatctcaccgccaccaccgaatacgcgccgctgtgggtcatcgtggcggtggcgctggcgctgggcatcggcaccatggtgggctggcgccgcgtggtgctgaccgtgggcgagaaaatcggcaagcagggcatgacctacgcccagggcatggcggcccaggtcaccgcggtcggcgccatcggcctggccaatgtgttcagcctgccggtctcgaccacccacgtgctgtcgtccggcgtggccggcaccatggtcgccaacaacagcggcctgcagggcggcaccgtgcgcaccatcctgatggcctgggtgctgacgctgccggcctcgatgctgctgtcggccggcctgttctgggtgggcacgctgctcgccgcgtag

SEQ ID NO: 4389 - protein, 555 aa, Bordetella parapertussis 12822
MDMAGIAGGGGGTERAARAGPPQAGPGTAAPEDLSRHSNAPRGAPGAGHKSAIIPPHDTPLLAPMLHLFSGLDLWVGLSLVLALTFVLAFEFINGFHDTANAVATVIYTKAMPPHLAVILSGIFNFLGVLLGGVGVAYAIVHLLPVELLINVDTGRGLAMVFAMLSAAIAWNLGTWYFGIPASSSHTLIGSILGVGMANALLTDISLAEGVNWGKAIDIGLSLVVSPVAGFMVAGGILLLLKRWLPLSKMHKTPEQRRAIDAKKHPPFWNRLVLVLSAMGVSFVHGSNDGQKGIGLIMLVLIGIVPAKFVLDVNSTTYQIDRTRDAASHLSAFYHRNEATLGEFLALSRGGNGADLPKTFRCDPKLTMPTIAALQDDLRGVTNYADLSADKRIDVRRYLLCLDDTAKKVARLEGLPARERADLQRLRGDLTATTEYAPLWVIVAVALALGIGTMVGWRRVVLTVGEKIGKQGMTYAQGMAAQVTAVGAIGLANVFSLPVSTTHVLSSGVAGTMVANNSGLQGGTVRTILMAWVLTLPASMLLSAGLFWVGTLLAA

SEQ ID NO: 4390 - DNA, 1476 bp, Bordetella bronchiseptica RB50
  CDS (1)..(1476): transl_table=11
atgctccaccttttctccggcctagacctctgggtaggtctcagcctcgtcctggcgttgacattcgttctcgccttcgaattcatcaatggctttcacgacaccgccaacgcggtggccacggtcatctacaccaaggccatgccgccgcacctggccgtcattctctccggcatcttcaacttcctcggcgtgctgctgggcggggtgggcgtggcctacgccatcgtgcacctgctgccggtcgaactgctgatcaacgtcgataccgggcgcggcctggccatggtcttcgccatgctgtcggcggccatcgcctggaacctgggcacctggtatttcggcatcccggcctccagctcgcacaccctgatcggctccatcctgggcgtgggcatggccaatgccctgctgaccgacatctcgctggccgaaggcgtgaactggggcaaggcgatcgatatcggcctgtcgctggtggtctcgccggtggccggcttcatggtggccggcggcatcctgctgctgctcaagcgctggctgccgctgtcgaaaatgcacaagacgcccgagcagcgccgcgccatcgacgccaagaagcacccgcccttctggaaccgcctggtgctggtcctgtcggccatgggcgtcagcttcgtgcacggctccaacgacggccagaaaggcatcgggctgatcatgctggtgttgatcggcatcgtgcccgccaagttcgtgctcgacgtcaacagcaccacctaccagatcgaccgcacccgcgatgccgccagccacctgagcgcgttctaccaccgcaacgaagccacgctgggcgagttcctggccctgtcgcgcggcggcaacggcgccgacctgcccaagacgttccgctgcgatcccaagctgaccatgcccaccatcgccgccctgcaggacgacctgcgcggcgtgaccaactacgccgacctctcggccgacaagcgcatcgatgtgcggcgctacctgctgtgcctggacgacacggccaagaaggtcgcgcggctggaaggcctgccggcgcgcgagcgcgccgacctgcagcgattgcgcggcgatctcaccgccaccaccgaatacgcgccgctgtgggttatcgtggcggtggcgctggcgctgggcatcggcaccatggtgggctggcgccgcgtggtgctgaccgtgggcgagaaaatcggcaagcagggcatgacctacgcccagggcatggcggcccaggtcaccgcggtcggcgccatcggcctggccaatgtgttcagcctgccggtctcgaccacccacgtgctgtcgtccggcgtggccggcaccatggtcgccaacaacagcggcctgcagggcggcaccgtgcgcaccatcctgatggcctgggtgctgacgctgccggcctcgatgctgctgtcggccggcctgttctgggtgggcacgctgctcgccgcgtag

SEQ ID NO: 4391 - protein, 491 aa, Bordetella bronchiseptica RB50
MLHLFSGLDLWVGLSLVLALTFVLAFEFINGFHDTANAVATVIYTKAMPPHLAVILSGIFNFLGVLLGGVGVAYAIVHLLPVELLINVDTGRGLAMVFAMLSAAIAWNLGTWYFGIPASSSHTLIGSILGVGMANALLTDISLAEGVNWGKAIDIGLSLVVSPVAGFMVAGGILLLLKRWLPLSKMHKTPEQRRAIDAKKHPPFWNRLVLVLSAMGVSFVHGSNDGQKGIGLIMLVLIGIVPAKFVLDVNSTTYQIDRTRDAASHLSAFYHRNEATLGEFLALSRGGNGADLPKTFRCDPKLTMPTIAALQDDLRGVTNYADLSADKRIDVRRYLLCLDDTAKKVARLEGLPARERADLQRLRGDLTATTEYAPLWVIVAVALALGIGTMVGWRRVVLTVGEKIGKQGMTYAQGMAAQVTAVGAIGLANVFSLPVSTTHVLSSGVAGTMVANNSGLQGGTVRTILMAWVLTLPASMLLSAGLFWVGTLLAA

SEQ ID NO: 4392 - DNA, 1455 bp, Chromobacterium violaceum ATCC 12472
  CDS (1)..(1455): transl_table=11
atgctggacctgttttccgggctcgatacccatgtagccatcacgctgatgctttcgctgggcttcgtgctcgcatttgagttcatcaacggttttcacgacaccgccaacgccgtcgccaccgtcatctacacccagtcgatgaagccgcgcctcgccgtgttctattccggcgtctgcaacttcctcggcgtgatgagcggcggcttggccgtcgcctacgccatcgtccacctgctgccggtggatctgttgatctcggtgaacaccagccgcggcatggccatggtattcgcgctgctcgccgccgccatcctgtggaacctgggcacctggtatctgggcctgcccgcctcgtccagccacacgctgatcggcgccatcctgggcgtcggcgtggccaacagcttcatcaaccacacctcgctgtcccacggcatcaactggggcaaggcaatcgacgtcggcgcctcgctgttggtgtcgccgatcgccggcgcggtgatggccggcctgatcgtcatcctgctgcggcgcttccgcccgcgcagcaacgtccacaagacgccgtaccagcgccagcaagtcgaaggccgcaagcatccgccgttctggacccgcttcatgctgatcgtgtcggcgatgggcgtcagcttcgcccacggctccaacgacggccagaagggcgtcggcctggtgatgctggtgctgatcggcatcgtgccggccaagttcgtgctgaacctggacagcacgccgtaccagctggagcgcacccgcgacgcggcgcagcacctgcagcagttctaccagcgccatgaggccgacctgtccaagatcatcgtcaagtcgaacagcaccagccagtacgagtgccacccgcagcagaccgtggccaccgccgaccagctgctgaaactgatgggcgacggcaacgattaccacaccctcagcgcctcgcagcgctgggacgtgcgcacccagctcctgtgcctggacgacgccgccaagaaggccgccgacctgcccaagctgtcgtccgacgacaagcagctgctgagcaatctgcgcaaggacctgaccaccaccaccgaatacgcgcccacctgggtgatcgtcgccgtggccttggcgctgggcatcggcaccatgataggctggcgccgcgtggtgaagaccgtgggcgaaggcataggcaagaaggacatgacctacgcccagggcgtggccgcgcagaccaccgccgccgtctccatcggcctggccagctggttcggcttcccggtgtccaccacccatgtgctgtccagcggcgtggccggcaccatgatcgccgacaaggccggcctgcagatgagcaccgtgcgctccatcgcgctggcctggctgttcacgctgccggcctcgatggccctggccgccggcctgtactacctggcggcgcagtggttctga

SEQ ID NO: 4393 - protein, 484 aa, Chromobacterium violaceum ATCC 12472
MLDLFSGLDTHVAITLMLSLGFVLAFEFINGFHDTANAVATVIYTQSMKPRLAVFYSGVCNFLGVMSGGLAVAYAIVHLLPVDLLISVNTSRGMAMVFALLAAAILWNLGTWYLGLPASSSHTLIGAILGVGVANSFINHTSLSHGINWGKAIDVGASLLVSPIAGAVMAGLIVILLRRFRPRSNVHKTPYQRQQVEGRKHPPFWTRFMLIVSAMGVSFAHGSNDGQKGVGLVMLVLIGIVPAKFVLNLDSTPYQLERTRDAAQHLQQFYQRHEADLSKIIVKSNSTSQYECHPQQTVATADQLLKLMGDGNDYHTLSASQRWDVRTQLLCLDDAAKKAADLPKLSSDDKQLLSNLRKDLTTTTEYAPTWVIVAVALALGIGTMIGWRRVVKTVGEGIGKKDMTYAQGVAAQTTAAVSIGLASWFGFPVSTTHVLSSGVAGTMIADKAGLQMSTVRSIALAWLFTLPASMALAAGLYYLAAQWF

SEQ ID NO: 4394 - DNA, 1491 bp, Photorhabdus luminescens subsp. laumondii TTO1
  CDS (1)..(1491): transl_table=11
atgctacatctttttactggcctggattttcacaccagcctaatgttagtactggcactactgtttgtgctattttatgaagccattaatggctttcatgataccgcgaatgcggtagcaacagttatttatacccgtgctatgcgagcacagttcgccgttgttatggctggggtatttaacttctttggtgttcttcttggtggattaagtgtcgcttacgcgattgtacatttacttccaaccgatcttcttcttaatgtcagttctgctcatggccttgctatggtgttttccatgttgctggctgcgattgtctggaaccttgggacctggtatttcggtttacctgcatccagttctcataccctgattggttctatcattggtatcggtttgaccaatgcgatcgtaaccggttcttctgtggttgatgcgttgaatgtgccgaagatgatacagattttcctgtcgttgatcctctctcctttaatcggattgatcattgcgggggcaatcgtgtttctactgcgccgttactggagtagcaccaagaaacgtaaacgtattcatctgactcccgctgaacgtgaaaagaaggatggtaagcgtaaacctcctttctggacacggactgcgctgattttatctgcggtaggtgtaagcttctctcatggggcgaatgatggtcagaaaggtatcggtctgattatgctggtgctaattggtgtagctccagcgggatttgtcgtaaacatgaatgctaatggttatgacattgcccgtacctacgatgccattactcacttgcagcaatattatcagcagcatggtgcagcgttatcccatgcaattgaactgacgccatcggtcgttgttgcggaagatgaaccggaagggcgattccattgtgatattacgcgtgctgtcgttgttcttgaccagacagaaagcctattaaaaggcattcagagctacagtgagctgaatgctgaacagcgtaacaatatgcgccgcatgttgatgtgtattgctgatacggctgagtctctggctaaactgccggaaacccgtgctgaagacgcccgtttcctgaataaattgcggaaagacttattacacaccgttgagtatgcaccagtctggatcatcattgcggtagcactggctctgtctttggggacactggttggttggaaacgtgttgcagtcactattggtgagaagattggtaaaaaaggtatgacctacgcacagggtgtttcagctcagatgactgctgctgtttcaatcggtgtggcgagttataccgggatgccagtttcaactacacaggttctttcctctgcggtagcggggacgatgttggttgatggcggtggtgttcagggtaaaactatccagaatatcatgttggcttggatactgacgctgccggtttcaatcgggttgtctggtacgctttactggttcgctttgaaactgatttaa

SEQ ID NO: 4395 - protein, 496 aa, Photorhabdus luminescens subsp. laumondii TTO1
MLHLFTGLDFHTSLMLVLALLFVLFYEAINGFHDTANAVATVIYTRAMRAQFAVVMAGVFNFFGVLLGGLSVAYAIVHLLPTDLLLNVSSAHGLAMVFSMLLAAIVWNLGTWYFGLPASSSHTLIGSIIGIGLTNAIVTGSSVVDALNVPKMIQIFLSLILSPLIGLIIAGAIVFLLRRYWSSTKKRKRIHLTPAEREKKDGKRKPPFWTRTALILSAVGVSFSHGANDGQKGIGLIMLVLIGVAPAGFVVNMNANGYDIARTYDAITHLQQYYQQHGAALSHAIELTPSVVVAEDEPEGRFHCDITRAVVVLDQTESLLKGIQSYSELNAEQRNNMRRMLMCIADTAESLAKLPETRAEDARFLNKLRKDLLHTVEYAPVWIIIAVALALSLGTLVGWKRVAVTIGEKIGKKGMTYAQGVSAQMTAAVSIGVASYTGMPVSTTQVLSSAVAGTMLVDGGGVQGKTIQNIMLAWILTLPVSIGLSGTLYWFALKLI

SEQ ID NO: 4396 - DNA, 1629 bp, Acinetobacter sp. ADP1
  CDS (1)..(1629): transl_table=11
atgaattcaaatctaccccctgtttcggattcaaagcttgtggaaccttcccttgcaaaatcgacgaatgtacatgtacctacaccgaaattttttatgccggtgttttttacaattattattgcaaccctgatttacattggatttcaggtgaatgctgatttggcgcacgtaccgcctttaaatttatactctgttattttactttctactgcattattgattgcattaggttttgagtttgttaatggctttcatgacacagcaaatgccgttgcaacggtgatttataccaatgcattgcctgcacctgtagccgtgatgtgggcaggtttctgtaattttctgggtgttatggtggctagcggcgccgtagcatacggaatcattgcattattgcccgtcgaactgattatgaatgtcagtagtggcgctggctttgccatggtttttgcacttttaattgccgcgattatctggaacttaggaacatggtttcttggtattccagcttcaagttctcacaccctgattggttcaattttgggtgtaggtatcatgaaccatattttgaatgcatcttctggaagcagtggcatcgatatggatcaagtcattaaagtgggtaaagcattattattttctcctttaattggttttgcttttgcagcagtcttattccttttggtcaagaaagtttttagacgtcaacttgaactttttcagccacctgaaggcaataaaccgccgccacccatcattcgtgcgattctgatttttacctgtactggtgtaagttttgctcacggttctaatgacggccaaaagggtatgggtctgatcatgctcattttgattggattggtaccactcgcgtattcattgaataaaaatcttgatgcacaatatttaaagtcttttgagcaactttcgagcgaaactgcaatcgttttgcatgcaaatcaggctgagatgaaagatgaaaaagcgcgtgaaattctgaccaaatatattcagaccaaacagcaaacgccagaagttgttcctgctttggcaagtattacagatcatcttggtcagcgcgttgcaacgtatggtgatttaaaagatattccagaagttgcagtgagtgaaatccgcaatgatatgtatttaagtacaaccacttttaaacgtctggataaagctgaagcgcttccagcaatgacacctcaacaagaaggtgttgtaaaagaataccgtagtaatctggatggtttcttacaatacattccaaactgggtgaaggttgctgtagcattagctttaggtcttggcaccatggtgggctggaagcgtattgtggtgactgtaggtgagcgtattggtaaaaaccatatgacttacggtcagggaatgtctgctgaattagttgcaatgagtaccattgctgctgccgatggtttgggcatgccagtatcaacgacgcatgtattaaatagtgcagttgctggtaccatggttgccaataaatcaggtctaaactttaatacagttaaaaccattatttcggcatggatttttaccttgccagccacgatctgtttgtcaggtggcttatattggttatttttacagtttgtaaattaa

SEQ ID NO: 4397 - protein, 542 aa, Acinetobacter sp. ADP1
MNSNLPPVSDSKLVEPSLAKSTNVHVPTPKFFMPVFFTIIIATLIYIGFQVNADLAHVPPLNLYSVILLSTALLIALGFEFVNGFHDTANAVATVIYTNALPAPVAVMWAGFCNFLGVMVASGAVAYGIIALLPVELIMNVSSGAGFAMVFALLIAAIIWNLGTWFLGIPASSSHTLIGSILGVGIMNHILNASSGSSGIDMDQVIKVGKALLFSPLIGFAFAAVLFLLVKKVFRRQLELFQPPEGNKPPPPIIRAILIFTCTGVSFAHGSNDGQKGMGLIMLILIGLVPLAYSLNKNLDAQYLKSFEQLSSETAIVLHANQAEMKDEKAREILTKYIQTKQQTPEVVPALASITDHLGQRVATYGDLKDIPEVAVSEIRNDMYLSTTTFKRLDKAEALPAMTPQQEGVVKEYRSNLDGFLQYIPNWVKVAVALALGLGTMVGWKRIVVTVGERIGKNHMTYGQGMSAELVAMSTIAAADGLGMPVSTTHVLNSAVAGTMVANKSGLNFNTVKTIISAWIFTLPATICLSGGLYWLFLQFVN

SEQ ID NO: 4398 - DNA, 1506 bp, Erwinia carotovora subsp. atroseptica SCRI1043
  CDS (1)..(1506): transl_table=11
atgctacatttatttgccggactggattactacaccggcctgatgttgatattggctttgttgtttgtgctgatgtatgaagccattaacggttttcacgatactgcgaatgccgttgccactgttatttatacccgagccatgcgcgccgagtttgccgttgttatggcgggtgtctttaatttcttcggtgtactgctgggcggcctgagcgtggcctatgcgattgttcaccttcttcccacggatttattgctgaacgtgagttcggcgcacggtctggcgatggtcttttccatgctgctggccgcgattatctggaacctgggtacctggtattttggtattcctgcctccagttcccacacgcttatcggtgccattatcggtattggtttgaccaacgctttgctgacggatacctccatcgttgatgcgttgaacgtaccgaaaatgatcagcattttcctgtcgttgctgctatcgccaattgtggggatggtagtcgcaggcctgatgctgctggtgctgcgtcggttctggaacaacagtaaaaaacgcaaacgcgtgcatctgacgcccgtcgatcgcgagaagcaggacggcaaacgtaagccgccgttctggacgcgtaccgcgctgatcttgtcggcgattggtgtgagcttctctcacggtgcaaacgacggtcagaaaggtatcggcttgattatgctggtgctgattggtgtcgcgccagccgggtttattgtcaacatgaacgcatctggctatgacatcagccgtacccgcgatgccgttgtcaatttacaggaatactacaagcagcatggcgacgcgttgacgcacgttatcgatctgtctccgccagtaattcctgtgccagaaagtacgattcccggcaacggtcagaaagaattccactgtgatagttcacgcgtgatgatcgcgattgaacgtactcagggtctgctgaataacctgaaaagttacgaccagttgaatcctgacgatcgtagcagagtgcgtcgcttgttgatgtgcatcgcggatacgatggatcgggtggttaagctgccagaaacgtcgggcgaagataaacgctacctgaacaacctgcgtaaagacatgctgcagacggttgaatacgcgcctctctggattatcgtcgcggttgcgttggcgctgtctctgggcacgatggtgggctggaaacgcgttgctgtgaccatcggtgagaagattggtaagaaaggcatgacctacgcacaaggcgtttcggcgcaggtgacggctgccttgtcgattggtgttgcgagctacaccgggatgccagtttccaccacgcacgtattgtcctcggcggttgctgggacgatgattgcggacggtgggggcgtacagggcaaaacgataagaagcattctgctggcctgggtattgacgctgccagtctcaatgttgatgtctggtacgctgtactggctggcgttgaagctgatctaa

SEQ ID NO: 4399 - protein, 501 aa, Erwinia carotovora subsp. atroseptica SCRI1043
MLHLFAGLDYYTGLMLILALLFVLMYEAINGFHDTANAVATVIYTRAMRAEFAVVMAGVFNFFGVLLGGLSVAYAIVHLLPTDLLLNVSSAHGLAMVFSMLLAAIIWNLGTWYFGIPASSSHTLIGAIIGIGLTNALLTDTSIVDALNVPKMISIFLSLLLSPIVGMVVAGLMLLVLRRFWNNSKKRKRVHLTPVDREKQDGKRKPPFWTRTALILSAIGVSFSHGANDGQKGIGLIMLVLIGVAPAGFIVNMNASGYDISRTRDAVVNLQEYYKQHGDALTHVIDLSPPVIPVPESTIPGNGQKEFHCDSSRVMIAIERTQGLLNNLKSYDQLNPDDRSRVRRLLMCIADTMDRVVKLPETSGEDKRYLNNLRKDMLQTVEYAPLWIIVAVALALSLGTMVGWKRVAVTIGEKIGKKGMTYAQGVSAQVTAALSIGVASYTGMPVSTTHVLSSAVAGTMIADGGGVQGKTIRSILLAWVLTLPVSMLMSGTLYWLALKLI

SEQ ID NO: 4400 - DNA, 1497 bp, Yersinia pseudotuberculosis IP 32953
  CDS (1)..(1497): transl_table=11
atgctacatcttttcgctggcctggatttccataccggccttatgttagttcttgctttgttgttcgtgctgttttacgaagccatcaatggttttcatgatacagccaatgcggttgcgaccgtaatctatacccgtgccatgcgttcacagatcgcagttgtgatggcaggggtgtttaacttcctcggcgtgatgctgggtggtttgagcgtggcctacgccattgttcacttactgcctactgatctgctgttaaacgtcagttccacgcatgggttggcaatggtcttctccatgttactggccgcgattatctggaatttgggtacctggtattttggtattccagcctccagttctcatacgctgattggtgctatcatcggtattggtctaaccaatgcattaatgaccagtacatccgttgtggatgcgctgaacgttcctaagatgatacaaatctttctgtcgctgatcttatccccgattgtgggtctggttatcgccggtttgatggtattcctgctacgtcgttactggagcagtaccaaaaagcagcaacgtattcacctgacgcctgctgaacgtgaaaagaaagacggtaaacgtaagccgccattctggacccgcacggcgctgatcctctccgctatcggtgtgagtttctctcacggcgctaacgatggtcagaaagggattggcttgatcatgctggtattaatcggtgtggctccggctggttttgtcgtgaatatgaatgcgactggctatgatattgcccgcacccgcgatgcagtcactcatgtgcaactctattatcagcaacatgctgaggcattgcctcatgccatcgcgctgaaaccactggtgccagccccagaaaccttgccaggtacacctgcgcaattccactgtgacacttcacgcgctatggtcgccattaaccatgcacaagcgctgctgaccgatctgaaaagctatgatgacctaaccgttgatcaacgcagccaaatgcgtcgcttgctgatgtgtgtcgcagaaaccgcaggggccgttgccaaactgccagaaaccagtgctgaaaaccgccgtttcctcaacaatctgcgtaccgatttgttggacacagtggaatatgcaccaacctggattatcgtagcggttgctctggctctgtctctggggacgatgatcggttggagacgtgttgccgtcactatcggtgagaagatcggcaaaaaaggcatgacctatgctcaaggggtttcagcccagatgactgcggcggtctctatcggtattgccagttataccggcatgccagtatcgaccactcaagtgctctcttctgctgttgccgggaccatgttggtcgatggcggtggcgtgcagagtaaaacggtgaagaacattatgttggcctgggtcttaaccctgccaatctctatcttcctttccggtgcactgtattggatagctttaaagttcatttaa

SEQ ID NO: 4401 - protein, 498 aa, Yersinia pseudotuberculosis IP 32953
MLHLFAGLDFHTGLMLVLALLFVLFYEAINGFHDTANAVATVIYTRAMRSQIAVVMAGVFNFLGVMLGGLSVAYAIVHLLPTDLLLNVSSTHGLAMVFSMLLAAIIWNLGTWYFGIPASSSHTLIGAIIGIGLTNALMTSTSVVDALNVPKMIQIFLSLILSPIVGLVIAGLMVFLLRRYWSSTKKQQRIHLTPAEREKKDGKRKPPFWTRTALILSAIGVSFSHGANDGQKGIGLIMLVLIGVAPAGFVVNMNATGYDIARTRDAVTHVQLYYQQHAEALPHAIALKPLVPAPETLPGTPAQFHCDTSRAMVAINHAQALLTDLKSYDDLTVDQRSQMRRLLMCVAETAGAVAKLPETSAENRRFLNNLRTDLLDTVEYAPTWIIVAVALALSLGTMIGWRRVAVTIGEKIGKKGMTYAQGVSAQMTAAVSIGIASYTGMPVSTTQVLSSAVAGTMLVDGGGVQSKTVKNIMLAWVLTLPISIFLSGALYWIALKFI

SEQ ID NO: 4402 - DNA, 1485 bp, Burkholderia mallei ATCC 23344
  CDS (1)..(1485): transl_table=11
gtgttcgttcacctgttcgcggatctcgcgcccgtcggcccacgctcggcgtttccgtatctgctgctcggcgtcgcgctcgcgatcgcgctcggcttcgagttcgtcaacggcttccacgacaccgcgaacgccgtggcgaccgtgatctacacgcattcgctgacgccgaacgtcgcggtcatctggtcgggcctctggaattttctcggcgtgatggcgtcgacgggcgcggtcgcgttcggcatcctgcaactgctgcccgtcgagctgatcctgcaagtcggccacggcgcgggcttcgcgatggtgttcgcgctgctgatcgcggcgatcgcgtggaatctcgcgacctggtacttcggcctgccttcgtcgagctcgcacacgctgatcggctcgatcatcggcgtcgggctcgcgaatcagctgatgcacgggccgtccggcacgagcggcgtcgattgggcgcaggcggcgggcgtcggccaatcgctgctgctctcgccgctcgtcggcttcctgtgcgcggccctgctgctcgccgcgctgaaggcgctcgtgcgcgtgcccgcgctctaccgcgagccgcagacgaacgagccgccgccgttctgggtccgctgcctgctgatcctgacctgcaccggcgtgtcgttcgcgcacggctcgaacgacgggcagaaaggcatggggctcatcatgctgatcctgatcggcaccgtgccgaccgcatacgcgctcaacaaggcggtcacgcccggcgagacgcaaacgttcatcgccgtcgcacaccgcgcgtccgaaacgctcgcccgctacgcgggcgccgcgcagccgtcgccgaacccgcgcgccgatgtcgaggcttacgtgcagtcgcgccgcctgagcgacgcgacgctgcccgcggttcgccggttgtcggacgcgctcgcggccgaagtcggcgcgacgggctcgatcgcgaaagtgcccgaggggcaggcggacaacgtgcgcaacacgatgtatctggtgtccgaagccctgcgcctgatggagaaaaccggccggccggcgttctcgccggcggatcgcctcgcgctcgacgactaccgcaggcagctcgaccacgcgaccaaattcattccgacctgggtgaaggtcgcggtggcgatcgcgctcggcctcggcacgatggtcggctggcggcgcatcgtcgtgaccgtcggcgagaagatcggcaagcagcatctgacctatgggcaaggcgcgtcggcggaagtcgtcgcgatgctcacgatcggcgcggccgatgcgtacgggctgccggtgtcgacgacgcacgtgctgtcttccggcgtcgcgggcacgatggccgcgaacggctccgggctgcaatggagcacggtgcgcagcctcgtgctcgcgtgggtgttgacgctgcccgcgtcgatcgtgctcgcgggcgcgctctattgggctttccacgcgctgacctga

SEQ ID NO: 4403 - protein, 494 aa, Burkholderia mallei ATCC 23344
MFVHLFADLAPVGPRSAFPYLLLGVALAIALGFEFVNGFHDTANAVATVIYTHSLTPNVAVIWSGLWNFLGVMASTGAVAFGILQLLPVELILQVGHGAGFAMVFALLIAAIAWNLATWYFGLPSSSSHTLIGSIIGVGLANQLMHGPSGTSGVDWAQAAGVGQSLLLSPLVGFLCAALLLAALKALVRVPALYREPQTNEPPPFWVRCLLILTCTGVSFAHGSNDGQKGMGLIMLILIGTVPTAYALNKAVTPGETQTFIAVAHRASETLARYAGAAQPSPNPRADVEAYVQSRRLSDATLPAVRRLSDALAAEVGATGSIAKVPEGQADNVRNTMYLVSEALRLMEKTGRPAFSPADRLALDDYRRQLDHATKFIPTWVKVAVAIALGLGTMVGWRRIVVTVGEKIGKQHLTYGQGASAEVVAMLTIGAADAYGLPVSTTHVLSSGVAGTMAANGSGLQWSTVRSLVLAWVLTLPASIVLAGALYWAFHALT

SEQ ID NO: 4404 - DNA, 1587 bp, Burkholderia pseudomallei K96243
  CDS (1)..(1587): transl_table=11
atgaatccccttctgtccgccgcggcgagcgaagagctcggtcgcacccggcatctgggcgtcgcgctgctcgtcgccctcctcgccgccggcgtcgcgtacgtgttcgttcacctgttcgcggatctcgcgcccgtcggcccacgctcggcgtttccgtatctgctgctcggcgtcgcgctcgcgatcgcgctcggcttcgagttcgtcaacggcttccacgacaccgcgaacgccgtggcgaccgtgatctacacgcattcgctgacgccgaacgtcgcggtcatctggtcgggcctctggaattttctcggcgtgatggcgtcgacgggcgcggtcgcgttcggcatcctgcaactgctgcccgtcgagctgatcctgcaagtcggccacggcgcgggcttcgcgatggtgttcgcgctgctgatcgcggcgatcgcgtggaatctcgcgacctggtacttcggcctgccttcgtcgagctcgcacacgctgatcggctcgatcatcggcgtcgggctcgcgaatcagctgatgcacgggccgtccggcacgagcggcgtcgattgggcgcaggcggcgggcgtcggccaatcgctgctgctctcgccgctcgtcggcttcctgtgcgcggccctgctgctcgccgcgctgaaggcgctcgtgcgcgtgcccgcgctctaccgcgagccgcagacgaacgagccgccgccgttctgggtccgctgcctgctgatcctgacctgcaccggcgtgtcgttcgcgcacggctcgaacgacgggcagaaaggcatggggctcatcatgctgatcctgatcggcaccgtgccgaccgcatacgcgctcaacaaggcggtcacgcccggcgagacgcaaacgttcatcgccgtcgcacaccgcgcgtccgaaacgctcgcccgctacgcgggcgccgcgcagccgtcgccgaacccgcgcgccgatgtcgaggcttacgtgcagtcgcgccgcctgagcgacgcgacgctgcccgcggttcgccggttgtcggacgcgctcgcggccgaagtcggcgcgacgggctcgatcgcgaaagtgcccgaggggcaggcggacaacgtgcgcaacacgatgtatctggtgtccgaagccctgcgcctgatggagaaaaccggccggccggcgctctcgccggcggatcgcctcgcgctcgacgactaccgcaggcagctcgaccacgcgaccaaattcattccgacctgggtgaaggtcgcggtggcgatcgcgctcggcctcggcacgatggtcggctggcggcgcatcgtcgtgaccgtcggcgagaagatcggcaagcagcatctgacctacgggcaaggcgcgtcggcggaagtcgtcgcgatgctcacgatcggcgcggccgatgcgtacgggctgccggtgtcgacgacgcacgtgctgtcttccggcgtcgcgggcacgatggccgcgaacggctccgggctgcaatggagcacggtgcgcagcctcgtgctcgcgtgggtgttgacgctgcccgcgtcgatcgtgctcgcgggcgcgctctattgggctttccacgcgctgacctga

SEQ ID NO: 4405 - protein, 528 aa, Burkholderia pseudomallei K96243
MNPLLSAAASEELGRTRHLGVALLVALLAAGVAYVFVHLFADLAPVGPRSAFPYLLLGVALAIALGFEFVNGFHDTANAVATVIYTHSLTPNVAVIWSGLWNFLGVMASTGAVAFGILQLLPVELILQVGHGAGFAMVFALLIAAIAWNLATWYFGLPSSSSHTLIGSIIGVGLANQLMHGPSGTSGVDWAQAAGVGQSLLLSPLVGFLCAALLLAALKALVRVPALYREPQTNEPPPFWVRCLLILTCTGVSFAHGSNDGQKGMGLIMLILIGTVPTAYALNKAVTPGETQTFIAVAHRASETLARYAGAAQPSPNPRADVEAYVQSRRLSDATLPAVRRLSDALAAEVGATGSIAKVPEGQADNVRNTMYLVSEALRLMEKTGRPALSPADRLALDDYRRQLDHATKFIPTWVKVAVAIALGLGTMVGWRRIVVTVGEKIGKQHLTYGQGASAEVVAMLTIGAADAYGLPVSTTHVLSSGVAGTMAANGSGLQWSTVRSLVLAWVLTLPASIVLAGALYWAFHALT

SEQ ID NO: 4406 - DNA, 1632 bp, Methylococcus capsulatus str. Bath
  CDS (1)..(1632): transl_table=11
atggtacagaatgctcgtgaggcggtggcggcgcccattgcggcggtagtggaaaaaccgaagctggaaacccgcgccggatcggtcgggtcgatcgttttcatggggcttctcggcgtcggcgtcgccttcacggcgtacggcctgcaaagcgacgtggccggtgccggtaccgcgctggctttggcgcctttgctgctgctcgggctgtcgctcctgatcgccctgggtttcgagttcgtgaacggattccacgatacggcgaatgccgtcgccaccgtcatctacacccattcgctgccgccgatggccgcggtggtgtggtcgggtgtctggaatttcgtcggcgtgctggtgtcgtcgggggccgtcgccttcggcatcgtttcccttttgccggtcgaactgattctccaggtggggagcgacgcgggcttcgccatggtgttctcgctgctgatcgcggccatcttgtggaatctcgggacctggtatttcggcctgccggcctccagctcgcacaccctgatcggctcgatcatcggcgtcgggctcgccaacgagctgatgtatcggggcgggtccgccacctcgggggtggactggtcgcaggcggcgaaagtgggccaatcgctcttgatgtcgccactcatcggggccgtcgccgccggtctgctgctggtcgtactcaagttcgtcgtcgccaatcccaggctctaccgcgctccggaaggcttgcggccgccgccgtggtggatacgcggcgtcctggtgctgacctgcaccggcgtctccttcgcgcacggctcgaacgacgggcagaaaggcatggggctgatcatgctgatcctgatcggcatcgtgccgaccgcctatgccttgaatcgggcggtgccggactcctacgtacccgaattcctggccttgtcgcatgtcgtcgggcaggcactgctggaaaagtcggaaggggcgaaagaattcgacggtgatccccggcctgccgtgaccgacttcatccggacccgccaaccggggccggatacgctggcggcgaccgcgaagctggtcggggaaatcgccggcaccatcgaaaaaaccggttcgctcgcccacattcccgtgaccaagacccagaacgtccgcaacgacatgtacctcctcgacgaggcgatgcggcggctggaaaagctgggccagccggtgttcgacgagcgcacgagaaaggagatcggcggctaccgcaaggcgctggggaacgccacccgcttcatccccacctgggtgaaggtcgccgtcgccatcgccctgggcctgggcacgatggtgggctggcggcgcatcgtggtgaccgtcggcgaaaagatcggcaagcagcacctgacctacggccagggcgcgtcggcggaactggtggccatgagcaccatcgcggcggcggacatgtacgggctgccggtgtcgacgacccacgtgctgtcgtcaggagtggccgggacgatggcggccaatggctcgggtctgcagtggtccacgatccgcaatctggccatggcctgggtgttgaccctgcctgccgcggtcctgctttccgggagcctcttcttcgtgtttcaccagatgatcgcccattga

SEQ ID NO: 4407 - protein, 543 aa, Methylococcus capsulatus str. Bath
MVQNAREAVAAPIAAVVEKPKLETRAGSVGSIVFMGLLGVGVAFTAYGLQSDVAGAGTALALAPLLLLGLSLLIALGFEFVNGFHDTANAVATVIYTHSLPPMAAVVWSGVWNFVGVLVSSGAVAFGIVSLLPVELILQVGSDAGFAMVFSLLIAAILWNLGTWYFGLPASSSHTLIGSIIGVGLANELMYRGGSATSGVDWSQAAKVGQSLLMSPLIGAVAAGLLLVVLKFVVANPRLYRAPEGLRPPPWWIRGVLVLTCTGVSFAHGSNDGQKGMGLIMLILIGIVPTAYALNRAVPDSYVPEFLALSHVVGQALLEKSEGAKEFDGDPRPAVTDFIRTRQPGPDTLAATAKLVGEIAGTIEKTGSLAHIPVTKTQNVRNDMYLLDEAMRRLEKLGQPVFDERTRKEIGGYRKALGNATRFIPTWVKVAVAIALGLGTMVGWRRIVVTVGEKIGKQHLTYGQGASAELVAMSTIAAADMYGLPVSTTHVLSSGVAGTMAANGSGLQWSTIRNLAMAWVLTLPAAVLLSGSLFFVFHQMIAH

SEQ ID NO: 4408 - DNA, 1617 bp, Pseudomonas syringae pv. syringae B728a
  CDS (1)..(1617): transl_table=11
atggctacaaacgcactgtctccagacgctctcggcaaggcgagcctgtcagcgagtcaattcggtcgcaagcccagccgaatgaccatgatacttttcttcacgatactcatcgcaggcttgctgttcaccggctacagcctcaaacaggacgttgacgacatgggcacggtggtcaccacctggaccccgttcgtgctgttgggcgtagcgttgctgatcgccttgggcttcgagttcgtcaacggctttcatgacacggccaacgcggtcgccaccgtgatctacacccactccctgccgcccggctttgcagtggtctggtcaggcttcttcaattttctcggcgtgatgttttccagcggcgcggtggcattcggcatcattgccctgctgccggtggaactgatcctgcaaaccggctcatcggcgggcttcgcgatgatcttcgcgctgttgatcgcggcgatcatctggaacctcggcacctggtggctgggtctgccggcgtcctcgtcacacacgctgatcggttcgatcatcggcgttggcatcgccaacgccctgatgcacgggcgggacggcaccagtggcgtggactggtcgcaggccaccaagatcggttactcactgctgctctcgcccctggtgggcttcggctgtgcggcgttgctgttgctggccatgcgcatgttcatcaagaaccgcgcgctgtacaaggctccggaaggcaatgcgccgccaccgttgtggattcgcgccatgctgatcgtgacctgcacgggcgtgtcgttcgcgcatggctccaacgatgggcagaaaggcatgggcctgatcatgctgattctggtcggcacactgccgatggcttatgcgctgaaccgcaccatgcccgccgaacaggctacccagttcgctgccgtggctgaagtaacccagcaggcgctgatccgcagcgtccctcaaccggcccccggggatgcgcgcaagacgctgtcggattacctggtcagcaaggaagcgagtcctgagctgatccctgcgctggcggtcatggctggcaagatcggcgatcaggtcgccagttatggctcgctgtctaaggtgcctgccgaagccgtgaccaacgtgcgtaacgacatgtatctgacctcggaaagcatccgcctgatggagaaaaacaaggtcggcgatttcgacgcggacaccaagaccaagcttgaggcgttcaaggggcagatcgacagtgctacgcggttcattccgacctgggtcaagattgtcgtggccatcgccttgggtctgggcacgatggtcggctggaagcgtatcgtggtgacggtgggcgagcgcatcggcaagacgcacatgacttacgcccagggcgcgtcggcagaggtcgtggcgatgttcacgatcggcgcggcggacatgtatgggctgccggtatccactacgcatgtgctgtcgtccggcgtggccggttcgatggtcgccaatggctcggggctgcaaatgcgtaccctgcgtaatctggccactgcctgggtgctgaccctgccggcggcgatcctcttgtcaggttcgttgtattgggtgttcagcaagctgttctga

SEQ ID NO: 4409 - protein, 538 aa, Pseudomonas syringae pv. syringae B728a
MATNALSPDALGKASLSASQFGRKPSRMTMILFFTILIAGLLFTGYSLKQDVDDMGTVVTTWTPFVLLGVALLIALGFEFVNGFHDTANAVATVIYTHSLPPGFAVVWSGFFNFLGVMFSSGAVAFGIIALLPVELILQTGSSAGFAMIFALLIAAIIWNLGTWWLGLPASSSHTLIGSIIGVGIANALMHGRDGTSGVDWSQATKIGYSLLLSPLVGFGCAALLLLAMRMFIKNRALYKAPEGNAPPPLWIRAMLIVTCTGVSFAHGSNDGQKGMGLIMLILVGTLPMAYALNRTMPAEQATQFAAVAEVTQQALIRSVPQPAPGDARKTLSDYLVSKEASPELIPALAVMAGKIGDQVASYGSLSKVPAEAVTNVRNDMYLTSESIRLMEKNKVGDFDADTKTKLEAFKGQIDSATRFIPTWVKIVVAIALGLGTMVGWKRIVVTVGERIGKTHMTYAQGASAEVVAMFTIGAADMYGLPVSTTHVLSSGVAGSMVANGSGLQMRTLRNLATAWVLTLPAAILLSGSLYWVFSKLF

SEQ ID NO: 4410 - DNA, 1473 bp, Pseudomonas syringae pv. syringae B728a
  CDS (1)..(1473): transl_table=11
atgatcgatttattcagcgggcttgatgcctgggtgcttgtgagcctgttgctcgccctggctttcgtcctcaccttcgagttcatcaacggctttcatgacaccgccaacgcggtggcgacagtcatttacaccaaagcaatgccgcctcatctggccgtgttcttctccggtgtattcaactttctcggcgtgttgctgggcggcgtgggcgttgcctatgccatcgtgcatctgctgccggtcgaactgctcatcaacgtcaacaccggacacggcctggccatggtgttctcgctgctggcggcggccattacctggaacctcgggacttggtacttcggtattccggcctccagttcgcacacgctgatcggctcgatactcggtgtgggtctggccaatgccctgctcaacgatatcccgttggccgatggcgtgaactggcagaaagcgatcgatatcggcgcttcgctggtgttctcgccgctggccggctttatcgttgcgggtctggtgctggttgccctgaaatggtggcgcccgctgtcgaagatgcacaagacccctgaccagcgccgcaagctggacgacaagaagcaccctccgttctggaaccgtctggtactggtcatttccgccatggcagtcagcttcgtacacggttcgaatgacggccagaaaggcattggcctgatcatgctggtgctgatcggcatcgtgcccagccagttcgtgcttgacctgaccagcacgacctaccagatcgaacgtacccgcgatgcgacccagcatctgagccagttctatcagcgcaacagcagcacgctgggcgaatatctggccatgggcaaagccgaaaaaggcgacctgccgtccagctccgcgtgtaatccgaagcagaccgaacctaccatcgacgcgctgctcgaccgcctgaagggcgtgtccgactaccacgcgctggcccctgaaagccgcatcgaagtgcgtcgctatctgttgtgcctggacgacaccgcccgcaaggtcggcaaacttccagacctgtcagcgcgtgaaaaatccgatctggagaaacttcgcaaggacctgaccaccaccaccgagtacgcaccgttctgggtgattctggcggtcgcactggcgctgggtatcggcaccatggtcggctggaagcgtgtagtcctgacgatcggcgagaagatcggcaagcagggcatgacttacgcacaaggcatgtccgcgcaaatcactaccgcctgcgcaatcggtctggccaacgtgttcagccttccggtgtccaccacgcacattctgtcgtcgggtgtggccggcaccatggtcgccaacaagagcggccttcagggcggaaccgtgcgcaccatcctgctggcctgggtgctgaccctgccggcaacggtcgccttgtccgcagcgctgttctggctggcttccaaggccctggcctga

SEQ ID NO: 4411 - protein, 490 aa, Pseudomonas syringae pv. syringae B728a
MIDLFSGLDAWVLVSLLLALAFVLTFEFINGFHDTANAVATVIYTKAMPPHLAVFFSGVFNFLGVLLGGVGVAYAIVHLLPVELLINVNTGHGLAMVFSLLAAAITWNLGTWYFGIPASSSHTLIGSILGVGLANALLNDIPLADGVNWQKAIDIGASLVFSPLAGFIVAGLVLVALKWWRPLSKMHKTPDQRRKLDDKKHPPFWNRLVLVISAMAVSFVHGSNDGQKGIGLIMLVLIGIVPSQFVLDLTSTTYQIERTRDATQHLSQFYQRNSSTLGEYLAMGKAEKGDLPSSSACNPKQTEPTIDALLDRLKGVSDYHALAPESRIEVRRYLLCLDDTARKVGKLPDLSAREKSDLEKLRKDLTTTTEYAPFWVILAVALALGIGTMVGWKRVVLTIGEKIGKQGMTYAQGMSAQITTACAIGLANVFSLPVSTTHILSSGVAGTMVANKSGLQGGTVRTILLAWVLTLPATVALSAALFWLASKALA

SEQ ID NO: 4412 - DNA, 1476 bp, Pseudomonas fluorescens Pf-5
  CDS (1)..(1476): transl_table=11
atgatcgatttattcagcggactggatgcttgggtgcttgtgagcctcttgctcgccctggcttttgtcctcgcctacgagttcatcaacggctttcatgacaccgcaaatgcggttgccactgttatctacaccaaggccatgccgccgcacctggccgtgttcttctccggtgtgttcaatttcctcggtgtgctgctgggcggggttggcgtggcctatgccatcgtccacctgctgccggtcgagctgctgatcaacgtcaacaccggccacggcctggccatggtcttctcgttgctcgccgcggccattacctggaacctgggcacctggtatttcggcattccggcctccagttcccataccctgatcggctccatcctcggtgtcggcctggccaatgccctgctcagcgacatccccctgggggatggcgtgaactggcagaaggcaatcgacatcggcgcttccctggtgttctcgccgatggcgggcttcattattgcagcgctggtactgatcggcctgaaatggtggcggccgatctcgaagatgcacaagactccggaacagcgccgcaaggtcgatgacaagaagcacccgccgttctggaaccgcctggtactggtgatctcggccatggccgtgagcttcgtgcacggctccaacgacggccagaaaggcatcggcctgatcatgctggtactgatcggtatcgtgcctgcccagttcgtgatggacctcaacagcaccacctaccagatcgagcggacccgcgacgccaccctgcacctgagccagttctacgagcgcaatcacgagtccctgggtgagttcctggccctgggcaaaagcgtgaaagacgacctgccgggcaagttccgctgcaatccgcagcaaaccgaaccgaccatcgccgcgctcctgagcagcctcaagggcgtttccgactaccattcgttgtcgccggaaagccgcatcgaagtgcgtcgctacctgctttgcctggatgacaccgcgaaaaaggtcggcaagctgccaggcatctcggcccgtgaaaaggccgacctggacaagctgcgcaaagacctgaccgccaccaccgaatacgcaccgttctgggtcatcctggctgtcgccctggctctgggcctgggcaccatgatcggctggaagcgcgtagtgcagaccattggcgagaagatcggcaagcagggcatgacctacgcccagggcatgtcggcacagatcaccgccgccggcctgatcggcctggcgaacatcttcagcctgccggtttccaccacccacgtactttcctccggcgtggccgggaccatggtcgccaacaagagcggcctgcagagcggaacggtacggaccatcctcctggcctgggtcctgaccctgccggcgaccgtggccctgtccgccggcctgttctgggcagcctccaagatcctgggtacctga

SEQ ID NO: 4413 - protein, 491 aa, Pseudomonas fluorescens Pf-5
MIDLFSGLDAWVLVSLLLALAFVLAYEFINGFHDTANAVATVIYTKAMPPHLAVFFSGVFNFLGVLLGGVGVAYAIVHLLPVELLINVNTGHGLAMVFSLLAAAITWNLGTWYFGIPASSSHTLIGSILGVGLANALLSDIPLGDGVNWQKAIDIGASLVFSPMAGFIIAALVLIGLKWWRPISKMHKTPEQRRKVDDKKHPPFWNRLVLVISAMAVSFVHGSNDGQKGIGLIMLVLIGIVPAQFVMDLNSTTYQIERTRDATLHLSQFYERNHESLGEFLALGKSVKDDLPGKFRCNPQQTEPTIAALLSSLKGVSDYHSLSPESRIEVRRYLLCLDDTAKKVGKLPGISAREKADLDKLRKDLTATTEYAPFWVILAVALALGLGTMIGWKRVVQTIGEKIGKQGMTYAQGMSAQITAAGLIGLANIFSLPVSTTHVLSSGVAGTMVANKSGLQSGTVRTILLAWVLTLPATVALSAGLFWAASKILGT

SEQ ID NO: 4414 - DNA, 1611 bp, Pseudomonas fluorescens Pf-5
  CDS (1)..(1611): transl_table=11
atggccaccccgtccctgactgccgcttcgtccaacctcgacagcaaaccgcaactggataaaaagcccggccccttcaccctcgtcgccttcttcgcggtgctggccatgggcttgctgttcaccgcctacagcctggtgcacgacatgcacgagctgggcaccacggtcaccacctggaccccgttcctgctcctgggcgtggcgttgctgatcgccctgggcttcgagttcgtcaacggtttccatgacaccgccaacgccgtggccacggtgatctacacccactcgctgccgccgcagttcgcggtggtctggtccggcctgttcaacttcctcggcgtactgctgtccagcggcgcggtggccttcggcatcatcgccctgttgccagtggaactgattctgcaagtgggctcctcggccggcttcgccatgatctttgccctgttgattgccgccatcctgtggaacctcggcacctggtggctcgggctgccggcctcctcgtcccacaccctgatcggctcaatcattggcgtcggtgtagccaacgcgctgatgcacggccgcgacggcaccagcggcgtggactggagccaggccaccaaggtcggctacgccctgttgttctcgccactgatcggtttcgtgtttgccgccctgctgctgttggccctgcgcctgttcgtcaagaaccgcgcgctgtacaaggccccaaagggcgacgtaccaccgccttggtggattcgcggcctgctgatcctgacctgcaccggggtgtccttcgcccacggttccaacgacggccagaaaggtatgggcctgatcatgctgatcctggtgggcaccctgcccatggcctacgccttgaaccgcaccatgcccgccgaccagtcgctgcaattcgccgcggtggccgaagtcacccagcaggccctggtgaagagtgccccgcaaccggcgccggccgattcccgcgcggtgctctccgagtacatgcgcagcaaggaagcgacaccggaactgatccccgcgctggccgccctgaccggcgccatcggcactgaagtgaagggctacggttcgctggccagggtgcccgccgaagccatgggcaacgtgcgcaacgacatgtacctgaccagcgaggcgatccgcctgatggacaagaatcaggtaggccacttcgaccaggacacccgggacaaactgcaactgttcaagcaacagatcgacaacgccacgcgcttcattccgctgtgggtgaagatcgccgtggccatcgcccttggcctgggcaccatggtgggctggaagcgcatcgtggtcaccgttggcgaaaagatcggcaagacccacctgacctacgcccagggcgcctcggcggaaaccgtggcgatgctgaccatcggcgcggcggacatgttcggcctgccggtgtccaccacccatgtgctgtcctcgggggtggccgggaccatggtggccaatggcggcggcttacagatgcgcaccatccgcaacctggccatggcctgggtgctgaccctgccggcggcgatcctgctgtccggcagcctgtactggttgttcactcagctcttctga

SEQ ID NO: 4415 - protein, 536 aa, Pseudomonas fluorescens Pf-5
MATPSLTAASSNLDSKPQLDKKPGPFTLVAFFAVLAMGLLFTAYSLVHDMHELGTTVTTWTPFLLLGVALLIALGFEFVNGFHDTANAVATVIYTHSLPPQFAVVWSGLFNFLGVLLSSGAVAFGIIALLPVELILQVGSSAGFAMIFALLIAAILWNLGTWWLGLPASSSHTLIGSIIGVGVANALMHGRDGTSGVDWSQATKVGYALLFSPLIGFVFAALLLLALRLFVKNRALYKAPKGDVPPPWWIRGLLILTCTGVSFAHGSNDGQKGMGLIMLILVGTLPMAYALNRTMPADQSLQFAAVAEVTQQALVKSAPQPAPADSRAVLSEYMRSKEATPELIPALAALTGAIGTEVKGYGSLARVPAEAMGNVRNDMYLTSEAIRLMDKNQVGHFDQDTRDKLQLFKQQIDNATRFIPLWVKIAVAIALGLGTMVGWKRIVVTVGEKIGKTHLTYAQGASAETVAMLTIGAADMFGLPVSTTHVLSSGVAGTMVANGGGLQMRTIRNLAMAWVLTLPAAILLSGSLYWLFTQLF

SEQ ID NO: 4416 - DNA, 1617 bp, Pseudomonas syringae pv. phaseolicola 1448A
  CDS (1)..(1617): transl_table=11
atggctataaacgcactttctcccgatgcgacgggccgggcgggcctgtcggcaactcacttcgggcgcaaaccgggtcgactgaccatggtcattttcttcgcgatactcatcgccggcctgctatttactggctacagcctcaagcaggatgtcgatgacatgggcacggtggttaccacctggaccccgttcgtgctgctgggcgtggcgttgctgattgcactggggtttgagttcgtcaacggtttccatgacaccgccaacgcagtcgcaaccgtgatctatacccattccctgccacccggcttcgcggtggtctggtcggggttcttcaactttctcggcgtgatgctctccagcggtgcagtagcgttcggcatcatcgcactgctgccggtggagctgattctgcaaaccggatcatcggcaggcttcgccatgatcttcgccctgctgatcgcggcgatcatctggaacctgggcacctggtggctgggcttgccagcgtcctcgtcgcatacgctgatcggctcaatcatcggtgtcggcatcgccaacgccttgatgcacggacgggacggcaccagcggcgtggactggtctcaggcgaccaaaataggctactcactgttactgtcgccgctagtgggcttcggctgtgccgccttgctgttgctggccatgcgcatgctcatcaagaaccgcgcgctgtacaaggcaccagaaggcaatgcaccgccaccgctgtggattcgcgccatgctgatcgtgacctgcaccggcgtatcatttgctcatggctccaatgacgggcagaaaggcatggggctgatcatgctgattctggtcggtaccctgccgatggcctatgcgctcaaccgcaccatgccggccgatcaggccactcagttcggcgcggtggcagaggtcacccaacaggcactgatgcgcagtgctcccctgcctgccccggctgactcgcgccagaccctgtcggattatctggtcagcaaacaggcaggccccgacctgatccctgcgctggcggtcatgaccggcaagatcggcaatcaggtcgccagttacggctcgctctcgaaggtgcctgcggaagcggtgaccaacgttcgaaacgatatgtacctcacctcggaagccattcgggtgatggataagaacaaggtaggcaatttcgacgccgatacccagaccaagctcgatgcgttcaaagggcagatcgacagcgcgacgcgttttattccgacctgggtcaagattgtggtcgctatcgccttggggctgggcacgatggtcggctggaaacgcatcgtcgtgacggtaggtgagcgcataggcaagacgcacatgacctacgcacaaggcgcgtcggcagaagtcgtggcaatgttcaccatcggcgcggcggacgtgtacgggctgccagtatcaaccacccacgtgctgtcatccggggtagcggggtcgatggtcgccaacggttcaggcctgcaaatgcgcaccttacgcaacctggccaccgcctgggtgttgaccctgccggctgccatcctgctttcgggttcgctgtactgggtgttcagcaaactgttttga

SEQ ID NO: 4417 - protein, 538 aa, Pseudomonas syringae pv. phaseolicola 1448A
MAINALSPDATGRAGLSATHFGRKPGRLTMVIFFAILIAGLLFTGYSLKQDVDDMGTVVTTWTPFVLLGVALLIALGFEFVNGFHDTANAVATVIYTHSLPPGFAVVWSGFFNFLGVMLSSGAVAFGIIALLPVELILQTGSSAGFAMIFALLIAAIIWNLGTWWLGLPASSSHTLIGSIIGVGIANALMHGRDGTSGVDWSQATKIGYSLLLSPLVGFGCAALLLLAMRMLIKNRALYKAPEGNAPPPLWIRAMLIVTCTGVSFAHGSNDGQKGMGLIMLILVGTLPMAYALNRTMPADQATQFGAVAEVTQQALMRSAPLPAPADSRQTLSDYLVSKQAGPDLIPALAVMTGKIGNQVASYGSLSKVPAEAVTNVRNDMYLTSEAIRVMDKNKVGNFDADTQTKLDAFKGQIDSATRFIPTWVKIVVAIALGLGTMVGWKRIVVTVGERIGKTHMTYAQGASAEVVAMFTIGAADVYGLPVSTTHVLSSGVAGSMVANGSGLQMRTLRNLATAWVLTLPAAILLSGSLYWVFSKLF

SEQ ID NO: 4418 - DNA, 1473 bp, Pseudomonas syringae pv. phaseolicola 1448A
  CDS (1)..(1473): transl_table=11
atgatcgatttattcagcgggcttgatgcctgggtgcttgtgagccttttgctcgccctggcttttgtcctcaccttcgagttcatcaacggctttcatgacaccgccaacgcggtggcgacagtcatttacaccaaagccatgccgcctcatctggccgtgttcttctctggtgtattcaacttcctcggcgtgctgctgggcggtgtgggtgttgcctacgcaatcgtccatctgctgccggtcgaactgctcatcaacgtcaacaccggacatggcctggccatggtgttctcgctgctggcggcggccattacctggaacctcggtacctggtacttcggcatcccggcctccagctcgcacaccttgatcggttcgatactcggtgtcggtctggccaatgcactgatcaacggcattccgttggccgacggcgtgaactggcagaaagcgatcgacattggcgcttcgctggtgttctcgccgctggccggcttcatcgttgcaggcctggtgctgattgcgctgaaatggtggcgcccgcagtcgaagatgcataaaaccccggaccagcgtcgcaagctggacgacaaaaagcacccgccattctggaaccgcctggtgctggtcatttccgcaatggcggtcagcttcgtacatggttcgaacgacggccagaaaggcatcggcctgatcatgctggtattgatcggcatcgtgcccagccagtttgtactggacctgaccagcacgacctaccagatcgaacgtacccgcgatgcgacccagcatctgagccagttctatcaacgcaacagcagcacgctgggcgaatatctggcgatgggcaaggctgaaaaaggcgacttgccgtccagctctgcctgtaatccgaagcagaccgaacccaccatcgacgcgttgctcgaccgcctcaaaggcgtgtccgactaccactcgctggcccctgaaagccgtatcgaagtgcgccgctatctcttgtgcctggacgacacggcccgcaaggtcggcaaacttccagacctgtcagcgcgtgaaaagtccgatctggagaaacttcgcaaagacctgaccaccaccacagaatacgcaccgttctgggtaattctggcggtcgccctggcactgggcatcggtaccatggttggctggaaacgcgtggtactgacgatcggcgagaagatcggcaaacagggcatgacttacgcacagggcatgtcggcgcaaatcaccaccgcctgcgcaatcggcctggctaacgtgttcagtctgccggtttccaccacccacatcctgtcatcaggcgttgccgggaccatggtcgccaacaagagcggcctgcaaggcggaaccgttcgcaccatcctgctggcctgggtgctgaccctgcctgcaacagtcgccttgtccgcagcgctgttctggctggcctccaaggcactgtcctga

SEQ ID NO: 4419 - protein, 490 aa, Pseudomonas syringae pv. phaseolicola 1448A
MIDLFSGLDAWVLVSLLLALAFVLTFEFINGFHDTANAVATVIYTKAMPPHLAVFFSGVFNFLGVLLGGVGVAYAIVHLLPVELLINVNTGHGLAMVFSLLAAAITWNLGTWYFGIPASSSHTLIGSILGVGLANALINGIPLADGVNWQKAIDIGASLVFSPLAGFIVAGLVLIALKWWRPQSKMHKTPDQRRKLDDKKHPPFWNRLVLVISAMAVSFVHGSNDGQKGIGLIMLVLIGIVPSQFVLDLTSTTYQIERTRDATQHLSQFYQRNSSTLGEYLAMGKAEKGDLPSSSACNPKQTEPTIDALLDRLKGVSDYHSLAPESRIEVRRYLLCLDDTARKVGKLPDLSAREKSDLEKLRKDLTTTTEYAPFWVILAVALALGIGTMVGWKRVVLTIGEKIGKQGMTYAQGMSAQITTACAIGLANVFSLPVSTTHILSSGVAGTMVANKSGLQGGTVRTILLAWVLTLPATVALSAALFWLASKALS

SEQ ID NO: 4420 - DNA, 1476 bp, Pseudomonas fluorescens PfO-1
  CDS (1)..(1476): transl_table=11
atgatcgatttattcagcggactggatgcctgggtgcttgtgagcctcctgctcgccctgacatttgtcctcgccttcgagttcatcaatggatttcatgacaccgctaacgcggtagccactgttatctacaccaaagcgatgccgcctcacctggcggtgttcttctcgggcgtgttcaacttcctcggcgtactgctgggcggcgttggcgtggcgtatgccatcgtgcacctgctgccggtagaactgttgatcaacgtaaacaccggccatggtctggcgatggtgttctcgctgctcgccgccgcgattgcctggaacctgggcacctggtacttcggtatcccggcctccagttcgcacacgttgatcggttcgatcctcggtgtcggcctggccaacgccctgatcaacgaaattccactggctgacggcgtcaactggcagaaagcgatcgacatcggcgcctcgctggtgttctcgccgatggccggcttcctgatcgccgcgctggtgctgatcggcctgaaatggtggcgcccgctgtcgaagatgcacaagacgccggaacagcgccgcaagatcgacgacaagaagcacccaccgttctggaaccgcctggtcctggtgatctcggcaatggccgtgagcttcgtgcacggctccaacgacggccagaaaggtatcggcctgatcatgctggtactgatcggtatcgtgcctgcgcagttcgtactcgacctgaacagcactacctaccagatcgaacgcactcgcgatgcgaccctgcacctgagccagttctacaagcgcaacgccgataccctgggcgaattcctggccctgggcaaaagcgtggaaggcgacctgccggagaaattccgttgcaacccgcaacagaccgaaccgaccatcgccgccctgctcgacacgctcaaaggtgtagctgactaccactcgctgtccgctgaaagccgcatcgaagtgcgtcgctacctgctctgcctggacgacaccgcgaagaaagtcagcaaactgccaggcctcgccgctcgtgaaaaagccgacctggacaaactgcgcaaagacctgaccaccaccaccgaatacgccccgttctgggtgattctggcggtagcgctggccctgggcctgggcaccatggtcggctggaaacgcgtggtactgaccatcggcgagaagatcggcaagcaaggcatgacctactcgcaaggcatgtcggcccagatcaccaccgccagcctgatcggcatggccaacatcttcagcctgccggtgtccaccacccacgtcctctcctcgggcgtggccggcaccatggtcgccaacaaaagcggcctgcaaggcggcacggtgaaaaccatcctgctggcctgggtcctgaccctgccagccaccgtggcgctgtcggccggcctgttctggctggcgtcgaaggcgctgggtagctga

SEQ ID NO: 4421 - protein, 491 aa, Pseudomonas fluorescens PfO-1
MIDLFSGLDAWVLVSLLLALTFVLAFEFINGFHDTANAVATVIYTKAMPPHLAVFFSGVFNFLGVLLGGVGVAYAIVHLLPVELLINVNTGHGLAMVFSLLAAAIAWNLGTWYFGIPASSSHTLIGSILGVGLANALINEIPLADGVNWQKAIDIGASLVFSPMAGFLIAALVLIGLKWWRPLSKMHKTPEQRRKIDDKKHPPFWNRLVLVISAMAVSFVHGSNDGQKGIGLIMLVLIGIVPAQFVLDLNSTTYQIERTRDATLHLSQFYKRNADTLGEFLALGKSVEGDLPEKFRCNPQQTEPTIAALLDTLKGVADYHSLSAESRIEVRRYLLCLDDTAKKVSKLPGLAAREKADLDKLRKDLTTTTEYAPFWVILAVALALGLGTMVGWKRVVLTIGEKIGKQGMTYSQGMSAQITTASLIGMANIFSLPVSTTHVLSSGVAGTMVANKSGLQGGTVKTILLAWVLTLPATVALSAGLFWLASKALGS

SEQ ID NO: 4422 - DNA, 1614 bp, Pseudomonas fluorescens PfO-1
  CDS (1)..(1614): transl_table=11
atggctactccctccctgaccgccagcctggcccccactgccagtggcaggccggcgctcgacaaaaaaaccggcccctttacttacgtggtgttcttcgccgtgctggccatggggatgctgttcaccgcctacagtctgatgcatgacatgcacgaactcggcacggtggtcaccacctggacgccgttcctgctgctcggcgtggcgctgttgattgcactgggttttgaattcgtcaacggtttccatgacaccgccaacgccgtggccacggtgatctacacccactcgctgccgccgaatgtggccgtggtgtggtcgggtttcttcaacttcctcggggtactgctttcgagcggcgcggtggcgttcggcatcattgcgctgttgccggtggagctgattctgcaagtgggttcgtccgccggtttcgcgatgatcttcgccctgctgatcgcggcgatcctgtggaacctcggcacctggtggctgggcctgccggcctcgtcgtcgcacacgctgatcggttcgatcatcggcgtcggcgtggccaacgcgttgatgcatggtcgcgacggcaccagcggtgtggactgggcccaggcgaccaagatcggttacgcactgctgctgtcgccgctggtgggtttcggttgtgcggcgctgttgctgctggcgttgcgcgcgttcgtaaagaaccgctcgctgtacaaggcaccggaaggcaataccccgccgccgtggtggattcgtggtttgctgatcctgacctgcaccggcgtgtcgttcgcacacggttccaacgacggccagaaaggcatgggcctgatcatgctgattctggtcggcactctgccgatggcttatgcactgaaccgcaccatgccggaagaacagtcgctgcaatttgccgccgtcgcccaagtgacccagcaagcgctggtaaaaagtgcgccactgccggcaccggccgatccacgcgccgtgctctcggattacatgcgcagcaagcaagccacgccgcaactgatccccgccctcgcctcgctgaccggacacatcggtgaagaagtcaaaggctacggctcgctggcgaaagtcccggccgaggccatgggtaacgtgcgtaacgacatgtacctggccagcgaaaccattcgcctgatggacaagaacaaggtcggcagcttcgacgccgacaccagcggcaagctgcaactgttcaaacagcagatcgacaacgccacgcggttcattccgctgtgggtgaagatcgccgtggcgattgccttgggtctgggcaccatggtcggctggaagcggatcgtggtcacggtcggcgagaagatcggcaagacccacctgacctacgcccagggcgcctcggcggaaaccgtggcgatgctgaccatcggcgccgccgacatgttcggcttgccggtctcgaccacccatgtgttgtcctcgggcgtggccgggaccatggtcgccaacggtggcggcttgcagatgaagaccatccgcaatctgctgatggcgtgggtgctgaccttgccggcggcgattgtgctgtcgggcagcctgtattggctgtttacccagatcttctga

SEQ ID NO: 4423 - protein, 537 aa, Pseudomonas fluorescens PfO-1
MATPSLTASLAPTASGRPALDKKTGPFTYVVFFAVLAMGMLFTAYSLMHDMHELGTVVTTWTPFLLLGVALLIALGFEFVNGFHDTANAVATVIYTHSLPPNVAVVWSGFFNFLGVLLSSGAVAFGIIALLPVELILQVGSSAGFAMIFALLIAAILWNLGTWWLGLPASSSHTLIGSIIGVGVANALMHGRDGTSGVDWAQATKIGYALLLSPLVGFGCAALLLLALRAFVKNRSLYKAPEGNTPPPWWIRGLLILTCTGVSFAHGSNDGQKGMGLIMLILVGTLPMAYALNRTMPEEQSLQFAAVAQVTQQALVKSAPLPAPADPRAVLSDYMRSKQATPQLIPALASLTGHIGEEVKGYGSLAKVPAEAMGNVRNDMYLASETIRLMDKNKVGSFDADTSGKLQLFKQQIDNATRFIPLWVKIAVAIALGLGTMVGWKRIVVTVGEKIGKTHLTYAQGASAETVAMLTIGAADMFGLPVSTTHVLSSGVAGTMVANGGGLQMKTIRNLLMAWVLTLPAAIVLSGSLYWLFTQIF

SEQ ID NO: 4424 - DNA, 1593 bp, Burkholderia sp. 383
  CDS (1)..(1593): transl_table=11
atgaatcaacctgcttcgtctaccccgaacaattcgggttccgtcgagcgcaccaggcagctcggctatgccgtcttcctgctggtgctcgcgatcggtgcaatctatatcgccacgcacctgatcgacgatctgtcgccgatgcgcgaaggatcgctgttcccgtacctgatgctcggcgccgcgctgctgatcgcgctcggcttcgagttcgtcaacggtttccacgacaccgcgaacgcggtggccaccgtgatctatacgcactcgctgacgccgaacgtcgcggtgatctggtccggcctgtggaacttcctcggcgtgatgatctcgagcggtgctgtcgcgttcggcatcctgcagcttctgccggtcgagctgatcctgcaggtgggcagcggtgcgggcttctcgatggtgttcgcgctgctgatcgccgcgatcgtgtggaacctcgcgacctggtatttcgggttgccgtcgtcgagctcgcatacgctgatcgggtcgatcatcggcgtcgggctgatgaaccagctgatgcacgggccgtccggcacgagcggtgtcgactggggccaggcgctcggtgtcggcaagtcgctgctgttctcgccgatcgtcggcttcctgtgcgcggcgctgctgctgctcgtgctgaaaaccctcgtgaagattccggagctgtacaaggagccgccgaaggatcagccgccgccgttctggattcgctgcctgctgatcctgacctgcaccggcgtgtcgttcgcgcacggctcgaacgacgggcagaaagggatgggcctcatcatgctgatcctgatcggcacggtgccggccgcctacgcgctgaacaaggccgtcacgccggccgagacgcagaccttcgtagcggtcgcgaaccaggcagccgcgacgttcgggaagtacacgaacggcgtcgcaccgtccgcgaacccgcgcgctgacgtcgagctttacgtccagcatcgcgaactgacgccggccgtgatccccgccgtgcagcagttgtccacgtcgctcgcgaccgcggtcggtgcatcgggctcgatggcggccgtgccgcagcgtgacgtcgacaacgtgcgcaacacgatgtatctggtatccgaagcaatccgcctgatcgagaagtccggtcagcccgcgttcgccgccgacgacaagctcgcgatcgacaactatcgcaagcagctcgaccacgcaaccaagttcattccgacttgggtgaaggttgcggtcgcgatcgcactgggcctcggcacgatggtgggctggaagcggatcgtcgtgaccgtcggcgagaaaatcggcaagcagcatctgacgtacggacagggcgcgtcggccgaactcgtcgcgatgctcacgatcggcgcagccgacgtgtacggattgcccgtatcgacgacgcacgtgctgtcgtcaggcgtcgcaggcacgatggcggcgaacggatcgggcttgcaatggggcacggtgcgcagcctcgtgctggcgtgggtgctgacgctgccggcgtcgatcgtgcttgccggcggactctattggctgttccggtcggtgggataa

SEQ ID NO: 4425 - protein, 530 aa, Burkholderia sp. 383
MNQPASSTPNNSGSVERTRQLGYAVFLLVLAIGAIYIATHLIDDLSPMREGSLFPYLMLGAALLIALGFEFVNGFHDTANAVATVIYTHSLTPNVAVIWSGLWNFLGVMISSGAVAFGILQLLPVELILQVGSGAGFSMVFALLIAAIVWNLATWYFGLPSSSSHTLIGSIIGVGLMNQLMHGPSGTSGVDWGQALGVGKSLLFSPIVGFLCAALLLLVLKTLVKIPELYKEPPKDQPPPFWIRCLLILTCTGVSFAHGSNDGQKGMGLIMLILIGTVPAAYALNKAVTPAETQTFVAVANQAAATFGKYTNGVAPSANPRADVELYVQHRELTPAVIPAVQQLSTSLATAVGASGSMAAVPQRDVDNVRNTMYLVSEAIRLIEKSGQPAFAADDKLAIDNYRKQLDHATKFIPTWVKVAVAIALGLGTMVGWKRIVVTVGEKIGKQHLTYGQGASAELVAMLTIGAADVYGLPVSTTHVLSSGVAGTMAANGSGLQWGTVRSLVLAWVLTLPASIVLAGGLYWLFRSVG

SEQ ID NO: 4426 - DNA, 1590 bp, Burkholderia sp. 383
  CDS (1)..(1590): transl_table=11
atgccgaatctcgcggcaacggaaaccagcggtgcggtcagcaaccgcacgcgcaccatcagcctcgcgctgttttttctgattattgcctgcggcatcgtctatgtcggcattcatctcagtgccgatctcagtcccgtcaaggaaagctcggtcctcccgttcctgctgctgatcgtcgcgctgctgatcgcactcggcttcgagttcgtcaacggctttcatgacaccgcgaacgcggtcgcgaccgtcatctatacgcattcgctcgacccgcatctggccgtcgtctggtcgggcctctggaacctggccggcgtgctcgtgtcgagcggcgccgtcgcgttcggcatcctgcagttgctgccggtcgagctgatcctgcaggtgggcagcggctcgggcttcgcgatggtgttcgcgctgctgatcgcagccgtcacatggaacctcgcgacctggtatttcgggctgccgtcgtcgagttcgcacacgctcgtcggctcgatcatcggcgtcggcctgatgaaccagatcgtcagcggcccgtcgggcacgagcggtgtcgactggaaccaggcgctcggcgtcggcaaggcgctgctgttctcgccgctgatcggtttcgtgctgtccgcgctcgtgctgctgctcctgaaggcgctcgtgcgcgtgccggcgctgtaccaggagccgaagggcaacaagccgccgccgttctggatccgcctgctgctgatcctcacctgcacgggcgtgtcgttcgcgcacggctcgaacgacgggcagaagggcatggggctgatcatgctgatcctgatcggcgtgatgccgaccgcgtatgcgctgaacaaggccgtgacgccggaccagacgagcacgttcgtcgcggtggcgcgtcacgcgtcgacgacgctcgtcaagtacgcggacccggccgcacagtcggccgacccgcgcgccgatgtcgaggcgtacgtgcgcacgcacaagctgacgcccgcgacggtcccggcattgggcaagctcaccgacacgatcgccgaccaggtcgcgcaggccggcggcatctcgagcgtgccgcagaacctcgtcgacaacgtgcgcaacaacatgtacgtcgcgtccgaggcgatccggctgatggagaaggcgaaggcgccggcgttctcggtcgaggacgcgagcgcgctcgaagcgttcaagaagcagatggaccgcgcgacgaaattcatcccgacctgggtgaaggtcgccgtcgcgatcgcgctcggcctcggcacgatggtcggctggaagcggatcgtcgtgacggtcggcgagaagatcggcaagtcgcatctcacctacgggcagggcgcatcggccgaagccgtcgcgatgctgacgatcgggatggccgacgcatacgggctgccggtgtcgacaacgcacgtgctcgcgtcgggcgtggccggcacgatgacggccagcggcgcgggcctgcgctgggatacggtgcgcaacctcgtgctcgcgtgggtgctcacgctgcccgcatcgatcgcgctgtcggccggcctgtactgggtactgcacggactgttctga

SEQ ID NO: 4427 - protein, 529 aa, Burkholderia sp. 383
MPNLAATETSGAVSNRTRTISLALFFLIIACGIVYVGIHLSADLSPVKESSVLPFLLLIVALLIALGFEFVNGFHDTANAVATVIYTHSLDPHLAVVWSGLWNLAGVLVSSGAVAFGILQLLPVELILQVGSGSGFAMVFALLIAAVTWNLATWYFGLPSSSSHTLVGSIIGVGLMNQIVSGPSGTSGVDWNQALGVGKALLFSPLIGFVLSALVLLLLKALVRVPALYQEPKGNKPPPFWIRLLLILTCTGVSFAHGSNDGQKGMGLIMLILIGVMPTAYALNKAVTPDQTSTFVAVARHASTTLVKYADPAAQSADPRADVEAYVRTHKLTPATVPALGKLTDTIADQVAQAGGISSVPQNLVDNVRNNMYVASEAIRLMEKAKAPAFSVEDASALEAFKKQMDRATKFIPTWVKVAVAIALGLGTMVGWKRIVVTVGEKIGKSHLTYGQGASAEAVAMLTIGMADAYGLPVSTTHVLASGVAGTMTASGAGLRWDTVRNLVLAWVLTLPASIALSAGLYWVLHGLF

SEQ ID NO: 4428 - DNA, 1587 bp, Burkholderia thailandensis E264
  CDS (1)..(1587): transl_table=11
atgaaccaccctctgtccgccgcggcgagcgaagcgctcggtcgcacccggcatctgggcgtcgcgcttctcgtcgccctactcgcggccggcgtcgcgtacgtgttcgctcacctgttcgcggatctcccgcccgtcggcgcgcgttcggtgtttccgtatctgctgctcggcaccgcgctcgcgatcgcgctcggcttcgagttcgtcaacggctttcacgacaccgcgaacgccgtcgcgaccgtcatctacacgcattcgctcacgccgaacgtcgccgtcatctggtcgggcatctggaattttctcggcgtgatggcgtccacgggcgcggtcgcgttcggcatcctgcaattgctgcccgtcgagctgatcctgcaggtcggccacggcgcgggcttcgcgatggtgttcgcgctgctgatcgccgcgatcgcgtggaatctcgcgacctggtacttcggcctgccttcgtcgagctcgcacacgctgatcggctcgatcatcggcgtcgggctcgcgaatcagctgatgcacgggccatccggcacgagcggcgtcgactgggcgcaggcggcgggcgtcggcaaatcgctgctgttctcgccgatcgtcggcttcctgtgcgcgggcctgctgctcgccgtgttgaaggcgctcgtgcgcgtgcccgcgctgtatcgcgagccgcagatgaacgagccgccgccgttctgggtccgcggcctgctgatcctcacctgcaccggcgtgtcgttcgcgcacggctcgaacgacgggcagaaaggcatggggctcatcatgctgatcctgatcggcaccgtgccgaccgcgtacgcgctcaacaaggcggtcacgcccggcgagacgcagacgttcatcgccgtcgcgcatcgcgcgtccgagacgctcgcgcgctacgcgggcgccgcgccgccgtcgccgaacccgcgcgccgatgtcgagacgtacgtgcagtcgcgccgcctgagcgacgcgacgctgcccgcggtccgtcagctgtcgagcgcgctcgcggccgaagtcgtcatgacgggctcgatcgcgaaagtgcccgagggccaggcggacaacatgcgcaatacgatgtacctggtgtccgaagcgctgcgcctgatggagaaaaccggccagccggccttcacggcggcggactgcctcgcgctcgacgactatcgcaagcagctcgatcacgcgacgaagttcatcccgacctgggtcaaggtcgcggtcgcgatcgcgctcggtctcggcacgatggtcggctggcggcgcatcgtcgtgaccgtcggcgagaagatcggcaagcagcacctgacgtacgggcaaggtgcgtcggcggaagtcgtcgcgatgctgacgatcggcgcggccgatgcatacgggctgccggtgtcgacgacgcacgtgctgtcgtccggcgtcgcgggcgcgatggccgcgaacggctcggggctgcaatggaacaccgtgcgcagcctcgcgctcgcgtgggtgctgacgctgcccgcgtcgatcgtgctcgcgggcgcgctctattgggccttccacgcgctgctctga

SEQ ID NO: 4429 - protein, 528 aa, Burkholderia thailandensis E264
MNHPLSAAASEALGRTRHLGVALLVALLAAGVAYVFAHLFADLPPVGARSVFPYLLLGTALAIALGFEFVNGFHDTANAVATVIYTHSLTPNVAVIWSGIWNFLGVMASTGAVAFGILQLLPVELILQVGHGAGFAMVFALLIAAIAWNLATWYFGLPSSSSHTLIGSIIGVGLANQLMHGPSGTSGVDWAQAAGVGKSLLFSPIVGFLCAGLLLAVLKALVRVPALYREPQMNEPPPFWVRGLLILTCTGVSFAHGSNDGQKGMGLIMLILIGTVPTAYALNKAVTPGETQTFIAVAHRASETLARYAGAAPPSPNPRADVETYVQSRRLSDATLPAVRQLSSALAAEVVMTGSIAKVPEGQADNMRNTMYLVSEALRLMEKTGQPAFTAADCLALDDYRKQLDHATKFIPTWVKVAVAIALGLGTMVGWRRIVVTVGEKIGKQHLTYGQGASAEVVAMLTIGAADAYGLPVSTTHVLSSGVAGAMAANGSGLQWNTVRSLALAWVLTLPASIVLAGALYWAFHALL

SEQ ID NO: 4430 - DNA, 1623 bp, Pseudomonas aeruginosa UCBPP-PA14
  CDS (1)..(1623)
atgacctccgatgtccttcccgccgacgccgtcgccagtgccgccggcaacgcgcacaagccccatctcgagcagcgtcccggccgcctcaccgccctcgtattcttcgccgtgctcgccaccggactgctgttcagcgcctacagcctgatgcaggacgtcgatgacgtcggttccacgatcaccacctggacgcccttcctgctgctcggcgtggccctgctgatcgccctcggcttcgagttcgtcaacggcttccacgacaccgccaacgcggtggccacggtgatctacacccactcgctgccgccgcacttcgcggtggtctggtcgggttgcttcaactttctcggcgtattgctctccagcggcgcggtggccttcggcatcatcgccctgctgccggtggaactgatcctgcaggtcggttcctcggccggcttcgccatggtcttcgccctgctgatcgccgccatcctgtggaacctcgggacctggtggctgggcctgccggcgtcgtcctcgcacaccctgatcggctcgatcatcggcgtcggcgtggccaacgcgctgatgcacgggcgcgatggcaccagcggggtggactggggccaggcgaccaaggtcggctactccctgctgctctcgccgctgatcggcttcgcctgcgccgccctgttgctcctggcgctgcgcctgctggtgaagaaccgcgcgctgtacaaggcgccgaagggcaaggcgccgccgccctggtggatccgcggcctgctgatcctgacctgtaccggagtgtccttcgcccacggctccaacgacggacaaaaaggcatgggcctgatcatgctgatcctggtcggcaccctgccgatggcctacgccctgaaccgcaccatgccggcggaccaggcggtgcagttcgccgccgtcgccgaggtcacccagcaagcgctggtgaagagcgcgccgcaaccggcgccggccgatccgcgccaggtactctccgactacgtgcgcagcaagcaggcatcgcctgagctgatcccggcgctggccgccctgaccggctcgatcggccaggaagtgaaaggctatggcgcgttctcgcgggtaccggcggaagccatgggcaacgtgcgcaacgacatgtacctgacctccgaggcgatccgcctgatggacaaggacggcgtcggccgcttcgacgccgacacccgcggcaaattgcaggcgttcaagcagaagatcgacgacgccaccaagttcatcccgctatgggtgaagatcgccgtggccatcgccctcggcctgggcaccatggtcggctggaaacgcatcgtggtgacggtcggcgagaagatcggcaagacccacctgacctacgcccagggcgcctcggcggaaaccgtggcgatgctgaccattggcgcggcggacctgtatggcttgccggtctccaccacccatgtgctgtcttccggggtggccgggaccatggcggcgaacggttcggggctacagtggaagaccatccgcaacctgctgatggcctgggtgctgacgctgccggcggcgatcctgctctcggcctcgctctactggctgctcacccggctgttctga

SEQ ID NO: 4431 - protein, 540 aa, Pseudomonas aeruginosa UCBPP-PA14
MTSDVLPADAVASAAGNAHKPHLEQRPGRLTALVFFAVLATGLLFSAYSLMQDVDDVGSTITTWTPFLLLGVALLIALGFEFVNGFHDTANAVATVIYTHSLPPHFAVVWSGCFNFLGVLLSSGAVAFGIIALLPVELILQVGSSAGFAMVFALLIAAILWNLGTWWLGLPASSSHTLIGSIIGVGVANALMHGRDGTSGVDWGQATKVGYSLLLSPLIGFACAALLLLALRLLVKNRALYKAPKGKAPPPWWIRGLLILTCTGVSFAHGSNDGQKGMGLIMLILVGTLPMAYALNRTMPADQAVQFAAVAEVTQQALVKSAPQPAPADPRQVLSDYVRSKQASPELIPALAALTGSIGQEVKGYGAFSRVPAEAMGNVRNDMYLTSEAIRLMDKDGVGRFDADTRGKLQAFKQKIDDATKFIPLWVKIAVAIALGLGTMVGWKRIVVTVGEKIGKTHLTYAQGASAETVAMLTIGAADLYGLPVSTTHVLSSGVAGTMAANGSGLQWKTIRNLLMAWVLTLPAAILLSASLYWLLTRLF

SEQ ID NO: 4432 - DNA, 1593 bp, Burkholderia vietnamiensis G4
  CDS (1)..(1593): transl_table=11
atgaatcaacctgcttcgcccgccgcacaccatcccggttccaccgaacgcgcccgacgtgccggctatgccgtgttcctgctggtgctgtcggtcggtgccgtctatatcgccacccatctgatcgccgatcttgcgccggtgcgcgaagggtcgctgtttccatacctgatgctcggcgccgcgctgctgatcgcgctcggcttcgagttcgtcaatggcttccacgacaccgcgaacgcggtggcgaccgtgatctacacccattcgctgacgccgaacgtcgcggtgatctggtcgggcatgtggaacttcctcggcgtgatggtatcgagcggcgccgtcgcgttcggcatcctgcaattgctgcccgtcgaactgatcctgcaggtgggcagcggcgcgggcttcgcgatggtgttcgcgctgctgatcgccgcgatcgtgtggaacctggcgacgtggtatttcgggctgccgtcgtcgagctcgcatacgctgatcggatcgatcatcggggtcgggctgatgaaccagctgatgcacggcccgaacggcacgagcggcgtcgactgggggcaggcgctcggcgtcggcaagtcgctgctgttctcgccgctcgtcggctttctgtgcgcggcgctgctgctgctcgtgctgcgcgccgtcgtgcgcgtgccggatctgtatcaggagccgccgaaggatcagccgccgccgttctggattcgctgcctgctgatcctgacctgcaccggcgtgtcgttcgcgcacggatcgaacgatggacagaagggcatggggctcatcatgctgatcctgatcggcaccgtacccactgcgtatgcgctgaacaaggccgtcacgccggccgagtcgcagaccttcgtcgccgtcgcgacgcacgccgcgtccaccttcgcgaaatattcgaacggcgtcgcgccgtccgcgaatccgcgcgccgacgtcgagcagttcgtgcagcaccgcaagctcacgccggccgtgctgcccgcggtgcagcagttgtcgacgtcgctcgcgcgcgccgtcggcgcatcgggcttgatggcggccgtgccgcaaaacgacgtcgacaacgtgcgcaacacgatgtacctggtgtccgaggcgatccggttgatcgagaagtccggacagctcgcgtttgccgccgacgacaagctcgcgatcgacaactaccgcaagcagctcgatcacgcgaccaagttcatcccgacctgggtgaaggtggccgtcgcgattgcgctgggtctcggcacgatggtcgggtggaagcggatcgtcgtgaccgtcggcgaaaagatcggcaagcagcatttgacgtacggccagggcgcgtcggccgaactcgtcgcgatgctgacgatcggcgcggccgatgcatacgggctgccggtgtcgacgacgcacgtgctgtcgtcgggcgtcgcgggcacgatggccgcgaacggatcgggactgcagtggagtaccgtgcgcagcctcgtgctcgcgtggattctcacgctgccggcgtcgatcgtgctggccggcgggctgtactggttgttccgcgcgctggcttga

SEQ ID NO: 4433 - protein, 530 aa, Burkholderia vietnamiensis G4
MNQPASPAAHHPGSTERARRAGYAVFLLVLSVGAVYIATHLIADLAPVREGSLFPYLMLGAALLIALGFEFVNGFHDTANAVATVIYTHSLTPNVAVIWSGMWNFLGVMVSSGAVAFGILQLLPVELILQVGSGAGFAMVFALLIAAIVWNLATWYFGLPSSSSHTLIGSIIGVGLMNQLMHGPNGTSGVDWGQALGVGKSLLFSPLVGFLCAALLLLVLRAVVRVPDLYQEPPKDQPPPFWIRCLLILTCTGVSFAHGSNDGQKGMGLIMLILIGTVPTAYALNKAVTPAESQTFVAVATHAASTFAKYSNGVAPSANPRADVEQFVQHRKLTPAVLPAVQQLSTSLARAVGASGLMAAVPQNDVDNVRNTMYLVSEAIRLIEKSGQLAFAADDKLAIDNYRKQLDHATKFIPTWVKVAVAIALGLGTMVGWKRIVVTVGEKIGKQHLTYGQGASAELVAMLTIGAADAYGLPVSTTHVLSSGVAGTMAANGSGLQWSTVRSLVLAWILTLPASIVLAGGLYWLFRALA

SEQ ID NO: 4434 - DNA, 1596 bp, Solibacter usitatus Ellin6076
  CDS (1)..(1596): transl_table=11
atggcagatgctcgcgtatcggtgctcgaggccaagctcgcgcgtaagccggggcgcctctctttgatcattttcgccgccgttctgctcggcggcatcgcctacaccggaggcagcctgctttcggacctctcccagctgcgcaacactcccggcttcgaatttctgctcctggggctgacgctcgcgattgcgctcggcttcgaattcgtcaacggtttccacgacacggccaacgccgtcgcgaccgtgatttacacgcactccctggaaccgcaccttgccgtggtctggtccggcctgtggaacttcatcggcgtactgacgtcgagcggtgccgtggcctttggcatcgtgtccctgctgccggtcgaattgattctcaatgcgggaacccacgccggctttgccatgattttcgcgctccttttctcagcgatcttgtggaatctgggcacctggtatttcggcttgccgaactccagctcccataccctgatcgggtccatcctcggcgtcggcctgatgaaccagtggatggcgccgctgcactccggcgtcagcggtgtggattggacccaggccatcggcgtcggcaaaagcctgtttttctctcccctcatcggcttcgtctgctccgctcttctctttctgctgattaagcgctgcgtgcgcgaccctcgcctttactctgaaccggtgggcaaggcgccgccgccgttctggattcgatcgatgctggtcttgacctgcaccggggtcagctacgcgcatggctccaacgatggacagaaaggcatggggttgatcatgctgatcctggtgggaacggtgcccgcggcctatgccttgaatcatgccgtcagcggtcccgaagttcaggcgttcctcgctatctccgagcgcaccggccgcatactcgagcactacaggcctgccggcgtcgaggctcctgccaaaatcaggccggtcctggagcggctcgtcagccaatcgtccatggagccgcaaaccgtgcccgcattgacggcggtgatcagtcgcattgcggccgacgtggccccttaccgcgcactggccagcgtaccgatcgagctttccggaaacatccgcaacgatatgtacctggccgacgaggccctcggcgttgtcgaagccaaacacctgttgccgctctccgcggccgacgccgaggccatccgggactaccgccgcacgatcgaccgcgccgccaaatttataccgacttgggtgaaggtcgccgtggccctggcgctcggactcggcaccatggttggctggaagcgcatcgtagtcacagtcggcgagcgaatcggcaagactcacctgacctacgcgcaaggagcagcctcggaagtgatcgcgatggcgaccatcctggccgccgatcgcgctgggatgcccgtaagcacgactcatgtcttgaccagcggcgtcgccggcaccatggcagccaatcactccggtctgcaatggagcacgctgcgcgccctggcggccgcctggctgatgacgctgcctgcctcggtagcattggcagccagtctcttctgggtattccgtcacatcatgtag

SEQ ID NO: 4435 - protein, 531 aa, Solibacter usitatus Ellin6076
MADARVSVLEAKLARKPGRLSLIIFAAVLLGGIAYTGGSLLSDLSQLRNTPGFEFLLLGLTLAIALGFEFVNGFHDTANAVATVIYTHSLEPHLAVVWSGLWNFIGVLTSSGAVAFGIVSLLPVELILNAGTHAGFAMIFALLFSAILWNLGTWYFGLPNSSSHTLIGSILGVGLMNQWMAPLHSGVSGVDWTQAIGVGKSLFFSPLIGFVCSALLFLLIKRCVRDPRLYSEPVGKAPPPFWIRSMLVLTCTGVSYAHGSNDGQKGMGLIMLILVGTVPAAYALNHAVSGPEVQAFLAISERTGRILEHYRPAGVEAPAKIRPVLERLVSQSSMEPQTVPALTAVISRIAADVAPYRALASVPIELSGNIRNDMYLADEALGVVEAKHLLPLSAADAEAIRDYRRTIDRAAKFIPTWVKVAVALALGLGTMVGWKRIVVTVGERIGKTHLTYAQGAASEVIAMATILAADRAGMPVSTTHVLTSGVAGTMAANHSGLQWSTLRALAAAWLMTLPASVALAASLFWVFRHIM

SEQ ID NO: 4436 - DNA, 1470 bp, Shewanella sp. ANA-3
  CDS (1)..(1470): transl_table=11
atgtttgagatattgacttctatcggcctgggttggtcggtagctttagtgctggcggtgttatttgtgctggcctacgaatttatcaatggtttccacgataccgccaatgctgttgccacagtcatctacaccaaggcaatgcctgccaacctcgcggtgatttcttcagccctgttcaactttgccggagtgctgctcggtggacttggcgtcgcctacgctatagtgcatctcttgccggtcgattctttactgggaatggattcaacccaagggctgttgatggtgttctcactactcttttcggccattatttggaacttagggacttggtattttggtattccggcctccagttcccacactctgattggctcgattatgggtgttggcggcgcattcgcctggatacacaatgaacctgtactgcacggcattaatcttaccaaagccacgcaaattatgctgtcgttgatcatttcgcccacgctgggatttgtgttggcgggggtactgttattgctaatgaagtttgtgtggcaaaagcacaagatccaccgcacccccgatgaacaatttcagattaatggcaaacgccatccgccgttctgggcgcgcgtcagtttgattgcctcggccatgggggtgagctttgcccacggttctaacgatggccaaaagggcattggcttagtgatgctggtactgatctgtatggcgccagcgtattttgccctcgacatgagtagccaatcctatgatttagaaagaacacaggatgctaaccgccgcattatggctatctacagtcgcaatcaagctgtgattagcgatctggtggatgttaaagcccaagtgaatgtgactgacactttactgagccactgctcggcacaaaccgtattaccggctatgtcgctgctcgatcgccgtttagataaggccagcagttttcaagagatgagtgtcgaagaacgtcgtgaagtgcgccgcttgctgctctgtatcgatgatactgcgcgtaaagtggcaaaattagacttacccgccaaggagttaacatcactcaataaatggcgtaaggacttaactaagtcaaccgaatacgcgcctttgtgggtgatagtggccattgcgacggccttgggctgtggcaccttagtgggttggcgccgcattgtttataccgtcggtgagaagataggctcctcggggatgacctacagccaagggattgcggcgcaggtgacggcggcggcatcgattgggattgctagcgtgacggggatgccagtttcaaccacccatattctgtcttcggcggtggcgggcactatggtggccaatcgctcaggcctacaaagccaaaccattaagcagattttattagcttgggtactgacactgccgattaccatgctcctatctgcattggtgtttatcttggctaacgcgctctggggttaa

SEQ ID NO: 4437 - protein, 489 aa, Shewanella sp. ANA-3
MFEILTSIGLGWSVALVLAVLFVLAYEFINGFHDTANAVATVIYTKAMPANLAVISSALFNFAGVLLGGLGVAYAIVHLLPVDSLLGMDSTQGLLMVFSLLFSAIIWNLGTWYFGIPASSSHTLIGSIMGVGGAFAWIHNEPVLHGINLTKATQIMLSLIISPTLGFVLAGVLLLLMKFVWQKHKIHRTPDEQFQINGKRHPPFWARVSLIASAMGVSFAHGSNDGQKGIGLVMLVLICMAPAYFALDMSSQSYDLERTQDANRRIMAIYSRNQAVISDLVDVKAQVNVTDTLLSHCSAQTVLPAMSLLDRRLDKASSFQEMSVEERREVRRLLLCIDDTARKVAKLDLPAKELTSLNKWRKDLTKSTEYAPLWVIVAIATALGCGTLVGWRRIVYTVGEKIGSSGMTYSQGIAAQVTAAASIGIASVTGMPVSTTHILSSAVAGTMVANRSGLQSQTIKQILLAWVLTLPITMLLSALVFILANALWG

SEQ ID NO: 4438 - DNA, 1470 bp, Shewanella sp. MR-7
  CDS (1)..(1470): transl_table=11
atgtttgagatattgacttctatcggcctgggttggtcggtagctttagtgctggcggtgttatttgtgctggcctacgaatttatcaatggtttccacgataccgccaatgctgttgccacagtcatctacaccaaggctatgcctgccaacctcgcggtgatttcttcagccctgttcaactttgccggagtgctgctcggtggacttggcgtcgcctacgcaatagtgcatctcttgcccgtcgattctttactgggaatggattcaacccaagggctgttgatggtgttctcattgctcttctcagccattatttggaacttagggacttggtattttggcattccggcctccagttcccacactctgattggctcgattatgggtgttggcggcgcatttgcttggatacacaatgaacctgtactgcacggcattaatctcaccaaagccacacaaattatgctgtcgttgatcatttcgcccacgctggggtttgtgctggcggggatactgttattgctaatgaagtttgtgtggcaaaagcacaagatccaccgcacccccgatgaacaatttcagattaatggcaaacgccatccgccgttctgggcgcgcgtcagtttgatagcctcggccatgggggtgagcttcgcccacggttctaacgatggccaaaaaggcattggtttagtgatgctggtgctgatctgtatggcaccagcgtattttgccctcgacatgagtagccaatcctatgatttagaaagaacacaggatgctaaccgccgcattatggctatctacagtcgcaatcaagctgtgattagcgatctggtggatgttaaagcacaagtgaatgtgactgacactttactgagccactgctcggcgcaaaccgtgttaccggccatgtcgctgctcgatcgccgtttagataaggccagcagttttcaagagatgagtgtcgaagaacgtcgtgaagtgcgccgcttgctgctgtgtatcgatgatactgcgcgcaaagtggcaaaattagacttacccgccaaggagttaacatcactcaataaatggcgtaaggacttaactaagtcaaccgaatatgcgcctttgtgggtgatagtagccattgcgacggccttgggctgtggcaccttagtgggttggcgccgcattgtttatacggtcggtgagaagataggctcctcggggatgacctacagccaagggattgcggcgcaggtgacggcagcggcatcgattgggattgccagcgtgacgggcatgccagtatcgactacgcatattttgtcttcggcggtggcgggcactatggtggccaatcgctcaggcttacaaagccaaaccattaagcagattttattagcttgggtactgacactgccgattaccatgctcttatctgcattggtttttattactgctaacgctatttggggttaa

SEQ ID NO: 4439 - protein, 489 aa, Shewanella sp. MR-7
MFEILTSIGLGWSVALVLAVLFVLAYEFINGFHDTANAVATVIYTKAMPANLAVISSALFNFAGVLLGGLGVAYAIVHLLPVDSLLGMDSTQGLLMVFSLLFSAIIWNLGTWYFGIPASSSHTLIGSIMGVGGAFAWIHNEPVLHGINLTKATQIMLSLIISPTLGFVLAGILLLLMKFVWQKHKIHRTPDEQFQINGKRHPPFWARVSLIASAMGVSFAHGSNDGQKGIGLVMLVLICMAPAYFALDMSSQSYDLERTQDANRRIMAIYSRNQAVISDLVDVKAQVNVTDTLLSHCSAQTVLPAMSLLDRRLDKASSFQEMSVEERREVRRLLLCIDDTARKVAKLDLPAKELTSLNKWRKDLTKSTEYAPLWVIVAIATALGCGTLVGWRRIVYTVGEKIGSSGMTYSQGIAAQVTAAASIGIASVTGMPVSTTHILSSAVAGTMVANRSGLQSQTIKQILLAWVLTLPITMLLSALVFITANAIWG

SEQ ID NO: 4440 - DNA, 1470 bp, Shewanella sp. MR-4
  CDS (1)..(1470): transl_table=11
atgtttgagatattgacttctatcggcctgggttggtcggtagctttagtgctggcggtgttatttgtgctggcctacgaatttatcaatggtttccacgataccgccaatgctgttgccactgtcatctacaccaaggcaatgcctgccaacctcgcggtgatttcttcagccctgttcaactttgccggagtgctgctcggtggacttggcgtcgcctatgcaatagtgcatctcttgcccgtcgattctttactgggaatggattcaacccaagggctgttgatggtgttctcactgctcttttcggccattatttggaacttagggacttggtattttggcattccggcctccagttcccataccctgattggctcgattatgggggttggcggcgcgttcgcctggatacacaatgaacctgtactgcatggcattaatctcaccaaagccacgcaaattatgctgtcgttgatcatttcgcccacgctgggatttgtgctggcggggatactgttattgctaatgaagttagtgtggcaaaagcacaagatccaccgtacccccgatgaacaatttcagattaatggtaaacgccatccgccgttctgggcgcgcgtcagtttgatagcctcggccatgggggtgagcttcgcccacggttctaacgatggccaaaagggcattggtttagtgatgctggtgctgatctgtatggcgccggcgtattttgccctcgacatgagtagccaatcctatgatttggcgagaacgcaagatgctaatcgtcgtattatggcgatttatagccgcaatcaagctgtgattagcgatcttgtggatgtgcaagcacaggttaatacgagtgacagtttgctgagccattgctcggcgcaaaccgtattaccggccatgtcacagctcgaccgccgtttagataaggccagtagttttcaagagatgagtgtcgaagaacgtcgagaggtgcgccgcttgctgctctgtatcgatgataccgcgcgcaaggtggcaaaattagacctgcccgccaaagagttaacatcactcaataaatggcgtaaggatctggctaaatcgactgaatatgcgcctttgtgggtgatagtggcaatagcgacggctctgggctgtggcaccttagtggggtggcgccgcattgtttatacggtcggcgagaagattggctcctcggggatgacctatagccaaggtattgcggcgcaggtgacggcggcggcatcgattgggatcgccagcgtgacgggaatgccggtttcaaccacccatattctgtcttcggcggtggcgggcactatggtggccaatcgctcaggcttacaaagccaaaccattaagcagattttattagcttgggtactgacactgccggttaccatgctcttgtctgccttggtgtttattctggctaatgccctttggggctaa

SEQ ID NO: 4441 - protein, 489 aa, Shewanella sp. MR-4
MFEILTSIGLGWSVALVLAVLFVLAYEFINGFHDTANAVATVIYTKAMPANLAVISSALFNFAGVLLGGLGVAYAIVHLLPVDSLLGMDSTQGLLMVFSLLFSAIIWNLGTWYFGIPASSSHTLIGSIMGVGGAFAWIHNEPVLHGINLTKATQIMLSLIISPTLGFVLAGILLLLMKLVWQKHKIHRTPDEQFQINGKRHPPFWARVSLIASAMGVSFAHGSNDGQKGIGLVMLVLICMAPAYFALDMSSQSYDLARTQDANRRIMAIYSRNQAVISDLVDVQAQVNTSDSLLSHCSAQTVLPAMSQLDRRLDKASSFQEMSVEERREVRRLLLCIDDTARKVAKLDLPAKELTSLNKWRKDLAKSTEYAPLWVIVAIATALGCGTLVGWRRIVYTVGEKIGSSGMTYSQGIAAQVTAAASIGIASVTGMPVSTTHILSSAVAGTMVANRSGLQSQTIKQILLAWVLTLPVTMLLSALVFILANALWG

SEQ ID NO: 4442 - DNA, 1500 bp, Escherichia coli O157
  CDS (1)..(1500): transl_table=11
atgctacatttgtttgctggcctggatttgcataccgggctgttattattgcttgcactggcttttgtgctgttctacgaagccatcaatggtttccatgacacagccaacgccgtggcaaccgttatctatacccgcgcgatgcgttctcagctcgccgtggttatggcagcggtgttcaactttttgggtgttttgctgggtggtctgagtgttgcctatgccattgtgcatatgctgccgacggatctgctgcttaatatgggatcgtctcatggccttgccatggtgttctctatgttgctggcggcgattatctggaacctgggtacctggtactttggtttgcctgcatccagctctcatacgctgattggcgcgatcatcgggattggtttaaccaatgcgttgatgaccgggacgtcagtggtggatgcactcaatatcccgaaagtattaagtattttcggttctctgatcgtttcccctattgtcggcctggtgtttgctggcggtctgattttcttgctgcgtcgctactggagcggcaccaagaaacgcgcccgtatccacctgaccccagcggagcgtgaaaagaaagacggcaagaaaaagccgccgttctggacgcgtatcgcgctgatcctttccgctatcggcgtggcgttttcgcacggcgcaaacgatggtcagaaaggcattggtctggttatgttggtattgattggtgtcgcaccagcaggcttcgtggtgaacatgaatgccactggctacgaaatcacccgtacccgtgatgccatcaacaacgtcgaagcttactttgagcagcatcctgcgctgctgaaacaagctactggtgctgatcagttagtaccggctccggaagctggcgcaacgcaacctgcggagttccactgccatccgtcgaataccattaacgcgctcaaccgcctgaaaggtatgttgaccaccgatgtggaaagctacgacaagctgtcgcttgatcaacgtagccagatgcgccgcattatgctgtgcgtttctgacactatcgacaaagtggtgaagatgcctggcgtgagtgctgacgatcagcgcctgttgaagaaactgaagtccgacatgcttagcaccatcgagtatgcaccggtgtggatcatcatggcggtcgcgctggcgttaggtatcggtacgatgattggctggcgtcgtgtggcaacgactatcggtgagaaaatcggtaagaaaggcatgacctacgctcaggggatgtctgcccagatgactgcggcagtgtctatcggcctggcgagttataccgggatgccggtttccactactcacgtactctcctcttctgtcgcggggacgatggtggtagatggtggcggcttacagcgtaaaaccgtgaccagcattctgatggcctgggtgtttacccttccggctgcggtactgctttccggcgggctttactggctctccttgcagttcctgtaa

SEQ ID NO: 4443 - protein, 499 aa, Escherichia coli O157
MLHLFAGLDLHTGLLLLLALAFVLFYEAINGFHDTANAVATVIYTRAMRSQLAVVMAAVFNFLGVLLGGLSVAYAIVHMLPTDLLLNMGSSHGLAMVFSMLLAAIIWNLGTWYFGLPASSSHTLIGAIIGIGLTNALMTGTSVVDALNIPKVLSIFGSLIVSPIVGLVFAGGLIFLLRRYWSGTKKRARIHLTPAEREKKDGKKKPPFWTRIALILSAIGVAFSHGANDGQKGIGLVMLVLIGVAPAGFVVNMNATGYEITRTRDAINNVEAYFEQHPALLKQATGADQLVPAPEAGATQPAEFHCHPSNTINALNRLKGMLTTDVESYDKLSLDQRSQMRRIMLCVSDTIDKVVKMPGVSADDQRLLKKLKSDMLSTIEYAPVWIIMAVALALGIGTMIGWRRVATTIGEKIGKKGMTYAQGMSAQMTAAVSIGLASYTGMPVSTTHVLSSSVAGTMVVDGGGLQRKTVTSILMAWVFTLPAAVLLSGGLYWLSLQFL

SEQ ID NO: 4444 - DNA, 1473 bp, Buchnera aphidicola subsp
  CDS (1)..(1473): transl_table=11
atgctacatttattttcttattctgatttgaatcatagtttattagtttttttagctctattttttgtgttattttatgaagccatcaatggttttcatgatacagcaaatgcggtatcaactttaatatatactcgagcaatgtctgcacatgttgcagttatcatgtcaggtatatttaattttttaggtgttttactaggtggtttaactgttgcttataccattgtacatttattaccaaatgatttattgttaaatgctacttcaaaaaatgcccttgctatggtattttcaatgttattagcagctataatttggaatctatctacatggtatttttgtttacctgcttcaagttcacattcccttattggagcaattatcggaataggtttaactaatgccttcgttacagattcgtctttagtagatgcattcaacattcctaaaatgacaagtgtttttttatcgcttgttttttctcctattattgggctcataatagctggtagtttaatatttttactacgatattatctaaataataataaaattttttatcgcattcatatgacaccattagagcgtaaagaaaaagatggtaaaaaaataccaccatttctaattagaatggcattaattctttcatctattggtgtaagttatgctcatggtgcaaatgatgggcaaaaaggcattggattaataatgcttgtactaataggaattgtaccctcttctttcttagtaaatttaaatactaataaatatgaaataaactgtacaaaacatacacttaatcatttagaaaaatattttttagaaaaaaatataaaaaaatcaaatattataaaaaataaagaggaaatcaataatttagttgtaagatctcaatcttacaattctataaaaaatattaaaaatactaaattattattaaaaaatatatctaactataacgatttaagcattaaaaaaagatttcaattgcgtcattatttattatgtatttctgattcaattgataaaaaagtaaattcttctgatatctgttccaaagataaacgttttctgatacacagtaaaaaagtaatacttaaaacaattgagtacgcgcctatgtggattatattaatcgttgcgctatctttatcaataggaacaatgataggttggaaacgtatagttgttactattggtgaaaaaataggaaaaaaaagaatgacatatgcacaagctatgtcagctcaaataacagcttctttttctattggaattgcaagttatacaggtataccagtttctactacacatattctttcatcttctgtagcaggaactatgttaatcgatggtgatggaattcaaacaaaaactattaaaaatattgctttagcatggatattaactttaccggtttctatgctattatctagctttttgtactggattgcattatttttaatataa

SEQ ID NO: 4445 - protein, 490 aa, Buchnera aphidicola subsp
MLHLFSYSDLNHSLLVFLALFFVLFYEAINGFHDTANAVSTLIYTRAMSAHVAVIMSGIFNFLGVLLGGLTVAYTIVHLLPNDLLLNATSKNALAMVFSMLLAAIIWNLSTWYFCLPASSSHSLIGAIIGIGLTNAFVTDSSLVDAFNIPKMTSVFLSLVFSPIIGLIIAGSLIFLLRYYLNNNKIFYRIHMTPLERKEKDGKKIPPFLIRMALILSSIGVSYAHGANDGQKGIGLIMLVLIGIVPSSFLVNLNTNKYEINCTKHTLNHLEKYFLEKNIKKSNIIKNKEEINNLVVRSQSYNSIKNIKNTKLLLKNISNYNDLSIKKRFQLRHYLLCISDSIDKKVNSSDICSKDKRFLIHSKKVILKTIEYAPMWIILIVALSLSIGTMIGWKRIVVTIGEKIGKKRMTYAQAMSAQITASFSIGIASYTGIPVSTTHILSSSVAGTMLIDGDGIQTKTIKNIALAWILTLPVSMLLSSFLYWIALFLI

SEQ ID NO: 4446 - DNA, 1482 bp, Buchnera aphidicola subsp
  CDS (1)..(1482): transl_table=11
atgctatatttattttcttattctgatttgaatcatagtttatttattttactagctttattttttgtattgtgttacgaagctattaatggatttcatgatacagcaaatgctgtgtcaacattgatttatacacgtgcaacttcagctcattttgcagttataatgtcaggtctatttaattttcttggtgtcttgttgggaggtttaacagttgcgtatgcaattgttcatttattgccaaatgatttactattaaatagtaattcaaaaaatgctcttgctatggttttttctatgttattagcagctatactatggaatttatctacttggtatttttgtttaccagcttcaagttcgcattcgcttattggagcaataattggaattggtttaactaacgcgataattactgattcttctttattacatgctttaaatgttcctaaaatgacaaatgtatttttatctcttattttttcaccgattgtaggattaataatttcgggtagtttaatatttttgttacgtttttttttaaaaaagaaaaagaatcattatcgtattcatatgactccattagaaagagaacaaaaagaaggcaaaaaaaaaccaccttttttaattaaaatcgctttgatcttatcatctattggagtaagttatgcacatggtgcaaacgatggtcaaaaaggaattggtttgttaatgcttgtccttatcggaattgcaccatgtggttttttagttaatttaaatgcatctaaaaaagaaattatttacacaaaaaatacaattgatcatctatatgaatactattcaaaaaataaagtcaaaataattaaaaatactaaaaatcaaaaaaaaattgatttttcaataaaaaattataattattttgaaattataaaaaatataaaaaaaactaaatttttattacaaaatatatatgattttaatcaattaaatataaaacaaagatttaaattacgtcattttttactttttctttctgaaaatatagatcaaacaatacatttttcaaatatcgttaaaaaagaaaaagattttttaaaaaaaagtaaaaaagatatacttaaaacgattgaatatgcaccaatgtggataatactaattatcgcactttctttatctgtaggtacaatgattggttggaaacgtatagtagtaactattggtgaaaagataggaaaaaaaagaatgacatatgcacaagccatgtcggcgcagataactgcttctttatcaattggtatagcaagctatacaggaatacctgtatctacaacacatattttgtcttcttctgtagctggagcaatgttaagtgatggagatggtattcaaattagtacaataaaaaatattgctcttgcttggatattaactttacctgtttcaattttattgtctggttttttttattggattactcttttatttataaaaaatttttaa

SEQ ID NO: 4447 - protein, 493 aa, Buchnera aphidicola subsp
MLYLFSYSDLNHSLFILLALFFVLCYEAINGFHDTANAVSTLIYTRATSAHFAVIMSGLFNFLGVLLGGLTVAYAIVHLLPNDLLLNSNSKNALAMVFSMLLAAILWNLSTWYFCLPASSSHSLIGAIIGIGLTNAIITDSSLLHALNVPKMTNVFLSLIFSPIVGLIISGSLIFLLRFFLKKKKNHYRIHMTPLEREQKEGKKKPPFLIKIALILSSIGVSYAHGANDGQKGIGLLMLVLIGIAPCGFLVNLNASKKEIIYTKNTIDHLYEYYSKNKVKIIKNTKNQKKIDFSIKNYNYFEIIKNIKKTKFLLQNIYDFNQLNIKQRFKLRHFLLFLSENIDQTIHFSNIVKKEKDFLKKSKKDILKTIEYAPMWIILIIALSLSVGTMIGWKRIVVTIGEKIGKKRMTYAQAMSAQITASLSIGIASYTGIPVSTTHILSSSVAGAMLSDGDGIQISTIKNIALAWILTLPVSILLSGFFYWITLLFIKNF

SEQ ID NO: 4448 - DNA, 1500 bp, Buchnera aphidicola subsp
  CDS (1)..(1500): transl_table=11
atgtcatattatttttcttttttttgttataatagtagtgtcgtattttcatgtttttcattattatttatatttatctatgaagtaattaatggttttcatgactcagctaatgcaatagccttaataatttatacgcgttctatgaacgaaaaaatggcaatattaatatcaggaatattgaattttttgggagtattttttggaggattgagtattgcatatgctataatttatttattaccaagtaatttattgttaaacattaatacttcgtgtggtttaaaagcaattttttctatattattatcggctatattgtggaatttatgtacttggtatttaagtttacctacatctagttcgcatacattaattggatcaattattggaattaattttgttaatgcgtttattaataatttttctattttaagtttaattagttttaataaaattatatatgtttttttatctttaatattatctccaatatgtgggttgataatagcgggcagtttggtttttttgttaaaaaaatattataattctaaatataaagaatattgcattaatatcagtccggtgtattatcgtattcaaaagaaaaaacaatcattattatggattaaaataacattaatattatcttcattcggaataagttattttcatggtgcgaatgatggccaaaaaggaattggtttaattatgttagtgttaatttgtatatttccatcgaaatatttaataaatttaaatacgtctacttatgatataataaatactaggatttctattgatagttttgaaaaatattacttacgtaatcaaacattaataaaacaaaatgttagtaacattatgtttaaggaaattattcaaccgttattgtttttaaaaaatatagataatactaaaaatgataatgtattggttattattaattttatgcggaatttattacataatatatcaagttataaagaattgaacgttattcagtgtcatcaattacgtcaatctttgttatgtataggaaattttatggaagtattaagtcatttttcaattgttcaggttaaagataaacactttttttattgtttgaaaaagaatttgttaagtacaattgaatatgctcctaattgggttgttacttttattgcattatcattatctattggaacgataataggatggcgccgtattactaatacgtttcagaataagttaggtacacaagatataacatatgctcaggctatatcggcacaattaacaactgcgtgttcggttagtttagctagttgttctggaatacccgtttcaactactcatattatgtcttcatcattggttggaactatgttagttaatcgtagtggtttgcgaattaatacaattaaaaaaactattattatttggatattaacaatacctatttctatgttattagctagttttttgtattggattagtttaaaatgttttaattaa

SEQ ID NO: 4449 - protein, 499 aa, Buchnera aphidicola subsp
MSYYFSFFCYNSSVVFSCFSLLFIFIYEVINGFHDSANAIALIIYTRSMNEKMAILISGILNFLGVFFGGLSIAYAIIYLLPSNLLLNINTSCGLKAIFSILLSAILWNLCTWYLSLPTSSSHTLIGSIIGINFVNAFINNFSILSLISFNKIIYVFLSLILSPICGLIIAGSLVFLLKKYYNSKYKEYCINISPVYYRIQKKKQSLLWIKITLILSSFGISYFHGANDGQKGIGLIMLVLICIFPSKYLINLNTSTYDIINTRISIDSFEKYYLRNQTLIKQNVSNIMFKEIIQPLLFLKNIDNTKNDNVLVIINFMRNLLHNISSYKELNVIQCHQLRQSLLCIGNFMEVLSHFSIVQVKDKHFFYCLKKNLLSTIEYAPNWVVTFIALSLSIGTIIGWRRITNTFQNKLGTQDITYAQAISAQLTTACSVSLASCSGIPVSTTHIMSSSLVGTMLVNRSGLRINTIKKTIIIWILTIPISMLLASFLYWISLKCFN

SEQ ID NO: 4450 - DNA, 26 bp, Artificial sequence
  primer
atgctaaatttatttgttggccttga

SEQ ID NO: 4451 - DNA, 24 bp, Artificial sequence
  primer
ttaaatcaactgcaatgctatcca

SEQ ID NO: 4452 - protein, 517 aa, Artificial sequence
  consensus sequence
  Variant (2)..(3): Xaa in position 2 to 3 is any amino acid
  Variant (6)..(8): Xaa in position 6 to 8 is any amino acid
  Variant (10)..(11): Xaa in position 10 to 11 is any amino acid
  Variant (13)..(14): Xaa in position 13 to 14 is any amino acid
  Variant (31)..(37): Xaa in position 31 to 37 is any amino acid
  Variant (40)..(42): Xaa in position 40 to 42 is any amino acid
  Variant (44)..(45): Xaa in position 44 to 45 is any amino acid
  Variant (48)..(48): Xaa in position 48 is any amino acid
  Variant (51)..(56): Xaa in position 51 to 56 is any amino acid
  Variant (59)..(60): Xaa in position 59 to 60 is any amino acid
  Variant (62)..(63): Xaa in position 62 to 63 is any amino acid
  Variant (67)..(68): Xaa in position 67 to 68 is any amino acid
  Variant (70)..(77): Xaa in position 70 to 77 is any amino acid
  Variant (79)..(79): Xaa in position 79 is any amino acid
  Variant (84)..(85): Xaa in position 84 to 85 is any amino acid
  Variant (87)..(87): Xaa in position 87 is any amino acid
  Variant (91)..(91): Xaa in position 91 is any amino acid
  Variant (98)..(99): Xaa in position 98 to 99 is any amino acid
  Variant (101)..(101): Xaa in position 101 is any amino acid
  Variant (112)..(112): Xaa in position 112 is any amino acid
  Variant (114)..(114): Xaa in position 114 is any amino acid
  Variant (116)..(116): Xaa in position 116 is any amino acid
  Variant (118)..(119): Xaa in position 118 to 119 is any amino acid
  Variant (121)..(142): Xaa in position 121 to 142 is any amino acid
  Variant (143)..(143): Xaa in position 143 is any or no amino acid
  Variant (146)..(147): Xaa in position 146 to 147 is any amino acid
  Variant (150)..(151): Xaa in position 150 to 151 is any amino acid
  Variant (153)..(155): Xaa in position 153 to 155 is any amino acid
  Variant (157)..(162): Xaa in position 157 to 162 is any amino acid
  Variant (164)..(169): Xaa in position 164 to 169 is any amino acid
  Variant (170)..(179): Xaa in position 170 to 179 is any or no amino acid
  Variant (181)..(190): Xaa in position 181 to 190 is any amino acid
  Variant (191)..(191): Xaa in position 191 is any or no amino acid
  Variant (194)..(194): Xaa in position 194 is any amino acid
  Variant (196)..(196): Xaa in position 196 is any amino acid
  Variant (198)..(199): Xaa in position 198 to 199 is any amino acid
  Variant (201)..(205): Xaa in position 201 to 205 is any amino acid
  Variant (210)..(210): Xaa in position 210 is any amino acid
  Variant (213)..(213): Xaa in position 213 is any amino acid
  Variant (220)..(220): Xaa in position 220 is any amino acid
  Variant (223)..(223): Xaa in position 223 is any amino acid
  Variant (226)..(226): Xaa in position 226 is any amino acid
  Variant (228)..(228): Xaa in position 228 is any amino acid
  Variant (230)..(231): Xaa in position 230 to 231 is any amino acid
  Variant (233)..(315): Xaa in position 233 to 315 is any amino acid
  Variant (316)..(363): Xaa in position 316 to 363 is any or no amino acid
  Variant (365)..(375): Xaa in position 365 to 375 is any amino acid
  Variant (376)..(378): Xaa in position 376 to 378 is any or no amino acid
  Variant (380)..(392): Xaa in position 380 to 392 is any amino acid
  Variant (393)..(393): Xaa in position 393 is any or no amino acid
  Variant (395)..(408): Xaa in position 395 to 408 is any amino acid
  Variant (410)..(410): Xaa in position 410 is any amino acid
  Variant (412)..(414): Xaa in position 412 to 414 is any amino acid
  Variant (418)..(418): Xaa in position 418 is any amino acid
  Variant (422)..(422): Xaa in position 422 is any amino acid
  Variant (426)..(426): Xaa in position 426 is any amino acid
  Variant (429)..(429): Xaa in position 429 is any amino acid
  Variant (431)..(433): Xaa in position 431 to 433 is any amino acid
  Variant (435)..(435): Xaa in position 435 is any amino acid
  Variant (442)..(444): Xaa in position 442 to 444 is any amino acid
  Variant (447)..(447): Xaa in position 447 is any amino acid
  Variant (450)..(451): Xaa in position 450 to 451 is any amino acid
  Variant (453)..(455): Xaa in position 453 to 455 is any amino acid
  Variant (457)..(459): Xaa in position 457 to 459 is any amino acid
  Variant (462)..(462): Xaa in position 462 is any amino acid
  Variant (464)..(468): Xaa in position 464 to 468 is any amino acid
  Variant (475)..(475): Xaa in position 475 is any amino acid
  Variant (479)..(479): Xaa in position 479 is any amino acid
  Variant (485)..(487): Xaa in position 485 to 487 is any amino acid
  Variant (488)..(489): Xaa in position 488 to 489 is any or no amino acid
  Variant (491)..(491): Xaa in position 491 is any amino acid
  Variant (493)..(494): Xaa in position 493 to 494 is any amino acid
  Variant (496)..(501): Xaa in position 496 to 501 is any amino acid
  Variant (504)..(504): Xaa in position 504 is any amino acid
  Variant (509)..(512): Xaa in position 509 to 512 is any amino acid
  Variant (514)..(516): Xaa in position 514 to 516 is any amino acid
LXXALXXXLXXEXXNGFHDTANAVATVIYTXXXXXXXAVXXXGXXNFXGVXXXXXXVAXXIXXLLPXXLXXXXXXXXGXAMVFXXLXAAIXWNLGTWXXGXPASSSHTLIGXIXGXGXXNXXXXXXXXXXXXXXXXXXXXXXXSLXXSPXXGXXXAXXXXXXLXXXXXXXXXXXXXXXXPXXXXXXXXXXXPPXWXRXXLXXXXXGVSFXHGXNDGQKGXGLXMLXLXGXXPXXXXXXXXXXXXXXXXXXXXXXXXXXXXXXXXXXXXXXXXXXXXXXXXXXXXXXXXXXXXXXXXXXXXXXXXXXXXXXXXXXXXXXXXXXXXXXXXXXXXXXXXXXXXXXXXXXXXXXXXXXXXXXXXXXXRXXXXXXXXXXXXXXKXXXXXXXXXXXXXXLXXXXXXXXXXXXXXPXWXXXAVAXALGXGTMXGWXRXXXTXGEKIGKXXXTYXQGXXAXXXAXXXIGXAXXXXXPVSTTHXLSSXVAGTMXXXXXGXQXXTXXXXXXAWXLTLPXXXXLXXXL

SEQ ID NO: 4453 - protein, 58 aa, Artificial sequence
  protein pattern
  Variant (3)..(3): Xaa in position 3 is Lys or Arg
  Variant (5)..(5): Xaa in position 5 is Ile or Val
  Variant (6)..(6): Xaa in position 6 is Ala or Val
  Variant (7)..(7): Xaa in position 7 is any amino acid
  Variant (9)..(9): Xaa in position 9 is Ile or Val
  Variant (15)..(17): Xaa in position 15 to 17 is any amino acid
  Variant (18)..(18): Xaa in position 18 is Leu or Met
  Variant (21)..(21): Xaa in position 21 is Ala, Gly or Ser
  Variant (23)..(23): Xaa in position 23 is Ala or Gly
  Variant (24)..(24): Xaa in position 24 is any amino acid
  Variant (25)..(25): Xaa in position 25 is Ala or Ser
  Variant (27)..(27): Xaa in position 27 is Glu or Gln
  Variant (28)..(28): Xaa in position 28 is any amino acid
  Variant (29)..(29): Xaa in position 29 is Thr or Val
  Variant (30)..(30): Xaa in position 30 is Ala or Thr
  Variant (31)..(33): Xaa in position 31 to 33 is any amino acid
  Variant (35)..(35): Xaa in position 35 is Ala or Gly
  Variant (36)..(36): Xaa in position 36 is any amino acid
  Variant (38)..(38): Xaa in position 38 is Asp, Asn or Ser
  Variant (39)..(40): Xaa in position 39 to 40 is any amino acid
  Variant (41)..(41): Xaa in position 41 is Ala, Gly or Ser
  Variant (42)..(42): Xaa in position 42 is Ile, Leu or Met
  Variant (48)..(48): Xaa in position 48 is any amino acid
  Variant (49)..(49): Xaa in position 49 is Ile or Val
  Variant (51)..(51): Xaa in position 51 is Ala or Ser
  Variant (53)..(53): Xaa in position 53 is Ala, Gly or Ser
  Variant (54)..(54): Xaa in position 54 is Ile or Val
  Variant (55)..(55): Xaa in position 55 is Ala or Thr
  Variant (57)..(57): Xaa in position 57 is Ala, Ser or Thr
GWXRXXXTXGEKIGXXXXTYXQXXXAXXXXXXXIXXAXXXXXPVSTTXXLXSXXXGXM

SEQ ID NO: 4454 - protein, 54 aa, Artificial sequence
  protein pattern
  Variant (2)..(2): Xaa in position 2 is any amino acid
  Variant (3)..(3): Xaa in position 3 is any or no amino acid
  Variant (5)..(7): Xaa in position 5 to 7 is any or no amino acid
  Variant (9)..(9): Xaa in position 9 is Ile or Val
  Variant (11)..(11): Xaa in position 11 is Ala or Ser
  Variant (12)..(12): Xaa in position 12 is Leu or Met
  Variant (14)..(14): Xaa in position 14 is any amino acid
  Variant (17)..(17): Xaa in position 17 is Ile or Val
  Variant (18)..(18): Xaa in position 18 is any amino acid
  Variant (22)..(22): Xaa in position 22 is Ala or Gly
  Variant (25)..(25): Xaa in position 25 is Phe, Trp or Tyr
  Variant (26)..(26): Xaa in position 26 is Phe or Leu
  Variant (28)..(28): Xaa in position 28 is Ile or Leu
  Variant (30)..(30): Xaa in position 30 is Ala or Ser
  Variant (36)..(36): Xaa in position 36 is Leu or Met
  Variant (37)..(37): Xaa in position 37 is Ile or Val
  Variant (39)..(39): Xaa in position 39 is Ala or Ser
  Variant (41)..(41): Xaa in position 41 is Ile or Leu
  Variant (43)..(43): Xaa in position 43 is Ile or Val
  Variant (45)..(45): Xaa in position 45 is Ile, Leu, Met or Val
  Variant (46)..(46): Xaa in position 46 is any amino acid
  Variant (48)..(48): Xaa in position 48 is any amino acid
  Variant (49)..(49): Xaa in position 49 is Phe, Ile, Leu, Met or Val
  Variant (50)..(50): Xaa in position 50 is Ile, Leu, Met or Val
  Variant (51)..(53): Xaa in position 51 to 53 is any amino acid
  Variant (54)..(54): Xaa in position 54 is Asp, Gly, Asn, Pro or Ser
GXXAXXXMXFXXLXAAXXWNLXTWXXGXPXSSSHTXXGXIXGXGXXNXXXXXXX

SEQ ID NO: 4455 - protein, 44 aa, Artificial sequence
  protein pattern
  Variant (2)..(3): Xaa in position 2 to 3 is any amino acid
  Variant (5)..(5): Xaa in position 5 is Ile or Val
  Variant (6)..(6): Xaa in position 6 is any amino acid
  Variant (7)..(7): Xaa in position 7 is Ser or Thr
  Variant (8)..(8): Xaa in position 8 is Ala, Cys or Ser
  Variant (9)..(9): Xaa in position 9 is any amino acid
  Variant (12)..(13): Xaa in position 12 to 13 is any or no amino acid
  Variant (15)..(16): Xaa in position 15 to 16 is any or no amino acid
  Variant (19)..(19): Xaa in position 19 is Ala or Ser
  Variant (26)..(26): Xaa in position 26 is Ile, Met or Val
  Variant (29)..(29): Xaa in position 29 is Ile or Val
  Variant (32)..(32): Xaa in position 32 is Ile, Leu or Val
  Variant (34)..(34): Xaa in position 34 is Ile or Val
  Variant (35)..(35): Xaa in position 35 is Cys or Gly
  Variant (36)..(37): Xaa in position 36 to 37 is any amino acid
  Variant (39)..(40): Xaa in position 39 to 40 is any amino acid
  Variant (41)..(41): Xaa in position 41 is Phe or Tyr
  Variant (42)..(42): Xaa in position 42 is any amino acid
  Variant (43)..(43): Xaa in position 43 is Leu or Val
  Variant (44)..(44): Xaa in position 44 is Asp or Asn
RXXLXXXXXGVXXSXXHGXNDGQKGXGLXMLXLXXXXPXXXXXX

SEQ ID NO: 4456 - protein, 29 aa, Artificial sequence
  protein pattern
  Variant (2)..(3): Xaa in position 2 to 3 is any amino acid
  Variant (5)..(7): Xaa in position 5 to 7 is any amino acid
  Variant (8)..(9): Xaa in position 8 to 9 is any or no amino acid
  Variant (11)..(12): Xaa in position 11 to 12 is any or no amino acid
  Variant (15)..(15): Xaa in position 15 is Ile or Val
  Variant (16)..(16): Xaa in position 16 is Phe or Leu
  Variant (20)..(20): Xaa in position 20 is any amino acid
  Variant (21)..(21): Xaa in position 21 is Ala, Ser or Thr
  Variant (22)..(22): Xaa in position 22 is Ile, Met or Val
  Variant (23)..(23): Xaa in position 23 is any amino acid
  Variant (25)..(25): Xaa in position 25 is Ala or Ser
  Variant (26)..(26): Xaa in position 26 is Ala, Gly or Ser
  Variant (27)..(27): Xaa in position 27 is any amino acid
  Variant (28)..(28): Xaa in position 28 is Phe, Leu or Val
  Variant (29)..(29): Xaa in position 29 is Phe or Tyr
QXXTXXXXXLXXAWXXTLPXXXXLXXXXX

SEQ ID NO: 4457 - protein, 21 aa, Artificial sequence
  protein pattern
  Variant (2)..(5): Xaa in position 2 to 5 is any or no amino acid
  Variant (7)..(7): Xaa in position 7 is any amino acid
  Variant (9)..(9): Xaa in position 9 is Ile or Val
  Variant (10)..(10): Xaa in position 10 is any amino acid
  Variant (11)..(11): Xaa in position 11 is Ile, Leu, Met or Val
  Variant (12)..(12): Xaa in position 12 is any amino acid
  Variant (15)..(15): Xaa in position 15 is Ile or Leu
  Variant (16)..(16): Xaa in position 16 is Ala or Ser
  Variant (18)..(18): Xaa in position 18 is Gly or Ser
  Variant (19)..(19): Xaa in position 19 is Ile or Leu
AXXXXPXWXXXXVAXXLXXGT

SEQ ID NO: 4458 - protein, 20 aa, Artificial sequence
  protein pattern
  Variant (2)..(4): Xaa in position 2 to 4 is any amino acid
  Variant (5)..(12): Xaa in position 5 to 12 is any or no amino acid
  Variant (14)..(14): Xaa in position 14 is Ile, Leu or Val
  Variant (15)..(15): Xaa in position 15 is Phe, Ile, Leu or Val
  Variant (18)..(18): Xaa in position 18 is Ile, Leu, Met or Val
  Variant (19)..(19): Xaa in position 19 is Ala, Ile or Val
VXXXXXXXXXXXLXXSPXXG

SEQ ID NO: 4459 - DNA, 1419 bp, Escherichia coli K12
  CDS (1)..(1419): transl_table=11
atggcaacgttcggggcgtgccggttttttttcggttacccggtcgtaactaacatcttcagcctctggcgggatgatggccgcgcttcctgcggatataacaaaacgatgaggttttacatgcgtaaaattaaagggttacgttggtatatgatcgcactggtgacgctcggcaccgtgcttggttacctgacgcgtaacactgtggcggcagctgcgccaactctgatggaagagttaaacatctccacccaacagtattcctatatcatcgcagcctattctgctgcttatacggtcatgcaaccggtagcaggttatgtactggatgtgctgggtacgaaaatcggttatgcaatgtttgctgtgctgtgggccgtgttctgtggtgcaaccgcgctggcaggtagctggggtggcctggctgttgctcgtggtgcggtcggtgccgcggaagcagcgatgatcccggcgggtctgaaagccagctccgaatggttcccggcgaaagagcgttccatcgcagtaggctactttaacgtaggttcttcgattggtgcgatgattgcgccgccgctggtggtatgggcaatcgtaatgcacagctggcagatggcatttatcatctccggtgcattgagctttatctgggcgatggcatggctgattttctataaacatccgcgcgaccagaagcatctgaccgatgaagaacgcgactatattattaatggtcaggaagcccagcaccaggtgagcacggcgaagaaaatgtccgttggtcagatcctgcgtaaccgtcagttctggggtatcgcgctgccgcgtttcctggcagaaccggcctggggtacttttaacgcgtggatcccgctgttcatgtttaaagtttacggctttaacctgaaagagatcgcgatgttcgcctggatgccgatgctgtttgctgacctcggttgtatcctcggtggttacctgccgccgctgttccagcgttggtttggtgtgaacctgatcgtttcccgtaagatggtcgtaacgctgggtgcagtgctgatgattggcccgggtatgatcggcctgttcaccaacccgtatgtcgcaattatgctgctgtgtatcggtggttttgcccaccaggcactgtctggcgcgctgattacgctctcttccgatgtgtttggtcgtaacgaagtggcaacggcaaacggtttaaccgggatgtccgcatggctggcaagtacgctgtttgcgctggttgtcggtgcactggctgacaccatcggcttcagcccgctgttcgcagttctggcagtgttcgacctgttaggtgcgctggttatctggaccgtgttgcagaacaaaccggcgattgaggtggcgcaggaaacacataacgatcccgcaccgcaacattaa

SEQ ID NO: 4460 - protein, 472 aa, Escherichia coli K12
MATFGACRFFFGYPVVTNIFSLWRDDGRASCGYNKTMRFYMRKIKGLRWYMIALVTLGTVLGYLTRNTVAAAAPTLMEELNISTQQYSYIIAAYSAAYTVMQPVAGYVLDVLGTKIGYAMFAVLWAVFCGATALAGSWGGLAVARGAVGAAEAAMIPAGLKASSEWFPAKERSIAVGYFNVGSSIGAMIAPPLVVWAIVMHSWQMAFIISGALSFIWAMAWLIFYKHPRDQKHLTDEERDYIINGQEAQHQVSTAKKMSVGQILRNRQFWGIALPRFLAEPAWGTFNAWIPLFMFKVYGFNLKEIAMFAWMPMLFADLGCILGGYLPPLFQRWFGVNLIVSRKMVVTLGAVLMIGPGMIGLFTNPYVAIMLLCIGGFAHQALSGALITLSSDVFGRNEVATANGLTGMSAWLASTLFALVVGALADTIGFSPLFAVLAVFDLLGALVIWTVLQNKPAIEVAQETHNDPAPQH

SEQ ID NO: 4461 - DNA, 1317 bp, Caulobacter crescentus CB15
  CDS (1)..(1317): transl_table=11
ttggcggtagcggtaccagaaagagcccctgaaggctcgcccgggggagccgccatgccgaagttgaaagccctgcgctggtggatcatcggcctggtgacgctgggcgcggtcatcaactatctgacgcgctcgaccatgggcgtggcggcgccgacgctgctgaaggagctcggcatctcggtgaccgagtactcctggatcaccagcgccttccagctggggatcatgctgcagcccatctgcggctatgtcctcgacaccctgggcctgcgcaccggcttcgcggtcttcgccgtcgcctggtccttgatcgccatggcccacggcctggccaacagctggcagggctttgcggtgttgcgcgggttcctgggcctggccgaggggtcggcccagccggcggggatgaagaccgtcgcgatctggttcccggccaaggagcgcggcttcgccggcggcgtgttcaacatcggcgcctcgatcggctcggtcctggccccgcccctggtggtctgggcggtcctggtctggaactggcgcgcggccttcgtgctgaccggggtcatgggtctggtctgggtcgtcctgtggctggccttctatcgctcgcccgaaaagcatccttcgatgacggacgaggagcgggcggtgatcgcggcggggcaggaggcccatctggaggccgtcgcggcgcggccctcgatcctgtcgatcctcaagcagggacagttctggggcatcgccctgccgcgctttctggccgacccgacctggggcacgctggccttctgggtgccgctctatctgtcacagacgcgcggctttgatctcaagcagatcgcgctcttcgcctggatgccgtttgtggccgcggacctgggctgcatggcggggccggtgatcgcgctcttcctgcaaaagcgcggtgtgacgctgatcaacgcccgccgcatcgccttcaccctgggggcggtgctgatgacgggcatgatgttcgtcggcaaggtcgagagcgcctacgccgccatcgcgctcttgtgcctgggcggcttcgcgcaccagacgctgtcggtgacggtgatcaccatggcctcggacctgttccggcggaacgaggtcgccacggtggctgggctggcgggcatgatgggcaatcttgggcttttgctgttctccctgctgatcggcgggctggtggccaaggtcggctatgacccgttctttatcgccctgggcgtgctggacatcctgggcgccatcctgctgtggaccttggtcaaggaccctgccgcccgcgccaaggccgccgcatga

SEQ ID NO: 4462 - protein, 438 aa, Caulobacter crescentus CB15
MAVAVPERAPEGSPGGAAMPKLKALRWWIIGLVTLGAVINYLTRSTMGVAAPTLLKELGISVTEYSWITSAFQLGIMLQPICGYVLDTLGLRTGFAVFAVAWSLIAMAHGLANSWQGFAVLRGFLGLAEGSAQPAGMKTVAIWFPAKERGFAGGVFNIGASIGSVLAPPLVVWAVLVWNWRAAFVLTGVMGLVWVVLWLAFYRSPEKHPSMTDEERAVIAAGQEAHLEAVAARPSILSILKQGQFWGIALPRFLADPTWGTLAFWVPLYLSQTRGFDLKQIALFAWMPFVAADLGCMAGPVIALFLQKRGVTLINARRIAFTLGAVLMTGMMFVGKVESAYAAIALLCLGGFAHQTLSVTVITMASDLFRRNEVATVAGLAGMMGNLGLLLFSLLIGGLVAKVGYDPFFIALGVLDILGAILLWTLVKDPAARAKAAA

SEQ ID NO: 4463 - DNA, 1305 bp, Salmonella typhimurium LT2
  CDS (1)..(1305): transl_table=11
atgaagatgacaaaattaagatggtggattatcggcctggtctgcgtagggaccatcgtaaactacctgtcccgtagctcgcttagcgttgcggcgccagcgatgatgaaagaactccattttgatgagcaacaatattcctgggtggtgagcgccttccagctttgttacaccattgcgcagccgatcaccggctatttgatggatgtcatcggactgaaaatcggcttctttatctttgccttgttgtggtcgctgatcaacatggcgcacgcgctggccggcggctggataagtctggcatttctgcgtggtctgatggggctaaccgaagcgtcagcgattccggccgggattaaagccagcgccgaatggttcccgacgaaagaacgcggtattgcggggggcctgtttaatatcggtacttcaattggcgcgatgctggcgccgccgctggtggtctgggcgatgctgacctttgctgatagcggcatcggtactgaaatggcgtttgtgattaccggtgggatcggcgtgctgttcgccatcacctggttcctgatttataactcgccaaataaacacccgtggatcacccacaaagagctgcgttatatcgaagacggccaggaaagctatctccaggacgataataaaaaaccggccgttaaagagatcgttaaaaagcgtaacttctgggcattggcgattacccgttttcttgctgacccggcatggggaacgctgagtttctggatgccgctgtatctgattaacgtgatgcatctgccgttaaaagagatcgccatgtttgcctggctgccgttcctggcggcggacttcggctgcgttgcaggcggtttcctggcgaagttcttcatggaaaagatgcacatgaccacgatcaatgcgcgtcgttgtagctttaccatcggcgctgttttgatgatttcgatcggttttgtcagcattacgactaacccgtatgtcgccattgcattgatgagtattggcggttttgcgcaccagacgctgtctaccgtcgtgattaccatgagcgctgacctgttcaagaaaaatgaggtcgcgacggttgccggtctggcaggatctgcggcatggatgggacagttaagcttcaacctgtttatgggggcattggtcgctattatcggttacggcccgttcttcattgcactcagtctgttcgatattatcggcgccatcatcctgtgggtactgattaaagatccggaaaagcaccacccgccaatgacggaacagccgctggcgtctcaccgctaa

SEQ ID NO: 4464 - protein, 434 aa, Salmonella typhimurium LT2
MKMTKLRWWIIGLVCVGTIVNYLSRSSLSVAAPAMMKELHFDEQQYSWVVSAFQLCYTIAQPITGYLMDVIGLKIGFFIFALLWSLINMAHALAGGWISLAFLRGLMGLTEASAIPAGIKASAEWFPTKERGIAGGLFNIGTSIGAMLAPPLVVWAMLTFADSGIGTEMAFVITGGIGVLFAITWFLIYNSPNKHPWITHKELRYIEDGQESYLQDDNKKPAVKEIVKKRNFWALAITRFLADPAWGTLSFWMPLYLINVMHLPLKEIAMFAWLPFLAADFGCVAGGFLAKFFMEKMHMTTINARRCSFTIGAVLMISIGFVSITTNPYVAIALMSIGGFAHQTLSTVVITMSADLFKKNEVATVAGLAGSAAWMGQLSFNLFMGALVAIIGYGPFFIALSLFDIIGAIILWVLIKDPEKHHPPMTEQPLASHR

SEQ ID NO: 4465 - DNA, 1299 bp, Ralstonia solanacearum GMI1000
  CDS (1)..(1299): transl_table=11
gtgaagaccatcaagggcctgcgctggtggatcatcgcactggtgtgcctgggcaccattacgaactacctggcgcgcaattcgctcggcgtgctggcgccgcagctcaagaccgagctgggcatgagcacacagcagtattcctacgtggtcggtgcgttccagatcggctacacgatcatgcagccggtgtgcgggttcatcgtcgacctgatcggcctgcgcatcggctttgcgctgttcgcggtgctgtggtcgattgccggctgcctgcatgcgggcgcgtcgggctggctgtcgctggcgagcttccgggggctgatggggctgaccgaggccgcggccatcccgtcgggcatgaaggcggtggcggagtggtttccggacaaggagaaatccgtcgcggtgggctacttcaatgcgggcacgtcgctgggggccctgctggcgccgccgctggtggtgttcctgtcgctgcgctacggctggcagtcggcgttcgtggtgacgggggcgctgggttttgtgtgggccgcgctgtggtacggcttctaccgctcgccgcgcgagcatgccaagctgtcggccaccgagcacgaccggatcatcggcgggcagatccgctcggcgggcgccgcgcgcggcaagcggccggtgcgcgaggtggtgacgtcgcggcgcttctgggcgatcgcgctgccgcgcttctttgccgagccggcgtggcagacgttcagcttctggattccgctgtacctgtcgagcgcgcggcacatggacctgaaggagattgcgctgttcgcctggctgccgtttctggcggcggacctgggcgggctgctgggcggctatctgtcgccgttcttcatgaagtttttccgcgtgccgctgatctggtcgcgcgtgtgcggcgtggtgctgggcgcgttcctgatgatcgggccggcgtgcatcgggctggtggcgtcgccgtatcaggccatcgcgctgttctgcgtgggcggcttcgcgcaccagatgatctcgaccctggtcaacacgctcagcgccgacgtcttcgatccggaagaggtgggcaccgccagcggctttgccggcatggctgcgtggatcggcggcctcggcttctcgctgatggtcggcgcgctggccgacaccgtcggctacggcccgctgttcggcctgctgggcgcgttcgatctgatcggcgcgacgctgctgatcctgttgatccgcgggcagtcgcaggaggagcgcgcggcgcgccagatgcagcaccacctctccgcttcccattga

SEQ ID NO: 4466 - protein, 432 aa, Ralstonia solanacearum GMI1000
MKTIKGLRWWIIALVCLGTITNYLARNSLGVLAPQLKTELGMSTQQYSYVVGAFQIGYTIMQPVCGFIVDLIGLRIGFALFAVLWSIAGCLHAGASGWLSLASFRGLMGLTEAAAIPSGMKAVAEWFPDKEKSVAVGYFNAGTSLGALLAPPLVVFLSLRYGWQSAFVVTGALGFVWAALWYGFYRSPREHAKLSATEHDRIIGGQIRSAGAARGKRPVREVVTSRRFWAIALPRFFAEPAWQTFSFWIPLYLSSARHMDLKEIALFAWLPFLAADLGGLLGGYLSPFFMKFFRVPLIWSRVCGVVLGAFLMIGPACIGLVASPYQAIALFCVGGFAHQMISTLVNTLSADVFDPEEVGTASGFAGMAAWIGGLGFSLMVGALADTVGYGPLFGLLGAFDLIGATLLILLIRGQSQEERAARQMQHHLSASH

SEQ ID NO: 4467 - DNA, 1308 bp, Ralstonia solanacearum GMI1000
  CDS (1)..(1308): transl_table=11
atgaacacgatcaaaggcctgcgctggtggatgatcgggctggtgctgaccggcctgatcatgaactacctggcgcgcaacgcactggcggccgcggcgcccgaagtcaacaaggtgctcggcatcacgacgcagcagtacggctacatcgtcgccgccttccaggccgcgtacatggtgatgcagccggtggccggctacgtgctggatgtgctgggcaccaagctgggcttcgcgctgttcgccggggcctggtcggtggtctgcatcctgcacagcacggcgggcaactgggtgtcgctggcggtgttccgcgccatgctcggggtgaccgaggcggccggcttcccgtccgccttgcgggcgacgtcggaatggtttcccgccaaggagcgctcgatcgccacgggctggttcaacatcggctcgtcggtgggcgcgctggtggcgccgccgctggtggtctggtgcatcctgcacggcaactggcgcttcgccttcgcggtgatcggcgtgctcgggctggtgtggagcgcgctgtggttcatgctctaccgggtaccggcccggcatccgcgcctgtccgccgaggagcacgcctacatccgcgcggggcaggagacgccggcgcccggcgccgatgccgtcaagccgtcgtggcgcgagatcatgtcgggccggcgcttctgggggatcgccatcccgcgctttctcaccgagccggcgtggcagaccttcaacttctggatcccgctctacatggcgaccgagcgccacatgaacctcaaggaaatcgccatgttcgcgtggctgccgttcctggcggcggacgtcggctgcgtgctgggcggctatctggcgccgtggtaccagaagcgcttctccacatcgctgatcacctcgcgcaagatggtgatggtgacgggcgcggtctgcatgatcggcccggcctgcatcggcctggccaccagtccctacacggcgatcgcgctgttctgcgtcggcggcttcgcgcaccagacgctgtcgggcgcgctgtacacgctgacctcggacgtgttcggcaagcatgaggtcggcaccgccgtggggctggcgggcatgtcgggcttcctgggcggcacgctgttctcgctggccgtcggcacgctggcctcgaccatcggctacaacccgctgttcgcggcgctggccctgttcgacatcgccgccgcgatcgtcatgtggaacgtgctgcgcgagccgcgccgcccgatggcgatgccggcgggcgagctgggcgccgcaccgcgcgtggccggcagctga

SEQ ID NO: 4468 - protein, 435 aa, Ralstonia solanacearum GMI1000
MNTIKGLRWWMIGLVLTGLIMNYLARNALAAAAPEVNKVLGITTQQYGYIVAAFQAAYMVMQPVAGYVLDVLGTKLGFALFAGAWSVVCILHSTAGNWVSLAVFRAMLGVTEAAGFPSALRATSEWFPAKERSIATGWFNIGSSVGALVAPPLVVWCILHGNWRFAFAVIGVLGLVWSALWFMLYRVPARHPRLSAEEHAYIRAGQETPAPGADAVKPSWREIMSGRRFWGIAIPRFLTEPAWQTFNFWIPLYMATERHMNLKEIAMFAWLPFLAADVGCVLGGYLAPWYQKRFSTSLITSRKMVMVTGAVCMIGPACIGLATSPYTAIALFCVGGFAHQTLSGALYTLTSDVFGKHEVGTAVGLAGMSGFLGGTLFSLAVGTLASTIGYNPLFAALALFDIAAAIVMWNVLREPRRPMAMPAGELGAAPRVAGS

SEQ ID NO: 4469 - DNA, 1308 bp, Yersinia pestis KIM
  CDS (1)..(1308): transl_table=11
atgagtattgatattaatcaatcagctaaaattgtaggacggcggaaaataaagtcattacgttggtggatgctggccttatttttacttggggtcaccgttaactatataacccgtaattctctagggattttagcccctgagttaaaaaccagtctgaatatgactaccgagcaatactcatggattgtagcctctttccaactggcttataccgtgttccaaccactttgtggctggttgatcgatgtcatcggtttaaaaatggggttcctggtttgcgccagtgtctgggcggtggtgtgcatgatgcatgccggagcgggtacctggttccaactggcagtattacgcttctttatgggcagtgccgaagccgcagccacccccgcaaacgccaaagccatttcggattggttcccgaaaaaagaacggcccattgccgctggatgggcaggggtggggttctctatcggtgcgatgttggcccccccgattatcgtactggcgcatgtggcactcggttggcaaggggcattcttgttctccggcgcattagccatgatttgggttctgctgtggtggcgtttttaccattcaccggatactcatccaaatctgagtcaagaagagtttgaactgattcaccaagataatgaacccgtactaccacgactgccattccttaaatccttagccattctaagtaaaaataagaaattttacggtattgctattcccgcgtttctggcggaaccggcctgggctgtatttagtttctgggtaccgctgtatttagccaccgaacgcggcatggacctgaaacagatcgccatgttcgcctggctgccattcctggcggcagatattggcagtgtcgccagtggctatttaaccaaactctatcagaaatggtttggttgcagccgggtcaactcggtggttgccagttcggtaaccggtgcttttatgatggtgtcattggcctttgttgccgtcaccaaagacccttatctggcaatcgctttaatctccattggcggctttgggcaccaagtcatctcctgcatgctcagtgcattagtggttgactcttttgataaaaatcaggttgccaccgtcaatggcctgcgtggttcttccgcctggatcgccagcttcctgtttacattattaatcggggccgtttcagacactatcggctttaacccgctgtttatcgctatggggttcttcgatctgattggggccgtattcctgattgctctgttcgctgagcgccgtaataaaccccaaccgacggtctga

SEQ ID NO: 4470 - protein, 435 aa, Yersinia pestis KIM
MSIDINQSAKIVGRRKIKSLRWWMLALFLLGVTVNYITRNSLGILAPELKTSLNMTTEQYSWIVASFQLAYTVFQPLCGWLIDVIGLKMGFLVCASVWAVVCMMHAGAGTWFQLAVLRFFMGSAEAAATPANAKAISDWFPKKERPIAAGWAGVGFSIGAMLAPPIIVLAHVALGWQGAFLFSGALAMIWVLLWWRFYHSPDTHPNLSQEEFELIHQDNEPVLPRLPFLKSLAILSKNKKFYGIAIPAFLAEPAWAVFSFWVPLYLATERGMDLKQIAMFAWLPFLAADIGSVASGYLTKLYQKWFGCSRVNSVVASSVTGAFMMVSLAFVAVTKDPYLAIALISIGGFGHQVISCMLSALVVDSFDKNQVATVNGLRGSSAWIASFLFTLLIGAVSDTIGFNPLFIAMGFFDLIGAVFLIALFAERRNKPQPTV

SEQ ID NO: 4471 - DNA, 1305 bp, Yersinia pestis KIM
  CDS (1)..(1305): transl_table=11
atgatgcgtaaaattaaagggttacgctggtacatgatcgcattggtcaccgtcggtaccatattaggttacttaacacgtaatgccattgctgttgccgcgccgacactgcaagaacagttacatatcaccacccagcaatattcttatattatcgctgcttattcagccgcttataccctaatgcaaccagtagccggttatgtattggacgttatgggtaccaaagtgggctatgccatgtttgccgttatgtgggccatattttgtatgagtaccgccttggccagcagttggggtggattagctatcgcccgtggtgcggtaggtatggcagaggcggctatgatccctgcaggcctgaaagccagtagtgaatggttcccggccaaagagcgttctattgcggtaggctactttaacgttggctcctccatcggcggtatgattgctccccctctcgtggtctgggctatcgtgatgcacagttggcagatggcgttcatcattaccggtgtactcagcctgatttgggccattgcctggttaatcctctacaaacacccgaaagatcaaaaaagactcagcgacgaagaacgtgagtacatccttagcggccaagaagcacagcactccactgctaatgccaaaaagatgtctgcgatgcagattatccgcaaccgtcaattctggggtattgccatcccgcgtttcttggcagaacccgcttgggggacgttcaacgcgtggattccgctcttcatgtttaaagcttatggctttaacttgaaagagatagccatgtttgcctggatgccaatgctgtttgctgatgtaggctgcattctgggtggctacctgccgccactgttccaaaaatactttaaggttaacctgattgtttcccgtaagttagtcgtcactatgggtggggtattgatgattgggcctgggaccatcggcctattcaccagcccttatgcggctatcgcgctgctctgtatcgggggctttgctcaccaagcactgtcaggagcactgattacattatcttctgacgtttttggccgtaacgaagtcgcaaccgccaacggcctgacggggatggcggcctggacggccagtactctgttcgccctcgtggtaggggcattagccgataccatgggcttcagcccactgtttgctgcactggcggtatttgatttactggccgtcgtggttatctggaccgtgttacaagatcgcacagcagatgaaccaacgaacgacccggttcaacggccgccggttggacaaaactga

SEQ ID NO: 4472 - protein, 434 aa, Yersinia pestis KIM
MMRKIKGLRWYMIALVTVGTILGYLTRNAIAVAAPTLQEQLHITTQQYSYIIAAYSAAYTLMQPVAGYVLDVMGTKVGYAMFAVMWAIFCMSTALASSWGGLAIARGAVGMAEAAMIPAGLKASSEWFPAKERSIAVGYFNVGSSIGGMIAPPLVVWAIVMHSWQMAFIITGVLSLIWAIAWLILYKHPKDQKRLSDEEREYILSGQEAQHSTANAKKMSAMQIIRNRQFWGIAIPRFLAEPAWGTFNAWIPLFMFKAYGFNLKEIAMFAWMPMLFADVGCILGGYLPPLFQKYFKVNLIVSRKLVVTMGGVLMIGPGTIGLFTSPYAAIALLCIGGFAHQALSGALITLSSDVFGRNEVATANGLTGMAAWTASTLFALVVGALADTMGFSPLFAALAVFDLLAVVVIWTVLQDRTADEPTNDPVQRPPVGQN

SEQ ID NO: 4473 - DNA, 1299 bp, Shigella flexneri 2a str. 301
  CDS (1)..(1299): transl_table=11
atgcgtaaaattaaagggttacgttggtatatgatcgcactggtgacgctcggcaccgtgcttggttacctgacgcgtaacactgtggcggcagctgcgccaactctgatggaagagttaaacatctccacccaacagtattcctatatcatcgcagcctattctgctgcttatacggtcatgcaaccggtagcaggttatgtactggatgtgctgggtacgaaaatcggttatgcaatgtttgctgtgctgtgggccgtgttctgtggtgcaaccgcgctggcaggtagctggggtggcctagctgttgctcgtggtgcggtcggtgccgcggaagcagcgatgatcccggcgggtctgaaagccagctccgaatggttcccggcgaaagagcgttccatcgcagtaggctactttaacgtaggttcttcgattggtgcgatgattgcgccgccgctggtggtatgggcaatcgtgatgcacagctggcagatggcatttatcatctccggtgcattgagctttatctgggcgatggcatggctgattttctataaacatccgcgcgaccagaagcatctgaccgatgaagaacgcgactatattattaatggtcaggaagcccagcaccaggtgagcacggcgaagaaaatgtccgttggtcagatcctgcgtaaccgtcagttctggggtatcgcactgccgcgtttccttgcagaaccggcctggggtacttttaacgcgtggatcccgctgttcatgtttaaagtttacggctttaacctgaaagagatcgcgatgttcgcctggatgccgatgctgtttgctgacctcggttgtatcctcggtggttacctgccgccgctgttccagcgttggtttggtgtgaacctgatcgtttcccgtaagatggtcgtaacgctgggtgctgtgctgatgattggcccgggtatgatcggtctgttcaccaacccgtatgtcgcaattatgctgctgtgtatcggtggttttgcccaccaggcactgtctggcgcgctgattacgctctcttctgacgtgttcggtcgtaacgaagtggcgacggcgaacggtttaaccgggatgtccgcatggctggcaagtacgctgtttgcgctggttgtcggtgcactggctgacaccatcggcttcagcccgctgttcgcagttctggcagtatttgacctgctgggtgcgctggttatctggaccgtattgcagaacaaaccggcgattgaggtggcgcaggaaacacataacgatcccgcaccgcaacattaa

SEQ ID NO: 4474 - protein, 432 aa, Shigella flexneri 2a str. 301
MRKIKGLRWYMIALVTLGTVLGYLTRNTVAAAAPTLMEELNISTQQYSYIIAAYSAAYTVMQPVAGYVLDVLGTKIGYAMFAVLWAVFCGATALAGSWGGLAVARGAVGAAEAAMIPAGLKASSEWFPAKERSIAVGYFNVGSSIGAMIAPPLVVWAIVMHSWQMAFIISGALSFIWAMAWLIFYKHPRDQKHLTDEERDYIINGQEAQHQVSTAKKMSVGQILRNRQFWGIALPRFLAEPAWGTFNAWIPLFMFKVYGFNLKEIAMFAWMPMLFADLGCILGGYLPPLFQRWFGVNLIVSRKMVVTLGAVLMIGPGMIGLFTNPYVAIMLLCIGGFAHQALSGALITLSSDVFGRNEVATANGLTGMSAWLASTLFALVVGALADTIGFSPLFAVLAVFDLLGALVIWTVLQNKPAIEVAQETHNDPAPQH

SEQ ID NO: 4475 - DNA, 1278 bp, Escherichia coli CFT073
  CDS (1)..(1278): transl_table=11
atgaataaaataaagaattatcgatggcatatgattgccctcgtatgctttatcactgtaatcaattatctggacagaacggcgttaggtattgcggctccaacgattatggagacaaccggaataaccaaagaacaatattcatggattgtcagtgcattccagttggcctatacattggggcaaccgataatgggcttctttattgataccgtgggtctgaagttaagttttgcgatatgtgccgcaatctggggcctggcgacaatggggcatgccttgacaggaacatggtcaggtctggcatttatgcgcgccctgatgggtttcagcgaagcatcggcaattcctgcgggtgtaaaaaccgcatcaacatggttcccggcaaaagagcgtggcgtggcgacaggtgttttcaatatgggcacctcactcggcgcgatgcttgctccaccgttgattgcctggtgcattatgtttcatagctggcaatttgcgtttattgtctcaggtagccttgctttactcgcggctttattttggttcttttgttataaagatccaaaagatgctaaacgcctttctgatgaagagcgccactatattgagtctgggcaagaacagcatcttaaaacagataagaaagaaaaaacgtcaatcaagcatatcctcagccaacgtaatttctgggggattggcatcgcgcgttttctcgctgacccggcatggggaaccattaacttctgggtaccgattttcttcgtcgaaacgctgcattttagcctgaaagaaattgccatgttcgtctggctacctttcctgctgggcgatctcggctgtttagccagtggttttgtcgcgaagttcttccacgatcgcggcgtgagtttaattaactcacgaagaattaccttcactattgcagccgtcattatgatgacgattggtctggtgagtattgtcgaaaatccctacatcgccgtattactgattagcattggcgcattctcgcatcaatgtctttctactgttgcagcaactctgggcggtgacctattcaaaaaagacgaagtagctaccgctgtgggtatggcaggagcctgtgcatggagcggtcagttgattttcaacctgtttatcggggcattcgttcacattattggcttcgcgccgttctttattgccctggctttctttgacattattggcgccattgcgctgtggatgcttatcaaagttaaagacgaagaaccacaagtacagttagcgacaagctaa

SEQ ID NO: 4476 - protein, 425 aa, Escherichia coli CFT073
MNKIKNYRWHMIALVCFITVINYLDRTALGIAAPTIMETTGITKEQYSWIVSAFQLAYTLGQPIMGFFIDTVGLKLSFAICAAIWGLATMGHALTGTWSGLAFMRALMGFSEASAIPAGVKTASTWFPAKERGVATGVFNMGTSLGAMLAPPLIAWCIMFHSWQFAFIVSGSLALLAALFWFFCYKDPKDAKRLSDEERHYIESGQEQHLKTDKKEKTSIKHILSQRNFWGIGIARFLADPAWGTINFWVPIFFVETLHFSLKEIAMFVWLPFLLGDLGCLASGFVAKFFHDRGVSLINSRRITFTIAAVIMMTIGLVSIVENPYIAVLLISIGAFSHQCLSTVAATLGGDLFKKDEVATAVGMAGACAWSGQLIFNLFIGAFVHIIGFAPFFIALAFFDIIGAIALWMLIKVKDEEPQVQLATS

SEQ ID NO: 4477 - DNA, 1311 bp, Pseudomonas syringae pv. tomato str. DC3000
  CDS (1)..(1311): transl_table=11
atgaagataaaaggaattcgatggtggatggtggggctggtcacggccggcctggtcgtcaactacctcgcacgcaacacgctgtccgttgcagcgccgacgctcatgagtgagctgagcatttccaccgagcagtacgcgcacatcgtggtcgcctggcagttgtgctacgcgatcatgcaaccggtggcgggctacatcatcgacgcaataggcaccaagatgggcttcgcgattttcgctgtggcctggtcgggtgcctgtgctgcggcagcgttcgcaactggctggcagagcctggcaatcttccgtggcctgctcgggctgaccgaagcggcgggcctgcctgcgggcgtcaaggcgacgaccgaatggtttccagccaaagagcgctcggtcgccatcggctggttcaacatcggctcgtcattcggcgcattgctcgcgccaccgttggtggtctgggcgattctgcacagcggctgggaactggcgtttctgattgtcggtggcctggggatcgtgtggagcgggctgtggctgctgctctacaagcacccgcgtgaccagaaacgtctgggcgatgccgagcgcgattacattctcagcggccaggaatcgcgcctcaaggatgcacctgcccaaaaaggcagctggaaacgcctgttcaagaaccgcaatttctacgccatcgcctcggcgcgcattctgtccgagcccgcctggcagaccttcaacgcgtggatcccgctgtacctgatgaccgaacggcacatgaacatcaaggaagtcgcgatgttcgcctggctgccgttcctggcggccgatatcggctgcgtgctgggcggctatctcagcccgctgtttcacaagtactgcaaggtctcgctgttcacctctcgcaagatggtcatgctgttcggctgttcatgcatgatcggcccggcctgcatcgggctggtcgaaagcccttacaccgccattgcgctgctgtgcattggtggctttgcgcaccagactctgtcgggtgcgctgtactcgatcacctccgactcgttcggcaaaaacgaagtggccacggccacgggcatgggcggaatgttcgggttcatgggggcggctgcgttcacgatggtgtttggcgtgctggtcaccaagatcggctacagcccgctgttcgtggtactggcgatcttcgacgtggtggccgcgattgtggtctggaccgtggcccgcgaggtgccgcaaaacgaagagcccgttgcacttggcgtcggtgagccgggccctcgtacagttccggtaacctga

SEQ ID NO: 4478 - protein, 436 aa, Pseudomonas syringae pv. tomato str. DC3000
MKIKGIRWWMVGLVTAGLVVNYLARNTLSVAAPTLMSELSISTEQYAHIVVAWQLCYAIMQPVAGYIIDAIGTKMGFAIFAVAWSGACAAAAFATGWQSLAIFRGLLGLTEAAGLPAGVKATTEWFPAKERSVAIGWFNIGSSFGALLAPPLVVWAILHSGWELAFLIVGGLGIVWSGLWLLLYKHPRDQKRLGDAERDYILSGQESRLKDAPAQKGSWKRLFKNRNFYAIASARILSEPAWQTFNAWIPLYLMTERHMNIKEVAMFAWLPFLAADIGCVLGGYLSPLFHKYCKVSLFTSRKMVMLFGCSCMIGPACIGLVESPYTAIALLCIGGFAHQTLSGALYSITSDSFGKNEVATATGMGGMFGFMGAAAFTMVFGVLVTKIGYSPLFVVLAIFDVVAAIVVWTVAREVPQNEEPVALGVGEPGPRTVPVT

SEQ ID NO: 4479 - DNA, 1302 bp, Erwinia carotovora subsp. atroseptica SCRI1043
  CDS (1)..(1302): transl_table=11
atgcgtaaaatcaaaggattacgctggtatatgatcggcctggtgacaattggcaccgtgctgggatatctgacgcgtaatgcaatttctgtcgccgcaccgacgctacaagatcaattgcacatcaccacacagcaatattcttacatcgttgctgcctactcagcttgttataccattatgcagcccatcgctggctatgtactggatttgcttggtacaaaaatcggctatgccctgtttgccattgtgtgggctatctgttgcatgggcaccgcattggcaaacagttggggtggtctggctatcgcccgcggtgcagtaggtatggcggaagcggcaatgattcctgcgggcctgaaagccagcagtgagtggttcccggcaaaagagcgttcagtcgccgtcggctacttcaacgtggggtcatccatcggcgcgatgatcgctccgccgctggtggtgtgggccattgtggcacacagctgggaaatggcctttatcattaccggtgcattaagcatggtctgggccatctgctggctcattttctataaacacccgaaagatcagaaaaaactcagcgacgaagagcgcgactacattcttagcgggcaagaagcacagcaccaaaccaataacgcaaagaaaatgtctgcctggcagattctgcataaccgccaattctggggtatcgcgctgccgcgtttcctggctgagccagcgtggggaaccttcaacgcgtggatcccgctgttcatgtttaaagcctacggctttaacctgaaagaaatcgccatgttcgcttggatgccaatgctgttcgccgatatcggctgcatcctgggtggttacctgccaatgctgttccagaagcatttcaaagtgaacctgatcgtttctcgcaaactggttgtcactatgggtgcggtactgatgattgctccggggatgatcgggctgttctccagtccttatgtcgccattgcactgctgtgtgtgggtggtttcgcgcaccagtcgctgtccggcgcactgattaccctgtcatccgatgtgtttggccgtaatgaagtcgccacggcgaacggcttaacaggtatggctgcctggatggcaagtactatgtttgcactggttgtaggcgcactggctgataccatgggcttcagcccgctgtttgctgcactggcggtctttgatctattaggcgcggtcgtgatctggacagtgttgaaaaaccaacccgcctcagaagtcgctgcagcggctgaaacattgaaagaagccaacgagcactga

SEQ ID NO: 4480 - protein, 433 aa, Erwinia carotovora subsp. atroseptica SCRI1043
MRKIKGLRWYMIGLVTIGTVLGYLTRNAISVAAPTLQDQLHITTQQYSYIVAAYSACYTIMQPIAGYVLDLLGTKIGYALFAIVWAICCMGTALANSWGGLAIARGAVGMAEAAMIPAGLKASSEWFPAKERSVAVGYFNVGSSIGAMIAPPLVVWAIVAHSWEMAFIITGALSMVWAICWLIFYKHPKDQKKLSDEERDYILSGQEAQHQTNNAKKMSAWQILHNRQFWGIALPRFLAEPAWGTFNAWIPLFMFKAYGFNLKEIAMFAWMPMLFADIGCILGGYLPMLFQKHFKVNLIVSRKLVVTMGAVLMIAPGMIGLFSSPYVAIALLCVGGFAHQSLSGALITLSSDVFGRNEVATANGLTGMAAWMASTMFALVVGALADTMGFSPLFAALAVFDLLGAVVIWTVLKNQPASEVAAAAETLKEANEH

SEQ ID NO: 4481 - DNA, 1308 bp, Yersinia pseudotuberculosis IP 32953
  CDS (1)..(1308): transl_table=11
atgagtattgatattaatcaatcagctaaagttgtaggacggcggaaaataaagtcattacgttggtggatgctggccttatttttacttggggtcaccgttaactatataacccgtaattctctagggattttagcccctgagttaaaaaccagtctgaatatgactaccgagcaatactcatggattgtagcctctttccaactggcttataccgtgttccaaccactttgtggctggttgatcgatgtcatcggtttaaaaatggggttcctggtttgcgccagtgtctgggcggtggtgtgcatgatgcatgccggagcgggtacctggttccaactggcagtattacgcttctttatgggcagtgccgaagccgcagccacccccgcaaacgccaaagccatttcggattggttcccgaaaaaagaacggcccattgccgctggatgggctggggtggggttctctatcggtgcgatgttggcccccccgattatcgtactggcgcatgtggcactcggttggcaaggggcattcttgttctccggcgcattagccatgatttgggttctgctgtggtggcgtttttaccattcaccggatactcatccaaatctgagtcaagaagagtttgaactgattcaccaagataatgaacccgtattaccacgactgccattccttaaatccttagccattctaagtaaaaataagaaattttacggtattgctattcccgcgtttctggcggaaccggcctgggctgtatttagtttctgggtaccgctgtatttagccaccgaacgcggcatggacctgaaacagatcgccatgttcgcctggctgccattcctggcagcagatattggcagtgtcgccagtggctatttaaccaaactctatcagaaatggtttggttgcagccgggtcaactcggtggttgccagttcggtaaccggtgcttttatgatggtgtcattggcctttgttgccgtcaccaaagacccttatctggcaatcgctttaatctccattggcggctttgggcaccaagtgatctcctgcatgctcagtgcattagtggttgactcttttgataaaaatcaggttgctaccgtcaatggcctacgtggttcttccgcctggatcgccagcttcctgtttacattattaatcggggccgtttcagacactatcggctttaacccgctgtttatcgctatggggttcttcgatctgattggggccgtattcctgattgctctgttcgctgagcgccgtaataaaccccaaccgacggtctga

SEQ ID NO: 4482 - protein, 435 aa, Yersinia pseudotuberculosis IP 32953
MSIDINQSAKVVGRRKIKSLRWWMLALFLLGVTVNYITRNSLGILAPELKTSLNMTTEQYSWIVASFQLAYTVFQPLCGWLIDVIGLKMGFLVCASVWAVVCMMHAGAGTWFQLAVLRFFMGSAEAAATPANAKAISDWFPKKERPIAAGWAGVGFSIGAMLAPPIIVLAHVALGWQGAFLFSGALAMIWVLLWWRFYHSPDTHPNLSQEEFELIHQDNEPVLPRLPFLKSLAILSKNKKFYGIAIPAFLAEPAWAVFSFWVPLYLATERGMDLKQIAMFAWLPFLAADIGSVASGYLTKLYQKWFGCSRVNSVVASSVTGAFMMVSLAFVAVTKDPYLAIALISIGGFGHQVISCMLSALVVDSFDKNQVATVNGLRGSSAWIASFLFTLLIGAVSDTIGFNPLFIAMGFFDLIGAVFLIALFAERRNKPQPTV

SEQ ID NO: 4483 - DNA, 1311 bp, Pseudomonas syringae pv. syringae B728a
  CDS (1)..(1311): transl_table=11
atgaagataaaaggcattcgttggtggatggtggggctggtcacggccggcctggtggtcaactacctggcacgcaacacactgtccgtcgcagctccgacgctcatgagcgagctgagcatttccaccgagcagtacgcgcacatcgtggtcgcctggcaactgtgctacgccatcatgcaacctgtggcgggctacatcattgatgcgatcggcaccaagatgggctttgcgattttcgccatcgcctggtctgccgcctgcgctgctgccgccttcgcaaccggctggcagagtctggcgatcttccgcggcatgctcggcctgaccgaagccgcagggctgccggccggcgtcaaggcgaccactgaatggtttccggccaaggagcgctcggtcgccatcggctggttcaacatcggttcgtcgttcggcgcattgcttgcgccgccgctggtggtctgggccattctgcagagtggctgggagctggcgtttctgattgtcggcggcctgggcattgtgtggagcggcctgtggctgctgctgtacaagcacccgcgcgatcagaagcgtcttggcgatgccgaacgtgactacatcctcagcggccaggaagcgcgtctgaaggacgcacctgcccagaaaggcagctggaagcgactgttcaaaaaccgtaatttctacgcgattgcctcggcgcgaatcctctccgagcctgcctggcagaccttcaatgcgtggattccgctgtacctgatgaccgagcgtcacatgaacatcaaggaagtcgcgatgttcgcctggctgccgtttctggcggctgacatcggctgcgtactgggcggctacctgagcccgttgttccacaagtactgcaaggtgtcgctgttcacctcgcgcaagatggtcatgctgttcggctgctcctgcatgatcgggccagcgtgcatcgggctggtcgaaagtccctacaccgctattgccttgttgtgcatcggtggttttgctcaccagaccctgtcgggcgcgctgtattcgatcacctcggattcattcggcaaaaacgaggtggctacggcgaccgggatgggcggaatgttcggctttttcggggcggcggcattcaccatggtgttcggcgtgctggtcaccaaaattggctacagcccgctgttcgtggtgctggcgattttcgacatcgtcgctgcgattgtggtgtggaacgttgcccgtgaagtcccgcagtatgacgacacagtgccgttgactgcggacgagcagggtccgcgtactgtgcctgcaacctga

SEQ ID NO: 4484 - protein, 436 aa, Pseudomonas syringae pv. syringae B728a
MKIKGIRWWMVGLVTAGLVVNYLARNTLSVAAPTLMSELSISTEQYAHIVVAWQLCYAIMQPVAGYIIDAIGTKMGFAIFAIAWSAACAAAAFATGWQSLAIFRGMLGLTEAAGLPAGVKATTEWFPAKERSVAIGWFNIGSSFGALLAPPLVVWAILQSGWELAFLIVGGLGIVWSGLWLLLYKHPRDQKRLGDAERDYILSGQEARLKDAPAQKGSWKRLFKNRNFYAIASARILSEPAWQTFNAWIPLYLMTERHMNIKEVAMFAWLPFLAADIGCVLGGYLSPLFHKYCKVSLFTSRKMVMLFGCSCMIGPACIGLVESPYTAIALLCIGGFAHQTLSGALYSITSDSFGKNEVATATGMGGMFGFFGAAAFTMVFGVLVTKIGYSPLFVVLAIFDIVAAIVVWNVAREVPQYDDTVPLTADEQGPRTVPAT

SEQ ID NO: 4485 - DNA, 1311 bp, Pseudomonas syringae pv. phaseolicola 1448A
  CDS (1)..(1311): transl_table=11
atgaaaataaaaggcattcggtggtggatggtggggctggtagcagctggcctggtcgtcaactaccttgcacgcaacacgctgtccgtcgcagcgccgacgctcatgagcgaactgagcatttccaccgagcagtacgcgcacatcgtcgtcgcctggcagctgtgctacgccatcatgcagccggtggcgggctacattatcgacgccatcggcaccaaaatgggttttgcgatttttgccattgcctggtcggctgcctgcgctgccgcagcgttcgcaaccggctggcagagcctggccatcttccgtggcatgctcgggctgaccgaagcagcgggcctgccggcaggcgtcaaggccacgaccgaatggtttccggccaaggagcgttcggttgccatcggctggttcaacattggctcgtcgttcggcgcattgcttgcgcccccgctggtggtctgggccatcctgcaaagtggctgggagctggcgtttctgattgtcggtggtctgggtattgtgtggagcgggctatggctgctgttgtacaagcacccgcgtgaccagaagcgtctgggcgatgccgagcgtgactatattctcagcggccaggaatcgcgcctcaaggatgcacctgcccagaaaggcagttggaaacgcctgttcaagaaccgcaatttctacgctatcgcttcggcgcgcatcctgtccgagcctgcttggcaaaccttcaacgcgtggatcccgctgtacctgatgaccgaacgccacatgaacatcaaggaagtcgcgatgttcgcctggctgccgtttctggcggctgacattggctgtgtactgggcggctatctgagcccgctgtttcacaaatactgcaaggtgtcgctgttcacatctcgcaagatggtcatgctgttcggctgttcatgcatgatcggcccggcctgtatcgggctggtcgaaagcccttacaccgctatcgcattgctgtgcatcggtggtttcgcgcaccagaccctgtctggcgcactgtactcgatcacctccgattcgttcggcaaaaacgaggtggccacagcgaccgggatgggcggaatgttcggctttttcggggcggcggcgttcaccatggtgttcggcgtgctggtcaccaaaatcggctacagcccgctgttcgtggtgctggcgattttcgatatcgtcgccgccattgtggtgtggaccgtcgcccgcgaagtgccgcagaacgacgaggccgtggcgctgagcgttgatgaatcaggttctcgaactgttcccgcaacgtga

SEQ ID NO: 4486 - protein, 436 aa, Pseudomonas syringae pv. phaseolicola 1448A
MKIKGIRWWMVGLVAAGLVVNYLARNTLSVAAPTLMSELSISTEQYAHIVVAWQLCYAIMQPVAGYIIDAIGTKMGFAIFAIAWSAACAAAAFATGWQSLAIFRGMLGLTEAAGLPAGVKATTEWFPAKERSVAIGWFNIGSSFGALLAPPLVVWAILQSGWELAFLIVGGLGIVWSGLWLLLYKHPRDQKRLGDAERDYILSGQESRLKDAPAQKGSWKRLFKNRNFYAIASARILSEPAWQTFNAWIPLYLMTERHMNIKEVAMFAWLPFLAADIGCVLGGYLSPLFHKYCKVSLFTSRKMVMLFGCSCMIGPACIGLVESPYTAIALLCIGGFAHQTLSGALYSITSDSFGKNEVATATGMGGMFGFFGAAAFTMVFGVLVTKIGYSPLFVVLAIFDIVAAIVVWTVAREVPQNDEAVALSVDESGSRTVPAT

SEQ ID NO: 4487 - DNA, 1272 bp, Burkholderia sp. 383
  CDS (1)..(1272): transl_table=11
gtgaagacagtcaaggcgttgcgctggtggatcatcgtgctcgtatgtctgggcacgatcctcaactacctcgcacggaattccctcgcggtgctcgcccccgagctcaagcaggtcttttcgatctcgacgcagcaatactcgtacatcgtcggcgcattccagatcggttacacgatcatgcagccggtgtgcggcttcgtcgtcgacctgatcgggctgcggctcgggttcgcgctgttcgcgatgctctggtcggtggtcggcgtcgcgcacgggttcgcgtcgggctggctgtcgctcggcatcctgcgcggctttctcggcctgttcgaagccgccgcgattccgtccgggatgaaggctgtcgccgaatggtttcccgatcgcgagaaatccgtcgcggtcggctacttcaacgcgggcacgtcgctcggcgccgcgatcgcgccgccgctcgtcgtgttcctgtcgatgcggttcggctggcaggccgcgttcatggcgaccggcgcgctcggcttcgtgtgggccgcgctctggtacacgcaataccggtcgcccgccgaccacccgcgcatcacgccgcaggagcgcgcgctgatccgcgacggccaggccacgatgccgcccgtgtcgaagcgccgcattcgcgacgtcgtcaccgcgcggcgcttctgggccatcgcgctgccgcgcttcttcgccgagcccgcgtggcagaccttcagcttctggattccgctgtatctcgcgaccgagcgccacatggaactcaagcagatcgcgatcttcgcgtggatgccgtttctcgcggccgacctcggcggcatcgcgggcggctacctgtcgccgtatctcgcgaagcggttcaagctgccgctcgtgtggtcgcgcgttgccggcgtcgcgctcggcgcggtgctgatgctcgggcccgcgatgatcgggctcgtggcgtcgccgtacacggccatcgcgctgttctgcgtcggcggcttcgcgcaccagatgatctccgcactcgtcaacacgctgtcggccgacgtgttcgattccgaggaagtcggcaccgcgagcggcttcgccgggatggccgcgtggatcggcgggctcgggttctcgctgctggtcggcgcgctcgccgacaaggtcggctatgcgccgctgttcgcatgcctcggcctgttcgacctcatcggcgtcacgctgctcgcggtgctgatccgcgggcagtcgaagcaggaacgcctgctcgcacggcacgcctga

SEQ ID NO: 4488 - protein, 423 aa, Burkholderia sp. 383
MKTVKALRWWIIVLVCLGTILNYLARNSLAVLAPELKQVFSISTQQYSYIVGAFQIGYTIMQPVCGFVVDLIGLRLGFALFAMLWSVVGVAHGFASGWLSLGILRGFLGLFEAAAIPSGMKAVAEWFPDREKSVAVGYFNAGTSLGAAIAPPLVVFLSMRFGWQAAFMATGALGFVWAALWYTQYRSPADHPRITPQERALIRDGQATMPPVSKRRIRDVVTARRFWAIALPRFFAEPAWQTFSFWIPLYLATERHMELKQIAIFAWMPFLAADLGGIAGGYLSPYLAKRFKLPLVWSRVAGVALGAVLMLGPAMIGLVASPYTAIALFCVGGFAHQMISALVNTLSADVFDSEEVGTASGFAGMAAWIGGLGFSLLVGALADKVGYAPLFACLGLFDLIGVTLLAVLIRGQSKQERLLARHA

SEQ ID NO: 4489 - DNA, 1302 bp, Burkholderia xenovorans LB400
  CDS (1)..(1302): transl_table=11
atgaaaatcaagggcatccgctggtggatggtcagcctggtcgcggccgggctcatcatcaattacctcgcgcgcaatacgttgtcagtggcggcgccgacgttgatgaaggacctccacatcaccacggaacagtattcgcacgtggtcgtggcctggcagctctgctatgcattcatgcagccggtcgccggctatgtgctcgacaccgtcggcaccaagctcggctttgcggcgttcgcgctggcatggtcgctggcgtgcgccgcggcggcgtggtcgaccggctggcgcagcctcgcgttcttccgcggtgtgctcggtattgccgaggcggccggcattccggccggcgtcaaggcgacgagcgagtggttcccggccaaagagcgttcggtggcgatcggctggttcaacatcggttcgtcgatcggcgcgctgctggcgccgccgctggtggtctgggcgctgttgcacggcgagtggcagttggccttcgtgatcgtcggcgtggcggggattatctggagcgtgctgtggatggcgctctacaaacatccgcgcaagcagaagctgttgggcgaagccgagcgcgactacattctcagcggccaggaagcaaggcacagcgacgccggcgccgcgaagcgcagctggttcgccatgctcggcagccgcgacttctgggcgatcggcattccgcgcattctttccgaaccggcctggcagaccttcaacgcgtggattccgctgtacatgatgaccgagcgtcacatgaatctgaaggaagtcgcgttgtacgcgtggatgccgtttctggccgccgacattggctgcgtgctgggcggctatctgagtccgctgtttcacaagtacgccaaagtgtcgctcttcacgtcgcgcaagatggtgttcgtggtcggcgcgctgtgcatgatcgggccggcctgcgtcggtctggtggcgagcccgtatgcggcggtggcgctgctgtgcgtcggcggctttgcgcatcagaccttgtcgggcgcgctgtatgcgatcacgtccgatatgttcggcaagaatgaagtcgctaccgcgaccggcatgggcggcatggcgggctatctcggcgcggcggcgttcaccgcgctgttcggcgtgctggtcacgcagatcggctatagcccgttgttcgtcgtgctggcggtgttcgacattatcgcggcggcggtggtgtgcctgctggcgaaaaacgccgacaggacgcccgagccgcgctggctcaccgacgcgccgcgaatgccctacggcgggtag

SEQ ID NO: 4490 - protein, 433 aa, Burkholderia xenovorans LB400
MKIKGIRWWMVSLVAAGLIINYLARNTLSVAAPTLMKDLHITTEQYSHVVVAWQLCYAFMQPVAGYVLDTVGTKLGFAAFALAWSLACAAAAWSTGWRSLAFFRGVLGIAEAAGIPAGVKATSEWFPAKERSVAIGWFNIGSSIGALLAPPLVVWALLHGEWQLAFVIVGVAGIIWSVLWMALYKHPRKQKLLGEAERDYILSGQEARHSDAGAAKRSWFAMLGSRDFWAIGIPRILSEPAWQTFNAWIPLYMMTERHMNLKEVALYAWMPFLAADIGCVLGGYLSPLFHKYAKVSLFTSRKMVFVVGALCMIGPACVGLVASPYAAVALLCVGGFAHQTLSGALYAITSDMFGKNEVATATGMGGMAGYLGAAAFTALFGVLVTQIGYSPLFVVLAVFDIIAAAVVCLLAKNADRTPEPRWLTDAPRMPYGG

SEQ ID NO: 4491 - DNA, 1266 bp, Solibacter usitatus Ellin6076
  CDS (1)..(1266): transl_table=11
atgatcttcgacatgccgaagatcagaggacttcgttggtggatgatcgggctgatcatgctcggctcggtgatcaactacctgacgcgcagcacgctcgccgtcgccgcaccgaccgtcttaaaagatctccacatcaccacgcagcaatactcgtggatcgtcggcgccttccagggcgcgatcatgacccagccaatctgcggttatgtgctcgacgtgcttggcctcaaggttggcttcgcgatcttcgccattgcctggtcactggtcaacatgtcgcatggcctggccaacagctggcaggcgctcgccgcgttacgcggcctcctgggatttagcgagggctcggccaatcccgcgggtatgaaagcgacctcggagtggttccccgcccgcgagcgcggcctcgccggcggcgtttacaacatcggcgcttcggtgggttccatgctcgcgccgccgctggttgcctgggccatcctgagctacaactggcgagtgtccttcgtgatcaccgggagcctgggactgatttgggtagccctgtggctgctgttctacgagtcgcccgcgaaacactccgcgctctcgaaggaggagcgggagtacatcgcgtcggggcaggagaaacacttgcaaggcgatggcacacgcccgtcgctcgtgaagattctcaagcagcgcaacttctggggaatcgcagtgccccgatttctcgccgaccccacgtggggcacgctcagcttctggctgccgctctatctgagcagcgtccgccatatggatttgaagcacatcgcgatgttcgcgtggatcccgtttctggccgccgatttcggttgcgtgttcggcggcctgatcgccatgacgctgcagaagcgcgccgggctgagcgtgattaacgcgcgccgctgcgccttcacggtgggcgcggtcctgatggtcggcgtgggctttgttggcttcgtgcagagcccgtatgccgcgatcgcgctgttgagtctcggcggcttcgcgcaccagacgctctccgtcaccgtgatcacgatggcctccgacctcttcaagaaaaacgaggtcgcgaccgccgccgggatggccgggacgttcggcaacgctggactgctcatcttctcgctgctgatcggcggcctggtcgcaaccgttggctatacgccgttcttcgtctgcctgggcgtgctcgatctgttcggcgccgtggtgctttggaccgtggtccgcgagcgcaacttctcgatatga

SEQ ID NO: 4492 - protein, 421 aa, Solibacter usitatus Ellin6076
MIFDMPKIRGLRWWMIGLIMLGSVINYLTRSTLAVAAPTVLKDLHITTQQYSWIVGAFQGAIMTQPICGYVLDVLGLKVGFAIFAIAWSLVNMSHGLANSWQALAALRGLLGFSEGSANPAGMKATSEWFPARERGLAGGVYNIGASVGSMLAPPLVAWAILSYNWRVSFVITGSLGLIWVALWLLFYESPAKHSALSKEEREYIASGQEKHLQGDGTRPSLVKILKQRNFWGIAVPRFLADPTWGTLSFWLPLYLSSVRHMDLKHIAMFAWIPFLAADFGCVFGGLIAMTLQKRAGLSVINARRCAFTVGAVLMVGVGFVGFVQSPYAAIALLSLGGFAHQTLSVTVITMASDLFKKNEVATAAGMAGTFGNAGLLIFSLLIGGLVATVGYTPFFVCLGVLDLFGAVVLWTVVRERNFSI

SEQ ID NO: 4493 - DNA, 1320 bp, Ralstonia solanacearum
  CDS (1)..(1320): transl_table=11
atgaacacgatcaaagggctgcgctggtggatgatcgggctggtgctgaccggcctgatcatgaattacctggcgcgcaacgcactggcggccgctgcacccgaagtcaacaaggtgctcaacatcacgacgcagcagtacggctacatcgtcgcggcgttccaggcggcgtacatggtgatgcagccggtggcgggctacgtgctggacatgctcgggaccaagctgggctttgcgctgtttgccggggcgtggtcggtggtctgcatcctgcacagcacggcgggcaactgggtgtcgctggcggtgttccgcgccctgctgggcgtgacggaggccgccggcttcccgtccgccctgcgcgcgacctcggaatggttcccggccaagaagcgctcgatcgccaccgggtggttcaacatcggctcgtcggtgggtgcgctggtggcaccccccctggtggtctggtgcatcctgcatggcgactggcggttggccttttccgcgatcggcgcgctcggggtggtgtggagcgtgctgtggttcacgctctatcgcgtgccggcccaacatccgcgcctgtcggcggacaagcacgactacatccgcgccgggcaggaggcgccggacgatcgtgcgggcaccgcgaagccgtcgtggaaagcgatcatcaccagccgccgcttctggggcatcgccatcccgcgcttcctgtcggagccggcgtggcagaccttcaacttctggatcccgctctacatggcgacgcagcggcacatgaacctcaaggagatcgccatgttcgcgtggctgccgttcctggcggcggacgtcggctgcgtgctgggcggctacctggcgccgtggtaccagaagcggttttccacgtcgctgatcacctcgcgcaagatggtgatggtgacgggcgcggtctgcatgatcggtccggcctgcatcggcctggcgacaagcccttacaccgcgatcgcgctgttctgcgtcggcggctttgcgcaccagaccctgtcgggcgcgctgtacacgctgaccgcggatgtgttcggcaagcacgaggtcggcacagcggtggggctggcgggcatgtcgggcttcctgggcggcacgctgttctcgctggccgtcggcgcactggcatcgaccatcggctacaacccgctgttcgcggcgctggcgctgttcgatatcgttgccgcgatcgtcatgtggaatgtcctgcgcgagccgcgcggtccgatcgcgatgccgacaggggcaggcgccgcagacctgggcgccgccccgcgtgcggccggcggctga

SEQ ID NO: 4494 - protein, 439 aa, Ralstonia solanacearum
MNTIKGLRWWMIGLVLTGLIMNYLARNALAAAAPEVNKVLNITTQQYGYIVAAFQAAYMVMQPVAGYVLDMLGTKLGFALFAGAWSVVCILHSTAGNWVSLAVFRALLGVTEAAGFPSALRATSEWFPAKKRSIATGWFNIGSSVGALVAPPLVVWCILHGDWRLAFSAIGALGVVWSVLWFTLYRVPAQHPRLSADKHDYIRAGQEAPDDRAGTAKPSWKAIITSRRFWGIAIPRFLSEPAWQTFNFWIPLYMATQRHMNLKEIAMFAWLPFLAADVGCVLGGYLAPWYQKRFSTSLITSRKMVMVTGAVCMIGPACIGLATSPYTAIALFCVGGFAHQTLSGALYTLTADVFGKHEVGTAVGLAGMSGFLGGTLFSLAVGALASTIGYNPLFAALALFDIVAAIVMWNVLREPRGPIAMPTGAGAADLGAAPRAAGG

SEQ ID NO: 4495 - DNA, 20 bp, Artificial sequence
  primer
atggcaacgttcggggcgtg

SEQ ID NO: 4496 - DNA, 20 bp, Artificial sequence
  primer
ttaatgttgcggtgcgggat

SEQ ID NO: 4497 - protein, 407 aa, Artificial sequence
  consensus sequence
  Variant (3)..(4): Xaa in position 3 to 4 is any amino acid
  Variant (7)..(10): Xaa in position 7 to 10 is any amino acid
  Variant (13)..(14): Xaa in position 13 to 14 is any amino acid
  Variant (16)..(19): Xaa in position 16 to 19 is any amino acid
  Variant (22)..(22): Xaa in position 22 is any amino acid
  Variant (24)..(29): Xaa in position 24 to 29 is any amino acid
  Variant (32)..(36): Xaa in position 32 to 36 is any amino acid
  Variant (38)..(40): Xaa in position 38 to 40 is any amino acid
  Variant (42)..(42): Xaa in position 42 is any amino acid
  Variant (45)..(46): Xaa in position 45 to 46 is any amino acid
  Variant (48)..(49): Xaa in position 48 to 49 is any amino acid
  Variant (51)..(54): Xaa in position 51 to 54 is any amino acid
  Variant (56)..(58): Xaa in position 56 to 58 is any amino acid
  Variant (61)..(62): Xaa in position 61 to 62 is any amino acid
  Variant (64)..(66): Xaa in position 64 to 66 is any amino acid
  Variant (68)..(69): Xaa in position 68 to 69 is any amino acid
  Variant (71)..(71): Xaa in position 71 is any amino acid
  Variant (73)..(73): Xaa in position 73 is any amino acid
  Variant (75)..(75): Xaa in position 75 is any amino acid
  Variant (77)..(77): Xaa in position 77 is any amino acid
  Variant (80)..(81): Xaa in position 80 to 81 is any amino acid
  Variant (83)..(91): Xaa in position 83 to 91 is any amino acid
  Variant (93)..(94): Xaa in position 93 to 94 is any amino acid
  Variant (96)..(97): Xaa in position 96 to 97 is any amino acid
  Variant (100)..(101): Xaa in position 100 to 101 is any amino acid
  Variant (103)..(105): Xaa in position 103 to 105 is any amino acid
  Variant (107)..(108): Xaa in position 107 to 108 is any amino acid
  Variant (111)..(113): Xaa in position 111 to 113 is any amino acid
  Variant (115)..(117): Xaa in position 115 to 117 is any amino acid
  Variant (120)..(122): Xaa in position 120 to 122 is any amino acid
  Variant (126)..(126): Xaa in position 126 is any amino acid
  Variant (130)..(131): Xaa in position 130 to 131 is any amino acid
  Variant (133)..(133): Xaa in position 133 is any amino acid
  Variant (135)..(135): Xaa in position 135 is any amino acid
  Variant (138)..(138): Xaa in position 138 is any amino acid
  Variant (140)..(140): Xaa in position 140 is any amino acid
  Variant (142)..(142): Xaa in position 142 is any amino acid
  Variant (145)..(146): Xaa in position 145 to 146 is any amino acid
  Variant (153)..(159): Xaa in position 153 to 159 is any amino acid
  Variant (160)..(164): Xaa in position 160 to 164 is any or no amino acid
  Variant (166)..(167): Xaa in position 166 to 167 is any amino acid
  Variant (170)..(172): Xaa in position 170 to 172 is any amino acid
  Variant (174)..(174): Xaa in position 174 is any amino acid
  Variant (176)..(178): Xaa in position 176 to 178 is any amino acid
  Variant (180)..(182): Xaa in position 180 to 182 is any amino acid
  Variant (184)..(186): Xaa in position 184 to 186 is any amino acid
  Variant (188)..(189): Xaa in position 188 to 189 is any amino acid
  Variant (191)..(195): Xaa in position 191 to 195 is any amino acid
  Variant (197)..(199): Xaa in position 197 to 199 is any amino acid
  Variant (201)..(203): Xaa in position 201 to 203 is any amino acid
  Variant (205)..(206): Xaa in position 205 to 206 is any amino acid
  Variant (210)..(218): Xaa in position 210 to 218 is any amino acid
  Variant (219)..(220): Xaa in position 219 to 220 is any or no amino acid
  Variant (222)..(228): Xaa in position 222 to 228 is any amino acid
  Variant (230)..(230): Xaa in position 230 is any amino acid
  Variant (232)..(233): Xaa in position 232 to 233 is any amino acid
  Variant (236)..(237): Xaa in position 236 to 237 is any amino acid
  Variant (239)..(239): Xaa in position 239 is any amino acid
  Variant (241)..(242): Xaa in position 241 to 242 is any amino acid
  Variant (246)..(246): Xaa in position 246 is any amino acid
  Variant (248)..(250): Xaa in position 248 to 250 is any amino acid
  Variant (252)..(252): Xaa in position 252 is any amino acid
  Variant (255)..(263): Xaa in position 255 to 263 is any amino acid
  Variant (266)..(267): Xaa in position 266 to 267 is any amino acid
  Variant (269)..(269): Xaa in position 269 is any amino acid
  Variant (273)..(273): Xaa in position 273 is any amino acid
  Variant (275)..(275): Xaa in position 275 is any amino acid
  Variant (277)..(277): Xaa in position 277 is any amino acid
  Variant (280)..(280): Xaa in position 280 is any amino acid
  Variant (282)..(284): Xaa in position 282 to 284 is any amino acid
  Variant (287)..(287): Xaa in position 287 is any amino acid
  Variant (289)..(301): Xaa in position 289 to 301 is any amino acid
  Variant (302)..(302): Xaa in position 302 is any or no amino acid
  Variant (305)..(310): Xaa in position 305 to 310 is any amino acid
  Variant (312)..(314): Xaa in position 312 to 314 is any amino acid
  Variant (316)..(326): Xaa in position 316 to 326 is any amino acid
  Variant (329)..(329): Xaa in position 329 is any amino acid
  Variant (334)..(336): Xaa in position 334 to 336 is any amino acid
  Variant (343)..(344): Xaa in position 343 to 344 is any amino acid
  Variant (346)..(353): Xaa in position 346 to 353 is any amino acid
  Variant (355)..(355): Xaa in position 355 is any amino acid
  Variant (357)..(359): Xaa in position 357 to 359 is any amino acid
  Variant (362)..(362): Xaa in position 362 is any amino acid
  Variant (364)..(365): Xaa in position 364 to 365 is any amino acid
  Variant (367)..(368): Xaa in position 367 to 368 is any amino acid
  Variant (370)..(378): Xaa in position 370 to 378 is any amino acid
  Variant (380)..(383): Xaa in position 380 to 383 is any amino acid
  Variant (385)..(385): Xaa in position 385 is any amino acid
  Variant (387)..(390): Xaa in position 387 to 390 is any amino acid
  Variant (392)..(393): Xaa in position 392 to 393 is any amino acid
  Variant (395)..(395): Xaa in position 395 is any amino acid
  Variant (397)..(398): Xaa in position 397 to 398 is any amino acid
  Variant (400)..(401): Xaa in position 400 to 401 is any amino acid
  Variant (404)..(406): Xaa in position 404 to 406 is any amino acid
IKXXRWXXXXLVXXGXXXXYLXRXXXXXXAPXXXXXLXXXTXQYXXIXXAXXXXYXXXQPXXGXXXDXXGXKXGXAXFAXXWXXXXXXXXXAXXWXXLAXXRXXXGXXEAXXXPXXXKAXXXWFPXKERXXAXGXFNXGXSXGAXXAPPLVVXXXXXXXXXXXXWXXAFXXXGXLXXXWXXXWXXXYXXPXXXXXLXXXEXXXIXXGQEXXXXXXXXXXXSXXXXXXXRXFXXIAXXRXLXXPAWXTXXXWXPLXXXXXXXXXLKXXAXFAWXPXLXADXGXXXGGXLXXXXXXXXXXXXXXSRXXXXXXGXXXMXXXXXXXXXXXPYXAIALXXXGGFAHQXXSXXXXXXXXDXFXXXEVXTXXGXXGXXXXXXXXXFXXXXGXLXXXXGXXPXFXXLXXFDXXXA

SEQ ID NO: 4498 - protein, 60 aa, Artificial sequence
  protein pattern
  Variant (2)..(2): Xaa in position 2 is Asp, Asn, Gln or Arg
  Variant (4)..(4): Xaa in position 4 is Trp or Tyr
  Variant (5)..(5): Xaa in position 5 is Ala or Gly
  Variant (6)..(6): Xaa in position 6 is Ile or Leu
  Variant (7)..(7): Xaa in position 7 is Ala or Gly
  Variant (8)..(8): Xaa in position 8 is any amino acid
  Variant (9)..(9): Xaa in position 9 is Ala, Pro or Thr
  Variant (11)..(11): Xaa in position 11 is Phe or Ile
  Variant (12)..(12): Xaa in position 12 is Phe or Leu
  Variant (13)..(13): Xaa in position 13 is Ala, Ser or Thr
  Variant (14)..(14): Xaa in position 14 is Asp or Glu
  Variant (16)..(16): Xaa in position 16 is Ala or Thr
  Variant (18)..(18): Xaa in position 18 is Gly or Gln
  Variant (20)..(21): Xaa in position 20 to 21 is any or no amino acid
  Variant (23)..(24): Xaa in position 23 to 24 is any or no amino acid
  Variant (26)..(26): Xaa in position 26 is Ile, Leu, Met or Val
  Variant (28)..(28): Xaa in position 28 is Ile or Leu
  Variant (29)..(29): Xaa in position 29 is Phe or Tyr
  Variant (30)..(30): Xaa in position 30 is Phe, Leu or Met
  Variant (31)..(35): Xaa in position 31 to 35 is any amino acid
  Variant (36)..(36): Xaa in position 36 is Phe, Leu or Met
  Variant (37)..(37): Xaa in position 37 is Asp, Glu, Asn, Pro or Ser
  Variant (38)..(38): Xaa in position 38 is Ile or Leu
  Variant (40)..(40): Xaa in position 40 is any amino acid
  Variant (41)..(41): Xaa in position 41 is Ile or Val
  Variant (43)..(43): Xaa in position 43 is Ile, Leu or Met
  Variant (44)..(44): Xaa in position 44 is Phe or Tyr
  Variant (45)..(45): Xaa in position 45 is Ala or Val
  Variant (47)..(47): Xaa in position 47 is Ile, Leu or Met
  Variant (49)..(49): Xaa in position 49 is Phe or Met
  Variant (51)..(51): Xaa in position 51 is any amino acid
  Variant (52)..(52): Xaa in position 52 is Ala or Gly
  Variant (54)..(54): Xaa in position 54 is Phe, Ile, Leu or Val
  Variant (56)..(56): Xaa in position 56 is Cys or Gly
  Variant (57)..(57): Xaa in position 57 is Ile, Leu or Val
  Variant (58)..(58): Xaa in position 58 is any amino acid
  Variant (59)..(59): Xaa in position 59 is Gly or Ser
RXFXXXXXXRXXXXPXWXTXXFXXWXPXXXXXXXXXXXKXXAXXXWXPXLXXDXGXXXXG

SEQ ID NO: 4499 - protein, 59 aa, Artificial sequence
  protein pattern
  Variant (2)..(4): Xaa in position 2 to 4 is any or no amino acid
  Variant (7)..(7): Xaa in position 7 is His, Trp or Tyr
  Variant (8)..(8): Xaa in position 8 is Ile or Met
  Variant (9)..(9): Xaa in position 9 is Ile, Leu or Val
  Variant (10)..(10): Xaa in position 10 is Ala, Gly or Ser
  Variant (12)..(12): Xaa in position 12 is Phe, Ile or Val
  Variant (13)..(14): Xaa in position 13 to 14 is any amino acid
  Variant (15)..(15): Xaa in position 15 is Gly or Ile
  Variant (16)..(18): Xaa in position 16 to 18 is any amino acid
  Variant (19)..(19): Xaa in position 19 is Gly or Asn
  Variant (21)..(21): Xaa in position 21 is Ile or Leu
  Variant (22)..(22): Xaa in position 22 is Ala, Asp or Thr
  Variant (24)..(24): Xaa in position 24 is Asn, Ser or Thr
  Variant (25)..(25): Xaa in position 25 is Ala, Ser or Thr
  Variant (26)..(26): Xaa in position 26 is Ile, Leu or Val
  Variant (27)..(27): Xaa in position 27 is Ala, Gly or Ser
  Variant (28)..(28): Xaa in position 28 is Ala, Ile or Val
  Variant (29)..(29): Xaa in position 29 is Ala or Leu
  Variant (32)..(32): Xaa in position 32 is Glu, Gln or Thr
  Variant (33)..(33): Xaa in position 33 is Ile, Leu or Val
  Variant (34)..(38): Xaa in position 34 to 38 is any amino acid
  Variant (39)..(39): Xaa in position 39 is Ile or Met
  Variant (40)..(40): Xaa in position 40 is Ser or Thr
  Variant (41)..(41): Xaa in position 41 is any amino acid
  Variant (42)..(42): Xaa in position 42 is Glu or Gln
  Variant (45)..(45): Xaa in position 45 is Ala, Gly or Ser
  Variant (46)..(46): Xaa in position 46 is His, Trp or Tyr
  Variant (47)..(48): Xaa in position 47 to 48 is Ile or Val
  Variant (49)..(49): Xaa in position 49 is Ala, Gly, Ser or Val
  Variant (50)..(50): Xaa in position 50 is Ala or Ser
  Variant (51)..(51): Xaa in position 51 is Phe, Trp or Tyr
  Variant (52)..(52): Xaa in position 52 is Gln or Ser
  Variant (53)..(53): Xaa in position 53 is Ala, Gly, Ile or Leu
  Variant (54)..(54): Xaa in position 54 is Ala, Cys or Gly
  Variant (55)..(58): Xaa in position 55 to 58 is any amino acid
  Variant (59)..(59): Xaa in position 59 is Pro or Gln
IXXXRWXXXXLXXXXXXXXYXXRXXXXXXAPXXXXXXXXXXXQYXXXXXXXXXXXXXXX

SEQ ID NO: 4500 - protein, 61 aa, Artificial sequence
  protein pattern
  Variant (2)..(2): Xaa in position 2 is Ala, Cys or Gly
  Variant (3)..(4): Xaa in position 3 to 4 is any amino acid
  Variant (6)..(6): Xaa in position 6 is any amino acid
  Variant (7)..(8): Xaa in position 7 to 8 is any or no amino acid
  Variant (10)..(17): Xaa in position 10 to 17 is any amino acid
  Variant (18)..(19): Xaa in position 18 to 19 is any or no amino acid
  Variant (21)..(21): Xaa in position 21 is any amino acid
  Variant (23)..(23): Xaa in position 23 is Ile or Val
  Variant (24)..(24): Xaa in position 24 is any amino acid
  Variant (26)..(26): Xaa in position 26 is Phe, Leu or Met
  Variant (27)..(27): Xaa in position 27 is Cys or Ser
  Variant (28)..(28): Xaa in position 28 is Ile, Leu or Val
  Variant (35)..(35): Xaa in position 35 is any amino acid
  Variant (36)..(36): Xaa in position 36 is Ile or Leu
  Variant (38)..(38): Xaa in position 38 is Ala, Gly, Thr or Val
  Variant (39)..(39): Xaa in position 39 is any amino acid
  Variant (40)..(40): Xaa in position 40 is Leu or Val
  Variant (41)..(41): Xaa in position 41 is any amino acid
  Variant (42)..(42): Xaa in position 42 is Ala, Ser or Thr
  Variant (43)..(43): Xaa in position 43 is Ile, Leu or Met
  Variant (44)..(44): Xaa in position 44 is Ala, Ser or Thr
  Variant (45)..(45): Xaa in position 45 is Ala or Ser
  Variant (47)..(47): Xaa in position 47 is any amino acid
  Variant (49)..(51): Xaa in position 49 to 51 is any amino acid
  Variant (54)..(54): Xaa in position 54 is Ala or Gly
  Variant (56)..(56): Xaa in position 56 is Ala or Val
  Variant (57)..(57): Xaa in position 57 is Ala, Asn, Ser, Thr or Val
  Variant (59)..(59): Xaa in position 59 is Phe, Leu or Met
  Variant (60)..(60): Xaa in position 60 is Ala, Gly or Thr
GXXXMXXXGXXXXXXXXXXYXAXXLXXXGGFAHQXXSXXXXXXXXDXFXXXEVXTXXGXXG

SEQ ID NO: 4501 - protein, 61 aa, Artificial sequence
  protein pattern
  Variant (2)..(3): Xaa in position 2 to 3 is any amino acid
  Variant (4)..(4): Xaa in position 4 is Leu, Met or Val
  Variant (6)..(7): Xaa in position 6 to 7 is any amino acid
  Variant (10)..(10): Xaa in position 10 is any or no amino acid
  Variant (12)..(12): Xaa in position 12 is any amino acid
  Variant (13)..(13): Xaa in position 13 is any or no amino acid
  Variant (15)..(15): Xaa in position 15 is Ala or Ser
  Variant (16)..(16): Xaa in position 16 is Ala, Gly or Asn
  Variant (17)..(17): Xaa in position 17 is any amino acid
  Variant (18)..(18): Xaa in position 18 is Lys or Arg
  Variant (20)..(20): Xaa in position 20 is any amino acid
  Variant (21)..(21): Xaa in position 21 is Ala, Ser or Thr
  Variant (22)..(22): Xaa in position 22 is Asp or Glu
  Variant (26)..(26): Xaa in position 26 is any amino acid
  Variant (27)..(27): Xaa in position 27 is Lys or Arg
  Variant (28)..(28): Xaa in position 28 is Glu or Lys
  Variant (29)..(29): Xaa in position 29 is Lys or Arg
  Variant (30)..(30): Xaa in position 30 is Gly, Pro or Ser
  Variant (31)..(31): Xaa in position 31 is Ile or Val
  Variant (33)..(33): Xaa in position 33 is any amino acid
  Variant (35)..(36): Xaa in position 35 to 36 is any amino acid
  Variant (37)..(37): Xaa in position 37 is Gly or Asn
  Variant (38)..(38): Xaa in position 38 is Ala, Ile or Val
  Variant (40)..(40): Xaa in position 40 is any or no amino acid
  Variant (42)..(42): Xaa in position 42 is any amino acid
  Variant (44)..(44): Xaa in position 44 is Ala or Gly
  Variant (45)..(45): Xaa in position 45 is any amino acid
  Variant (46)..(46): Xaa in position 46 is Ile, Leu or Val
  Variant (50)..(50): Xaa in position 50 is Ile or Leu
  Variant (51)..(51): Xaa in position 51 is Ile or Val
  Variant (53)..(55): Xaa in position 53 to 55 is any amino acid
  Variant (56)..(56): Xaa in position 56 is Leu, Met or Val
  Variant (57)..(58): Xaa in position 57 to 58 is any amino acid
  Variant (59)..(59): Xaa in position 59 is Ala, Asp, Glu, Gly, Asn or Ser
  Variant (60)..(60): Xaa in position 60 is any amino acid
  Variant (61)..(61): Xaa in position 61 is Glu, Gln, Arg or Ser
RXXXGXXEAXAXXPXXXXAXXXWFPXXXXXXAXGXXXXGXSXGXXXAPPXXVXXXXXXXXX

SEQ ID NO: 4502 - protein, 41 aa, Artificial sequence
  protein pattern
  Variant (3)..(5): Xaa in position 3 to 5 is any amino acid
  Variant (7)..(7): Xaa in position 7 is Ala, Gly or Val
  Variant (8)..(8): Xaa in position 8 is any amino acid
  Variant (9)..(9): Xaa in position 9 is Ala, Gly or Ser
  Variant (10)..(10): Xaa in position 10 is Phe, Ile, Leu, Met or Val
  Variant (11)..(11): Xaa in position 11 is Ile or Val
  Variant (13)..(13): Xaa in position 13 is Ala, Ser or Val
  Variant (14)..(15): Xaa in position 14 to 15 is any amino acid
  Variant (17)..(19): Xaa in position 17 to 19 is any amino acid
  Variant (21)..(21): Xaa in position 21 is His, Lys or Arg
  Variant (22)..(22): Xaa in position 22 is any amino acid
  Variant (24)..(28): Xaa in position 24 to 28 is any amino acid
  Variant (29)..(29): Xaa in position 29 is Ile, Leu or Met
  Variant (30)..(30): Xaa in position 30 is Gly, Ser or Thr
  Variant (31)..(31): Xaa in position 31 is any amino acid
  Variant (32)..(32): Xaa in position 32 is Ala, Asp, Glu, Gln or Thr
  Variant (33)..(33): Xaa in position 33 is Glu or Lys
  Variant (34)..(34): Xaa in position 34 is any amino acid
  Variant (35)..(35): Xaa in position 35 is Ala, Asp or Glu
  Variant (36)..(36): Xaa in position 36 is any amino acid
  Variant (38)..(38): Xaa in position 38 is any amino acid
  Variant (39)..(39): Xaa in position 39 is Ala, Asp, Gly, Asn, Gln or Ser
  Variant (40)..(40): Xaa in position 40 is Asp or Gly
  Variant (41)..(41): Xaa in position 41 is Asn or Gln
AFXXXGXXXXXWXXXWXXXYXXPXXXXXXXXXXXXXIXXXX

SEQ ID NO: 4503 - protein, 37 aa, Artificial sequence
  protein pattern
  Variant (2)..(4): Xaa in position 2 to 4 is any amino acid
  Variant (6)..(6): Xaa in position 6 is any amino acid
  Variant (7)..(7): Xaa in position 7 is Ile, Leu, Met or Val
  Variant (9)..(9): Xaa in position 9 is any amino acid
  Variant (11)..(11): Xaa in position 11 is Ile, Leu, Met or Val
  Variant (12)..(12): Xaa in position 12 is Gly or Ser
  Variant (13)..(13): Xaa in position 13 is Phe or Tyr
  Variant (14)..(16): Xaa in position 14 to 16 is any amino acid
  Variant (18)..(19): Xaa in position 18 to 19 is any amino acid
  Variant (21)..(21): Xaa in position 21 is Ala, Gly or Ser
  Variant (22)..(22): Xaa in position 22 is Ala, Gly, Ile, Leu or Val
  Variant (23)..(23): Xaa in position 23 is any amino acid
  Variant (24)..(24): Xaa in position 24 is Cys, Asn or Thr
  Variant (25)..(27): Xaa in position 25 to 27 is any amino acid
  Variant (28)..(28): Xaa in position 28 is Ala, Gly or Ser
  Variant (29)..(29): Xaa in position 29 is any amino acid
  Variant (30)..(30): Xaa in position 30 is Ala, Ser or Thr
  Variant (31)..(32): Xaa in position 31 to 32 is Gly, Asn, Ser or Thr
  Variant (34)..(34): Xaa in position 34 is any amino acid
  Variant (35)..(35): Xaa in position 35 is Ala, Gly, Gln or Ser
GXXXDXXGXKXXXXXXAXXWXXXXXXXXXXXXWXXLA

SEQ ID NO: 4504 - protein, 38 aa, Artificial sequence
  protein pattern
  Variant (2)..(5): Xaa in position 2 to 5 is any or no amino acid
  Variant (7)..(7): Xaa in position 7 is Ala, Gly, Thr or Val
  Variant (9)..(9): Xaa in position 9 is Ala or Val
  Variant (10)..(10): Xaa in position 10 is Ala, Asp, Ser or Thr
  Variant (11)..(11): Xaa in position 11 is any amino acid
  Variant (12)..(12): Xaa in position 12 is Ile, Met or Val
  Variant (14)..(14): Xaa in position 14 is Phe or Tyr
  Variant (15)..(15): Xaa in position 15 is Ala, Asp, Gly, Asn, Ser or Thr
  Variant (17)..(17): Xaa in position 17 is Phe or Leu
  Variant (19)..(19): Xaa in position 19 is Ala, Gly, Ile or Val
  Variant (20)..(20): Xaa in position 20 is any amino acid
  Variant (22)..(22): Xaa in position 22 is Ala, Gly or Ser
  Variant (23)..(23): Xaa in position 23 is Ala, Ile, Leu or Val
  Variant (24)..(24): Xaa in position 24 is Phe or Leu
  Variant (26)..(26): Xaa in position 26 is Ile, Leu or Val
  Variant (27)..(27): Xaa in position 27 is any amino acid
  Variant (28)..(28): Xaa in position 28 is Ala or Gly
  Variant (29)..(29): Xaa in position 29 is Ala or Val
  Variant (30)..(30): Xaa in position 30 is any amino acid
  Variant (31)..(31): Xaa in position 31 is Ile, Leu or Val
  Variant (32)..(32): Xaa in position 32 is Ile, Leu, Met or Val
  Variant (33)..(34): Xaa in position 33 to 34 is any amino acid
  Variant (35)..(35): Xaa in position 35 is Leu or Val
  Variant (36)..(36): Xaa in position 36 is Ala, Ile, Leu or Val
  Variant (37)..(37): Xaa in position 37 is any amino acid
  Variant (38)..(38): Xaa in position 38 is Asp, Glu, Gly or Asn
FXXXXGXLXXXXGXXPXFXXLXXXDXXXXXXXXXXXXX

SEQ ID NO: 4505 - DNA, 573 bp, Escherichia coli K12
  CDS (1)..(573): transl_table=11
atgttcaaatcgaccctggcggcgatggctgctgttttcgctctttctgctctttctcccgcagcaatggcagcgaaaggggacccgcacgtattgttgacaacctcagctggtaacatcgaactggagctggataaacaaaaagcgccagtgtctgtgcaaaactttgtcgattatgtgaacagcggtttttataacaacactacctttcaccgcgtcattcctggctttatgattcagggcggcggtttcaccgagcagatgcagcagaaaaaaccaaacccgccaatcaaaaatgaagccgataacggcctgcgcaacacgcgtggcaccatcgcgatggcacgtaccgctgacaaagacagcgccaccagccagttctttatcaacgttgccgataacgccttccttgaccatggtcagcgtgatttcggttacgcggtatttggtaaagtggtgaaaggcatggacgttgccgataagatttcccaggtgccgactcatgacgttggtccgtaccagaatgtgccgtcaaaaccggtagttatcctttccgctaaagtcctgccgtaa

SEQ ID NO: 4506 - protein, 190 aa, Escherichia coli K12
MFKSTLAAMAAVFALSALSPAAMAAKGDPHVLLTTSAGNIELELDKQKAPVSVQNFVDYVNSGFYNNTTFHRVIPGFMIQGGGFTEQMQQKKPNPPIKNEADNGLRNTRGTIAMARTADKDSATSQFFINVADNAFLDHGQRDFGYAVFGKVVKGMDVADKISQVPTHDVGPYQNVPSKPVVILSAKVLP

SEQ ID NO: 4507 - DNA, 949 bp, Escherichia coli
  CDS (427)..(921)
aagctttcgccattttcattggcgcgtttgatgattttgtcgtcgatatcggtaatgttgcgcacatacttcagtttatagccgaggaaacgcagatagcgcgcaaccacgtcaaaagcaacaaaggtacgcccgtgaccgatatgacagagatcgtaaacggtgattccacacacgtacatgccgacttccccggcgtgaataggcttaaattcctctttttggcgtgtcagagtattgaagatttttagcatcgaagattccgtttaggacatgtgtgggtaattgagttgcgtataatacccatatttcccgcgcgaatcagcatacattgcgtgatgatccgatcgtgcggttatgctataacaccaccctatatatgacccgaactgggttgaagcaccatcaacggaacaggatgcaaaaatggttactttccacaccaatcacggcgatattgtcatcaaaacttttgacgataaagcacctgaaacagttaaaaacttcctggactactgccgcgaaggtttttacaacaacaccattttccaccgtgttatcaacggctttatgattcagggcggcggttttgaaccgggcatgaaacaaaaagccaccaaagaaccgatcaaaaacgaagccaacaacggcctgaaaaatacccgtggtacgctggcaatggcacgtactcaggctccgcactctgcaactgcacagttcttcatcaacgtggttgataacgacttcctgaacttctctggcgaaagcctgcaaggttggggctactgcgtgtttgctgaagtggttgacggcatggacgaggtagacaaaatcaaaggtgttgcaaccggtcgtagcggtatgcaccaggacgtgccaaaagaagacgttatcattgaaagcgtgaccgttagcgagtaatcgtggcgacactctttattgcagatct

SEQ ID NO: 4508 - protein, 164 aa, Escherichia coli
MVTFHTNHGDIVIKTFDDKAPETVKNFLDYCREGFYNNTIFHRVINGFMIQGGGFEPGMKQKATKEPIKNEANNGLKNTRGTLAMARTQAPHSATAQFFINVVDNDFLNFSGESLQGWGYCVFAEVVDGMDEVDKIKGVATGRSGMHQDVPKEDVIIESVTVSE

SEQ ID NO: 4509 - DNA, 831 bp, Lactococcus lactis; IL1403
  CDS (1)..(831)
atgaatacgaataaaaaaaataatacaattctttttacaatctttgggattgtcttagttattgtcgttggactccttgttttctttgcaaatcgtccaaaaacaactgataatacagcaagtagtacaagcacttcttcaagccaaaaagttgattatccaacaaattataaattacatgatgcagtaaaaaattctacaactgcccttaatgatttgactttgccacaactttctacaactgttgctgaggatgaagctgaggtcgaaattaaaacgactgctggaaatatcaatattaaacttttccctaaattggcccctaatgcggttcaaaatttccttgttcttgccaaaaatggttactacaaaaataatgaattcttccgtgtcatcaaagatttcatgattcaatctggtgacccttctaatcaaggaactggtactgcttcaatttttggtgggaaaacatttgatactgaaatttctaatcaactgtacaatatccgcggcgcacttgctttagcaaatactggccaagcaagctctagcagttcacaatttttcattgtgcaaaattcccaagatatgaccagtcaaattcaagacaagactaaatatcctcaaaaaataattgatgcttataaaaaagggggatacccaagtttagacggaagttacactgtctttggtcaagttatttcaggaatggatgtcgttgataaaatcgcgaaagccgaggttacatcaagtggttctggcgaagcttcatctcctgttgaccctgtaaaaattaaatctgttaaaattcttaaaaactggaaattttaa

SEQ ID NO: 4510 - protein, 276 aa, Lactococcus lactis; IL1403
MNTNKKNNTILFTIFGIVLVIVVGLLVFFANRPKTTDNTASSTSTSSSQKVDYPTNYKLHDAVKNSTTALNDLTLPQLSTTVAEDEAEVEIKTTAGNINIKLFPKLAPNAVQNFLVLAKNGYYKNNEFFRVIKDFMIQSGDPSNQGTGTASIFGGKTFDTEISNQLYNIRGALALANTGQASSSSSQFFIVQNSQDMTSQIQDKTKYPQKIIDAYKKGGYPSLDGSYTVFGQVISGMDVVDKIAKAEVTSSGSGEASSPVDPVKIKSVKILKNWKF

SEQ ID NO: 4511 - DNA, 495 bp, Legionella pneumophila
  CDS (1)..(495)
atggttttaatttctacatccatgggtgatattcatatcaaattagatacagaaaataccccattaactgcagaaaacttcctaaattatgtgcgtaaaggtttttataatgacacgattttccatcgtgttatcgatggttttatgattcaaggcggcggtttgaagacaaatatggagcaaaaaacaactgcctctccaattcaaaatgaagcaaaaggagcgaaacctaacaaacgtggaaccatcgcaatggcgagaacaatggatccccattctgcaacagcccaattttttattaatgttgcggataatggttttctgaattacagcggcgaccaccctcaaggttacggttactgcgtatttggagaagtagttgaagggatggatgtggttgatgccattgctaaagtgaaaacaggccaacgaaatggtcatgcagatgtccctgtagaagaaataagcatcattgaggttagagaattggcttag

SEQ ID NO: 4512 - protein, 164 aa, Legionella pneumophila
MVLISTSMGDIHIKLDTENTPLTAENFLNYVRKGFYNDTIFHRVIDGFMIQGGGLKTNMEQKTTASPIQNEAKGAKPNKRGTIAMARTMDPHSATAQFFINVADNGFLNYSGDHPQGYGYCVFGEVVEGMDVVDAIAKVKTGQRNGHADVPVEEISIIEVRELA

SEQ ID NO: 4513 - DNA, 567 bp, Legionella pneumophila
  CDS (1)..(567)
atgaataaaattatttgtttactcagcaacttattgttaacagtaggcatcatgtcggcacatgcggaaactgcaattattaaaacctcagaaggcaacataacgtgtgaattatttacaaaagaagctcccaatactgttgcaaattttgtagggctggcaaccggaacaaaagaatttaaagatgtaaaaactggtgaaatggttaagcgtcctttttacaatggcctgatttttcatcgtgtgattgcaggctttatgattcaaggtggcgacccgcttggaaatgggaccggtggcccaggttacacatttgataatgaaaatactaatgccagttttaacaaacctggcgtacttgcaatggctaatgcaggccccaataccaatggcagccaattttttattaccgttgcgccaacacctgaattacaaggcaactacaatgtttttggtcaagtaatttccggacaagaggttgttgacaagattagcaagatgcctactgatcctcaagataagccaataaagcctgtagtcattgaaaacatcaccattcaaaaataa

SEQ ID NO: 4514 - protein, 188 aa, Legionella pneumophila
MNKIICLLSNLLLTVGIMSAHAETAIIKTSEGNITCELFTKEAPNTVANFVGLATGTKEFKDVKTGEMVKRPFYNGLIFHRVIAGFMIQGGDPLGNGTGGPGYTFDNENTNASFNKPGVLAMANAGPNTNGSQFFITVAPTPELQGNYNVFGQVISGQEVVDKISKMPTDPQDKPIKPVVIENITIQK

SEQ ID NO: 4515 - DNA, 510 bp, Pasteurella multocida subsp. multocida str. Pm70
  CDS (1)..(510): transl_table=11
atgattacattacacactaacttgggtaacattaaaattcaattagatcatgaaaaagcaccgaacacagcgcaaaactttgtaaattactgtaaaagtggattctatgataacacaatttttcatcgtgttattgatggatttatgatccaaggtggtggtatggatgaggcgatgcgtgagaaaaagacgaatgcgccgatccaaaatgaagccaacaatggtttaagtaacaaacgtggcacaattgcgatggcgcgaacatcggatcctcattctgcgaccgcacaattttttattaatgtagcagataatacttttttagatcaccgttcaaaagagttatttggtaaaaaggtggtacaagagtggggctatgccgtctttggtgaagtggttgagggcatggatgtagtagataagatcaaaggcgtgaaaaccggaaataaagggtttcaccaagatgtaccacaagaagccatcgtgattactgcagtgaccgttgaataa

SEQ ID NO: 4516 - protein, 169 aa, Pasteurella multocida subsp. multocida str. Pm70
MITLHTNLGNIKIQLDHEKAPNTAQNFVNYCKSGFYDNTIFHRVIDGFMIQGGGMDEAMREKKTNAPIQNEANNGLSNKRGTIAMARTSDPHSATAQFFINVADNTFLDHRSKELFGKKVVQEWGYAVFGEVVEGMDVVDKIKGVKTGNKGFHQDVPQEAIVITAVTVE

SEQ ID NO: 4517 - DNA, 558 bp, Neisseria meningitidis MC58
  CDS (1)..(558): transl_table=11
atgaaacccaaattcaaaaccgttttaaccgcgctgcttttggcggtttccctgccgtctatggcggcaacccatgttttgatggaaaccgatatgggcaatatccgtttggttttggacgaatccaaagcccccaaaaccgttgctaatttcgtgcgctatgcccgaaaaggcttttacgacgacaccgtttttcaccgcgttatcgacggttttgttatccagggcggtggattgaccgaggacttggcacaaaaggcaagcgataaggccgttgccaacgaatccggcaacggcttgaaaaacaccgccggcaccatcgccatggcgcggacgacagcccccgattccgccaccagccaattctttatcaatctggcggacaacgcttcgctcgactacaaaaacggacaatacggctataccgttttcggcagggtcgaaagcggcatgaacaccgtttccaaaatcgcccgcgtcaaaaccgccacgcgcggcttttatcaaaacgtacccgtacagcccgtcaaaatccgtcgcgttgttgtcgggcagtaa

SEQ ID NO: 4518 - protein, 185 aa, Neisseria meningitidis MC58
MKPKFKTVLTALLLAVSLPSMAATHVLMETDMGNIRLVLDESKAPKTVANFVRYARKGFYDDTVFHRVIDGFVIQGGGLTEDLAQKASDKAVANESGNGLKNTAGTIAMARTTAPDSATSQFFINLADNASLDYKNGQYGYTVFGRVESGMNTVSKIARVKTATRGFYQNVPVQPVKIRRVVVGQ

SEQ ID NO: 4519 - DNA, 558 bp, Neisseria meningitidis Z2491
  CDS (1)..(558): transl_table=11
atgaaacccaaattcaaaaccgttttaaccgcgctgcttttggcggtttccctgccgtctatggcggcaacccatgttttgatggaaaccgatatgggcaatatccgtttggttttggacgaatccaaagcacccaaaaccgttgccaatttcgtgcgctatgcccgaaaaggcttttacgacaatacgatttttcaccgcgtcatcggcggcttcgttatccaaggcggcggattgaccgaggacttggcacaaaaggcaagcgataaggccgttgccaacgaatccggcaacggcttgaaaaacactgtcggcaccatcgccatggcgcggacggccgatccggattccgccaccagccaattctttatcaatctggtggacaatgattcgctcaactacaaaaacggacaatacggctataccgttttcggcagggtcgaaagcggcatgaacaccgtttccaaaatcgcccgcgtcaaaaccgccacgcgcggcttttatcaaaacgtacccgtacagcccgtcaaaatccgtcgcgttgttgtcgggcagtaa

SEQ ID NO: 4520 - protein, 185 aa, Neisseria meningitidis Z2491
MKPKFKTVLTALLLAVSLPSMAATHVLMETDMGNIRLVLDESKAPKTVANFVRYARKGFYDNTIFHRVIGGFVIQGGGLTEDLAQKASDKAVANESGNGLKNTVGTIAMARTADPDSATSQFFINLVDNDSLNYKNGQYGYTVFGRVESGMNTVSKIARVKTATRGFYQNVPVQPVKIRRVVVGQ

SEQ ID NO: 4521 - DNA, 570 bp, Yersinia pestis CO92
  CDS (1)..(570): transl_table=11
atgtttaaacgtactttagtgaccttcattgccctatgttccctcagcgccgtagcgcctgctgctttagctgccggtgagcctcatgtgttgttaacaacgtcggccgggaatattgagctggagctcaatagccagaaggcacccatttcaacccagaatttcgttgattatgttaacaatggttactataacaacactattttccaccgtgttatccctggctttatgattcaaggcggcggttttaccgcagatttcaaagaaaaaacgcctaaaacaccaatcaaaaatgaagcagataatggcctgcgtaacctacgtggtaccatttcgatggcccgtactgcagataaagacagcgccaccagtcagttcttcttgaacgtggcagacaatgctttccttgaccacggccaacgtgactttggttatgcggtattcggtaaagtcgttaaaggcatggatgtcgtcgaaaaaatttctcaggttcagacagaaaacgtcggcccttatcagaatgtacccgttaaaccgatcactatcctgtcagcaaaagttttaccttaa

SEQ ID NO: 4522 - protein, 189 aa, Yersinia pestis CO92
MFKRTLVTFIALCSLSAVAPAALAAGEPHVLLTTSAGNIELELNSQKAPISTQNFVDYVNNGYYNNTIFHRVIPGFMIQGGGFTADFKEKTPKTPIKNEADNGLRNLRGTISMARTADKDSATSQFFLNVADNAFLDHGQRDFGYAVFGKVVKGMDVVEKISQVQTENVGPYQNVPVKPITILSAKVLP

SEQ ID NO: 4523 - DNA, 540 bp, Ralstonia solanacearum GMI1000
  CDS (1)..(540): transl_table=11
ttgcttttgcgcttttccgccaaggaactcaccatgacccaagtcaagctgcacaccaaccacggcgacatcacgctggccctggacgccgagaaggcgcccaagagcgtcgccaacttcgtccactacgtcaagaagggccactacaacggcacggtgttccaccgcgtcatcaagggcttcatgatccagggcggcggtttcgagccgggcgccgacatgaagcagaagccgaccgacgcaccgatcgacaacgaagccaacaacggcctgaagaacgagcgcggctcgatcgccatggcgcgcaccaacgacccgcattcggccacggcccagttcttcatcaacgtggtcgacaacgacttcctgaaccacacctcgccgacgccgcaaggctggggctatgccgtgttcggcaaggtgaccgagggcctggacgtggtcgacaagatccgcgccgtgcgcaccggcaaccgcggctaccaccaggacgtgccgatggaagacgtggtgatcgaaagcgccgaagtgatcgaatga

SEQ ID NO: 4524 - protein, 179 aa, Ralstonia solanacearum GMI1000
MLLRFSAKELTMTQVKLHTNHGDITLALDAEKAPKSVANFVHYVKKGHYNGTVFHRVIKGFMIQGGGFEPGADMKQKPTDAPIDNEANNGLKNERGSIAMARTNDPHSATAQFFINVVDNDFLNHTSPTPQGWGYAVFGKVTEGLDVVDKIRAVRTGNRGYHQDVPMEDVVIESAEVIE

SEQ ID NO: 4525 - DNA, 600 bp, Yersinia pestis KIM
  CDS (1)..(600): transl_table=11
ttgtccgcatcccatagaaaggaaccgttaatgtttaaacgtactttagtgaccttcattgccctatgttccctcagcgccgtagcgcctgctgctttagctgccggtgagcctcatgtgttgttaacaacgtcggccgggaatattgagctggagctcaatagccagaaggcacccatttcaacccagaatttcgttgattatgttaacaatggttactataacaacactattttccaccgtgttatccctggctttatgattcaaggcggcggttttaccgcagatttcaaagaaaaaacgcctaaaacaccaatcaaaaatgaagcagataatggcctgcgtaacctacgtggtaccatttcgatggcccgtactgcagataaagacagcgccaccagtcagttcttcttgaacgtggcagacaatgctttccttgaccacggccaacgtgactttggttatgcggtattcggtaaagtcgttaaaggcatggatgtcgtcgaaaaaatttctcaggttcagacagaaaacgtcggcccttatcagaatgtacccgttaaaccgatcactatcctgtcagcaaaagttttaccttaa

SEQ ID NO: 4526 - protein, 199 aa, Yersinia pestis KIM
MSASHRKEPLMFKRTLVTFIALCSLSAVAPAALAAGEPHVLLTTSAGNIELELNSQKAPISTQNFVDYVNNGYYNNTIFHRVIPGFMIQGGGFTADFKEKTPKTPIKNEADNGLRNLRGTISMARTADKDSATSQFFLNVADNAFLDHGQRDFGYAVFGKVVKGMDVVEKISQVQTENVGPYQNVPVKPITILSAKVLP

SEQ ID NO: 4527 - DNA, 558 bp, Pseudomonas putida KT2440
  CDS (1)..(558): transl_table=11
atgctgaaaaaactcctgctcaccgcctgctcggtcgccttcgccaccagtgtcatggcttccgacaagaccccgcacgtcctgctggacaccagcttcggccaggtcgaaatcgagctgaacgccgagaaggcaccgctcagtaccaagaacttcctgcagtacgtggacagcggcttctacaacaacaccatcttccaccgcgtgatcccggggttcatggtccagggcggcggtttcactgaccagatggtgcagaagaacaccaacgacccgatcaagaacgaggccagcaacggcctgcagaacacccgcggcaccctgtcgatggcacgcacgtccaacccgaactcggccaccagccaattcttcatcaacgtcgccgacaacgacttcctcaacccaggccgcgacgccggttatgccgtgttcggcaaggtgaccaaaggcatggaagtggtcgatcagatcgtcaactcgccgaccaccatcaaaaaaggcatgcgcgacgtaccggccgatccggtctatatcaagtccgccaaacgtatcgactga

SEQ ID NO: 4528 - protein, 185 aa, Pseudomonas putida KT2440
MLKKLLLTACSVAFATSVMASDKTPHVLLDTSFGQVEIELNAEKAPLSTKNFLQYVDSGFYNNTIFHRVIPGFMVQGGGFTDQMVQKNTNDPIKNEASNGLQNTRGTLSMARTSNPNSATSQFFINVADNDFLNPGRDAGYAVFGKVTKGMEVVDQIVNSPTTIKKGMRDVPADPVYIKSAKRID

SEQ ID NO: 4529 - DNA, 564 bp, Pseudomonas syringae pv. tomato str. DC3000
  CDS (1)..(564): transl_table=11
atgctgaaaaaaatcgctctcgccgcctgctccgtgctgtttgccgccaacctgatggctgctcaagacaaggccacgcatgtggtactcgataccagcttcggccagattgaaatcgagctcgccgacaccaaggcgcctgtcagcactcagaactttctgggttacgtagacagcggcttctacagcaacaccatttttcaccgggtgattccgggcttcatggtgcaaggtggcggtttcacccagcaactggtgcagaaacccaccaaggacccgatcaagaacgaagcccagaacggtctgcataacgtgcgcggcacgattgccatggcccggacttcggatgtgaactcggccaccagccagttcttcatcaacaccaatgacaatgccatgctcgacaacggcacccgtgacttcggctacgcggtgttcggcaaagtcgtcaagggcatggacgtggtcgacaacatcgtcaacgcccgaaccggcaatcagaaaggcatgcaaaacgtgccagtcgacccgatcctgatcaagtccgccaaacgcgtcaactga

SEQ ID NO: 4530 - protein, 187 aa, Pseudomonas syringae pv. tomato str. DC3000
MLKKIALAACSVLFAANLMAAQDKATHVVLDTSFGQIEIELADTKAPVSTQNFLGYVDSGFYSNTIFHRVIPGFMVQGGGFTQQLVQKPTKDPIKNEAQNGLHNVRGTIAMARTSDVNSATSQFFINTNDNAMLDNGTRDFGYAVFGKVVKGMDVVDNIVNARTGNQKGMQNVPVDPILIKSAKRVN

SEQ ID NO: 4531 - DNA, 546 bp, Oryza sativa (japonica cultivar-group)
  CDS (1)..(546)
atggcgccggcggcgtcctccaagtccaacccaagggtgttccttgacatcgccatcggcggcgagtgggttggccgcgtggtgatcgagctgctcgccgacaaggtgcccgacacggcggagaacttccggcggctgtgcaccggcgagcgcgccgggcgctccggcaagagcaggctccactacaaggggtcggcgttccaccgcgtggtgcccgggttcatgtgccagggcggcgacatcacggccgggaacggcaccggcggcgagtcggcgctggacggcgccgcgaggcacttccccgacgaggggttcgcggtgaagcacgacgggcccggggtggtgtccatggcgaacgccgggcccaacaccaacggctcccagttcttcatcaccgtcgacaaggcgccgtggctggacggccgccacgtcgcgttcggccgcgtcgtcgccgggatgggcgccgtccgcgccatcgacaggacgggaacctggagcggcaagacggtgaagcccgtcgtcatcaccgactgcggcgtgctctag

SEQ ID NO: 4532 - protein, 181 aa, Oryza sativa (japonica cultivar-group)
MAPAASSKSNPRVFLDIAIGGEWVGRVVIELLADKVPDTAENFRRLCTGERAGRSGKSRLHYKGSAFHRVVPGFMCQGGDITAGNGTGGESALDGAARHFPDEGFAVKHDGPGVVSMANAGPNTNGSQFFITVDKAPWLDGRHVAFGRVVAGMGAVRAIDRTGTWSGKTVKPVVITDCGVL

SEQ ID NO: 4533 - DNA, 570 bp, Photorhabdus luminescens subsp. laumondii TTO1
  CDS (1)..(570): transl_table=11
atgtttaaacgtattttagtagcacttgtaactgcatgctctctgagcgcaatggcacctctggctttggcggtgggagaaacccacgtgaagctgacaacaacggagggtaatattgaactggaattaaataaccagaaagcgccaattacaacgaaaaactttattgaatacgtcaatgagggttattacaacaatacaatcttccatcgggtaatccctggatttatggtgcaaggtggtggttttaccaaagatttgcagcaaaaagcgactaaagctgctattaaaaatgaggcagataatggactgcgtaatttacgcggaactatctctatggcacgtaccgctgataaagacagtgccactagccaattttttattaatgtagcggataatgctttccttgatcacggtcagcgtgattttggctatgcagtatttggtaaagtcgtaaaaggtatggatgttgtggataaaatttctcaagtcaaaacggaaaacgttggtccatatcagaatgtaccggttaaacctgttgctattctgtctgcggagattatcccttaa

SEQ ID NO: 4534 - protein, 189 aa, Photorhabdus luminescens subsp. laumondii TTO1
MFKRILVALVTACSLSAMAPLALAVGETHVKLTTTEGNIELELNNQKAPITTKNFIEYVNEGYYNNTIFHRVIPGFMVQGGGFTKDLQQKATKAAIKNEADNGLRNLRGTISMARTADKDSATSQFFINVADNAFLDHGQRDFGYAVFGKVVKGMDVVDKISQVKTENVGPYQNVPVKPVAILSAEIIP

SEQ ID NO: 4535 - DNA, 597 bp, Geobacter sulfurreducens PCA
  CDS (1)..(597): transl_table=11
atgttcaagagactgatcatcgccctgctcatgagcgggctgttcggcgcactgctcctggccggcaacgccgatgccgccgacaaggcggccaaggccgccaatcccgtggtggttatggagacgagcctcggcaagatcgccgtggagctctacccggacaaggcgccggccacggtgaagaacgttctcgactacgtcaagagcggcttctacgatggcaccatcttccaccgggtcatccccggcttcatgatccagggaggcggcttcaccaccgaccggaaacagaaggagaccagggctccgatcaagaacgaggcggacaacggcctcaagaacgaccggggtaccattgccatggcccgcaccgccagccccgacagcgccacggcccagttcttcatcaacttggtgaacaacgaaaacctgaaccgtccccgccccgacggctacggctacgcggtgttcggcaaggtgatcgaggggatggatgtggttgacaagattgccgcctcccccacccagcgtctcaacatgctcttcgccaacataccggtgacgccggtggtcatcacctccgtcaagatccggtaa

SEQ ID NO: 4536 - protein, 198 aa, Geobacter sulfurreducens PCA
MFKRLIIALLMSGLFGALLLAGNADAADKAAKAANPVVVMETSLGKIAVELYPDKAPATVKNVLDYVKSGFYDGTIFHRVIPGFMIQGGGFTTDRKQKETRAPIKNEADNGLKNDRGTIAMARTASPDSATAQFFINLVNNENLNRPRPDGYGYAVFGKVIEGMDVVDKIAASPTQRLNMLFANIPVTPVVITSVKIR

SEQ ID NO: 4537 - DNA, 849 bp, Neurospora crassa
  CDS (1)..(849)
atgttcagcttgcggcgactcctcctcgccgccacgctgttcctcggcgcgatgctgctctttgcgcagtccgccgaggcagccaagggccccaagatcacccacaaggtctacttcgacattgagcagggcgacaagcccctcggccgcatcgttatgggtctctatggcaagaccgtccccaagaccgctgaaaacttccgcgctcttgccactggcgagaagggcttcggttatgagggctctaccttccaccgtgttatcaagcagttcatgatccagggtggtgacttcaccaagggcgatggcaccggtggcaagtccatctatggtgacaagttccccgatgagaacttcaagctcaagcactccaagaagggtctcctctcaatggccaacgctggcaaggataccaacggctcccagttcttcattaccactgtcatcacctcttggctcgatggcaagcacgtcgtcttcggcgaggtcctcgagggctacgatgtcgtcgagaagattgagaacaccaagaccggtcctcgcgatgctcctgctgagcctatcaagatcgccaagagtggcgagcttgaggttccccctgaaggcctggaaggccagtcggaatgggcatctcccgcgtacgcaaacgaagacgagaagcctgctgctcctgttcctgttaccgatgccaagcctcctgcgcacgacagcatccccgccgccaccgccgacgacgatgacactggtgctcccttgttcgccaaggtcctcttctttggtgtattagttctaggtctcgttttgtatattcgccttcgtcgcgcccctaaggggtctgggcgggcgtga

SEQ ID NO: 4538 - protein, 282 aa, Neurospora crassa
MFSLRRLLLAATLFLGAMLLFAQSAEAAKGPKITHKVYFDIEQGDKPLGRIVMGLYGKTVPKTAENFRALATGEKGFGYEGSTFHRVIKQFMIQGGDFTKGDGTGGKSIYGDKFPDENFKLKHSKKGLLSMANAGKDTNGSQFFITTVITSWLDGKHVVFGEVLEGYDVVEKIENTKTGPRDAPAEPIKIAKSGELEVPPEGLEGQSEWASPAYANEDEKPAAPVPVTDAKPPAHDSIPAATADDDDTGAPLFAKVLFFGVLVLGLVLYIRLRRAPKGSGRA

SEQ ID NO: 4539 - DNA, 549 bp, Neurospora crassa
  CDS (1)..(549)
atggcacccaccgttctccctgcctctggcaacccgctagtcttcttcgacatcaccctcgggggtgagcccctcggccgcatcaccttcgagctcttcaaggacgtagtccccaggacggccgagaacttccggcagttctgcacgggcgagagcaagaacaacctcggtcggccgcaggggtataaggggagcaagttccatcggattatccccaacttcatgtgccaaggcggtgactttctcaacggcgatggcaccggctcaacttgcatctacggcaccaagagctttgcggacgagaatttcttgctgaagcatgatacgcctgggttgctttctatggctaacgccggcccaaacacgaacggctcgcaattcttcatcactacggtcccaacccccttcctggacggcaagcacgtcgtttttggtaaagttgtcgatggaatggatgtcgtcaagaagatggagaacaccaagactggatatcgcggtaaggacgtgccgaacctggatgtggtgattgctcagtgtggtgagatgtaa

SEQ ID NO: 4540 - protein, 182 aa, Neurospora crassa
MAPTVLPASGNPLVFFDITLGGEPLGRITFELFKDVVPRTAENFRQFCTGESKNNLGRPQGYKGSKFHRIIPNFMCQGGDFLNGDGTGSTCIYGTKSFADENFLLKHDTPGLLSMANAGPNTNGSQFFITTVPTPFLDGKHVVFGKVVDGMDVVKKMENTKTGYRGKDVPNLDVVIAQCGEM

SEQ ID NO: 4541 - DNA, 570 bp, Erwinia carotovora subsp. atroseptica SCRI1043
  CDS (1)..(570): transl_table=11
atgtttaaacgtactctggttgctgcggcggcccttatttcactgacggcattttccccagcctttgcggcttccggcactactcatgtgctgttgacgacgtccgcaggcaatatcgaactgtctttagataatcaaaaggcaccgatttcggtaaaaaatttcgtcgagtacgttaacaacggcttttataacgggacgacatttcaccgtgtgatcccaggctttatggtgcagggtggcggcttttctggcgaaatgaaccagaaagcgccgaatgcgccgatcaagaatgaagccgataacggtttgcgtaaccaacgcggcacgattgccatggcgcgcacgtccgacaaagacagtgcgactagccagttctttatcaacatagcggacaacgctttcctcgatcacggccagcgtgattttggctatgccgtgttcggtaaagtggtgaaaggtatggaagtcgtggataagatctctcaggtaccaacgaaaaacgtcgggccttatcagaacgtaccgactacgccgatcgtgattcagtcagtgaaagtgttgccttga

SEQ ID NO: 4542 - protein, 189 aa, Erwinia carotovora subsp. atroseptica SCRI1043
MFKRTLVAAAALISLTAFSPAFAASGTTHVLLTTSAGNIELSLDNQKAPISVKNFVEYVNNGFYNGTTFHRVIPGFMVQGGGFSGEMNQKAPNAPIKNEADNGLRNQRGTIAMARTSDKDSATSQFFINIADNAFLDHGQRDFGYAVFGKVVKGMEVVDKISQVPTKNVGPYQNVPTTPIVIQSVKVLP

SEQ ID NO: 4543 - DNA, 552 bp, Mannheimia succiniciproducens MBEL55E
  CDS (1)..(552): transl_table=11
atgcgcaaccaaattcccattcatttttataaggaaaacacaatggttacattacataccaatttcggcgacatcaaaatcgctttaaatcatgaaaaagcaccggaaactgcggcaaattttgaagcttattgtaaagagggtttttataataacacaattttccaccgtgttattgacggttttatgattcagggcggcggtatggaaccggggatgcgtgaaaaaaataccaaagcgccaatcaaaaacgaagcgaacaaccgtttaagcaacaaacgcggcaccattgcgatggcgcgtacttccgatccgcattccgcaacggcgcaattttttattaacgtggcggacaacgctttccttgattatcgcgcgaaagaaatgttcggacgtgaagttgtgcaggaatggggctatgccgtattcggtgaagtggttgaaggcatggatgtagtggataaaatcaaaggcgtaaaaacaggtaatgccggttttcatcaggacgtgccgaaagaagatgtagttattacttcggtgacggtggaataa

SEQ ID NO: 4544 - protein, 183 aa, Mannheimia succiniciproducens MBEL55E
MRNQIPIHFYKENTMVTLHTNFGDIKIALNHEKAPETAANFEAYCKEGFYNNTIFHRVIDGFMIQGGGMEPGMREKNTKAPIKNEANNRLSNKRGTIAMARTSDPHSATAQFFINVADNAFLDYRAKEMFGREVVQEWGYAVFGEVVEGMDVVDKIKGVKTGNAGFHQDVPKEDVVITSVTVE

SEQ ID NO: 4545 - DNA, 582 bp, Azoarcus sp. EbN1
  CDS (1)..(582): transl_table=11
atgaagcgcctgctcgcctctctctttctgttcggttggctcgtttccgccggcgcagccaacccggttgtcgagatgcggaccagcgaaggtccggtaatggtcgagcttttcgccgacaaggcacctaaatcggtcgcgaacttcattgagtacgtgaagagcggccacttcaacggcaccattttccatcgcgtcatcgatggattcatggttcagggcggcggcttcgacgcggcgatgcgacagaaacctacccgtgccccgatcgagaacgaagcgaaaaacggcctgcgcaacgaagccggcacgctcgcgatggctcgcacggccgatcctcattcggccagcgcacagttcttcgtcaacctcgtcgacaaccgctttctcgactacccgtcccgcgacggctgggggtatgccgttttcggcaaggtcaccgaggggttcgacgtcgtgcagaaaatcggccggcttccgacccacaccgtgaatggcatgcagaacgttcccgagcagccggtcatgatcgaatcgatccgcatcgtggatgcggtgccggcaaaatccacccagcagtaa

SEQ ID NO: 4546 - protein, 193 aa, Azoarcus sp. EbN1
MKRLLASLFLFGWLVSAGAANPVVEMRTSEGPVMVELFADKAPKSVANFIEYVKSGHFNGTIFHRVIDGFMVQGGGFDAAMRQKPTRAPIENEAKNGLRNEAGTLAMARTADPHSASAQFFVNLVDNRFLDYPSRDGWGYAVFGKVTEGFDVVQKIGRLPTHTVNGMQNVPEQPVMIESIRIVDAVPAKSTQQ

SEQ ID NO: 4547 - DNA, 558 bp, Neisseria gonorrhoeae FA 1090
  CDS (1)..(558): transl_table=11
atgaaacccaaattcaaaaccgttttaaccgcgctgcttttggcggtttccctgccgtctatggcggcaacccgcgtcctgatggaaaccgatatgggcaatatccgtttggttttggacgaatccaaagcctccaaaaccgttgccaatttcgtgcgctatgcccgaaaaggcttttacgacaacacgattttccaccgcgtcatcggcggcttcgtcatccaaggcgacggattgaccgaggacttggtgcaaaaggcaaccgataaggccgttgccaacgaatccggcaacggcttgaaaaacaccgtcggcaccatcgcaatggcgcggacggcagcccccgattccgccgccgcccaattctttatcaatctggcggacaacggttcgctcgactacaaaaacggacaatacggctacaccgttttcggcagggtagaaagcggaatggacaccgtttccaaaatcgcccgcgtcaaaaccgccacgcgcggcttttatcaaaacgtacccgtacagcccgtcaaaatccgtcgcgttgttgtcgggcagtaa

SEQ ID NO: 4548 - protein, 185 aa, Neisseria gonorrhoeae FA 1090
MKPKFKTVLTALLLAVSLPSMAATRVLMETDMGNIRLVLDESKASKTVANFVRYARKGFYDNTIFHRVIGGFVIQGDGLTEDLVQKATDKAVANESGNGLKNTVGTIAMARTAAPDSAAAQFFINLADNGSLDYKNGQYGYTVFGRVESGMDTVSKIARVKTATRGFYQNVPVQPVKIRRVVVGQ

SEQ ID NO: 4549 - DNA, 564 bp, Pseudomonas syringae pv. syringae B728a
  CDS (1)..(564): transl_table=11
atgctgaaaaaaatcgctctcgccgcctgctccgtgctgttcgccgccaacctgatggctgccccggataaagccacgcacgtggtgctcgacaccagtttcggccagattgaaatcgaactcgcagacaccaaggcgccggtcagcacccagaactttctgggttatgtcgacagcggcttctacaccaacaccatctttcaccgggtgattccgggcttcatggtgcaaggcggtggcttcaccccgcagatggttcagaagcagaccaaggatccgatcaagaacgaagcccagaacggtttgcataacgtccgcggcaccattgccatggcgcgtacctcggacgtgaactcggccaccagtcaattcttcatcaacaccaacgacaatgccatgctcgacaacggcgcacgcgacttcggttacgcagtgttcggcaaagtcgtcaagggcatggacgtcgtcgacaacatcgtcaacgcccgcaccactactcagaaaggcatgcaaaacgtgccagtcgacccgatcctgatcaagtccgccaaacgcgtcaactga

SEQ ID NO: 4550 - protein, 187 aa, Pseudomonas syringae pv. syringae B728a
MLKKIALAACSVLFAANLMAAPDKATHVVLDTSFGQIEIELADTKAPVSTQNFLGYVDSGFYTNTIFHRVIPGFMVQGGGFTPQMVQKQTKDPIKNEAQNGLHNVRGTIAMARTSDVNSATSQFFINTNDNAMLDNGARDFGYAVFGKVVKGMDVVDNIVNARTTTQKGMQNVPVDPILIKSAKRVN

SEQ ID NO: 4551 - DNA, 564 bp, Pseudomonas fluorescens Pf-5
  CDS (1)..(564): transl_table=11
atgctgaaaaaaatcgccctcgtcgccggctccgtactcttcgcggccaacctgatggccgcgcaaccggccaaggcgccccacgtcctgctggacaccagcttcggcaagatcgaagtggaactggacccggtcaaggcaccgatctccagcaagaacttcctcgactacgtcgacagcggcttctacaccaacaccatcttccaccgggtgatcccggggttcatggtccagggcggtggcttcaccgcgcagatggtgcagaaagacacccgcgacccgatcaagaacgaagcctccaacggcctgcataacgtgcgtggcaccctgtccatggcccgtacctcgaaccccaactcggccaccagccagttcttcatcaacgtcgccgacaacgccttcctcgacccgggccgcgatgccggctacgccgtattcgccaaggtggtgagcggcatggacgtggtggaccagatcgtcaactcccagaccaccaccaagcagggcatgcagaacgtgccgatcgacccggtactgatcaagtcggccaagcgtatcgactga

SEQ ID NO: 4552 - protein, 187 aa, Pseudomonas fluorescens Pf-5
MLKKIALVAGSVLFAANLMAAQPAKAPHVLLDTSFGKIEVELDPVKAPISSKNFLDYVDSGFYTNTIFHRVIPGFMVQGGGFTAQMVQKDTRDPIKNEASNGLHNVRGTLSMARTSNPNSATSQFFINVADNAFLDPGRDAGYAVFAKVVSGMDVVDQIVNSQTTTKQGMQNVPIDPVLIKSAKRID

SEQ ID NO: 4553 - DNA, 609 bp, Pseudomonas syringae pv. phaseolicola 1448A
  CDS (1)..(609): transl_table=11
ttgccggccacagtcgatatctcttaccgaaggacctgttgccacatgctgaaaaaaatcgccctcaccgcctgcttcgtattgttcgccgccaacctgatggctgccccggataaagccacgcacgtggtactcgataccagcttcggccagattgaaatcgaactcgcagacaccaaggcaccggtcagcacccagaactttctgggttacgtcgacagcggcttctacagcaacactatttttcaccgtgtgattccgggcttcatggtgcaaggtggcggtttcacccagcaactggttcagaagccgaccaaggacccgatcaagaacgaagcacagaacggtttgcacaacgtgcgtggcaccattgccatggcccgtacttcggacgttaactcggccaccagtcaattcttcatcaacaccaacgacaatgccatgctcgacaacggcacacgtgacttcggttacgcggtgttcggtaaagtcgtcaagggtatggacgtggtcgacaacatcgtcaacgcccgcaccactactacgaaaggcatgcaaaacgtgccaatcgacccgatcctgatcaagtccgccaaacgcgtcgactaa

SEQ ID NO: 4554 - protein, 202 aa, Pseudomonas syringae pv. phaseolicola 1448A
MPATVDISYRRTCCHMLKKIALTACFVLFAANLMAAPDKATHVVLDTSFGQIEIELADTKAPVSTQNFLGYVDSGFYSNTIFHRVIPGFMVQGGGFTQQLVQKPTKDPIKNEAQNGLHNVRGTIAMARTSDVNSATSQFFINTNDNAMLDNGTRDFGYAVFGKVVKGMDVVDNIVNARTTTTKGMQNVPIDPILIKSAKRVD

SEQ ID NO: 4555 - DNA, 573 bp, Dechloromonas aromatica RCB
  CDS (1)..(573): transl_table=11
atgttgaaaaaaatttctgttctcgccgctggcctgctggcttcagcaatggtgtgggctgccccaaccgtcgaaatgacgaccaatctgggcaagttcacgcttgaactgttcccggaaaaggccccgaaaacggttgaaatgtttctctataacgccaagcacggtttttatgaggcgaccatcttccaccgcgtgattgatggcttcatgatccagggtggcggtttcagccgggccatggaagagaaaaagaccctgaccccggcgctgcagaacgaagccaccaacggcctgaccaatgaccgtggcacggtggccatggcacgcacgcaggacccgcattcagctcgcgtccagttcttcatcaatctgaaggacaacgagttcctgaaccatcgcaactctaccgacccacgcggctggggctatgccgtctttggcaaagtgacccagggcatggatgtcgtcgacaagattgccaaggtgccgaccggcaacgctggctattacgaaaacgttccgacgacaccggttgtcattcagaacgtcaaaatcatctctgaaaaataa

SEQ ID NO: 4556 - protein, 190 aa, Dechloromonas aromatica RCB
MLKKISVLAAGLLASAMVWAAPTVEMTTNLGKFTLELFPEKAPKTVEMFLYNAKHGFYEATIFHRVIDGFMIQGGGFSRAMEEKKTLTPALQNEATNGLTNDRGTVAMARTQDPHSARVQFFINLKDNEFLNHRNSTDPRGWGYAVFGKVTQGMDVVDKIAKVPTGNAGYYENVPTTPVVIQNVKIISEK

SEQ ID NO: 4557 - DNA, 660 bp, Thiobacillus denitrificans ATCC 25259
  CDS (1)..(660): transl_table=11
atgaaccgcctgtcccgcttcttctcccccctcttcgtcgtcgcgctgatgctcggcatgtcgggctgcggcgccagcgagcccggcaagcagaacgtctcgaccgcaccggcggcagggcagcccgccaacccgcgcgtgctgatcgaaacctcgaaaggcaacatcacggtcgaactcttcgccgccaacgccccgcggtcgaccgccaatttcctcgactacgtcgggcagggtttctacgacggcacgatcttccaccgcgtgattccgggtttcatgatccagggcggcggcatgacggcggacatgaatgaaaaacccaacggcgagccgatcccgaacgaggccgacaacggcctcaagaacctgcgcgggacgcttgcgatggcgcgcaccggcgacccacactcggcgacctcgcagttcttcatcaacgtcgtcgacaacgcgctgctcaaccaccgcggcaagagcgtccagggctgggggtatgcggtcttcggccaggtcgtcgacggcatggacgtcgtcgacgcgatcgtcgcggtgccacgcggcccctggggaccgcacgacgacgtcccggtcgagccggtcgtgatgcggcgcgtgagcctgttgccgccagccgcgtcggcagcagccggcaagccataa

SEQ ID NO: 4558 - protein, 219 aa, Thiobacillus denitrificans ATCC 25259
MNRLSRFFSPLFVVALMLGMSGCGASEPGKQNVSTAPAAGQPANPRVLIETSKGNITVELFAANAPRSTANFLDYVGQGFYDGTIFHRVIPGFMIQGGGMTADMNEKPNGEPIPNEADNGLKNLRGTLAMARTGDPHSATSQFFINVVDNALLNHRGKSVQGWGYAVFGQVVDGMDVVDAIVAVPRGPWGPHDDVPVEPVVMRRVSLLPPAASAAAGKP

SEQ ID NO: 4559 - DNA, 564 bp, Pseudomonas fluorescens PfO-1
  CDS (1)..(564): transl_table=11
atgctgaaaaaactcgccctcgccgccggcaccgtgctgttcgctgccaacctgatggctgccacgccggcaaaagcaccgcacgtgctgctggacaccaccaacggccagatcgaaatcgagctggacccggtcaaggcgccgatcagtaccaagaatttcctcgagtacgtcgacagcggcttttacaacaacacgattttccaccgcgtgatcccgggcttcatggcccagggcggcggcttcacccagcagatgcagcaaaaagacaccaaggcgccgatcaagaacgaagccagcaacggcctgcataacgttcgtggcaccctgtcgatggcccgtacttccaacccggattcggccaccagccagttcttcatcaacgtcgccgacaacgctttcctcgatccgggccgtgacgccggttacgcggtgttcgccaaagtggtcaagggcatggacgtggtcgacatcatcgtcaactcccagaccaccaccaaacagggcatgcaaaacgtgccggtcgaccctgtgatcatcaagtcggccaagcgcatcgactaa

SEQ ID NO: 4560 - protein, 187 aa, Pseudomonas fluorescens PfO-1
MLKKLALAAGTVLFAANLMAATPAKAPHVLLDTTNGQIEIELDPVKAPISTKNFLEYVDSGFYNNTIFHRVIPGFMAQGGGFTQQMQQKDTKAPIKNEASNGLHNVRGTLSMARTSNPDSATSQFFINVADNAFLDPGRDAGYAVFAKVVKGMDVVDIIVNSQTTTKQGMQNVPVDPVIIKSAKRID

SEQ ID NO: 4561 - DNA, 600 bp, Geobacter metallireducens GS-15
  CDS (1)..(600): transl_table=11
atgttcaaacggattatcctggccctgacaatctgcggtcttttcagcgtgcttctcatcgccggcaatgccgatgccgcggcaaaggccgaaaaggccaagaaccccgtggttctcatggagacgaccctcggtcccgtgaagatcgagctctaccccgacaaggcgccggtatcggtgaagaacttcctcgactacgtgaacagcggcttctacaacggcaccatcttccaccgggtcatccccggcttcatggcccaggggggcggcttcaccgccgaccggaagcagaaggaaacgaaggcccccatcaagaacgaagccgctaacggcctcaagaacgaccgggggaccatcgccatggcccgcaccgccaaccccgacagcgccacggcccagttcttcatcaacgtggtgaacaacgacggtctcaaccgcccgaacccggacggcttcggctacgccgtcttcggcaaggtggtcgaagggatggacgtggtggacaaaatcgtcgccacccccacccagcgcctcaacatggtctttgccaacctcccggtgacgccggtggtcatcacgtcgatgaaggccgtcaaataa

SEQ ID NO: 4562 - protein, 199 aa, Geobacter metallireducens GS-15
MFKRIILALTICGLFSVLLIAGNADAAAKAEKAKNPVVLMETTLGPVKIELYPDKAPVSVKNFLDYVNSGFYNGTIFHRVIPGFMAQGGGFTADRKQKETKAPIKNEAANGLKNDRGTIAMARTANPDSATAQFFINVVNNDGLNRPNPDGFGYAVFGKVVEGMDVVDKIVATPTQRLNMVFANLPVTPVVITSMKAVK

SEQ ID NO: 4563 - DNA, 516 bp, Geobacter metallireducens GS-15
  CDS (1)..(516): transl_table=11
atgggcgaagaaaccaatccccgcgtcgtcatcgagacatcccaggggaacatcaccgtcgaactgttcaaggacaaggcccccatcaccgtccgcaacttcatctcctacgtgaaggaagggttctatgacggcctcatcttccaccgggtcatcaagaatttcatggtccaggggggcggactcgacgagaatatgcagcagaaaaaatacaaatttgccatcaagaacgaggccgccaacggtctcaagaacaacaggggaaccctggccatggcccggaccgccgtggtggacagcgccacctgccagtttttcatcaacctggtggataacgccttcctcgatcacaaggggaaaacccctgatatgttcggctatgccgtgttcggccaggttgtggaggggatggatgcggtggatgccattgcccaggtgaagaccggcaataaggccggccactccgatgtgccggtggagccggtattcatcaccaaggcttccgtggtggagtag

SEQ ID NO: 4564 - protein, 171 aa, Geobacter metallireducens GS-15
MGEETNPRVVIETSQGNITVELFKDKAPITVRNFISYVKEGFYDGLIFHRVIKNFMVQGGGLDENMQQKKYKFAIKNEAANGLKNNRGTLAMARTAVVDSATCQFFINLVDNAFLDHKGKTPDMFGYAVFGQVVEGMDAVDAIAQVKTGNKAGHSDVPVEPVFITKASVVE

SEQ ID NO: 4565 - DNA, 510 bp, Desulfovibrio desulfuricans G20
  CDS (1)..(510): transl_table=11
atgagcaatcccatggtgctgctggaaacatcttccggcgatatgctgatagaactctatgccgacaaggcccctgaaaccgtgaaaaactttctgcgctatgtggaggaaggtttttacgaaaacaccatcttccaccgtgtcattaaaaatttcatgattcagggcggtggcgttaccatgcgcatggaagacaaaaaaggccacgaacccattgccaacgaggcaggcaacggccttaaaaacgtccgcggcaccattgccatggcgcgcaccgcagccccccacagcgcgacttcacagtttttcatcaaccttgtggacaaccccgaccttgaccatcaggacgattccgatgccggattcggctactgcgttttcggtgccgtggttgaaggcatggacgtggttgatgccataggcaagctgaaaaccaaacccatgggtgagcacgatgatgttcccgtggattcggtggtcatcaccggcgcaggccttttcgacctgtag

SEQ ID NO: 4566 - protein, 169 aa, Desulfovibrio desulfuricans G20
MSNPMVLLETSSGDMLIELYADKAPETVKNFLRYVEEGFYENTIFHRVIKNFMIQGGGVTMRMEDKKGHEPIANEAGNGLKNVRGTIAMARTAAPHSATSQFFINLVDNPDLDHQDDSDAGFGYCVFGAVVEGMDVVDAIGKLKTKPMGEHDDVPVDSVVITGAGLFDL

SEQ ID NO: 4567 - DNA, 582 bp, Burkholderia xenovorans LB400
  CDS (1)..(582): transl_table=11
atgaaatggttgatgttggcgctcggcagcgccgccctgatcgcaaacgcacccgcctttgcccagtccggttcgcaagccgcgcatccgtccgtcctcttcaagacatcggaaggcgacatccgcgtcgagctgtatcctgagaaagcgcccaagacggtcgccaacttcctcgactacgtgaagtccggccagtacaacggcacgatttttcatcgcgtgattcgcggcttcatgatccagggcggcggctatacgcagagcttcgctgagaagcccacgcgcgcgccaatcgtgctcgaaagccgtaacggtctgaagaacacgaccggcacgctcgcgatggcgcgcaccagcgatccgaattcggccaccgcgcagttcttcatcaacacagtggacaacgccggcctcgactatccgaatccggacggcaacggctatgcggtgttcggcaaggtcacgggcggcatggacgtcgtgaagaagatcgaaggcacgcccaccacctcgcgcggcccgatgagcgacgtgccgcaaaaggcggtcgtgatcgagtcggcaacggtcgtcggcaagtaa

SEQ ID NO: 4568 - protein, 193 aa, Burkholderia xenovorans LB400
MKWLMLALGSAALIANAPAFAQSGSQAAHPSVLFKTSEGDIRVELYPEKAPKTVANFLDYVKSGQYNGTIFHRVIRGFMIQGGGYTQSFAEKPTRAPIVLESRNGLKNTTGTLAMARTSDPNSATAQFFINTVDNAGLDYPNPDGNGYAVFGKVTGGMDVVKKIEGTPTTSRGPMSDVPQKAVVIESATVVGK

SEQ ID NO: 4569 - DNA, 609 bp, Ralstonia metallidurans CH34
  CDS (1)..(609): transl_table=11
atgatcctttcccgccgcatcgtcctgaccggcctgatggccgccgccactgccctgtctccgctggccgcaatggcccagggcgccagccccgccaccgccgcgccgaagaccgagcgcgtgcagttcgtgacgagcgccggcaagttcactatcgagctgtaccccgatgccgccccgaagaccgtggccaacttcatgggctacgtaaaaagcggcttctattccggcacgatcttccatcgcgtgatcaacggcttcatggttcagggcggtggcttcgaccgcgacatgaaggaaaagccgacgctggcgccgatcgcgctggaatcgcagaacggcctgaagaacaaggccgggaccgtcgccatggcacgcacgtcgaacccgaactcggcaaccgcccagttcttcgtcaatgtggtggataatccgaacctcgactacccacagccggacggcaatggatatgccgtctttggcaaggtggtagagggaatggacacgatcgacaagatcaagaccacgccgactacggcgtatggcgccatgcgcaacgtgcctgccgcgccgatcgtgatcgaatcggccaccgtggtcaccaagtga

SEQ ID NO: 4570 - protein, 202 aa, Ralstonia metallidurans CH34
MILSRRIVLTGLMAAATALSPLAAMAQGASPATAAPKTERVQFVTSAGKFTIELYPDAAPKTVANFMGYVKSGFYSGTIFHRVINGFMVQGGGFDRDMKEKPTLAPIALESQNGLKNKAGTVAMARTSNPNSATAQFFVNVVDNPNLDYPQPDGNGYAVFGKVVEGMDTIDKIKTTPTTAYGAMRNVPAAPIVIESATVVTK

SEQ ID NO: 4571 - DNA, 564 bp, Pseudomonas aeruginosa UCBPP-PA14
  CDS (1)..(564)
atgctcaaacgtctcctgatcgccacctgcaccctgctcttcgccggttccctgctggccgccacgcctgccgccaagccgcacgtcctgatcgccaccagcctcggcgagatcgaggtagaactcgatccgaccaaggcgccgatcagcgtgaagaacttcctcgagtacgtcgacagcggctactacgacggcaccctgttccaccgcgtgatcccgggcttcatggtgcagaccggcggcttcagcgccggcatgcaggagaagaagacccgcgcaccgatcaagaacgaggccgacaacggcctgctcaacgagcgcggcaccctcgccatggcccgcaccggcgtggtcgattcggccaccagccagttcttcatcaacctgaccgacaacgacttcctcaaccatggtgcccgcgacttcggctatgcggtgttcggcaaggtggtgcgtggcatgggcgtggtcgaccagatcgccaaggttcccaccacccgccgcaacggcttcgccgacgtgccgagcgacgacgtggtgatcctgtccgccaaacgcctctga

SEQ ID NO: 4572 - protein, 187 aa, Pseudomonas aeruginosa UCBPP-PA14
MLKRLLIATCTLLFAGSLLAATPAAKPHVLIATSLGEIEVELDPTKAPISVKNFLEYVDSGYYDGTLFHRVIPGFMVQTGGFSAGMQEKKTRAPIKNEADNGLLNERGTLAMARTGVVDSATSQFFINLTDNDFLNHGARDFGYAVFGKVVRGMGVVDQIAKVPTTRRNGFADVPSDDVVILSAKRL

SEQ ID NO: 4573 - DNA, 576 bp, Burkholderia vietnamiensis G4
  CDS (1)..(576): transl_table=11
atgaaacgtctgttgctggcgcttggcggcgccgcccttgtcgcgaccgcgcctgcttttgcgcaatcggctaccgcgcaccccgtcgtgcagctgaagacctcgcagggcgacattcgcgtcgagctctacccggagaaggcgccgaaaacggtcgccaacttcctcgattacgtgaaggccggccaatacaacggcacgatcttccatcgcgtgatcaagggcttcatgatccagggcggcggctacaagaccaacttcgaggaaaagccgacgcgtgcgccgatcccgctggaaagccgcaatggtctgaagaacctgacgggcacgatcgcgatggcgcgcaccagcgatccgaattcggccaccgagcagttcttcatcaataccgtcgacaacagcggcctcgactacccgaacccggacggcaacggctatgccgtgttcggcaaggtcgtgtccggcctcgacgtcgtgaagaagatcgaaggcgtggccacgacctcgcgcggcccgatgcaggacgtgccggcccagccggtcgtgatcgaatcggccagcgtcgtctcgaaataa

SEQ ID NO: 4574 - protein, 191 aa, Burkholderia vietnamiensis G4
MKRLLLALGGAALVATAPAFAQSATAHPVVQLKTSQGDIRVELYPEKAPKTVANFLDYVKAGQYNGTIFHRVIKGFMIQGGGYKTNFEEKPTRAPIPLESRNGLKNLTGTIAMARTSDPNSATEQFFINTVDNSGLDYPNPDGNGYAVFGKVVSGLDVVKKIEGVATTSRGPMQDVPAQPVVIESASVVSK

SEQ ID NO: 4575 - DNA, 597 bp, Magnetococcus sp. MC-1
  CDS (1)..(597): transl_table=11
atgttttttactcgattcttccaaccttcggcatggtggatgacgctgggactgctgttagtcgtcacctctccaaccatggcgggtgcgcaaggcaaaggagccaacccggtgattgtaaagctttctacctctatgggcgacatcaaactacagttggatgccgaaaaagcccccattagcactgaaaactttctcagctatgtgaaaaagggccactatgacggcaccatctttcaccgtgtcattcccggctttatggtgcagggtggtggcatggatgccaatatgaaagagaaatccaccgatgcccccattaaaaacgaggccgataatggtttagtcaataagcgcggtagcgtcgctatggcccgcacgcaggttgttgacagcgccaccagccagttttttatcaacgtcaacaacaacgatttcctcaaccatggtggccgtgattttggctatgcggtgtttggtgaggtgattgaaggcatggatgtggtggatcaaatcacggcgcagcccacaggcaacaagggctaccaccaagatgttcccaccacccccattaccattaatagcgccacgcaggagtaa

SEQ ID NO: 4576 - protein, 198 aa, Magnetococcus sp. MC-1
MFFTRFFQPSAWWMTLGLLLVVTSPTMAGAQGKGANPVIVKLSTSMGDIKLQLDAEKAPISTENFLSYVKKGHYDGTIFHRVIPGFMVQGGGMDANMKEKSTDAPIKNEADNGLVNKRGSVAMARTQVVDSATSQFFINVNNNDFLNHGGRDFGYAVFGEVIEGMDVVDQITAQPTGNKGYHQDVPTTPITINSATQE

SEQ ID NO: 4577 - DNA, 630 bp, Alkalilimnicola ehrlichei MLHE-1
  CDS (1)..(630): transl_table=11
atggcgttacgctcagcccacaaactgatcgctttcatgcttttcgtgattttcgccgtcctgttggtcgtcggcgccaaggccgtcggcggtgaacgggatgatcaggacagccagcacgcgcaaatggagacccccatggttgtattcgagaccagccacggcaacctcaccctggaactctttccggacgaggcccccatcaccgttgagaatttcctgcagtacgtggatgacgggttctacgacggcaccatcttccaccgggttatccccggtttcgtggtgcagggtggcggtttcgacgaggagttccggcagaaggagacccgtgccccgatcaagaacgaggccgataacggcctgcggaacgaacgcggcacgctgtcgatggcccggacccagcagaaagacagcgccacctcccagttcttcatcaacctggccgacaacgcctttctcgaccacggtacccgcgacttcggttacgccgtcttcgcccgggtggccgagggcatggaggtggtcgacaagatcgcccaagtgcgcaccggcaaccggggtatgcaccaggacgtcccggtggaggatatcgtggtcaagcgggcctaccgccagggcgacgactaa

SEQ ID NO: 4578 - protein, 209 aa, Alkalilimnicola ehrlichei MLHE-1
MALRSAHKLIAFMLFVIFAVLLVVGAKAVGGERDDQDSQHAQMETPMVVFETSHGNLTLELFPDEAPITVENFLQYVDDGFYDGTIFHRVIPGFVVQGGGFDEEFRQKETRAPIKNEADNGLRNERGTLSMARTQQKDSATSQFFINLADNAFLDHGTRDFGYAVFARVAEGMEVVDKIAQVRTGNRGMHQDVPVEDIVVKRAYRQGDD

SEQ ID NO: 4579 - DNA, 612 bp, Oceanobacter sp. RED65
  CDS (1)..(612): transl_table=11
atgcgtttgatactagcttttttactttcaatgtttagttttgctgtgatggccgagtcacaaagcgagccgtctgcagagcaagcagacgtagcgacaccttacgtcacaatgaaaaccaatatgggcgacattattctggaactcaaccctgccaaagcacccataagtgtggctaactttttagagtatgcgcaaaacggttattacgatggcaccttattccaccgagtaattccagactttatgattcaagccggagggttctttactccatctatgattcgtaaagccaccaatgagcccattaaaaacgaagcggataatggcctgtttaataatcgtggcaccatcgcaatggctcgcactgcggctgttgatagcgccaccagtcagttctttattaacgtaaaaaacaatcacttcctcaatcatggattccgtgattttggttatgccgtgttcggaaaggtgatttcaggcatagaagtggtcgatgctatcagtaccgtcgaaacgacgcgtaagagtggccaccagaacgttccagtagaacctgtcgctattgaaagtgttaccgtcagctacgacaagcctgtcgcgacgaactaa

SEQ ID NO: 4580 - protein, 203 aa, Oceanobacter sp. RED65
MRLILAFLLSMFSFAVMAESQSEPSAEQADVATPYVTMKTNMGDIILELNPAKAPISVANFLEYAQNGYYDGTLFHRVIPDFMIQAGGFFTPSMIRKATNEPIKNEADNGLFNNRGTIAMARTAAVDSATSQFFINVKNNHFLNHGFRDFGYAVFGKVISGIEVVDAISTVETTRKSGHQNVPVEPVAIESVTVSYDKPVATN

SEQ ID NO: 4581 - DNA, 573 bp, Candidatus Kuenenia stuttgartiensis
  CDS (1)..(573): transl_table=11
ttgaaaacaatacttatttgtgctgccattgcaataacctgcttcatacaaaatgcccgggcaaatacggtttatccgaaagttttgctcgaaaccaatcagggagaaatagttctagagctttatcccgaaaaagccccggagacggtagaaaattttctcaaatatgtccgggatggtttttacaacggcacaatctttcatcgtgtaataaagggatttatgatacagggcgggggtatgaccgaaggtatgagtaagaaaaccacactggatcccgttaaaaatgaggcgtataacggactcaaaaatttgaggggtaccgtagcaatggcccgtacgatggacccgcactctgccactgcacagtttttcattaatacggtggataatggttttcttgattttaagggccaaactgcaacagggtggggatattgtgtctttggaaaagtgataaaaggcatggaagtggttgatgctattgaacaaatgcctaccacaaaaaaagagggacatagcgatgttccccgctctacagtagttctgaaaaaagccattgagataaaataa

SEQ ID NO: 4582 - protein, 190 aa, Candidatus Kuenenia stuttgartiensis
MKTILICAAIAITCFIQNARANTVYPKVLLETNQGEIVLELYPEKAPETVENFLKYVRDGFYNGTIFHRVIKGFMIQGGGMTEGMSKKTTLDPVKNEAYNGLKNLRGTVAMARTMDPHSATAQFFINTVDNGFLDFKGQTATGWGYCVFGKVIKGMEVVDAIEQMPTTKKEGHSDVPRSTVVLKKAIEIK

SEQ ID NO: 4583 - DNA, 549 bp, Oryza sativa
  CDS (1)..(549)
atgttcaatgaaaaacccccaccggaagagcttttggctgtatcagatttagggaagactgctacaacatcactccctgataatttggtgatgcatacttctatgggtgatattcacttgagattatatccagaagagtgtccaaaaactgtggagaatttcactacccattgccggaatggttattatgataatctcatatttcatcgtgtgattaaaggctttatgattcagactggagaccctttgggggatggcactggtgggcaatcaatctggggaagggagttcgaagatgaatttcacaaaagcttgagacatgataggccttttactctttcaatggccaatgctggaccaaataccaatgggtcccaattctttatcacaactgtggcaactccatggctagacaacaaacacacagtgtttggtagagttgtgaaagggatggatgttgttcagcaaatcgagaaggtcaagaccgacaagaatgacaaaccatatcaggatgtgaagatcttgaacgttacagttccaaagacataa

SEQ ID NO: 4584 - protein, 182 aa, Oryza sativa
MFNEKPPPEELLAVSDLGKTATTSLPDNLVMHTSMGDIHLRLYPEECPKTVENFTTHCRNGYYDNLIFHRVIKGFMIQTGDPLGDGTGGQSIWGREFEDEFHKSLRHDRPFTLSMANAGPNTNGSQFFITTVATPWLDNKHTVFGRVVKGMDVVQQIEKVKTDKNDKPYQDVKILNVTVPKT

SEQ ID NO: 4585 - DNA, 549 bp, Pseudomonas citronellolis
  CDS (1)..(549): transl_table=11
atgaaaaaactattcctcgcaaccagtttggttttagcaagtggtcagttatttgcaaatacaattattgatatgaaaacctcaatggggaatattgaaattgaactttttaatgataaagcacccgtatcagcaaaaaattttgagaattatgtaaaaagtaacttttatgctggaaccatttttcatcgagtcatcccaggatttatgattcaaggtgggggaatggatgccaatatgattgagagggcaactaaatctccaattattaatgaggcaaataatggtctcaaaaatgcacggggaactttagcaatggcacgcacgagtgatcctaattctgccacgagtcaattttttattaatgttgctgataatagcttcttgaatcgttcagctatggatgcaggttatgccgtatttggtaaagtcaccaaaggaatgaatgttgttgataaaatcgtaaatgtgcctacaggtaattatggaatgcatcaaaatgtaccaaagcaaccgattaaaattatcagtgtgcaaataaagaaataa

SEQ ID NO: 4586 - protein, 182 aa, Pseudomonas citronellolis
MKKLFLATSLVLASGQLFANTIIDMKTSMGNIEIELFNDKAPVSAKNFENYVKSNFYAGTIFHRVIPGFMIQGGGMDANMIERATKSPIINEANNGLKNARGTLAMARTSDPNSATSQFFINVADNSFLNRSAMDAGYAVFGKVTKGMNVVDKIVNVPTGNYGMHQNVPKQPIKIISVQIKK

SEQ ID NO: 4587 - DNA, 624 bp, Neurospora crassa
  CDS (1)..(624)
atgttcagcttgcggcgactcctcctcgccgccacgctgttcctcggcgcgatgctgctctttgcgcagtccgccgaggcagccaagggccccaagatcacccacaaggtctacttcgacattgagcagggcgacaagcccctcggccgcatcgttatgggtctctatggcaagaccgtccccaagaccgctgaaaacttccgcgctcttgccactggcgagaagggcttcggttatgagggctctaccttccaccgtgttatcaagcagttcatgatccagggtggtgacttcaccaagggcgatggcaccggtggcaagtccatctatggtgacaagttccccgatgagaacttcaagctcaagcactccaagaagggtctcctctcaatggccaacgctggcaaggataccaacggctcccagttcttcattaccactgtcatcacctcttggctcgatggcaagcacgtcgtcttcggcgaggtcctcgagggctacgatgtcgtcgagaagattgagaacaccaagaccggtcctcgcgatgctcctgctgagcctatcaagatcgccaagagtggcgagcttgaggttccccctgaaggtatccatgtggagctttaa

SEQ ID NO: 4588 - protein, 207 aa, Neurospora crassa
MFSLRRLLLAATLFLGAMLLFAQSAEAAKGPKITHKVYFDIEQGDKPLGRIVMGLYGKTVPKTAENFRALATGEKGFGYEGSTFHRVIKQFMIQGGDFTKGDGTGGKSIYGDKFPDENFKLKHSKKGLLSMANAGKDTNGSQFFITTVITSWLDGKHVVFGEVLEGYDVVEKIENTKTGPRDAPAEPIKIAKSGELEVPPEGIHVEL

SEQ ID NO: 4589 - DNA, 606 bp, Arabidopsis thaliana
  CDS (1)..(606)
atggcgaaagcaagctttattctactcggaactctcttcctcttcggagccatagcttcaattcaggcaaaagaagatctcaaggaggttactcacaaggtttacttcgatgtagagatcgacggcaaatccgctggtcgcgttgttataggactatttggcaaggcagttcctaaaactgcagaaaacttcagagctttgtgcacaggggagaaaggtgtagggaagagtgggaaacctctacactacaagggaagcaagttccatcgaatcattcccagctttatgatccagggaggtgacttcacgcatgggaacggtatgggtggagaatcaatctatggtcagaagtttgctgatgagaacttcaagctgaagcacactggaccaggtgtactttcaatggcgaactcgggagaagacacaaatggttcgcagttttttatcacaacggtgacaacaagctggttagatggaaggcatgtggtgtttgggaaagtggtgcaaggaatggatgtagtttataagattgaagctgagggcaaacaaagcggaactcctaagagcaaagtcgtaattgcagacagtggagaacttcctctctaa

SEQ ID NO: 4590 - protein, 201 aa, Arabidopsis thaliana
MAKASFILLGTLFLFGAIASIQAKEDLKEVTHKVYFDVEIDGKSAGRVVIGLFGKAVPKTAENFRALCTGEKGVGKSGKPLHYKGSKFHRIIPSFMIQGGDFTHGNGMGGESIYGQKFADENFKLKHTGPGVLSMANSGEDTNGSQFFITTVTTSWLDGRHVVFGKVVQGMDVVYKIEAEGKQSGTPKSKVVIADSGELPL

SEQ ID NO: 4591 - DNA, 519 bp, Lupinus luteus
  CDS (1)..(519)
atgtccaaccctaaggttttctttgatatggccatcgccggcaaccccgccggccgcatcgtcatggagctgtacgccgacaccacccctcgcaccgccgagaacttccgtgccctctgcaccggcgagaagggagtcggccgcagcggcaagccactccattacaagggatccaccttccaccgcgtgatccctaacttcatgtgccagggcggtgatttcaccgccggaaacggtaccggagccgaatcgatctacggagctaagttcgctgatgagaacttcatcaagaggcacaccggtcccgggatcttgtccatggcgaatgctggagctggaaccaatggatctcagttcttcatctgtacggagaagacagagtggctcgatggaaagcacgttgtgtttggtaaagtgattgaaggaatgaacgttgtgagggacatagagaaggttggatctggatctggtaaaacctcgaggcctgttactatcgctgattgcggtcaactctcttag

SEQ ID NO: 4592 - protein, 172 aa, Lupinus luteus
MSNPKVFFDMAIAGNPAGRIVMELYADTTPRTAENFRALCTGEKGVGRSGKPLHYKGSTFHRVIPNFMCQGGDFTAGNGTGAESIYGAKFADENFIKRHTGPGILSMANAGAGTNGSQFFICTEKTEWLDGKHVVFGKVIEGMNVVRDIEKVGSGSGKTSRPVTIADCGQLS

SEQ ID NO: 4593 - DNA, 567 bp, Acinetobacter sp
  CDS (1)..(567): transl_table=11
atgcttaaacgagtcgcgatagttctgggtggattattgattagtgcacatgctttagcaaataccatggttgagatgaaaaccaatctgggaaatatagaaattgagctttacaacaataaagcaccgatctcagcgaaaaactttgaaagctatgtcaaaaataatttctacaatggcactatttttcatcgcgtcattccaaatttcatgattcaaggaggtggttttgaaaccaatatgaaagagaaggcgactgctgcacctatcaaaaatgaggcgtcaaatggcttggcaaatactcgcggcacattggcaatggcaagaaccagtaatcccgattcagcaaccagccagttttttatcaatgttgcagataacaacttcttaaatgcttcacgtacagatgcaggttatgcagtatttggcaaggtaattaaaggcatggatgtcgtcgataaaattgcgaatgtacctacaagtacctatggtatgcatcaaaatgtacctaaacaacctgtgaaaattataagtgtacaaattaagagcattaatacagcaaaataa

SEQ ID NO: 4594 - protein, 188 aa, Acinetobacter sp
MLKRVAIVLGGLLISAHALANTMVEMKTNLGNIEIELYNNKAPISAKNFESYVKNNFYNGTIFHRVIPNFMIQGGGFETNMKEKATAAPIKNEASNGLANTRGTLAMARTSNPDSATSQFFINVADNNFLNASRTDAGYAVFGKVIKGMDVVDKIANVPTSTYGMHQNVPKQPVKIISVQIKSINTAK

SEQ ID NO: 4595 - DNA, 573 bp, Dickeya dadantii
  CDS (1)..(573): transl_table=11
atgtcaaaacgtatattggcaccggtagtaaccgtactctcgctgaccgcattttcaccggcttttgccgcaaccacgtccacccatgtgttgctgaccacctctgcgggcaacattgaactggctctggatgaccaaaaagcgccggttttcgtgaaaaactttgttgattatgtcaacagtgggttttacaacggcaccattttccaccgtgtcattccgggattcatggttcagggtggtggtttcagcagcgatatgaaacagaaagccaccaatccgccggtcaagaatgaagcggacaatggcctgcgtaacctgcgcggcaccatttccatggcgcgcaccagcgaaaaagacagcgctaccagccagttcttcatcaacgtcgcggacaacgcttttctggatcacggccagcgtgattttggctacgccgtattcggtaaagtggtgaaaggcatggaagtggctgacaagatttctcaggtccagacagaaaatgtagggccatatcagaacgtgccttccaaaccgattgtgattcagtcggcgaaaatcattaagaaataa

SEQ ID NO: 4596 - protein, 190 aa, Dickeya dadantii
MSKRILAPVVTVLSLTAFSPAFAATTSTHVLLTTSAGNIELALDDQKAPVFVKNFVDYVNSGFYNGTIFHRVIPGFMVQGGGFSSDMKQKATNPPVKNEADNGLRNLRGTISMARTSEKDSATSQFFINVADNAFLDHGQRDFGYAVFGKVVKGMEVADKISQVQTENVGPYQNVPSKPIVIQSAKIIKK

SEQ ID NO: 4597 - DNA, 564 bp, Pseudomonas aeruginosa
  CDS (1)..(564)
atgctcaaacgtctcctgatcgccgcctgcaccctgctcttcgccggttccctgctggccgccacgcctgccgccaagccgcacgtcctgatcgccaccagcctcggcgagatcgaggtagaactcgatccggccaaggcgccgatcagcgtgaagaacttcctcgagtacgtcgacagcggctactacgacggcaccctgttccaccgcgtgatcccgggcttcatggtgcagaccggcggcttcagcgccggcatgcaggagaagaagacccgtgcaccgatcaagaacgaggccgacaacggcctgctcaacgagcgcggcaccctcgccatggcccgtaccggagtggtcgattcggccaccagccagttcttcatcaacctgaccgacaacgacttcctcaaccatggtgcccgcgacttcggctatgccgtgttcggcaaggtggtgcgtggcatgggcgtggtcgaccagatcgccaaggttcccaccacccgccgcaacggcttcgccgacgtgccgagcgacgacgtggtgatcctgtccgccaaacgcctctga

SEQ ID NO: 4598 - protein, 187 aa, Pseudomonas aeruginosa
MLKRLLIAACTLLFAGSLLAATPAAKPHVLIATSLGEIEVELDPAKAPISVKNFLEYVDSGYYDGTLFHRVIPGFMVQTGGFSAGMQEKKTRAPIKNEADNGLLNERGTLAMARTGVVDSATSQFFINLTDNDFLNHGARDFGYAVFGKVVRGMGVVDQIAKVPTTRRNGFADVPSDDVVILSAKRL

SEQ ID NO: 4599 - DNA, 495 bp, Brassica napus
  CDS (1)..(495)
atgacggcgagacctgaaggaagtcccccggaggttacacttgaaacctccatgggtccgttcaccgtcgagatgtattacaaacactccccgagaacttgccggaacttcgtggagctatcaaggagaggttactatgacaacgttctctttcacaggatcatcaaggatttcatcgtgcaaggtggagatcctactggaactggaaggggtggccaatccatttacggttccaagtttgaggacgagataaagcctgagttgaagcacacaggagctgggattttgtcaatggcaaacgctggtcccaacaccaacgggagtcagttcttcatcactttagctccggcaccgtccttggatggaaagcacacgatatttggcagagtatgccgtggtatggaggtgatcaagaggctcggtagtgtccaaaccgataacaccgacaggccaatccatgaagtgaagattctgagggccaaagtggttgattag

SEQ ID NO: 4600 - protein, 164 aa, Brassica napus
MTARPEGSPPEVTLETSMGPFTVEMYYKHSPRTCRNFVELSRRGYYDNVLFHRIIKDFIVQGGDPTGTGRGGQSIYGSKFEDEIKPELKHTGAGILSMANAGPNTNGSQFFITLAPAPSLDGKHTIFGRVCRGMEVIKRLGSVQTDNTDRPIHEVKILRAKVVD

SEQ ID NO: 4601 - DNA, 483 bp, Brassica napus
  CDS (1)..(483)
atgtcagtaacattgcacacgaatctgggggatataaagtgcgagatcttctgtgacgaggttcccaagagtgccgagaactttctggcgctatgtgcaagtgagtattacgatgggacaatctttcacaggaatatcaaaggcttcatgattcaaggcggagacccaaccggaactgggaaaggaggaactagcatctggggaaagaaattcaatgacgagattcgtgactccctcaagcacaatgcaagagggatgctgtcgatggcaaacagtggcccaaacacaaacggaagccagttcttcattacctatgcaaaacaacctcatctcaatggactatacaccatctttggcaaagtcattcatggcttcgaagtacttgacatcatggaaaagactcaaacaggtgcgggagataggccgcttgctgagataaggctaaaccgtgtgacaatccacgccaatccacttgctggttaa

SEQ ID NO: 4602 - protein, 160 aa, Brassica napus
MSVTLHTNLGDIKCEIFCDEVPKSAENFLALCASEYYDGTIFHRNIKGFMIQGGDPTGTGKGGTSIWGKKFNDEIRDSLKHNARGMLSMANSGPNTNGSQFFITYAKQPHLNGLYTIFGKVIHGFEVLDIMEKTQTGAGDRPLAEIRLNRVTIHANPLAG

SEQ ID NO: 4603 - DNA, 606 bp, Brassica napus
  CDS (1)..(606)
atggcgaggtcagtgaagctgcttctatggagtcttcttcttctgggaaccctaaccgctattcaggccaaaaagtcaaaggaaaagatcacaaacaaggtttatttcgatgtcgaaattaatggcaaagaagcaggtcgtattgtcatgggtctatttggcaagacagtccccaaaactgctgagaatttccgagctttgtgcacaggggagaaaggagtaggtaagaaagggaaggcactacattacaaggggagttccttccataggatcataccaagctttatgctccagggaggcgactttactgatggaaatggtatgggaggtgaatctatttatggcgagaagtttgctgatgagaacttcaaactcaagcatactggtccagggtatctatcaatggcaaacgctggtgaagacaccaacggatcacagtttttcatcacaacagtaacaacaagctggttggacgggaggcacgtagtgttcgggaaggtagttacaggaatggacgtggtgtacaagatcgaagctgaggggagtcagagtggaactcctaagagtaaagttgtgattgttgacagtggcgagcttcctctgtaa

SEQ ID NO: 4604 - protein, 201 aa, Brassica napus
MARSVKLLLWSLLLLGTLTAIQAKKSKEKITNKVYFDVEINGKEAGRIVMGLFGKTVPKTAENFRALCTGEKGVGKKGKALHYKGSSFHRIIPSFMLQGGDFTDGNGMGGESIYGEKFADENFKLKHTGPGYLSMANAGEDTNGSQFFITTVTTSWLDGRHVVFGKVVTGMDVVYKIEAEGSQSGTPKSKVVIVDSGELPL

SEQ ID NO: 4605 - DNA, 519 bp, Brassica napus
  CDS (1)..(519)
atggcgtttcctaaagttttcttcgacatgaccgtcgacggcaagcccgcgggaaggatcgtgatggagctgtacaccgacaagactcccaagactgctgagaatttcagagctctctgcacgggtgagaagggagtcgggagcaaaggcaagcctcttcacttcaaggggtcttccttccaccgcgtgatccctaacttcatgtgtcagggaggagatttcacggccgggaacgggacgggaggcgagtccatctacggggagaagttcgccgacgagaatttcgagaggaagcacaccggtcctgggatcctctccatggccaacgctggtcccaacaccaacgggtctcagttctttatctgcactgttaagaccgattggcttgatggtaagcatgtggtgttcgggcaggtggtggaagggttagacgtggtgaaggcgatcgagaaggtggggtcggcttctggaaagccgtcgaagccggtggtcgtggccgactgtggtcagctctcttag

SEQ ID NO: 4606 - protein, 172 aa, Brassica napus
MAFPKVFFDMTVDGKPAGRIVMELYTDKTPKTAENFRALCTGEKGVGSKGKPLHFKGSSFHRVIPNFMCQGGDFTAGNGTGGESIYGEKFADENFERKHTGPGILSMANAGPNTNGSQFFICTVKTDWLDGKHVVFGQVVEGLDVVKAIEKVGSASGKPSKPVVVADCGQLS

SEQ ID NO: 4607 - DNA, 483 bp, Brassica napus
  CDS (1)..(483)
atgtcagtaacattgcacacgaatctgggggatataaagtgcgagatcttctgtgacgaggttcccaagagtgccgagaactttctggcgctatgtgcaagtgggtattacgatgggacaatctttcacaggaatatcaaaggcttcatgattcaaggcggagacccaaccggaactgggaaaggaggaactagcatctggggaaagaaattcaatgacgagattcgtgactccctcaagcacaatgcaagagggatgctgtcgatggcaaacagtggcccaaacacaaacggaagccagttcttcattacctatgcaaaacaacctcatctcaatggattatataccatctttggcaaagtcattcatggcttcgaagtgcttgacatcatggaaaagactcaaacaggtgcgggggataggccgcttgctgagataaggctaaaccgtgtgacaatccacgccaatccacttgctggttaa

SEQ ID NO: 4608 - protein, 160 aa, Brassica napus
MSVTLHTNLGDIKCEIFCDEVPKSAENFLALCASGYYDGTIFHRNIKGFMIQGGDPTGTGKGGTSIWGKKFNDEIRDSLKHNARGMLSMANSGPNTNGSQFFITYAKQPHLNGLYTIFGKVIHGFEVLDIMEKTQTGAGDRPLAEIRLNRVTIHANPLAG

SEQ ID NO: 4609 - DNA, 519 bp, Brassica napus
  CDS (1)..(519)
atggcgtttcctaaagttttcttcgacatgaccgttgacggcaagcccgcgggaaggatcgtgatggagctgtacaccgacaagactcccaagactgccgagaatttcagagctctctgcacgggtgagaagggtgtcgggagcaaaggcaagcctcttcacttcaagggatcttccttccaccgtgtgatccctaactttatgtgtcagggaggcgatttcacggccgggaacgggacgggaggcgagtccatctacggtgagaagttcgccgacgagaatttcgagaggaagcacaccggtcctgggatcctctccatggccaacgctggtcccaacaccaacgggtctcagttctttatctgcactgttaagaccgattggcttgatggtaagcatgtggtgttcgggcaggtggtggaagggttagacgtggtgaaggcgatcgagaaggtggggtcggcttctggaaagccgtcgaagccggtggtcgtggccgactgtggtcagctctcttag

SEQ ID NO: 4610 - protein, 172 aa, Brassica napus; identical to SEQ ID NO: 4606

SEQ ID NO: 4611 - DNA, 606 bp, Brassica napus
  CDS (1)..(606)
atggcgaggtcagtgaagctgcttctatggagtcttcttcttctgggaaccctatgcactattcaggccaaaaagtcaaaggaaaagatcacacacaaggtttatttcgatgtcgaaattaatggcaaagaagccggtcgtattgtcatgggtctatttggcaagacagtccccaaaactgctgagaatttccgagctttgtgcacaggggagaaaggaatgggtaagaaagggaaggctctacattacaaggggagttccttccataggatcataccaagctttatgctccagggaggcgactttactgatggaaatggtatgggaggtgaatctatttatggcgagaagtttgctgatgagaacttcaaactcaagcatactggtccagggtatctatcaatggcaaacgctggtgaagacaccaacggatcacagtttttcatcacaacagtaacaacaagctggttggacgggaggcacgtagtgttcgggaaggtagttacaggaatggacgtggtgtacaagatcgaagctgaggagagtcagagtggaactcctaagagtaaagttgtgattgttgacagtggcgagcttcctctgtaa

SEQ ID NO: 4612 - protein, 201 aa, Brassica napus
MARSVKLLLWSLLLLGTLCTIQAKKSKEKITHKVYFDVEINGKEAGRIVMGLFGKTVPKTAENFRALCTGEKGMGKKGKALHYKGSSFHRIIPSFMLQGGDFTDGNGMGGESIYGEKFADENFKLKHTGPGYLSMANAGEDTNGSQFFITTVTTSWLDGRHVVFGKVVTGMDVVYKIEAEESQSGTPKSKVVIVDSGELPL

SEQ ID NO: 4613 - DNA, 495 bp, Glycine max
  CDS (1)..(495)
atgtgggcaagcgcagaaggtggtgctccggaggttactctggaaacttccatgggttctttcaccgttgagctgtactacaagcatgcgccgaggacttgtaggaacttcattgaactgtctcgccgaggttactacgacaacgttaaattccacaggatcatcaaggacttcatagtacaaggtggggatcccactggaacaggaaggggaggagaatccatatatggtgcaaagtttgaagatgagataaaacgagagttgaagcacactggagctggaatcttatccatggcaaatgctggcccaaataccaatggtagtcagttctttattactctggcaccatgcccctctctcgatggaaaacacacaatatttggaagagtgtgtagggggatggaaattatcaaaagacttggcagcgtccaaacagataacaacgacaggcccatccatgacgttaagatactacgtacctcagtcaaggattag

SEQ ID NO: 4614 - protein, 164 aa, Glycine max
MWASAEGGAPEVTLETSMGSFTVELYYKHAPRTCRNFIELSRRGYYDNVKFHRIIKDFIVQGGDPTGTGRGGESIYGAKFEDEIKRELKHTGAGILSMANAGPNTNGSQFFITLAPCPSLDGKHTIFGRVCRGMEIIKRLGSVQTDNNDRPIHDVKILRTSVKD

SEQ ID NO: 4615 - DNA, 783 bp, Glycine max
  CDS (1)..(783)
atggcgtctccattatcagctcaattggttcaatgtcagaactcacttccacctcttcagggtaattttagccaagatgtgtctaaggttcaaaggtcgcgtgtggtatgttacggtaccagatcaccgcttggttattatggtaaagcattgacatcaagatcacataacgccctgaggttttctgtcacgcgacaatctgaagcacggtcaattggatataggagaatgacatgtgtcaatgctgcagacaatgttgtagagcttcaagccaaggtgacaaccaagtgtttctttgatgtagaagttgggggtgaacctgtgggcaggattgttttgggcctatttggagaggttgttcctaaaaccgttgaaaatttccgtgctttgtgcacaggtgagaaaggatatggttacaaaggaagctccttccatcgtataatcaaagatttcatgattcagggaggagactttacagaaggaaatggaactggtggaattagtatctatggtcctagttttaaagatgagagttttgccttaaagcatgtcggtcctggagttctgagcatggcaaatgctggtcctaatactaatgggagtcaatttttcatttgcactgtaaagactccatggctagacaatcgtcacgttgtatttggacatatcattgatggaatggatgttgtgaagacacttgaatcccaggagacgagtaggttagatgtccctcgaaagccttgcagaattgttaattgcggagaactgcctatagagggttga

SEQ ID NO: 4616 - protein, 260 aa, Glycine max
MASPLSAQLVQCQNSLPPLQGNFSQDVSKVQRSRVVCYGTRSPLGYYGKALTSRSHNALRFSVTRQSEARSIGYRRMTCVNAADNVVELQAKVTTKCFFDVEVGGEPVGRIVLGLFGEVVPKTVENFRALCTGEKGYGYKGSSFHRIIKDFMIQGGDFTEGNGTGGISIYGPSFKDESFALKHVGPGVLSMANAGPNTNGSQFFICTVKTPWLDNRHVVFGHIIDGMDVVKTLESQETSRLDVPRKPCRIVNCGELPIEG

SEQ ID NO: 4617 - DNA, 483 bp, Glycine max
  CDS (1)..(483)
atgtcggtgactctgcacacaaacctaggcgacatcaagtgtgaaatcttctgcgacgaggtccctaaaacctccgagaattttttagcgctatgtgcaagtggttactatgatgggactatatttcaccgcaacattaagggttttatgattcaaggtggagatccaactggaactggcaaagggggaaccagtatatggggcaagaaatttaacgatgagataagagaatctctgaagcacaatgcaagaggaatattagcaatggccaatagtggtccaaatactaatggaagccaatttttcttgacttatgcaaagcagcctcatttaaatgggctatacaccgtgtttggcaaagtaattcatggatttgaagttcttgatctcatggagaagacacaaacaggggcaggggaccgaccgcttgcagagataaggctcaatcgtgtaacaatacatgctaatccacttgctggttag

SEQ ID NO: 4618 - protein, 160 aa, Glycine max
MSVTLHTNLGDIKCEIFCDEVPKTSENFLALCASGYYDGTIFHRNIKGFMIQGGDPTGTGKGGTSIWGKKFNDEIRESLKHNARGILAMANSGPNTNGSQFFLTYAKQPHLNGLYTVFGKVIHGFEVLDLMEKTQTGAGDRPLAEIRLNRVTIHANPLAG

SEQ ID NO: 4619 - DNA, 717 bp, Glycine max
  CDS (1)..(717)
atggcctctagaggaactggaacgctgattttggtttgtctcttatggcttttcttcctatgcgccaccatagctttcttgcagctcaacttcgtagacaaaggaaccaccaacaacaacccttcctctcgcagtagtaacttcatcgcaactcaacagcatagcgctgatacccctttggaacaggatttggagggtgtcacccacaaggtgtattttgatattcagatccatggcaaattagcgggtcgcatagtcatgggcctttatgggaacacagtaccgaaaactgcagaaaactttcgagcgctttgtacaggagagaaaggagtgggaagaagtgggaagtctcttcattataaagggagcacattccataggattataccgagctttatggtccaagggggtgatttcacccgtggtgatggaagaggtggagaatcaatctatggtgataagtttgctgatgaaaactttaagctgaagcataccggaccgggatacttatccatggcaaattctggggaagacaccaatggctcccagttcttcattacaacagttaaaaccagctggctggatggacgccatgtcgtatttggcaaggtactttccggtatggatgttttgtacaagattgaagcagaaggaagtgaaagcggctcgccaaagaacaaggttgtcatattagacagtggagaattaacttcatga

SEQ ID NO: 4620 - protein, 238 aa, Glycine max
MASRGTGTLILVCLLWLFFLCATIAFLQLNFVDKGTTNNNPSSRSSNFIATQQHSADTPLEQDLEGVTHKVYFDIQIHGKLAGRIVMGLYGNTVPKTAENFRALCTGEKGVGRSGKSLHYKGSTFHRIIPSFMVQGGDFTRGDGRGGESIYGDKFADENFKLKHTGPGYLSMANSGEDTNGSQFFITTVKTSWLDGRHVVFGKVLSGMDVLYKIEAEGSESGSPKNKVVILDSGELTS

SEQ ID NO: 4621 - DNA, 537 bp, Helianthus annuus
  CDS (1)..(537)
atgagcttcgcaaacttcccaacatctccgctactgcaatcgaccatgccaggcgcagaaggaggtccaccggaggtaactctcgaaacatccatgggctctttcaccgttgagatgtacgataagcacgcacctaggacttgcaaaaacttcattgaactgtctcgaaggggctactacaacaacgttaagtttcacagaatcattaaggattttattgttcaaggaggggatcccactggcactggtagaggtggagaatctatttacggctcaaagtttgaggatgagatcaccccaaagttgaagcatacgggagctggtatcttatctatggctaatgctggcccgaatacaaatggaagtcagttctttatcacattggccccagcgcaatcgcttgatggaaagcacacgatatttggaagagtgtgcagaggaatggagattgtcaagagacttggtagtgttcagactgataataccgacaggccaattcatgacgtgaagatactacggacagcagttaaggattga

SEQ ID NO: 4622 - protein, 178 aa, Helianthus annuus
MSFANFPTSPLLQSTMPGAEGGPPEVTLETSMGSFTVEMYDKHAPRTCKNFIELSRRGYYNNVKFHRIIKDFIVQGGDPTGTGRGGESIYGSKFEDEITPKLKHTGAGILSMANAGPNTNGSQFFITLAPAQSLDGKHTIFGRVCRGMEIVKRLGSVQTDNTDRPIHDVKILRTAVKD

SEQ ID NO: 4623 - DNA, 486 bp, Helianthus annuus
  CDS (1)..(486)
atgtcggttactcttcacactaatctcggagacatcaagtgcgaaatcgcctgtgatgaagtgcctaaggcatcagagaattttcttgcattatgtgcaagcggatactatgatggcaccattttccacagaaacataaagggatttatgatccaaggcggagatcccactgggactggcaaaggagggacaagtatttggggcaaaaagttcaatgatgagatacgtgagtctctcaagcacaatgccagaggggtgctatcaatggctaatagtgggcccaacaccaatgggagccaattcttcattacttatgctaaacaaccacatctcaatggggtatatactatctttggcaaagtaattcatgggtttgaagttcttgatctcatggaaaagactccaacagcaggagctggggaccggccactggcggagattaggattaaccgtataacaattcattctaatccactagctggctag

SEQ ID NO: 4624 - protein, 161 aa, Helianthus annuus
MSVTLHTNLGDIKCEIACDEVPKASENFLALCASGYYDGTIFHRNIKGFMIQGGDPTGTGKGGTSIWGKKFNDEIRESLKHNARGVLSMANSGPNTNGSQFFITYAKQPHLNGVYTIFGKVIHGFEVLDLMEKTPTAGAGDRPLAEIRINRITIHSNPLAG

SEQ ID NO: 4625 - DNA, 495 bp, Linum usitatissimum
  CDS (1)..(495)
atgtggaaagccgccgatggaggagcacctgaggtgactctggagacttccatgggagctttcaccgttgagttgtactacaagcacgctccaaagacttgcaggaacttcattgagctgtccaggagaggatactacgacaatgtgaaattccaccggattatcaaggatttcatagtgcaaggtggggatccgacggggacaggaagaggtggagagtctatattcggaaagaagtttgaggacgagataaagaaggagttgaagcacactggggctgggattctatccatggcaaatgctggtcctgatacaaatggaagccagttcttcattacattggcgccatgcctttcactagatgggaaacatactattttcggaagagtatgctcagggatggagataatcaaaagacttgggagcgtccaaactgataacagtgacaggcccattcatgacgtgaagatactaaggacgtctgtcaaagattaa

SEQ ID NO: 4626 - protein, 164 aa, Linum usitatissimum
MWKAADGGAPEVTLETSMGAFTVELYYKHAPKTCRNFIELSRRGYYDNVKFHRIIKDFIVQGGDPTGTGRGGESIFGKKFEDEIKKELKHTGAGILSMANAGPDTNGSQFFITLAPCLSLDGKHTIFGRVCSGMEIIKRLGSVQTDNSDRPIHDVKILRTSVKD

SEQ ID NO: 4627 - DNA, 690 bp, Zea mays
  CDS (1)..(690)
atggcggtgctactccgccgcgccgcggcgctcctcgtcgtcgctgctgtctgcgcggacggcgcctccacgttctactcctccgaccccaacctcggatccgcccgcgtcgtcttccagacgaattttggtgatattgagtttggcttctttcctcatgttgcacctaagactgtcgaacacattttcaaacttgtgcggcttggatgctacaacacaaatcacttcttccgggttgacaagggtttcgttgcacaagttgctgatgttatgtcaggtcgaaccgcccctatgaatgaggagcagaaaaaagaagcggagaaaacaattgttggtgaatttagtagtgtcaagcatgtcaggggaatcctctccatgggaaggcactctgatccagacagtgctggctcttccttttctattcttctgggcaattcaccgcatcttgatggccagtatgctgtatttgggagggtcactaaaggtgacgatacattgagtaaactagagaggcttccaacccggagagaaggcatttttgtaatgccgatcgagcgtatcaacatcctatcaacttactattatgatattgatctagagagctgtgaagcagaaaaatctattctccggaggagactttctgaatcagcatcagaagttgagcgatggagaagaaaatgctttgcttaa

SEQ ID NO: 4628 - protein, 229 aa, Zea mays
MAVLLRRAAALLVVAAVCADGASTFYSSDPNLGSARVVFQTNFGDIEFGFFPHVAPKTVEHIFKLVRLGCYNTNHFFRVDKGFVAQVADVMSGRTAPMNEEQKKEAEKTIVGEFSSVKHVRGILSMGRHSDPDSAGSSFSILLGNSPHLDGQYAVFGRVTKGDDTLSKLERLPTRREGIFVMPIERINILSTYYYDIDLESCEAEKSILRRRLSESASEVERWRRKCFA

SEQ ID NO: 4629 - DNA, 495 bp, Zea mays
  CDS (1)..(495)
atgtggggtagcaccgacggcggaacgccggaggtcaccctcgagacctccatgggcgctgtctctgttgagatgtactacaggcacgcgcccaagacttgccggaacttcgtcgagctcgcgcgacgtggctactacgacaacgttatcttccaccgcatcatcaaagatttcattgtgcaaggtggggatcctacaggaaccggcagaggtggcgagtccatctatggagcaaagtttgaggatgagataaagactgagttaaagcacactggggctggaattctgtccatggcaaacgctggcccaaacacgaatggaagccagttcttcataactcttgccccttgtcagtcacttgatgggaaacatacaatttttgggagggtatgcagaggaatggaaattgttaagcgccttggaagtgtgcagactgacaaaaatgataggcctatccatgaagtgaaaatcttgcgtgccgttgtcaaagactga

SEQ ID NO: 4630 - protein, 164 aa, Zea mays
MWGSTDGGTPEVTLETSMGAVSVEMYYRHAPKTCRNFVELARRGYYDNVIFHRIIKDFIVQGGDPTGTGRGGESIYGAKFEDEIKTELKHTGAGILSMANAGPNTNGSQFFITLAPCQSLDGKHTIFGRVCRGMEIVKRLGSVQTDKNDRPIHEVKILRAVVKD

SEQ ID NO: 4631 - DNA, 690 bp, Zea mays
  CDS (1)..(690)
atggcggtgctactccgccgcgccgcggcgctcctcgtcgtcgctgctgtctgcgcggacggcgcctccacgttctactcctccgaccccaacctcggatccgcgcgcgtcgtcttccagacgaattttggtgatattgagtttggtttctttcctcatgttgcacctaagactgtcgagcacattttcaaacttgtgcggcttggatgctacaacacaaatcacttcttccgggttgacaagggtttcgttgcacaagttgctgatgttatgtcaggtcgaaccgcccctatgaatgaggagcagaaaaaagaagcggagaaaacaattgttggtgaatttagtagtgtcaagcatgtcaggggaatcctctccatgggaaggcactctgatccagacagtgctggctcttccttttctattcttctgggcaattcaccgcatcttgatggccagtatgctgtatttgggagggtcactaaaggtgacgatacattgagtaagctagagaggcttccaacccggagagaaggcatttttgtaatgccgatcgagcgtatcaacatcctatcaacttactattatgatattgatctagagagctgtgaagcagaaaaatctattctccggaggagactttctgaatcagcatcagaagttgagcgatggagaagaaaatgctttgcttaa

SEQ ID NO: 4632 - protein, 229 aa, Zea mays; identical to SEQ ID NO: 4628

SEQ ID NO: 4633 - DNA, 483 bp, Zea mays
  CDS (1)..(483)
atgtcggtgacgctgcacacgaacctgggcgacatcaagtgcgaggtgttctgcgaccaggtgccgcgcacggcggagaacttcctggcgctctgcggcagcggctactacgacggcaccgtgttccaccgcaacatcaagggcttcatggtccagggcggcgaccccaccggcaccggcaagggcgggtcgtccatctggggcggcaagttcgcggacgagttgagggagtcgctcaagcacaacgcgcgcgggatcatgtcgatggccaacagcgggcccaacaccaacggcagccagttcttcatcacctacgccaagcagccgcacctcaacggccactacaccgtgttcgccaaggtcatccacggcttcgaggtgctggacctcatggagaaggcgcagacgggacccggggacaggccgctcgccgagatcaggctcaaccgcgtcaccatccacgccaacccgctcgccgtctga

SEQ ID NO: 4634 - protein, 160 aa, Zea mays
MSVTLHTNLGDIKCEVFCDQVPRTAENFLALCGSGYYDGTVFHRNIKGFMVQGGDPTGTGKGGSSIWGGKFADELRESLKHNARGIMSMANSGPNTNGSQFFITYAKQPHLNGHYTVFAKVIHGFEVLDLMEKAQTGPGDRPLAEIRLNRVTIHANPLAV

SEQ ID NO: 4635 - DNA, 21 bp, Artificial sequence
  primer
atgttcaaatcgaccctggcg

SEQ ID NO: 4636 - DNA, 23 bp, Artificial sequence
  primer
ttacggcaggactttagcggaaa

SEQ ID NO: 4637 - protein, 191 aa, Artificial sequence
  consensus sequence
  Variant (2)..(3): Xaa in position 2 to 3 is any amino acid
  Variant (5)..(9): Xaa in position 5 to 9 is any amino acid
  Variant (11)..(15): Xaa in position 11 to 15 is any amino acid
  Variant (17)..(20): Xaa in position 17 to 20 is any amino acid
  Variant (23)..(30): Xaa in position 23 to 30 is any amino acid
  Variant (31)..(45): Xaa in position 31 to 45 is any or no amino acid
  Variant (47)..(50): Xaa in position 47 to 50 is any amino acid
  Variant (54)..(54): Xaa in position 54 is any amino acid
  Variant (56)..(57): Xaa in position 56 to 57 is any amino acid
  Variant (60)..(60): Xaa in position 60 is any amino acid
  Variant (64)..(79): Xaa in position 64 to 79 is any amino acid
  Variant (80)..(86): Xaa in position 80 to 86 is any or no amino acid
  Variant (88)..(90): Xaa in position 88 to 90 is any amino acid
  Variant (91)..(91): Xaa in position 91 is any or no amino acid
  Variant (93)..(112): Xaa in position 93 to 112 is any amino acid
  Variant (117)..(123): Xaa in position 117 to 123 is any amino acid
  Variant (125)..(129): Xaa in position 125 to 129 is any amino acid
  Variant (130)..(154): Xaa in position 130 to 154 is any or no amino acid
  Variant (158)..(158): Xaa in position 158 is any amino acid
  Variant (160)..(161): Xaa in position 160 to 161 is any amino acid
  Variant (163)..(164): Xaa in position 163 to 164 is any amino acid
  Variant (166)..(173): Xaa in position 166 to 173 is any amino acid
  Variant (175)..(178): Xaa in position 175 to 178 is any amino acid
  Variant (179)..(184): Xaa in position 179 to 184 is any or no amino acid
  Variant (186)..(190): Xaa in position 186 to 190 is any amino acid
TXXGXXXXXLXXXXXPXXXXNFXXXXXXXXXXXXXXXXXXXXXXXYXXXXFHRXIXXFMXQGGXXXXXXXXXXXXXXXXXXXXXXXEXXXXLXXXXXXXXXXXXXXXXXXXXQFFIXXXXXXXLXXXXXXXXXXXXXXXXXXXXXXXXXXXXXXVFGXVXXGXXVXXXXXXXXTXXXXXXXXXXPXXXXXI

SEQ ID NO: 4638 - protein, 19 aa, Artificial sequence
  protein pattern
  Variant (2)..(2): Xaa in position 2 is any amino acid
  Variant (3)..(3): Xaa in position 3 is Asp, Gly or Asn
  Variant (4)..(5): Xaa in position 4 to 5 is any amino acid
  Variant (9)..(9): Xaa in position 9 is any amino acid
  Variant (11)..(11): Xaa in position 11 is any amino acid
  Variant (12)..(12): Xaa in position 12 is Asp, Gly, Asn, Gln or Ser
  Variant (14)..(14): Xaa in position 14 is Ile, Met or Val
  Variant (15)..(15): Xaa in position 15 is any amino acid
  Variant (19)..(19): Xaa in position 19 is Asp or Gly
YXXXXFHRXIXXFXXQGGX

SEQ ID NO: 4639 - protein, 16 aa, Artificial sequence
  protein pattern
  Variant (2)..(2): Xaa in position 2 is any or no amino acid
  Variant (5)..(5): Xaa in position 5 is any amino acid
  Variant (6)..(6): Xaa in position 6 is Ile or Val
  Variant (7)..(8): Xaa in position 7 to 8 is any amino acid
  Variant (10)..(10): Xaa in position 10 is any amino acid
  Variant (11)..(11): Xaa in position 11 is Asp, Glu, Gly or Asn
  Variant (12)..(12): Xaa in position 12 is Ala, Thr or Val
  Variant (13)..(13): Xaa in position 13 is Ala, Ile, Leu or Val
  Variant (14)..(15): Xaa in position 14 to 15 is any amino acid
  Variant (16)..(16): Xaa in position 16 is Ile, Leu or Met
VXFGXXXXGXXXXXXX

SEQ ID NO: 4640 - DNA, 1434 bp, Escherichia coli K12
  CDS (1)..(1434): transl_table=11
atgcaggttttacatgtatgttcagagatgttcccgctgcttaaaaccggcggtctggctgatgttattggggcattacccgcagcacaaatcgcagacggcgttgacgctcgcgtactgttgcctgcatttcccgatattcgccgtggcgtgaccgatgcgcaggtagtatcccgtcgtgataccttcgccggacatatcacgctgttgttcggtcattacaacggggttggcatttacctgattgacgcgccgcatctctatgatcgtccgggaagcccgtatcacgataccaacttatttgcctataccgacaacgtattgcgttttgcgctgctggggtgggttggggcagaaatggccagcgggcttgacccattctggcgtcctgatgtggtgcatgcgcacgactggcatgcaggccttgcgcctgcgtatctggcggcgcgcgggcgtccggcgaagtcggtgtttactgtgcacaacctggcctatcaaggcatgttttatgcacatcacatgaatgacatccaattgccatggtcattctttaatattcatgggctggaattcaacggacaaatctctttcctgaaggccggtctgtactatgccgatcacattacggcggtcagtccaacctacgctcgcgagatcaccgaaccgcagtttgcctacggtatggaaggtctgttgcaacagcgtcaccgtgaagggcgtctttccggcgtactgaacggcgtggacgagaaaatctggagtccagagacggacttactgttggcctcgcgttacacccgcgatacgttggaagataaagcggaaaataagcgccagttacaaatcgcaatggggcttaaggttgacgataaagtgccgctttttgcagtggtgagccgtctgaccagccagaaaggtctcgacctggtgctggaagccttaccgggtcttctggagcagggcgggcagctggcgctactcggcgcgggcgatccggtgctgcaggaaggtttccttgcggcggcagcggaataccccggtcaggtgggcgttcagattggctatcacgaagcattttcgcatcgcattatgggcggcgcggacgtcattctggtgcccagccgttttgaaccgtgcggcttaacgcaactttatggattgaagtacggtacgctgccgttagtgcggcgcaccggtgggcttgctgatacggtttctgactgttctcttgagaaccttgcagatggcgtcgccagtgggtttgtctttgaagatagtaatgcctggtcgctgttacgggctattcgacgtgcttttgtactgtggtcccgtccttcactgtggcggtttgtgcaacgtcaggctatggcaatggattttagctggcaggtcgcggcgaagtcgtaccgtgagctttactatcgcttgaaatag

SEQ ID NO: 4641 - protein, 477 aa, Escherichia coli K12 [sequence omitted]

SEQ ID NO: 4642 - DNA, 1434 bp, Clostridium acetobutylicum
  CDS (1)..(1434)
atgaaaattttatttgcttcttctgaaagttatccttttataaaaacaggtgggcttggtgatgtatcctatgcccttcctaaagctttaagaaaaataggaattgatgcaagagtaataattccaaaatattcagatatacctgaatactttagatataatactcaccatattgcaagttttggtgttccagttggctggaggagtcagtatggaggccttgaatactatgaatacgatggagttcctttttacttcatagataacgactactatttcaaaagatctggactttatggatactatgatgatggagaacgcttcgcctatttttcaagaggagtacttcaagccataacttatatgcaggactttaatccagatattattcaatgcaacgattggcaaacagcgataatacctgttcttcttaaagatcattatcgaaattacagaaactataatcatataaaaactatatttacaatacacaatctaaaatatcaaggtgtttttggaaaatcagtacttggagagcttttgtgtttaaatgaaggctattataacgaaaatgcattaaagttttacgatggtatttcctttatgaaaggcggtattttattttcagataaactttcaactgtaagcagaacttatgctgaagaaattaaagacccttattatggagaacatcttgatggcttacttagaagtcgttcttatgacttatggggtattgtaaatggaattgattacgatatattaaatcctgaaacagacaaagacttgttttttaattttgattcttcaaccttgtataataaaacaaaaaataaaatagagcttcaaaaaatgctgaatttacctgtgtcagaaaatataccaatgataggtatagtctctagacttgtaagtcaaaaaggtttagatttaatttcctgcgttttagaagacttacttcaagatggaatacaacttgtagtacttggtactggtgatgctaaatatgaaaatatgtttaaatatttcgcatggaagtacccaaataaactatctgcaaatattcaattcaataacagcttagctcaaaaaatatatggtgcatccgatatgttcttaatgccttcaaaattcgaaccttgtggtataggacaattaatagctcttagatacggtagtctccctatagtacgtgagacaggaggtcttaaagacactgtaagaccttttaatccaataacaggtgaaggaaatggtttctcttttaccaattataatgcacatgatatgctgcatgttataagaaatgcagaatatttctattacaacgaaaaatacaattggaataagcttgtacaaactgcaatgaatgatgataacagttggagtaaatcagcagaaatttacagaaatttgtacatgtcagtactttaa

SEQ ID NO: 4643 - protein, 477 aa, Clostridium acetobutylicum
MKILFASSESYPFIKTGGLGDVSYALPKALRKIGIDARVIIPKYSDIPEYFRYNTHHIASFGVPVGWRSQYGGLEYYEYDGVPFYFIDNDYYFKRSGLYGYYDDGERFAYFSRGVLQAITYMQDFNPDIIQCNDWQTAIIPVLLKDHYRNYRNYNHIKTIFTIHNLKYQGVFGKSVLGELLCLNEGYYNENALKFYDGISFMKGGILFSDKLSTVSRTYAEEIKDPYYGEHLDGLLRSRSYDLWGIVNGIDYDILNPETDKDLFFNFDSSTLYNKTKNKIELQKMLNLPVSENIPMIGIVSRLVSQKGLDLISCVLEDLLQDGIQLVVLGTGDAKYENMFKYFAWKYPNKLSANIQFNNSLAQKIYGASDMFLMPSKFEPCGIGQLIALRYGSLPIVRETGGLKDTVRPFNPITGEGNGFSFTNYNAHDMLHVIRNAEYFYYNEKYNWNKLVQTAMNDDNSWSKSAEIYRNLYMSVL

SEQ ID NO: 4644 - DNA, 1431 bp, Bacillus halodurans
  CDS (1)..(1431)
atgaatgtgttacacgtcgcttcagaatgcaacccttttttcaaaacagggggacttgccgacgttctcggttcgctcccaaaagctcttataaaacaagggatcaatgtttccgtcatcctaccaaaatatggacacctctctgacgaatggcagaaccaattaacgttaaaaaaatcgttcacggtctccgtcacatggcgaaatcaatattgtggactggagcagtttgtagatcaaggagtgacctactacttcatcgataacgaatattactttaagcgggaacgcctttacggctatctcgatgaggctgaacggttcacattttttaatcatgctgttcttagctctttaccgttccttgatgaatcacctgatttaattcattgccatgattggcagtcaggtcttattcctgcctatatgaaaacgggttccgtcgaaaatcccgtaccgacggtgttcacaatccataaccttcgctatcaaggagcctttccccctgatgtttttcgcgaattgcttcactttgcgccagagcactttgctggattagagatggacggtgcgatcaattttttgaagggagcactcgtccattctgaccgggttacaacggtaagcccaacatatgctcaggaaatacaaacccctgcctttggcgaaggcttgcacggattgcttcatcaagaacgaggaaaaacaagaggtattttaaatgggattgacctggaggatttcgatccaaaaaccgatccgcatgttacgtatccttataagcacaatcaaatggaaaaacggaaaaacaaacaggtcatccaacgtctgtttgaattgccagagcgcaaggacattcctcttattgcgatggtcagccgtctcgtagaagagaaaggggtccctcttctcacccaaattgcaggtgaacttgtgacaacggaaaatgtgcagctcgccattctcggtacaggcgatccttctttagaggaccaactgcatcatctagcttctttgcatccacatcaaatttcatttaaatgtgtgtttgcggagccgctcgcgcgtaagctttatgcaggggctgatttattcatcatgccgtcccgattcgaaccgtgcggacttagccaaatgatttcccttcgctacgaaacggttccaattgttcgtgaaacaggagggttatatgacacgattcaatcctataatgaagaaataggcgaaggaaatggattcagttttactcattataacgcccatgatttcttgtatacaatcaagcgagccctccgtttttatcgtacggaaaaagagtgggaaaaccttttgcttaacatctacagctcggaagtaggatgggacgtttccgccaaacaatatacagcgctttatgaagaaatactagggaaaaggaaggtggaggcatga

SEQ ID NO: 4645 - protein, 476 aa, Bacillus halodurans
MNVLHVASECNPFFKTGGLADVLGSLPKALIKQGINVSVILPKYGHLSDEWQNQLTLKKSFTVSVTWRNQYCGLEQFVDQGVTYYFIDNEYYFKRERLYGYLDEAERFTFFNHAVLSSLPFLDESPDLIHCHDWQSGLIPAYMKTGSVENPVPTVFTIHNLRYQGAFPPDVFRELLHFAPEHFAGLEMDGAINFLKGALVHSDRVTTVSPTYAQEIQTPAFGEGLHGLLHQERGKTRGILNGIDLEDFDPKTDPHVTYPYKHNQMEKRKNKQVIQRLFELPERKDIPLIAMVSRLVEEKGVPLLTQIAGELVTTENVQLAILGTGDPSLEDQLHHLASLHPHQISFKCVFAEPLARKLYAGADLFIMPSRFEPCGLSQMISLRYETVPIVRETGGLYDTIQSYNEEIGEGNGFSFTHYNAHDFLYTIKRALRFYRTEKEWENLLLNIYSSEVGWDVSAKQYTALYEEILGKRKVEA

SEQ ID NO: 4646 - DNA, 1455 bp, Vibrio cholerae
  CDS (1)..(1455)
atggaacaattcaacgtttggtttaccgtttcagaagtacaggggctggtaaaaagtggtggcctggccgatgtggcaaaagcgctgccacaagcgttgaaagcgttgcatcagcaggtagccattgcgctgcctgcttatcgttcagtaccgggaaaggaagacgcagagttagtactggaaacagagctgacacactggccgcacacgcagtatcgtgttttaaaacgcgatctagacggtgtgccaatctatctaattgattgccctgcttattttgaccgcccggcgctgtatgctgagaataatcaagcctatgccgataatggtgaacggtttggttttttctctgcagcgtgtttggacgtactgccgaaactcggtattcagcctgacatcattcatgcgaatgattggcacacaggcttagtgccttttttgttgaaaacccgttatcgctatgacagcttttttgagcaagtcaaaagtgtgctgacggtgcataacgcgatttttaaagggatcttttcctaccatcagttagaagtcattcctgagctcaatttatcgggtatggaatttctgcaatacggtcacgatcatgtgagcatgctgcgggcggggatcgcttttgcggataaagtgaatgcggtgagtcctaattatgcggctgagcttttaacgcctcttggggctcacgggctggtggatgattttgtgcgccgagcgcgcgatttacacggtatcgtcaacggttgtgattacagcgagtggaatccaagaaccgaccactatctgccagcaacctacagcgatgagcctgagtcgatgcgcaaggggaaagcgctgtgtaaaacggcgctgcaggaagagttacacctgccggttaccgatgtacctctgtttggtatggtttgccgtttaacgcatcagaaaggctttcattacttgttgccgattttagagcagttcctgcgcaataacgttcaagtggttattgttggtactggtgagccggaagttgctgcgcggttgaataagatcgctcattatcatcgagccaagtttgcgtttgtcgaaacctacagtgagcgtttagcgcactgggttgaagcgggatcggatttcttcttaatgccttctgaatttgaagcctgtgggctcaatcagatttacagcatggcttatggcactctgcctattgttcgtgaagtgggtggcttgaaagatacggtgaacgattacgataaattcccggagcgcgcgacaggctttggttaccaagagcccacgccagaagctctattgatcacgatgcagcgggcactcttgttttatctgcagcagccagaagagatgctgaaagtgcaacaacgtgccatgcagcaaaacttcagttgggaagagtctgcccaagaatatatgaagatgtatcgactcgcgcgatttggctaa

SEQ ID NO: 4647 - protein, 484 aa, Vibrio cholerae
MEQFNVWFTVSEVQGLVKSGGLADVAKALPQALKALHQQVAIALPAYRSVPGKEDAELVLETELTHWPHTQYRVLKRDLDGVPIYLIDCPAYFDRPALYAENNQAYADNGERFGFFSAACLDVLPKLGIQPDIIHANDWHTGLVPFLLKTRYRYDSFFEQVKSVLTVHNAIFKGIFSYHQLEVIPELNLSGMEFLQYGHDHVSMLRAGIAFADKVNAVSPNYAAELLTPLGAHGLVDDFVRRARDLHGIVNGCDYSEWNPRTDHYLPATYSDEPESMRKGKALCKTALQEELHLPVTDVPLFGMVCRLTHQKGFHYLLPILEQFLRNNVQVVIVGTGEPEVAARLNKIAHYHRAKFAFVETYSERLAHWVEAGSDFFLMPSEFEACGLNQIYSMAYGTLPIVREVGGLKDTVNDYDKFPERATGFGYQEPTPEALLITMQRALLFYLQQPEEMLKVQQRAMQQNFSWEESAQEYMKMYRLARFG

SEQ ID NO: 4648 - DNA, 1434 bp, Streptococcus pneumoniae
  CDS (1)..(1434)
atgaaaattttatttgtagcagcagagggtgcacccttttcaaaaacaggtggtttgggagacgtcattggcgctcttccaaaatcactggtaaaagctgggcacgaagttgcagtgattttaccctactatgatatggtagaggctaaatttggaaatcagattgaagatgtgcttcattttgaggtgagcgttggttggcgcagacagtattgtggaattaagaaaacagtattaaatggtgtaaccttctactttattgacaatcaatattatttcttccgtggtcatgtttacggtgattttgatgacggagaacgctttgcctttttccaactggctgccattgaggctatggaaaggattgactttattcctgatcttctccatgttcatgactaccatacagctatgattcctttcttgttgaaggaaaaataccgttggattcaagcctatgaggacattgaaacagttttaaccattcataatttagaattccaaggacaattttcagaaggaatgttgggtgatttgtttggagttggctttgaacgttacgctgatggcacccttcgatggaacaactgtctgaactggatgaaggcaggtattctctatgcgaaccgtgtttcaaccgtttcacctagctatgctcatgaaattatgactagtcagtttggatgtaatttggatcatattcttaaaatggagtctggtaaagtatctggtatcgtgaatgggattgatgctgatctttataatcctcagacggatgctcttttagactatcatttcaatcaggaagatttgtctgggaaagccaaaaataaggcaaaattgcaagaaagagttggcttgcctgttagagcagacgttccactggtgggaattgtttctcgtttgacacgtcaaaaaggttttgatgtggtggtcgaaagtcttcaccatatcttgcaagaagatgttcagattgttcttttgggaactggcgatccagcctttgaaggagctttctcatggtttgctcagatttacccagacaagctatcaacaaatatcacttttgatgtcaaacttgctcaggaaatctacgctgcttgtgacctcttcctcatgccaagtcgttttgaaccgtgtggcttgtctcaaatgatggctatgcgttatggaaccttgccattggtccatgaagttggaggcttgcgagatacagttcgcgctttcaatccaatcgaaggaagcggtactggctttagctttgacaatctatctccttattggttaaattggactttccaaacagcattggacttgtatagaaaccatccagacatttggagaaacctacaaaaacaagctatggagagtgacttctcatgggatacagcctgcaagtcataccttgacttgtaccatagtttagttaattaa

SEQ ID NO: 4649 - protein, 477 aa, Streptococcus pneumoniae
MKILFVAAEGAPFSKTGGLGDVIGALPKSLVKAGHEVAVILPYYDMVEAKFGNQIEDVLHFEVSVGWRRQYCGIKKTVLNGVTFYFIDNQYYFFRGHVYGDFDDGERFAFFQLAAIEAMERIDFIPDLLHVHDYHTAMIPFLLKEKYRWIQAYEDIETVLTIHNLEFQGQFSEGMLGDLFGVGFERYADGTLRWNNCLNWMKAGILYANRVSTVSPSYAHEIMTSQFGCNLDHILKMESGKVSGIVNGIDADLYNPQTDALLDYHFNQEDLSGKAKNKAKLQERVGLPVRADVPLVGIVSRLTRQKGFDVVVESLHHILQEDVQIVLLGTGDPAFEGAFSWFAQIYPDKLSTNITFDVKLAQEIYAACDLFLMPSRFEPCGLSQMMAMRYGTLPLVHEVGGLRDTVRAFNPIEGSGTGFSFDNLSPYWLNWTFQTALDLYRNHPDIWRNLQKQAMESDFSWDTACKSYLDLYHSLVN

SEQ ID NO: 4650 - DNA, 1419 bp, Deinococcus radiodurans R1
  CDS (1)..(1419): transl_table=11
ttggcgaggggccgcccgtgcctgtccgctcagcgacttggcgaggaaccccgtgtgaacagcaccgggcggtacagtgggcccatgcgtgtgctgcatctcgcctccgaggtcttccccttttcccgctccggtggcctgggcgacgtgctgggagcgctgcccgctgtgcaggcgcggctgggcgaagacgcagaagtcacggtcctctcgccgtggtacgcctccttgcagggcgagccgcaggaactctggcgcggggaagcctggggcgagcaggcgtggctgggcgaactccgtcaggacggcgtgcgctacctctttctcggcctgaacgagtttcagcgccccggcctctatcaccccgacgacgtagagcgcttctgcgccttcgggcgagcggcgctcccggcactggacgcggtgggcgtgaccccggacgtgctgcacgggcacgactggcaggcgggactggtggtcgcccacgcccggctgcgtggcctgcggaccgccttttcggtccacaacctgcaataccagggccgctggaacctgcacgaagcggcgggctggaccgggctcccggactggaccttcgggcccgatggggtggagtttttcggcgacctcaacctgatgaaagcgggcctgaactttgctgggcacgtcaccaccgtcagccccacctacgcgcaggaaatcaccacgccgcaatacggcgaggggttggaagggctgctggtgcggctgacccacgagggccgactctcgggcatcctcaacgggctcgaccaggaccgctggaacccgcgcaccgaccccgacatcgccgcctacagcgacccggcaggcaaggcaggggccgtgaaggcgctgcggcaggaattcggcctggacgacgccccgattctggcgacggtcagccgcctcgccgaccagaagggcatggacctgctgattacggcgctgcccgaactggtgcgcgactggaacgtggtggtgctcggcggcggcgacccgctgctggaagccgcgctgaccggctgggccaaccacccccgcgtcgccttcgcttcgggcatgaacgagccgttggcgcaccgcatctacgccggcgcccacgcgtttgccatgcccagccgcttcgagccgtgcggcctctcgcagctcatcgccatgcgctacggcaccctgcccatcgtgcgcgaaaccggcggactggccgacaccgtgccgcccgaagtcggtttccgctttgccgacgccaccgcgcccgccttcctgcaagcctgccgcgaggcccaggccgcctttcaggacccggcgcagtggcagacccgcgccacccgcgccatgtcattggatttctcctgggacggtccggcacggcaatacctggaactttaccgggggctgtaa

SEQ ID NO: 4651 - protein, 472 aa, Deinococcus radiodurans R1
MARGRPCLSAQRLGEEPRVNSTGRYSGPMRVLHLASEVFPFSRSGGLGDVLGALPAVQARLGEDAEVTVLSPWYASLQGEPQELWRGEAWGEQAWLGELRQDGVRYLFLGLNEFQRPGLYHPDDVERFCAFGRAALPALDAVGVTPDVLHGHDWQAGLVVAHARLRGLRTAFSVHNLQYQGRWNLHEAAGWTGLPDWTFGPDGVEFFGDLNLMKAGLNFAGHVTTVSPTYAQEITTPQYGEGLEGLLVRLTHEGRLSGILNGLDQDRWNPRTDPDIAAYSDPAGKAGAVKALRQEFGLDDAPILATVSRLADQKGMDLLITALPELVRDWNVVVLGGGDPLLEAALTGWANHPRVAFASGMNEPLAHRIYAGAHAFAMPSRFEPCGLSQLIAMRYGTLPIVRETGGLADTVPPEVGFRFADATAPAFLQACREAQAAFQDPAQWQTRATRAMSLDFSWDGPARQYLELYRGL

SEQ ID NO: 4652 - DNA, 1593 bp, Agrobacterium tumefaciens str. C58
  CDS (1)..(1593): transl_table=11
ttgtcaccaacctgtttccgggctccccaccatctgaaatcactgcgttcccggaggcgccaaatgcggattcttgccgttacggccgaaatgtttcccttcgtcaaaaccggcggattggccgatgccacgagcgctttgccgcaggcgctggaacgaaaaggggctgacgttcggacattgctacccctctaccgcgggctcacgccgcttgtccgcggccggaagccggtcctggttgccaatattctggagcagccggtatcagtttattacgttgtttccgatggtcacaagcttctgcttcttgaagcggcaagcctgttcgacagagacggacatccctatggcgtaaaaggcgagccttttgctgacaacgatcttcgctttgcggttctgtccaaagtagcggcggaaatagccctcggcgcgattgacggctggcagccggatgttgtccatgtccatgattggcacgcggctctgacctgcgtctatctcgcggattcgacgccctcggtagcctccgttctaacccttcacaatctcgcatttcagggtcagtatccgctggagagggcgggtatgcttggactaccctcgcacctctgcactgtcgattgccttgaatattacgatgacatgtcatttttgaagggcggtctgacgaccgcgtcggcggtaacgacggttagtccaacttatgcaagagaaatccttacgccggaaatggggatgggaatgcatggcgtgctcgccaggcggcgaggggacctgcgcggcatcgtcaacggtgtcgatcacgacgtctggaatccggcaacagatccgtacattctcgcaaatttcacggctgccacggcgacaagacggagcctcaacaaatatgccttgcttcaggcccttggcctagcccctacccagggccctgtcttcggcgtggtcagtcgcctgacctggcaaaagggaatcgatctcctccctcacgtcgtaccccttataatagaaaggaaaggcaggctgatcgttcacggagagggagatacggcactggaagacagcttgcaggcgctggcaaagcgctatccggaactagtctgcgcccatatcggctatgacgaacggctggcgcacatgatccaggccggctcggatttcatcatccagccgtcacggttcgaaccctgcgggctgacgcagctttacgcgctgcgatacggcgcgctgcccatcgtcagccgcacgggcgggctggcggaaaccattatcgacgcgaatgacgcggccattgaagcgggcgtagcaacaggctttcaattcgagccggcgaatgaagacgatctgcgcgccgcgctggagcgtgccattagcgcctataacgaccgggaacttttccgacggcttcagacgcaggccatgcaggccaatttttcctgggacaagagtgccgcacaatatatggcgcttttcgagagccttgtcggcaacagcacgcgcgaaacggatgccgtcgccgacatcagaaccgagacttttgcaaagataagagctgataggcggctggcgggaaccccaggatcaccaacaggttag

SEQ ID NO: 4653 - protein, 530 aa, Agrobacterium tumefaciens str. C58
MSPTCFRAPHHLKSLRSRRRQMRILAVTAEMFPFVKTGGLADATSALPQALERKGADVRTLLPLYRGLTPLVRGRKPVLVANILEQPVSVYYVVSDGHKLLLLEAASLFDRDGHPYGVKGEPFADNDLRFAVLSKVAAEIALGAIDGWQPDVVHVHDWHAALTCVYLADSTPSVASVLTLHNLAFQGQYPLERAGMLGLPSHLCTVDCLEYYDDMSFLKGGLTTASAVTTVSPTYAREILTPEMGMGMHGVLARRRGDLRGIVNGVDHDVWNPATDPYILANFTAATATRRSLNKYALLQALGLAPTQGPVFGVVSRLTWQKGIDLLPHVVPLIIERKGRLIVHGEGDTALEDSLQALAKRYPELVCAHIGYDERLAHMIQAGSDFIIQPSRFEPCGLTQLYALRYGALPIVSRTGGLAETIIDANDAAIEAGVATGFQFEPANEDDLRAALERAISAYNDRELFRRLQTQAMQANFSWDKSAAQYMALFESLVGNSTRETDAVADIRTETFAKIRADRRLAGTPGSPTG

SEQ ID NO: 4654 - DNA, 1437 bp, Yersinia pestis KIM
  CDS (1)..(1437): transl_table=11
gtgatgatgagggttttacatgtatgttctgagctgttccctttactaaaaacaggcgggttggctgatgttatcggtgctttacccgcagctcagcttgccgagggggctgatgtgcggatcatcttgcccgccttcccggatttgcgtagagggatccctgagaccgtactggtcagggagattgacacttttgcggggcgggtagcattacgctatggccattatcgggggattggcatttatctgattgatgcgccagcgctctatgatcgtgcgggtagcccttatcacgatgcttctttatatgcctatagcgataactatctacgctttgccttgctgggatggatggcgtgcgaactggcttgtggcctggacggttactggcgtccagaggttgtccatgcccatgattggcacgcgggattaacctgtgcttatctggctgcgcgtgggcggcctgcacgatcggtgtttaccgtccataatttggcttatcaggggctattttctgcagatcacttatctgaattacacctgcccgctgagtttttccagatctatgggctggagttttacgggcagatctcttatctgaaagccgggttgttctttgccgaccatgtcacgaccgtcagcccgacctatgcaaaagagatcactcagcctgcttttggctatggcatggaggggttgctacaagcattggcgcgtcaaggccggttgacggggatcctgaacggggtcgacagtgatatttgggatccgcagagcgataccttgctacctactcgttatgatgcggagaacctgcaagcaaaggccatcaataaaacacatttgcaaacggctatgggtttgcaactggcagaaaataaacccatttttgctgttgtcagtcgattgaccgtccagaaagggttggatctggtattggaagcactgcccgaattactggcactgggggggcagttggtcgtcttggggagcggagatgccacgctgcaagaggcatttctagccgccgcagcagagcattctggccaggttggggtgcaaataggttatcacgaggcattctctcatcgaattattgccgggtcggatgtcattctggtgcccagccgctttgaaccctgtgggctaacacagttgtatgggttgaaatatggcacgttgccgctggtgcgacataccggtgggctggctgataccgtggtggattgcgcgttggaaaacctggctgacggcagcgcttcgggatttgtattcaatgaatgtgaggcgcaagccttagtgaaggcgatacgccgtgcctttgtactgtggagcaggccgaagcattggcgtcacgtccagcgccatgcgatgaggctcgactttggttggcaacttgccgccgtagattatttgtcactttatcgacgtctgtaa

SEQ ID NO: 4655 - protein, 478 aa, Yersinia pestis KIM
MMMRVLHVCSELFPLLKTGGLADVIGALPAAQLAEGADVRIILPAFPDLRRGIPETVLVREIDTFAGRVALRYGHYRGIGIYLIDAPALYDRAGSPYHDASLYAYSDNYLRFALLGWMACELACGLDGYWRPEVVHAHDWHAGLTCAYLAARGRPARSVFTVHNLAYQGLFSADHLSELHLPAEFFQIYGLEFYGQISYLKAGLFFADHVTTVSPTYAKEITQPAFGYGMEGLLQALARQGRLTGILNGVDSDIWDPQSDTLLPTRYDAENLQAKAINKTHLQTAMGLQLAENKPIFAVVSRLTVQKGLDLVLEALPELLALGGQLVVLGSGDATLQEAFLAAAAEHSGQVGVQIGYHEAFSHRIIAGSDVILVPSRFEPCGLTQLYGLKYGTLPLVRHTGGLADTVVDCALENLADGSASGFVFNECEAQALVKAIRRAFVLWSRPKHWRHVQRHAMRLDFGWQLAAVDYLSLYRRL

SEQ ID NO: 4656 - DNA, 1599 bp, Pseudomonas syringae pv. syringae B728a
  CDS (1)..(1599): transl_table=11
atgattagcgccgctgtgaaaacccagaagggagagagttttaaccagcctgtcggcgagctgactcatctgccggtgttctctaccaagagcgttcctgtgctgcaaatgccaacgtcgactgtccagcctcagccgaccatgtcccaggtcaacagacgcaaagtgttgttcgtgacctccgaactggccgatctggtgaaaaccggtgggctgggcgatgtgtctgccgcactgccgcgagccatgcgtcacctgcacgacgttcgagtactgattccaggttatccgcaggtcattaacagcggtaatccgatccatatcatcagccagctgggcgggcatgcagcactgccaccttgcaaggtcggtcgcatggacatgaaagatggcctggtgatctacgtgctgatctgcccggagctttacgagcgcgaaggcaccccttacgccgacagcaacggtcgcgactggtctgataaccatattcgttttgcccgcctgggcctggcagccgccgagttcgccgccggcgaagtaaagagccagtggtgccccgagctggttcacgcccatgactggccagccggcctggcgcctgcgtacatgcgctggcgcgggcagtccacgcccagcatcttcactgttcacaacctagcctatcaaggcacggtaagcacagcctcgagccgtgaactgggtatcccggactccgccattacccctgagggcatggagttctacggccagctgtcgttcatcaaggcgggtatggcgttcgccagccacatcaccaccgtcagcgccacctacgctcgggaaatcaccaccccggagttcggctgcggcctggaaggcttcctgcaaagcaaggccaacaagggccagctcagcggcatccccaacggcattgacgaaagctgggatgcggccaccgacgaacacctgatctgccactttgcgcccaacgaatggacgcgcaaggaaatcaacgctgactatgtgcgtgagctgttcgaactggacgcctcgaccgggccgctattcgcggtggtatcgcgccttgtgtatcagaaaggtcttgacctgacgatcggcgtcgccgagcacatcgtcaacaatggcgggcagatcgcaatcatcggccgcggtgaaccggaggaagaagaggccatgcgcgagttggctgcccgcttccccggacgtgtcggcgtgcgcatcggcttcaacgaaaccgacgcacgacgcatgttcgccggcagcgatttcctgctgatgccgtcccgctatgagccgtgcgggcttagccagatgtacgcgcaacgcttcggctcgttgcctgtcgcacgcaataccggcggcctggccgatacgatcgaagacggtgtcactggcttcctgttcaatgaatcgacagtcgaaagctacacccaggcactggatcgcgccttccaggtcttcgcccatccggagctgctcaacgccatgcgctgccgtgccatggcggctcccttcaactggcatcaggcagtagagccctacgcagatctctatcgcgacctgttgaagaaaaacgtgagcgtttccagcaactactag

SEQ ID NO: 4657 - protein, 532 aa, Pseudomonas syringae pv. syringae B728a
MISAAVKTQKGESFNQPVGELTHLPVFSTKSVPVLQMPTSTVQPQPTMSQVNRRKVLFVTSELADLVKTGGLGDVSAALPRAMRHLHDVRVLIPGYPQVINSGNPIHIISQLGGHAALPPCKVGRMDMKDGLVIYVLICPELYEREGTPYADSNGRDWSDNHIRFARLGLAAAEFAAGEVKSQWCPELVHAHDWPAGLAPAYMRWRGQSTPSIFTVHNLAYQGTVSTASSRELGIPDSAITPEGMEFYGQLSFIKAGMAFASHITTVSATYAREITTPEFGCGLEGFLQSKANKGQLSGIPNGIDESWDAATDEHLICHFAPNEWTRKEINADYVRELFELDASTGPLFAVVSRLVYQKGLDLTIGVAEHIVNNGGQIAIIGRGEPEEEEAMRELAARFPGRVGVRIGFNETDARRMFAGSDFLLMPSRYEPCGLSQMYAQRFGSLPVARNTGGLADTIEDGVTGFLFNESTVESYTQALDRAFQVFAHPELLNAMRCRAMAAPFNWHQAVEPYADLYRDLLKKNVSVSSNY

SEQ ID NO: 4658 - DNA, 1497 bp, Thiobacillus denitrificans ATCC 25259
  CDS (1)..(1497): transl_table=11
atgaaacgcggagcaatgaaggtgctgttcgtcgcgagcgaggcctttcccctggtcaagacgggcggactcggcgacgtcctgcacggacttccccaggccttgcacggcctcggcgtcggcgtccgactcctgctgcccggctatcgtacgctcctgcgccagctcgaccaggtgcggatagtcgcctggttcgacgtgcgcggggcggaggggccggtcgccgcgcgcgtgctcgagacgcgtcatccggggttcgatttcccgctgtggatcgtcgattgcccgccgctgttcgatcgcccgggcaatccttacgtcgacgtcacgggctatgactggcccgacaatgccgagcgtttcgcggtgttcgcgcgcgtcgccgcgctgctcgcacaggatgcccacgaggccggctggctgccggacgtcgtgcacacccacgactggcagaccggactcgtgccggctttcctcgccgacctgccggcacgtccgcggacggtgttcacgatccacaacctcgcctacggcggccacttcccgcacggcgacttcctgcgcctgcaactgccggcgcattggtggtcgcacgagggcgtcgagtttcacggcggcttttcgatgctgaaggcgggcatcgtctacgccgacgcggtcaccaccgtaagcccgacctatgccgaggaaatctgcacgccggccttcggctacggactcgacggcctgctgcgctcgcgccgccacaagctgcacggaattctcaacggcatcgatagcgcgacctgggacccggctgacgacccgcatctacgcgcgcgctacaccgcgggacgcattctgccgggcaagcggcgcgacaagcaggcgctgctcgaacgttttctgccggcggccgacgaagccgcgctgcaggcgccgctcgtcggcctggtcggccgcctcgtcgagcagaagggcatcgactgggtgctcgcggcgatgccgctgctgctcgccgaaaccgatgcgcgtttcgtgttgctcggcagcggccaggccgcctacgagcagaggctcacccggctggcccgccagcacccgacgcgcgtcttcgtcgagatcggctacgacgaggcgctggcgcaccagatcgaggccggcgccgacatgttcctgatgccgtcgcgcttcgaaccctgcggcctgaaccagatgtacagcctgcgttacggcaccttgccgatcgtgttcaagacgggcggcctcgccgacaccatcgtcgacaccaacgaagcgagcctggcggacggcagcgcgaatggcttcgtcttcgacacgccggacgtggcgcatttcgtcgacgcggtccgccgcgcgcttgccctctaccgtcagccctcgctgtggcgccgcgtgcagcagaccggaatgcgcctgtccttcgactggcgggaaagcgccggccactacctcgcgctctacgcggccgattccgccggagaacccgatgtctga

SEQ ID NO: 4659 - protein, 498 aa, Thiobacillus denitrificans ATCC 25259
MKRGAMKVLFVASEAFPLVKTGGLGDVLHGLPQALHGLGVGVRLLLPGYRTLLRQLDQVRIVAWFDVRGAEGPVAARVLETRHPGFDFPLWIVDCPPLFDRPGNPYVDVTGYDWPDNAERFAVFARVAALLAQDAHEAGWLPDVVHTHDWQTGLVPAFLADLPARPRTVFTIHNLAYGGHFPHGDFLRLQLPAHWWSHEGVEFHGGFSMLKAGIVYADAVTTVSPTYAEEICTPAFGYGLDGLLRSRRHKLHGILNGIDSATWDPADDPHLRARYTAGRILPGKRRDKQALLERFLPAADEAALQAPLVGLVGRLVEQKGIDWVLAAMPLLLAETDARFVLLGSGQAAYEQRLTRLARQHPTRVFVEIGYDEALAHQIEAGADMFLMPSRFEPCGLNQMYSLRYGTLPIVFKTGGLADTIVDTNEASLADGSANGFVFDTPDVAHFVDAVRRALALYRQPSLWRRVQQTGMRLSFDWRESAGHYLALYAADSAGEPDV

SEQ ID NO: 4660 - DNA, 1587 bp, Pseudomonas fluorescens PfO-1
  CDS (1)..(1587): transl_table=11
atgatcagtgcggcattggatattcagggagaacgggctcatcagccgatgggtgaatcgagcaccgtaagtgttcccggcagccggtcgatcaacgtcccgagcaccaagacgctgaccccgatggccagtcagaaccccaacaagaagaaagtcttgttcgtcacctcggaaattgccgatctggtgaagaccggcggtctgggagacgtttcagccgccctgccccgcgccatggcgcacctgcatgacgtccgggtgttgatccccggttacccgcaagtgatgaacagcgagaatccgatccacatcatcggcgaactgggcggtcacgccgcgctgccgccctgcaagatcgggcgcatggacatgcccgatggtctggtgatttatgtgttgatctgccctgaactttacgctcgtgacggtggcccgtatggcgccaacaacggccgcgactggccggacaaccacattcgcttcgcccgcctgggcctggccgccgccgatatcgcggccaatctcgcgcaaatccactggtgcccggatctggtgcacgcccatgactggccggccgggctggcgcctgcctatatgcactggcgcgggcaacgcacgccgaccctgttcaccattcacaacctcgcttatcaaggcgtgaccagcctcggttcgtgcccggaactcgggatccccgctcatgccctgcaacaggaaggcatggagttctacggcaagatgtcgttcctcaaggccggcatggcctattcgagccacatcaccacggtcagcgccacctacgcgcaggaaatcaccaccccggatttcggctgcggtctcgacggttttcttgccgccaagacccagcaaggcctgctcagcggcatccccaacggcatcgatgagagctgggacgctgccaccgacccgcatctgttcgcgccatttgccatcggcgactgggaaggcaaggccatcaacgccgcccatgtgcgcgaactgttcggcttgaaagactcggaaggtccactgtttgccgtggtctcgcgtctggtttatcaaaaaggtttggacctgaccgaggcggtgtcggaatacatcgtccagaacggtggccagatcgcgatcatcggccgtggcgaaccggaagaagaacaggccatgcgtgaactggcgctgcgcttccccggccagatcggcgtgcgcatcggcttcaacgaaacagacgcccggcggatgttcgccggcagcgatttcctgctgatgccgtcgcgctatgagccgtgcggcctgagccagatgtacgcccagcgcttcggctcgctgccggtggcgcgcaacactggtgggctggccgacaccattgaaaacggcgtcaccggtttcctattcaacgaatccaccgccgacagctaccgcgaagccctgagccgcgcgttcaaggtgtttgccttccccgaactgctcaatgcaatgcgttgccgggcgatggccgcacccttcaactggtgcaaggcggtcgaaccttacgccgaactctacgaaaaactggtggccaaggcgctgggtaaaacgcaccacaaataa

SEQ ID NO: 4661 - protein, 528 aa, Pseudomonas fluorescens PfO-1
MISAALDIQGERAHQPMGESSTVSVPGSRSINVPSTKTLTPMASQNPNKKKVLFVTSEIADLVKTGGLGDVSAALPRAMAHLHDVRVLIPGYPQVMNSENPIHIIGELGGHAALPPCKIGRMDMPDGLVIYVLICPELYARDGGPYGANNGRDWPDNHIRFARLGLAAADIAANLAQIHWCPDLVHAHDWPAGLAPAYMHWRGQRTPTLFTIHNLAYQGVTSLGSCPELGIPAHALQQEGMEFYGKMSFLKAGMAYSSHITTVSATYAQEITTPDFGCGLDGFLAAKTQQGLLSGIPNGIDESWDAATDPHLFAPFAIGDWEGKAINAAHVRELFGLKDSEGPLFAVVSRLVYQKGLDLTEAVSEYIVQNGGQIAIIGRGEPEEEQAMRELALRFPGQIGVRIGFNETDARRMFAGSDFLLMPSRYEPCGLSQMYAQRFGSLPVARNTGGLADTIENGVTGFLFNESTADSYREALSRAFKVFAFPELLNAMRCRAMAAPFNWCKAVEPYAELYEKLVAKALGKTHHK

SEQ ID NO: 4662 - DNA, 1455 bp, Rhodobacter sphaeroides 2.4.1
  CDS (1)..(1455): transl_table=11
atgaaggacagggacaggatggagacggcgcgcggacgggtgttgtcggtggcttccgaatgcgtgccgctgctgaagaccggggggctcgccgatgtggtgggcgcgcttccgggggcgctggcggcggaaggctgggagatgcgggtgctgatgccctgctaccggccgctgaaatggcggctcgaggagatggaggaggtcttcgccgaagaggatctcttcggggggccggggcgggtgatggcgggcgaggtggccgggcggaagatgctgctccttgatgcgccgcatctctacgaccgcgagggcggcccctatgcgggtccggacggcgactggggcgacaatgcgcagcggtttgcggcgctttcctggatcggggcgcggatcgcgcgcgaggggctcggggacggctggcggccggatgtggttcatgcccacgactggcaggcgggcttcacgccggcctatatgaactattggggcagcggcggagcgagttcggtgctgacggtgcacaacatcgccttccagggctgggcgccggcgagccttctgtcggcgctgcgcctgccgccgcaggagttccatccggccgcgctcgaatattacggcgggctctcgtcgctgaaggcggggctggtctcggccgatcatatcaccaccgtctcgcccacctatgcctgcgagctgatgcggcccgagttcggcatgggcctgcagggcgtgattgcccagcgggctgggcaggtgaccggcatcctgaacggggtcgacaccgacatctggtcgcccgaggtcgaggagcggccctatgacgccgagagcctgaaggccaaggcggagaaccgcgccgtgctgtcgggcgccttcaaactgtcggtgccggggccgcttgcgatcctcgtgagccgcctgacctatcagaagggcatcgacctcatccccgaggtgctgccggacttcatcgccgcgggcgggggccttgcagttctgggcacgggtgacgcgccgctcgaggcggcgatgcgcgagctcgaggtgcgctttccgggtcgggtcggggtgcggatcggctatgacgaagggctgtcgcatctgatgttcgcgggcggcgatgcggttttggtgccctcgcggttcgagccctgcgggctcacgcagatgtacgggctgcgctacggggccattccggtggtggccctgacagggggccttgccgacacgatcatcaacgccaatccggccgccatggccgcgggctgtgcgaccggcctcaccttccatccgaccgagccgcccgccttcgccgaggcgctgaggcggctgatccatctttatgccgatcccgcggcctgggagacggtgcaacggaatgcgatgcgccatccggtgggctgggagacctcggccgcggcctatgcggcgctctaccgggagctcgtcgcgtga

SEQ ID NO: 4663 - protein, 484 aa, Rhodobacter sphaeroides 2.4.1
MKDRDRMETARGRVLSVASECVPLLKTGGLADVVGALPGALAAEGWEMRVLMPCYRPLKWRLEEMEEVFAEEDLFGGPGRVMAGEVAGRKMLLLDAPHLYDREGGPYAGPDGDWGDNAQRFAALSWIGARIAREGLGDGWRPDVVHAHDWQAGFTPAYMNYWGSGGASSVLTVHNIAFQGWAPASLLSALRLPPQEFHPAALEYYGGLSSLKAGLVSADHITTVSPTYACELMRPEFGMGLQGVIAQRAGQVTGILNGVDTDIWSPEVEERPYDAESLKAKAENRAVLSGAFKLSVPGPLAILVSRLTYQKGIDLIPEVLPDFIAAGGGLAVLGTGDAPLEAAMRELEVRFPGRVGVRIGYDEGLSHLMFAGGDAVLVPSRFEPCGLTQMYGLRYGAIPVVALTGGLADTIINANPAAMAAGCATGLTFHPTEPPAFAEALRRLIHLYADPAAWETVQRNAMRHPVGWETSAAAYAALYRELVA

SEQ ID NO: 4664 - DNA, 1671 bp, Burkholderia thailandensis E264
  CDS (1)..(1671): transl_table=11
atgaacgacggggtaacgggccgggcgcgcggggcgtccgccgggcgaggccgtgcggggccgcgggtgatgttcgtcgcatcggaagcgtttccgctcgcgaagacgggcggactcgccgacgtttgcgcatcgctgccgaaggcgctgcgcgcgctcggctgcgatgtgcgcgtgctgatgccgggctacgcgcaagcgctcgatcgcgtattgcggccgcgcgtcgtcgccgagctgggcgaagtgctgccgggcgcggcggtgcgcatcatcgcggggtcgatgcccgattccggcgtgccggtgtggctgctcgactgcccgtcgttgtatcgtcgcgcgggctcgctgtattgcggcccggacgacgcggactgggcggacaacgcgtaccgcttcggcctgctttgccaggtggccgcgcgcgttgcgctcggcgccgcggggctgaggtggcgtccggacgtcgtgcacgcgcacgactggcacggcgggctcgttgcgcttctgacgcgcggcgcgggcgacgcgcgcccgaagaccgtgttcacgatccacaacgccgcgttccagggcaatttcgcgctcgacgacgcggcgcgcatcggcttgccggccgatgcgctgtcggtcgatggcgtcgaattctacgggcagttgtcgttcctgaaagcgggcgcgcgctacgcggaccgactcaccacggtcagtcccacctatgcgggcgagatccagacggccgaattcggctgcggcctcgagggtttgtacgcggcgcggcgcgaccagctcagcgggatcatgaacggcatcgacaccgagctgtggaatccggcgacggaccgctggctgccgcaaccgtattcgatcgacgacatgggcggaaaggcgggctgcaaggctgcgctgcagcaggaactcggcctttgcgccgacgcaagggccccgctcgtcgcatcggtgtgccggctgacctcgcaaaagatgtcggacatcgtgctcgaacgcctgcctgagcagctcgcgcagcatccgcgcatgcagttcgcactgcatggacgcggcgatcgcgcgctcgaacaggggttcgatgcgttggccgcgcagtatccgcgccgcgtggcggtgcggatcggctatgacgaaacgctcgcgcaccggattcatgccggcgcggacatcctgctgcacggcgcccggttcgagccgtgcgggctcacgcagctgtacgcgatgcgctacggaacgattccgatcgtacggcgggttggcggactcgccgacagcgtcgtcgatctcgacacgctcgcgccgcactccgaggacgcgacgggcttcgtgttcgacgcgccgacaggcgatgcgatgagcgaagcgctgcgccgctgcgtgaatctgcacgatgcgcggcccggcgtgtggtccgcgttgtgccggctcgcgatggcgcgcgattcgagctggtcgcgttcggcgcgcgcgtatctggacctgtacgcggcgctgacgccgcggcggcgcgtcgaggcgtccgacgaggcgcggggcgcggcggccgcgcttgcgcgagcggacgccgcgagcgggcgccggcgtcgcgcgcccgagcagtccgaacggctgcgtcaggagcggctcgcgcggcaggtggcgctcgcgtcgaagtga

SEQ ID NO: 4665 - protein, 556 aa, Burkholderia thailandensis E264
MNDGVTGRARGASAGRGRAGPRVMFVASEAFPLAKTGGLADVCASLPKALRALGCDVRVLMPGYAQALDRVLRPRVVAELGEVLPGAAVRIIAGSMPDSGVPVWLLDCPSLYRRAGSLYCGPDDADWADNAYRFGLLCQVAARVALGAAGLRWRPDVVHAHDWHGGLVALLTRGAGDARPKTVFTIHNAAFQGNFALDDAARIGLPADALSVDGVEFYGQLSFLKAGARYADRLTTVSPTYAGEIQTAEFGCGLEGLYAARRDQLSGIMNGIDTELWNPATDRWLPQPYSIDDMGGKAGCKAALQQELGLCADARAPLVASVCRLTSQKMSDIVLERLPEQLAQHPRMQFALHGRGDRALEQGFDALAAQYPRRVAVRIGYDETLAHRIHAGADILLHGARFEPCGLTQLYAMRYGTIPIVRRVGGLADSVVDLDTLAPHSEDATGFVFDAPTGDAMSEALRRCVNLHDARPGVWSALCRLAMARDSSWSRSARAYLDLYAALTPRRRVEASDEARGAAAALARADAASGRRRRAPEQSERLRQERLARQVALASK

SEQ ID NO: 4666 - DNA, 1500 bp, Methylobacillus flagellatus KT
  CDS (1)..(1500): transl_table=11
ttgatcttcaactccccaaaaaagcaaagagcacataccttgcgcatcctttttgtcacttcagaggcctaccccttaatcaaaactggcggcctcgcagatgtcagcggctcattgccagccgctatacgcgaccttggtatcgatatccgcatattgctgccaggttatccggcagtgctggaaaagctgcaagaaaaacacctcatcacgcagattcatggcctgccggaagtgggcagcgttaatctgctggggggcaaaatgccggatacaggggtcgatgtcatggtggttgaacatgcccagttgttcgaaagaccgggtggcccgtacaacgacggccaaggcattgactggggcgacaatgctctgcgctttggcatcttgtccaaagtaggcagtatattgggcggcctacactcgcccttgcaggacgactggatccctgacgttgtccactgcaatgactggcaaagtgggttaactcctgccttcctgcatcattcggccagccctcatgcaagatccattatcagcattcacaacctagcattccagggcaactttgcgccggaatgggtacagcggctgggcctgcctaaccacagctaccagatgcacggccttgaatattatgggcagatgtctttcctgaaggccggaatctactatgccgatagcattactaccgtcagcccgacctatgcccgtgaaatccagacggagcaatacggctttggcatgcagggattgctggcagcccgaagccatgaaattcatggcatattgaacgggattgaaattcaggaatggaatccggctaccgacccttaccttgcaaagacctacaacctggagcatcttgcagacaagaaaatcgtcaagaaagcacttcaagtccagttggggctcgagaccgcaccccacaagccactgcttggcgtcgtcagcaggcttacacaccagaagggcttggatattttcctggaagtggcagagagcctattggcaaagcactgccagattgtcgtacttggcagcggtgaagcacacatggagaacggattcaaggatctggcgagacgatatccccgccaggtgagcgtaacgattggctataaggaacccttgtcccatcagatcatggcaggtgcggacatgttcatcatgccatcccgttttgagccttgcggactcaaccagatgtatggcctgcgctatggtaccccccctgtcgtgacccgcactggcgggctggctgattcagtccaagacagcaatagcactacaatgaaaaacaacacggcaacgggattcgtactggaatctgcggaacctcgccaactgcttcatactgtgcagcgggccttggtgtattatcacgatccgagggcatggcgcagaatccagcgtaacggcatgcgccgcgatctgagctggaccagcagtgcaaaactctatctggacctgtatcaatcacttgcccagcgccgctag

SEQ ID NO: 4667 - protein, 499 aa, Methylobacillus flagellatus KT
MIFNSPKKQRAHTLRILFVTSEAYPLIKTGGLADVSGSLPAAIRDLGIDIRILLPGYPAVLEKLQEKHLITQIHGLPEVGSVNLLGGKMPDTGVDVMVVEHAQLFERPGGPYNDGQGIDWGDNALRFGILSKVGSILGGLHSPLQDDWIPDVVHCNDWQSGLTPAFLHHSASPHARSIISIHNLAFQGNFAPEWVQRLGLPNHSYQMHGLEYYGQMSFLKAGIYYADSITTVSPTYAREIQTEQYGFGMQGLLAARSHEIHGILNGIEIQEWNPATDPYLAKTYNLEHLADKKIVKKALQVQLGLETAPHKPLLGVVSRLTHQKGLDIFLEVAESLLAKHCQIVVLGSGEAHMENGFKDLARRYPRQVSVTIGYKEPLSHQIMAGADMFIMPSRFEPCGLNQMYGLRYGTPPVVTRTGGLADSVQDSNSTTMKNNTATGFVLESAEPRQLLHTVQRALVYYHDPRAWRRIQRNGMRRDLSWTSSAKLYLDLYQSLAQRR

SEQ ID NO: 4668 - DNA, 1590 bp, Burkholderia xenovorans LB400
  CDS (1)..(1590): transl_table=11
ttgccgctcaacgttcttctcgtcgcttccgaagccctgccgctcgccaaatccggcggcctcggcgacatggtcagcgcatacgccgccgctctgcgcgatgccggcgtcgatgtctcgatcctgatgcccgcgtatccggccgcgctcgaacgcgccgtcgacgtcacgcccgtcgcgcgcatgaccggcctgcccggcggcgacgcccggctcctgcgcggccacatgcccgacaccggcgtgccggtgctgcttctgcagatggatcacctgttcgcgcgcgaaggcctctaccgcgatccgcaaggacgcgactatctggacaacctcacgcgtttcgcatcgctcgctgcagcggccgcgcgagtggcgcgcggcgtgcgcaacgtgaagcgccccgacatcgtgcacgcgcacgattggcatgcaggactcacgccgctgtatctgcggcttgcgggcgttgccgccagaagcgtcttcacgattcacaacctggcgttccagggcaaccatccgctcgctatgggcggctggatcggcgtgccgcccgaattgctggcgcccgcgctttccgacgaacgcagcatcgagttctatggctcgctcagcatgatgaaagccggcatcgtccatgcggatcgggtcacgaccgtgagccggcgctatgcgcgcgaaatcctgacgccgcgtttcgggcacggcatggaaggcgtgttgcaggcgcaggcggccaagctgtcgggcatcgtgaacggcatcgacagcgcggtatggaatccggctaccgacaaacatatcgcgcgcccctattccgtcgacgatacggccggcaagcaggcctgcaagcgcgatttgcagcaggccttcgggctgacgcgcgatccgttcgcaccgctcgtcgccatcggcagccgtctgaccgaacagaagctcgccgacgtcgtcgtgcatacgctgccggcgctgctcgaacggcatccgcgcctgcagttcgcgattctcggccagggcgagcaaggcatcgaacaggcgctgcagggcatcgcggccgcgtggccgggacgcgtcggcgtacagatcggttatgacgagcggcgggcgcacatgctgcacgcgggtgcggacattctgctgcacggcagccgcttcgaaccctgcggactcacgcagctctacgcaatgcgctacggcacgattccggtggcctcgcgcgtgggcggcctggccgatacgatcgtcgactatctgccgcacgacccgcgcggcgacagaaaggcgaccggctttctgttcgacggcgaaactccggatgacgtgatgcatgcactcggccgcgcgctggacgcgttcgtggagccgtcgtcgtggcatgtgttgcagcgtaatgcgatgagccgcgacttcggctgggcaacgtcgacttcgaactatctctcgctgtatgcggagctggtggatgcgcgtccggcgcagcgcgatacgcgggtccgcaagacgccggtgcgggcgcgtggtgccgccgctgcgggtagccgcagggaagagttcaatgcgggactcgggaagatggcgcgcagcgcgtga

SEQ ID NO: 4669 - protein, 529 aa, Burkholderia xenovorans LB400
MPLNVLLVASEALPLAKSGGLGDMVSAYAAALRDAGVDVSILMPAYPAALERAVDVTPVARMTGLPGGDARLLRGHMPDTGVPVLLLQMDHLFAREGLYRDPQGRDYLDNLTRFASLAAAAARVARGVRNVKRPDIVHAHDWHAGLTPLYLRLAGVAARSVFTIHNLAFQGNHPLAMGGWIGVPPELLAPALSDERSIEFYGSLSMMKAGIVHADRVTTVSRRYAREILTPRFGHGMEGVLQAQAAKLSGIVNGIDSAVWNPATDKHIARPYSVDDTAGKQACKRDLQQAFGLTRDPFAPLVAIGSRLTEQKLADVVVHTLPALLERHPRLQFAILGQGEQGIEQALQGIAAAWPGRVGVQIGYDERRAHMLHAGADILLHGSRFEPCGLTQLYAMRYGTIPVASRVGGLADTIVDYLPHDPRGDRKATGFLFDGETPDDVMHALGRALDAFVEPSSWHVLQRNAMSRDFGWATSTSNYLSLYAELVDARPAQRDTRVRKTPVRARGAAAAGSRREEFNAGLGKMARSA

SEQ ID NO: 4670 - DNA, 1461 bp, Burkholderia xenovorans LB400
  CDS (1)..(1461): transl_table=11
atgacgattcgcgccctgcacgtcgcaagcgagctgtatcccctcctcaaaacgggcggcctcgccgacgtcgcgggcgcgttgccgcccgcgctgatcgagcgcggcgccgatgtgcgggtgctgttgcccggcttcccggcggtggtggccggtttgaccgagctcgcgccggttgcgcaactggggcgccaattcgatgccccgggcgtcacgctcgaacgcggcacgctggcgtcgagcggcctgatcgtctatgtgatccgcgcgagcacgctgtatgaccggccaggcaatccctatctgaacgacgaacacgtgccgtacggcgacaacgcgcagcgtttcgcgctgctcggctgggtcgccgcgcaactcgcgcagcatctggatccggcctggtcgccgcagatcgtccacgcgcacgactggcatgcggggctcgcgccggcctatctgaaagcggccgaacgccagcatggccggtctttcgcgcgcagcgtcttcacggtgcacaacctcgcgtatcaaggcgtgtttcccgcgccccagttcggccaactggggctgccggccgattacttcagcatgcacggcgtggagttctacgggcaactgtcgtttctcaaggccggcctttacttcagcgaccgcatcaccaccgtgagcccgacctacgcgcgcgaaatccagacgctcgcccagggcggcggactcgacgggctgctgcgccatcgttcgcacgacctgagcggcattctgaacggcgtcgactacacggtctggaatccggccagcgacgcgcttctcgaagaccactacagcgccacgcgcctcgccggcaaactggcgtgcaaggaagcactgcaaaaacgcttcggcctcgcgcagaaaagcgacgcgctgctgttcggcgtggtgagccgcctgaccgaacagaaaggcctcgacctgctgctcgaggcggtgcccgaaatcatcaaacatggcggccaactggtggtattcggcaccggcgacccggcgctggaaaacggtttgaaacgcgtcgcgcatgcgcacccggaagccgtcgcggtggaactcggcttcgacgaaaagctcgcgcatacgatcgtcgcgggcagcgacgtgatcgcggtgccgtcgcgtttcgagccctgcggcttgacccagctgtatgcgctcgcttatggctcgctgccgctcgtgcattgcgtgggcggtctcgcggacacggtggtggacgcgtcgctcgaaaatctcgccgacgacctcgccaccggtttcatgttcgaacgcttcgagctgaagggtatcggcgccgcgatccgccgcgccttcgcgctccgagaacgccgcaccgaatggaaagcgacccagcggcgcgcgatgcgccaggacttcggctggggcgcttcggcggagcgctatctggcgctgtatcgcgagctcgcctga

SEQ ID NO: 4671 - protein, 486 aa, Burkholderia xenovorans LB400
MTIRALHVASELYPLLKTGGLADVAGALPPALIERGADVRVLLPGFPAVVAGLTELAPVAQLGRQFDAPGVTLERGTLASSGLIVYVIRASTLYDRPGNPYLNDEHVPYGDNAQRFALLGWVAAQLAQHLDPAWSPQIVHAHDWHAGLAPAYLKAAERQHGRSFARSVFTVHNLAYQGVFPAPQFGQLGLPADYFSMHGVEFYGQLSFLKAGLYFSDRITTVSPTYAREIQTLAQGGGLDGLLRHRSHDLSGILNGVDYTVWNPASDALLEDHYSATRLAGKLACKEALQKRFGLAQKSDALLFGVVSRLTEQKGLDLLLEAVPEIIKHGGQLVVFGTGDPALENGLKRVAHAHPEAVAVELGFDEKLAHTIVAGSDVIAVPSRFEPCGLTQLYALAYGSLPLVHCVGGLADTVVDASLENLADDLATGFMFERFELKGIGAAIRRAFALRERRTEWKATQRRAMRQDFGWGASAERYLALYRELA

SEQ ID NO: 4672 - DNA, 1434 bp, Myxococcus xanthus DK 1622
  CDS (1)..(1434): transl_table=11
atgaatgtcctcttcatctcctcggaggtggccccgttctccaagacggggggcctgggggacgtggccggggccctccccgccgcgcttgcctcgctgggccatgacgtcaaggtcatcaccccgcgctaccgcgacctgcgaggcgcggagcggctggagcccacaggccagtccctgctactgcgcttccccttcggcgagctgtcgggccccatcctctccgcccgcgtgtcggagcggctggaggtgctcttcctggagaacgcgttcctcttcggcaaccgccacggcctctacggagacgcggggggcgccttcgccgacaatcaccggcgcttcgcctatctcagcgtgggcgcgctccaggcggcgcagcggctgcgcttcatcccggacatcatccacgccaacgactggcagacggggctggtgccggtggcgctgcggcgcggcttccagacggggccgctggcgcacgcgaagagcgtcttcaccatccacaacctggcctaccaggggcagttccccaaggacgtgatgggggacctggcgctgccctgggacttgttcaccgcccatgacgggctggagttccacgacacggtgaacttcctgaaggcggggctcgtcttctccgacgcgctcaccaccgtgtcccccacctacgcacgggaaatccagacgccggagcagggctacgggctggacggcctgctgcgccaccgcgcgcaccggctccacggcatcctcaacggcgtggacacgcacgagtggaacccggaggacgacgccttcctcccggcccgctacggactgaaggacctgtccggcaaggccgtgtgcaagcgcgagctactggcccgcttcgggctggaggacggccccgcgccggtgttcggcttcgtcagccggctggcgtggcagaagggcatggacctgctgctggaggccctgccggccgcgctccacgcggacatccgcgtcgtcggcgtgggcagtggcgaagggcctctggaggaagggctgctcgcgttgcagtcccgttacccgaagcaggtgggcgtgcacatcggcttcgaccccgggctctcccacctggtggaggcgggggcggacttcttcctcatgcccagtcgctacgagccgtgcggcctgaaccagatgtattcgctgcgctacggcacggtgcccatcgtccgggccaccggcgggttggtggacacggtggagggagggctggacggaaacggcatcctcttcgaggccttccacaagtccgccctgctggcggccatccgccgcgccctggccctctatgcggacccgtcgcgcctggatgagttccgccgccggggcatggagaaggacttctcctggggggcatccggccgtcgctacgaagcgctcttccacgacctggtggcggaatag

SEQ ID NO: 4673 - protein, 477 aa, Myxococcus xanthus DK 1622
MNVLFISSEVAPFSKTGGLGDVAGALPAALASLGHDVKVITPRYRDLRGAERLEPTGQSLLLRFPFGELSGPILSARVSERLEVLFLENAFLFGNRHGLYGDAGGAFADNHRRFAYLSVGALQAAQRLRFIPDIIHANDWQTGLVPVALRRGFQTGPLAHAKSVFTIHNLAYQGQFPKDVMGDLALPWDLFTAHDGLEFHDTVNFLKAGLVFSDALTTVSPTYAREIQTPEQGYGLDGLLRHRAHRLHGILNGVDTHEWNPEDDAFLPARYGLKDLSGKAVCKRELLARFGLEDGPAPVFGFVSRLAWQKGMDLLLEALPAALHADIRVVGVGSGEGPLEEGLLALQSRYPKQVGVHIGFDPGLSHLVEAGADFFLMPSRYEPCGLNQMYSLRYGTVPIVRATGGLVDTVEGGLDGNGILFEAFHKSALLAAIRRALALYADPSRLDEFRRRGMEKDFSWGASGRRYEALFHDLVAE

SEQ ID NO: 4674 - DNA, 1479 bp, Magnetospirillum magnetotacticum MS-1
  CDS (1)..(1479)
atgcgcgttctcttcgtttcctccgaggtgtttcccctggtcaagaccggggggcttgccgatgtgtcgggggccttgcccgccgccctgaccgagtcgggggaggacgtcaaaatcctgctgcccggctatcccgaggccatcaaggcttcgggcgccaagaagtccgtcgggtctctgggcgatccgttcggcctgggggccgaggtgcaactgctgtcgggcaagctgcccgatagcggcgttcccgtctggctggtggattgtcccgctctgttcgagcgtgatggtggcccctatcaggatttgcagggccgtgactggcccgataacgcgctgcgctttgccttgctgtcgtggacggcggcccatctgtgtaccgagcatagcccggtgaaatggcgtccccaggtgctgcacgccaatgactggcaggcgggactggcggcggcctatctgcaggcctggaatgtggcgcagcgcccggcgacggtgttcaccatccacaatatcgcctatcaaggccagtttccgcccgagatggtggcgcgcctgggctttccgcccgagatgtatgccatggaggggttcgagtattacgacacgctctccttcctcaaggccgggctgttctattccgatcgcatcaccacggtcagcccgcgttacgccaaggaaattcagactccggcctttggctgcggcatggatgggctgttgtcctatcgcgccgccgatctgaccggcatcctgaatggcgccgattatcaggtgtggaatcctgccacggatccccatctggatcatcccttcgcccccggcgatgcggcgggcaaggcgcgcaacaaggcggcgcttcaggcggaactggggctggcccaggacccggatgcgcccttgatggtcatcgtcagccgcctcaacgatcacaagggcatggatctggttctcgccgccctgcccaatattctgcgcctgggcgcccaggtggcggtcgtcgggaccggcgatcgtccgctggaggacgggttccgcgccgcggcggccgcccatcccgctcaggtggcggcgcgcatcggctattccgagcccctggcccatcgcatgatggcgggcggcgacatgctcttgatgccgtcgcgcttcgagccctgcggcctgacccagttctacgcgttccgttacggcacggtgccggtggcccatgccacgggcgggctggccgataccctggtggatacgggttacgataccctgatgaccggcaaggccaacggcttcgtcttcgagcattgcaatgccggggccttccagtgggcggtagagcgcgccgtggggctttacgccaagaaggatcagtggacccgcatcgtcaaggcttgcaacgcccaggatttcggatggagccgttcggcggctttgtaccgcgagctctataaatcgctggccgggaacggcaaggggaagaagaaggcatga

SEQ ID NO: 4675 - protein, 492 aa, Magnetospirillum magnetotacticum MS-1
MRVLFVSSEVFPLVKTGGLADVSGALPAALTESGEDVKILLPGYPEAIKASGAKKSVGSLGDPFGLGAEVQLLSGKLPDSGVPVWLVDCPALFERDGGPYQDLQGRDWPDNALRFALLSWTAAHLCTEHSPVKWRPQVLHANDWQAGLAAAYLQAWNVAQRPATVFTIHNIAYQGQFPPEMVARLGFPPEMYAMEGFEYYDTLSFLKAGLFYSDRITTVSPRYAKEIQTPAFGCGMDGLLSYRAADLTGILNGADYQVWNPATDPHLDHPFAPGDAAGKARNKAALQAELGLAQDPDAPLMVIVSRLNDHKGMDLVLAALPNILRLGAQVAVVGTGDRPLEDGFRAAAAAHPAQVAARIGYSEPLAHRMMAGGDMLLMPSRFEPCGLTQFYAFRYGTVPVAHATGGLADTLVDTGYDTLMTGKANGFVFEHCNAGAFQWAVERAVGLYAKKDQWTRIVKACNAQDFGWSRSAALYRELYKSLAGNGKGKKKA

SEQ ID NO: 4676 - DNA, 1461 bp, Haemophilus somnus 129PT
  CDS (1)..(1461)
atgggaggattaaaattaacaatgaaagtattacatgtttgttccgaattatatccattattaaaaacaggcggattggctgatgtaatgggggctttaccttttgcgcaaaatgaaattggtattgatgctagacttgttttaccggcttatcctgctatttctcgtggtatccccaatactgtggttgttgctgagtttaataattttgctggacatgttgtactacgttatggtgaatacaatggtattggtgtttatttaatcgatgcaccgcatttatatgcccgtgaaggtaatccatatcatgatatgtggtataacgattatacggacaactataagcgttttgctttattggcttgggttggggcagagttggctacaggattagacttttggtggcgtgctgaaattgtgcatgctcatgattggcatgcaggattaacagctgcttatttgcatcataaaggacgtcctgctaaatcggtgtttactatccataatttagcctatcaaggacgttttttaccttatcatctaactgaaattggattgccttggtggatgtttaatgtagatggattggaattatatggtgaaatgtcttatttaaaagccggactgtattattccgatatttctactgcagttagtccaacctatgccaaagaaattacaacacctgaatttgcttatggtttacaagggttgttgcaaactttgaaagcacagggacgattggttggtattttgaatggcgtagatgaaaaaatttggcatccgtatagtgatccgtatattgaagatcattacaaattgaaatcaatgcagggtaaacgtaagaataaaataaaattacaagcttattttaatttaccacaaaatcctaatgcactgttatttgtaatggttacacgtctaacagagcaaaaaggtgtagatttactaattggtagtgctgagagaattgtacaacaaggtgggcaattagcaattttaggttccggttcagcacatttagaagccggtattaattggcttgcacaagagtatccggaaaatatcgcagtaaaaattggatatgatgaagcattatcacatttaatgattgccggaggagatgtcattcttgttccaagtcgttttgagccttgtggtttaacgcagttatacggattaaaatatggaactttaccgttagttcgttcaacaggtggtttggctgatactgtcattgatagtagcagtgaaaacatcaaagcacgtcatgcaacaggatttgtatttaatgatgctgatgttgggggattatgttatggtattgatagtgcatttactttgtggcgtaaaccaagtcaatgggaaagtgtgatagtcaatgctatggaacaggatttcagttggcagacatctgcaaaaggatatcaatccctatatgatattcttttacataaataa

SEQ ID NO: 4677 - protein, 486 aa, Haemophilus somnus 129PT
MGGLKLTMKVLHVCSELYPLLKTGGLADVMGALPFAQNEIGIDARLVLPAYPAISRGIPNTVVVAEFNNFAGHVVLRYGEYNGIGVYLIDAPHLYAREGNPYHDMWYNDYTDNYKRFALLAWVGAELATGLDFWWRAEIVHAHDWHAGLTAAYLHHKGRPAKSVFTIHNLAYQGRFLPYHLTEIGLPWWMFNVDGLELYGEMSYLKAGLYYSDISTAVSPTYAKEITTPEFAYGLQGLLQTLKAQGRLVGILNGVDEKIWHPYSDPYIEDHYKLKSMQGKRKNKIKLQAYFNLPQNPNALLFVMVTRLTEQKGVDLLIGSAERIVQQGGQLAILGSGSAHLEAGINWLAQEYPENIAVKIGYDEALSHLMIAGGDVILVPSRFEPCGLTQLYGLKYGTLPLVRSTGGLADTVIDSSSENIKARHATGFVFNDADVGGLCYGIDSAFTLWRKPSQWESVIVNAMEQDFSWQTSAKGYQSLYDILLHK

SEQ ID NO: 4678 - DNA, 1461 bp, Haemophilus somnus 2336
  CDS (1)..(1461)
atgggaggattaaaattaacaatgaaagtattacatgtttgttccgaattatatccattattaaaaacaggcggattggctgatgtaatgggggctttaccttttgcacaaaatgaaattggtattgatgctagacttgttttaccggcttatcctgctatttctcgtggtattccaaataccgttgtagttgctgaatttgataattttgccggacatgttgtactacgttatggtgaatacaatggtattggtgtttatttaatcgatgcaccgcatttatatgcccgtgaaggtaatccataccatgatatgtggtataacgattatacggacaactataagcgttttgctttattggcttgggttggggcagagttggctacaggattagacttttggtggcgtgctgaaattgtgcatgctcatgattggcatgcaggcttaacagctgcttatttgcatcataaaggacgccctgctaaatcggtgtttactatccataatttagcctatcaaggacgttttttaccttatcatctaactgaaattggattgccttggtggatgtttaatgtagatggattggaattatatggtgaaatgtcttatttaaaagccggactgtattattccgatatttctactgcagttagtccaacctatgccaaagaaattacaacacctgaatttgcttatggtttacaagggttgttgcaaactttgaaagcacagggacgattggttggtattttgaatggcgtagatgaaaaaatttggcatccgtatagtgatccgtatattgaagatcattacaaattgaaatcaatgcagggtaaacgtaagaataaaataaaattacaagcttattttaatttaccacaaaatcctaatgcactgttatttgtaatggttacacgtctaacagagcaaaaaggtgtagatttactaattggtagtgccgagagaattgtacaacaaggtgggcaattagcaattttaggttccggttcagcacatttagaagccggtattaattggcttgcacaagagtatccggaaaatatcgcagtaaaaattggatatgatgaagcattatcacatttaatgattgccggaggagatgtcattcttgttccaagtcgtttcgagccttgtggcttaacgcagttatacggattaaaatatggaactttaccgttagttcgttcaacaggcggtttggctgatactgtcattgatagtagcagtgaaaacatcaaagcacgtcatgcaacaggatttgtatttaatgatgctgatgttgggggattatgttatggtattgatagtgcatttactttgtggcgtaaaccaagtcaatgggaaagtgtgatagtcaatgctatggaacaggatttcagttggcagacatctgcaaaaggatatcaatccctatatgatattcttttacataaataa

SEQ ID NO: 4679 - protein, 486 aa, Haemophilus somnus 2336
MGGLKLTMKVLHVCSELYPLLKTGGLADVMGALPFAQNEIGIDARLVLPAYPAISRGIPNTVVVAEFDNFAGHVVLRYGEYNGIGVYLIDAPHLYAREGNPYHDMWYNDYTDNYKRFALLAWVGAELATGLDFWWRAEIVHAHDWHAGLTAAYLHHKGRPAKSVFTIHNLAYQGRFLPYHLTEIGLPWWMFNVDGLELYGEMSYLKAGLYYSDISTAVSPTYAKEITTPEFAYGLQGLLQTLKAQGRLVGILNGVDEKIWHPYSDPYIEDHYKLKSMQGKRKNKIKLQAYFNLPQNPNALLFVMVTRLTEQKGVDLLIGSAERIVQQGGQLAILGSGSAHLEAGINWLAQEYPENIAVKIGYDEALSHLMIAGGDVILVPSRFEPCGLTQLYGLKYGTLPLVRSTGGLADTVIDSSSENIKARHATGFVFNDADVGGLCYGIDSAFTLWRKPSQWESVIVNAMEQDFSWQTSAKGYQSLYDILLHK

SEQ ID NO: 4680 - DNA, 1437 bp, Actinobacillus pleuropneumoniae serovar 1 str. 4074
  CDS (1)..(1437)
atgaaaattttacatatctgttcggaaatgtatcctttgatcaaaacaggcggcttggctgatgtgatgggagcacttccttacgcgcaacaacaatcgggcaatgacgtcagagttctgattccgttatatcctcaagtggcggaaaaaattggcgaaaccaatgaagtggcgaccatcggtacttttgccggtttagtgaccattcgttttacttattttaacggactcggcgtttatgtgattgatgcgccgcatttattccagcgttcgggtaatccttatcatgattcgggttatgcggattatccggataattataaacgttttgcacttttaggttatttaggtgcgcagctttcggaaggattggatcaatggtggggtaaggcggatatcttgcatgcgcatgattggcagggcggtttagcttgtgcttaccttaaaagttggaatagtccggtaaaaagcgtatttactattcataatatcgcttatccgggacgtttccattcttaccacttacatgagctcggtttaccttggcatttcttccaagcggaaggtttagagttttacggtgaaatttcttatcttaaagccggtttatattttgcggataaaattacaacggtaagtccgacttacgcattggaaattaccgaagaaattgccggtggcggtatgcacggtttattacaaactcgcaaagcgcaaggtcgattacacggggtgttaaacggcgtggacgatacggtgtggaatccggaaaccgacacgaatatcgttgcaacctataagccgagttatatgcaaggtaaatcgaagaataaagcggaattacaacaaatgttccacttaccggaagataaagatgcgatgcttatggtgatggttacccgtttaaccgagcaaaaaggtgcggattttattctggatcgtatcgatgaattaatggaagaacgtgttcaattagtcgttttaggaagcggctcgcctcatttggaatatttattgaatgaagcgcgtagtcgtcatccggaacaaatcggtatttacatcggctataatgaagcgctttctcatcaaattattgccggcggggacgttattttagtgccgagccgttttgaaccttgcggattaacccagttatacggtttaaaatacggtacgcttcctttagtgcgtcgtaccggcggattggccgatacggtggtggatagtaataaagaaagtattgaacaacgtactgcaacggggtttgtgtttaattatccgagcagtgacgatttccttgaggctttccgacgagcggtcaatttatggaagaaaaataaattatggtcaagcgttcgtcaaaatgcattggctcaagatttcggctgggcgagagcggcggcttcatatcaggcgatttatcaagaaatcgtataa

SEQ ID NO: 4681 - protein, 478 aa, Actinobacillus pleuropneumoniae serovar 1 str. 4074
MKILHICSEMYPLIKTGGLADVMGALPYAQQQSGNDVRVLIPLYPQVAEKIGETNEVATIGTFAGLVTIRFTYFNGLGVYVIDAPHLFQRSGNPYHDSGYADYPDNYKRFALLGYLGAQLSEGLDQWWGKADILHAHDWQGGLACAYLKSWNSPVKSVFTIHNIAYPGRFHSYHLHELGLPWHFFQAEGLEFYGEISYLKAGLYFADKITTVSPTYALEITEEIAGGGMHGLLQTRKAQGRLHGVLNGVDDTVWNPETDTNIVATYKPSYMQGKSKNKAELQQMFHLPEDKDAMLMVMVTRLTEQKGADFILDRIDELMEERVQLVVLGSGSPHLEYLLNEARSRHPEQIGIYIGYNEALSHQIIAGGDVILVPSRFEPCGLTQLYGLKYGTLPLVRRTGGLADTVVDSNKESIEQRTATGFVFNYPSSDDFLEAFRRAVNLWKKNKLWSSVRQNALAQDFGWARAAASYQAIYQEIV

SEQ ID NO: 4682 - DNA, 1431 bp, Haemophilus influenzae R2846
  CDS (1)..(1431)
atgaaaatactacacgtttgttcggaactctatccgctcttaaaaacaggcgggcttgccgatgttttaggggcattaccccaagcacagaaccaaattgggctagatgctcgcgttttattgcctgcttatcctgcaattacagcaggcattcagaatacccaagtggttgccgaatttgataacttcgctgggcacgtggtgttacgttatggagaatataatgatgtcgggatctatttgattgacgcaccgcacttatacggtcgcgaaggcaatccttatcacgatgcctattacaacgactacggcgacaactacaaacgttttgctttgctcggttgggtgggggcagaattagccacaggtttagacaactggtggcgtgcggaagtggtgcacgctcatgattggcatgcaggtttgtgtgcggcgtatttattcaacaaaggcaaaccagcaaaatcggtctttactattcataacttggcgtatcaagggcagttttcttatcatcatttgtatgaaatcggcttgccaacaggaatgttccacgtagaaggcttggaattatttggacaaatttcttacttgaaatcaggattgttctattccgatgcaagcacggcagttagcccaacttatgcccaagaaatcacgacaccagaatttgcctacggtttgcaaggcttgctttctggcttaaaagctcaaggtcgtttggtggggattttaaatggtgtggacgaaaatatttggcatccgaacgtggatcaatacattccgcaccattacaagctgaaatatatggcaggtaaaaagaaaaacaaagctgaactgcaagcctatttcaatttgccacaagatgaatctgctttggcatttgtgatggttacccgtttaaccgagcaaaaaggtgttgatttattaatcgaaagtgcagacgaaatcgtcaaacaaggcgggcagttgatgattttaggctctggtgcaccgcacttggaacaaggtattcgtgagcttgccgcccaatatccagaaaatattgcagtaaaaatcggctatgatgaagccctttcgcatttaatggtggcaggtggtgatgtgattttagtgccaagccgttttgagccttgtggcttaacccaactttatggtttgcaatatggcactctgccactagttcgtaaaacgggtggtttggcggatacggtggtggatagcgcttcagaaagcatcaaagctcgcaccgcaacaggttttgtgtttgaaaatgcaacgcctgaagctctccgccattgcttgcaacgtgcctttgccttatggcaaaaaccgcgtgcatggacgatggttcgcaccgatgcaatggaacaagacttcagctggcgtaaggctgcagagcaatatagaacactttatgaacgcttgtag

SEQ ID NO: 4683 - protein, 476 aa, Haemophilus influenzae R2846
MKILHVCSELYPLLKTGGLADVLGALPQAQNQIGLDARVLLPAYPAITAGIQNTQVVAEFDNFAGHVVLRYGEYNDVGIYLIDAPHLYGREGNPYHDAYYNDYGDNYKRFALLGWVGAELATGLDNWWRAEVVHAHDWHAGLCAAYLFNKGKPAKSVFTIHNLAYQGQFSYHHLYEIGLPTGMFHVEGLELFGQISYLKSGLFYSDASTAVSPTYAQEITTPEFAYGLQGLLSGLKAQGRLVGILNGVDENIWHPNVDQYIPHHYKLKYMAGKKKNKAELQAYFNLPQDESALAFVMVTRLTEQKGVDLLIESADEIVKQGGQLMILGSGAPHLEQGIRELAAQYPENIAVKIGYDEALSHLMVAGGDVILVPSRFEPCGLTQLYGLQYGTLPLVRKTGGLADTVVDSASESIKARTATGFVFENATPEALRHCLQRAFALWQKPRAWTMVRTDAMEQDFSWRKAAEQYRTLYERL

SEQ ID NO: 4684 - DNA, 1431 bp, Haemophilus influenzae R2866
  CDS (1)..(1431)
atgaaaatcttacacgtttgctcggaactctatccgctcttaaaaataggcgggcttgccgatgttttaggagcattaccccaagcgcagaaccaaatcgggctagatgcccgcgttttattgcctgcttatcctgcaattacagcaggtattccgaatactcaagtggttgccgaatttgataacttcgcagggcacgtggtattgcgttatggagaatataatggtgtcgggatctatttgattgactcaccgcacttatacggtcgcgaaggcaatccttatcacgatgcctattacaatgactacggcgacaactacaaacgttttgctttgctcggttgggtgggggcagaattagccacaggtttagatagctggtggcgtgcagaagtggtacacgcccacgattggcacgcaggtttgtgtgcagcatatctcttcaacaaaggtcgccctgcgaaatcggtgttcactattcataacttggcgtatcaagggcagttttcttatcatcatttgtatgaaatcggcttgccaacaggaatgttccacgtagaaggcttggaattatttgggcagatttcttacttgaaatcaggcttgttctattccgatgcaagcacggcagttagcccaacttatgccgaagaaatcacgacaccagaatttgcctacggtttgcaaggcttgctttctggcttaaaagctcaagatcgtttggtggggattttaaacggcgtggacgaaaatatttggcatccgaacgtggatcaatacattccgaaccattacaagctgaaatatatggcaggcaaaaagaaaaacaaagccgaactgcaagcctatttcaatttgccacaagatgaatctgctttggcatttgtgatggtcacccgtttaaccgagcaaaaaggtgtagatttattaatcgaaagtgcagatgaaatcgtcaaacaaggcgggcagttgatgattttaggttcaggtgcaccgcacttggaacaaggtattcgtgagcttgctgaacgttatccacaaaatattgcggtaaaaatcggctatgatgaagccctttcgcatttaatggtggcaggtggtgatgtgattttagtgccaagccgtttcgagccttgtggcttaacccaactttatggtttgcaatatggcacactgccactagttcgtaaaacgggtggtttggcggatacggtggtggatagcacctcagaaagtatcaaagctcgcaccgcaacaggttttgtgtttgaacaggctgaggcagatgatttacgccgtaccattcagcacgcattttcaatttggaagaaaccaagagcttggtcaatgatacgcacggacgcaatggaacaagacttcagctggcgtaaggctgcagagcaatatagaacactttatgaacgcttgtag

SEQ ID NO: 4685 - protein, 476 aa, Haemophilus influenzae R2866
MKILHVCSELYPLLKIGGLADVLGALPQAQNQIGLDARVLLPAYPAITAGIPNTQVVAEFDNFAGHVVLRYGEYNGVGIYLIDSPHLYGREGNPYHDAYYNDYGDNYKRFALLGWVGAELATGLDSWWRAEVVHAHDWHAGLCAAYLFNKGRPAKSVFTIHNLAYQGQFSYHHLYEIGLPTGMFHVEGLELFGQISYLKSGLFYSDASTAVSPTYAEEITTPEFAYGLQGLLSGLKAQDRLVGILNGVDENIWHPNVDQYIPNHYKLKYMAGKKKNKAELQAYFNLPQDESALAFVMVTRLTEQKGVDLLIESADEIVKQGGQLMILGSGAPHLEQGIRELAERYPQNIAVKIGYDEALSHLMVAGGDVILVPSRFEPCGLTQLYGLQYGTLPLVRKTGGLADTVVDSTSESIKARTATGFVFEQAEADDLRRTIQHAFSIWKKPRAWSMIRTDAMEQDFSWRKAAEQYRTLYERL

SEQ ID NO: 4686 - DNA, 1605 bp, Pseudomonas aeruginosa UCBPP-PA14
  CDS (1)..(1605)
atgccacggcgcgacggagtccgaccgaccaacgccaaggacaacgtacgaccggaggatgacatgggacattctgttgcaggcgcttgcctggaagaacccgcggtactgaccgcttttccgtcgctgctgcacccgcaggacccgccgcaacagagggatcggatactcttcgtcaccgccgagctaagcgacttcgtcaaggtcggcggactcggcgacttttccgccgcgctgccgcgggtcctcaagcgcgagcattcggtgcgggtcctgctgcccggctaccgccaggtgctggagcgctgccgcgacctgcggatcatcggcagcctgcccggccgggcggcgatcccgccctgcgagatcggcctggtgaccctcgacgacggcctggaagtcatgctggtgctctgcccgctgctctacgagcgcgagggcacgccatacatggacgaccagggcaatgactggccggacaaccacctgcgcttcgcccgcctgtgcctggccgccgccgagatcgccggcggccgcggcgcccagggctggcagccgggcctggtgcacgccaatgactggccgtcggcgctgaccccggcctacatggcctggaacggcgtgcgcacgccgagcctgttcaccatccacaacctcgcctaccagggcctctgcgacctgcaatgcagcgccgagctgggtcttcccgacgaagcgctgagccacgaaagcatggaattccacgggcgcctgtcgttcctcaaggccggcatcgcccatgcccaccacatcaccacggtgagcgagacctacgcccaggaaatcactaccccggaatacggctgcggcctgcacggcatcctcaagtgcaaggtcgagaagcgtcagctcagcggcatcgtcaacggtatcgacgatagctggcagccgcactgcgatccacacctggtggccggcttcagcgcccgccaatgggccggcaagcgcgccaacacgcgctacgtggaggagcgtttcggcctggagccgggcaaggggccgctgttcgcggtggtctcgcgcctggtgcagcagaaaggcatcgacctgaccctggagatcagcgatgccctgctccaggccggcggccgcctggtcagcatcggccgtggcgagccgaacctggagaaggccatgctcgagctcgcccggcgtcatcccggccaggtcggcgtgcatatcggtttcgacgagaccgaggcccgccgtatctacgccggcagcgacttcctgctcatgccctcgcgttacgagccctgcgggctcagtcagctctatgcgcaatgtttcggctcgctgccgatcgcgcgctgcaccggcggcctcgccgataccatcgtcgacggggtcaccggcttcctgttccgtgaggaaaccgcgcagagctacctcgacgcggtgatgcgcgcgatcaacgtctaccactgtccctcactgctcaacgccatgcgctgcaaggcgatggccgcgccgatgttctggagcgactcggtggagccttacaaccgcctgtaccggcgcctgttgaggaataccgctccggccctgcgcggggtacgccaatga

SEQ ID NO: 4687 - protein, 534 aa, Pseudomonas aeruginosa UCBPP-PA14
MPRRDGVRPTNAKDNVRPEDDMGHSVAGACLEEPAVLTAFPSLLHPQDPPQQRDRILFVTAELSDFVKVGGLGDFSAALPRVLKREHSVRVLLPGYRQVLERCRDLRIIGSLPGRAAIPPCEIGLVTLDDGLEVMLVLCPLLYEREGTPYMDDQGNDWPDNHLRFARLCLAAAEIAGGRGAQGWQPGLVHANDWPSALTPAYMAWNGVRTPSLFTIHNLAYQGLCDLQCSAELGLPDEALSHESMEFHGRLSFLKAGIAHAHHITTVSETYAQEITTPEYGCGLHGILKCKVEKRQLSGIVNGIDDSWQPHCDPHLVAGFSARQWAGKRANTRYVEERFGLEPGKGPLFAVVSRLVQQKGIDLTLEISDALLQAGGRLVSIGRGEPNLEKAMLELARRHPGQVGVHIGFDETEARRIYAGSDFLLMPSRYEPCGLSQLYAQCFGSLPIARCTGGLADTIVDGVTGFLFREETAQSYLDAVMRAINVYHCPSLLNAMRCKAMAAPMFWSDSVEPYNRLYRRLLRNTAPALRGVRQ

SEQ ID NO: 4688 - DNA, 1557 bp, Solibacter usitatus Ellin6076
  CDS (1)..(1557): transl_table=11
atgccgcgaagctcacaatcctttcacgaagtttggccaggatctgttcgcgctccacgctcgccgcccgtttcagtcgcaatcatagcattcgttcccgcccgaaccggacgccgcccctgctacaattccaacgtgtcccgcgtcctcatgatctcctccgaggctgctccgttcgccaagacaggcggcctggccgacgtggttggcgcactgcccaccgcgcttcatagctttggcgacgaagtggccgtggtcatcccgcgctatggttcgatcgatctcaaacatgcccgccgggtctgggagaacctcttcgtacaccttggtcccgccgcgtttccgattacaatctatcaggctcccgccgaataccccgtttatctggtggattgtccgccgctcttcgagcgcaagggcttctatggcgattctgcaatggatttcccggacaaccacatccgcttcgcagtcttcgcgcgcgctgcgctcgcggtcgcccgagtgctcttccgcaccgagatcttccactgccacgactggcagtcggggctggtgcccgcctacctgcgcaccaccttcgcttccgatcccacgtacctgggatgccgcacgcttttcaccatccacaacctgggctatcagggactctttccgaagagcgcgctcgccgaagtcgccctgcctgtcgaggatgtcttccgtcccgatgccatggagttcttcggccgcgtcagttatatcaaagccgggatcgcattcgcggacgtcctgagcaccgtgagccccacttacgcccgcgagatccagacgccggagtacggtttcggactggacggcgccctgcgcgcccgctccaacgtgctgaccgggattctgaacggtgttgactatcgggaatggaacccggaaatcgaccccctgattccggcccgctactcggtggacgacttgagcgggaaagagatctgcaaacgccaattgctcgcggaattcggacttccgccggaggcgatgggacggcccctgctcggcatcgtctcgcgcttcactcggcagaagggcaccgatatactcgcggaggtcatttcccatatcatcgcccaggatgtttatctggtcgcgctgggtagcggggatgtcgcctacgaggaattctttcgtagcatgcagagcgactatcccgggcgcatcggcgtccgcattggcttcgataacggactcgcccaccggatcgaagccggcgccgatatcttcctgatgcccagccactatgaaccctgcggtctcaaccagatatatagccttcgctatggaaccgtgcccgtggttcgcgccaccggcggcctggatgataccatcgatgagggcactggattcaagttcgcggaatattccggcgaggcgctcctggaagcggttcgagccgccgtcgcgggtttttcggaccccggcgcctggcggaatatgatgcgcaacggtatgcggaaggatttctcctggaagacctccgccgctgcctattcggagctttaccgccggctgttgggccgctga

SEQ ID NO: 4689 - protein, 518 aa, Solibacter usitatus Ellin6076
MPRSSQSFHEVWPGSVRAPRSPPVSVAIIAFVPARTGRRPCYNSNVSRVLMISSEAAPFAKTGGLADVVGALPTALHSFGDEVAVVIPRYGSIDLKHARRVWENLFVHLGPAAFPITIYQAPAEYPVYLVDCPPLFERKGFYGDSAMDFPDNHIRFAVFARAALAVARVLFRTEIFHCHDWQSGLVPAYLRTTFASDPTYLGCRTLFTIHNLGYQGLFPKSALAEVALPVEDVFRPDAMEFFGRVSYIKAGIAFADVLSTVSPTYAREIQTPEYGFGLDGALRARSNVLTGILNGVDYREWNPEIDPLIPARYSVDDLSGKEICKRQLLAEFGLPPEAMGRPLLGIVSRFTRQKGTDILAEVISHIIAQDVYLVALGSGDVAYEEFFRSMQSDYPGRIGVRIGFDNGLAHRIEAGADIFLMPSHYEPCGLNQIYSLRYGTVPVVRATGGLDDTIDEGTGFKFAEYSGEALLEAVRAAVAGFSDPGAWRNMMRNGMRKDFSWKTSAAAYSELYRRLLGR

SEQ ID NO: 4690 - DNA, 1446 bp, Magnetococcus sp. MC-1
  CDS (1)..(1446): transl_table=11
atgcgtgtgctatttgtaacatcagagatctacccactcataaaaaccggtggtcttggcgatgtcgccgctgctctgcccgcagcgttgattgaacaaggcgttgatatacgcgttttggtgcccggctaccctagtgtgctagaaggcatgcagcgccaaggtgatgctattgtgctgggtgaggtttttggtcatggtgatgcccgactcatacccggccgcctgcccgatagcgatgtttttttgtgggcactggacattcctaccctctacaaccgtccgggcaacccctacttaagccacgatggccgggattggggggacaatgccattcgctttgccgccctctcgcgggtagcggcattgattgccgaagcgggtggttttttaggttggcgtcccgatgtgctgcacgccaacgattggcaagcgggcttggcctcggcttatctgcatttttctggcaaccgtcactgtaaaagcatcatcaccgtgcacaatatccaatttcagggcaattttcccgcccgtgtggtgcacgaggttggcttacctgccagcgccatgcatgtttatggtgccgaattttacggacagtttagctttttgaaagcgggccttttttacagcaactggctcacgaccgtcagccccacttatgccaatgagatctgcacccctgcctatagctttggtatggatggcctgttgcaagatcgcgtacaccagctacacggcattcttaatggcattgattaccatgcctggaaccccgagaccgatcctttaattccccacccttatagccgtgataccctagagaacaagcttctcaacaaacgggctttgcagcaggagatggggctgttggtggaggatgatcggcccctgtttggtctggtcagccgcttgaccgaacaaaagggcattgatcttattttggaggccattccagcggtgctcagtgccggggcccaattggttgtgttgggcagcggccaccgcgcttttgaggatcagctgcgccaactcgccgcgcaaaacccgctacaagtcgcggtacatattggttatgacgagattcactcccaccgcatccaagcaggggtcgatattctgttggtgccatcacgctttgaaccgtgcggcctgacccaactctatgccatgcgctatggcaccctacccttggtcagacgcaccggcggtttggccgatagtgttacgcccatccattccgaaaaccacggcaccggttttctgtttgatcgacccgacaccatcagcctacttaccgtcatgttgcaagccatgggttgcctgcgcaaccccaccctgtggcgcaatgcccagcaacgtgccatgtccatggattttggctggcgcaaatccgcacgtgcctacatgcatctatatgaatctggggcaccaccggtcatgtaa

SEQ ID NO: 4691 - protein, 481 aa, Magnetococcus sp. MC-1
MRVLFVTSEIYPLIKTGGLGDVAAALPAALIEQGVDIRVLVPGYPSVLEGMQRQGDAIVLGEVFGHGDARLIPGRLPDSDVFLWALDIPTLYNRPGNPYLSHDGRDWGDNAIRFAALSRVAALIAEAGGFLGWRPDVLHANDWQAGLASAYLHFSGNRHCKSIITVHNIQFQGNFPARVVHEVGLPASAMHVYGAEFYGQFSFLKAGLFYSNWLTTVSPTYANEICTPAYSFGMDGLLQDRVHQLHGILNGIDYHAWNPETDPLIPHPYSRDTLENKLLNKRALQQEMGLLVEDDRPLFGLVSRLTEQKGIDLILEAIPAVLSAGAQLVVLGSGHRAFEDQLRQLAAQNPLQVAVHIGYDEIHSHRIQAGVDILLVPSRFEPCGLTQLYAMRYGTLPLVRRTGGLADSVTPIHSENHGTGFLFDRPDTISLLTVMLQAMGCLRNPTLWRNAQQRAMSMDFGWRKSARAYMHLYESGAPPVM

SEQ ID NO: 4692 - DNA, 1515 bp, Alkalilimnicola ehrlichei MLHE-1
  CDS (1)..(1515): transl_table=11
gtggtcggtggtattgaccctaccgccgctggccggggtggtgctgtcaccggaagccggcccatgaagattctctttaccgcctccgaggcgtggccgctggtgaagaccggcgggctgggcgatgtggcccacggcctcacccacgccctgcgggaacgccgccacgacgtgcgcctgttgctgccggcccaccccgatgcggtggccggcctggagggccgtattcgccgccacgccctgaccctggaccagcggccgttcacactcatcgaggggcggctgcccggtacccgcgtcaccacctggctgctggacgacccgccgctcttcgcccgcgccggcaacccgtacaccaccgaggacggcgacccgtggcccgacaacgcccgccgctaccaccgcctgagccgggtggcggcggccctggccgccggcgagctgctgccgtggcaggcggcggtgctccacgcccatgactggcagacggccctggcgccgttcctcctccagcggcggcccgtcccccgcccggccactgtcttcaccattcacaacctggcctaccgcggcctcttcccggcggagacccacacccgcctcgggctaccgccggaggcgtggacgcccgaaggcctggagttccacggccgactcgcctttatcaagggcggcctggcctacgccgacgccatcaccaccgtcagccccacctacgcccgggagatccagaccccggccttcggctgcggcctggacggcctgctgcgccaccggtccggggtgctccacggcatcgtcaacggtatcgacaccacggtctggaacccggccgccgacccccacctggcggcctgctaccggaaacccgacccggcggcccgggccgccaaccgcgccgcccttgcccaacggatcggcctcgacggcgataccggcgagaggagcggcccgctactcggcttcgtcgggcggctggtggaacagaagggtgtcgacctgatcctcgccgccctcccccggctgttggccggcggcgcgcgcctcgccttgctcggctcgggggaacgggagttggaggaggcgctgcgccaagccgcccggcactatccgggccgggtcggcgtccatatcggctacgacgaggggctggctcatctgatcgaggggggctgcgatctctttctgatgccctcccgcttcgagccatgcggcctcaaccagctctactccctgcgctacggcaccccgccggtggtcacggccaccggcggactggccgacaccgtcatggacgtggacaccgaccccaccgccggcaacggctttcaccttcccgccgccaacgccggcgccctggcggccacagtggaacgggccaccgcccattggcggcgaccggcggcgtggaagcgcatccaggcgcggggaatgggcggagactactcctgggacgcctcggcggaggcgtacctgcggctctaccgcaacacccctggcaataacggatcatga

SEQ ID NO: 4693 - protein, 504 aa, Alkalilimnicola ehrlichei MLHE-1
MVGGIDPTAAGRGGAVTGSRPMKILFTASEAWPLVKTGGLGDVAHGLTHALRERRHDVRLLLPAHPDAVAGLEGRIRRHALTLDQRPFTLIEGRLPGTRVTTWLLDDPPLFARAGNPYTTEDGDPWPDNARRYHRLSRVAAALAAGELLPWQAAVLHAHDWQTALAPFLLQRRPVPRPATVFTIHNLAYRGLFPAETHTRLGLPPEAWTPEGLEFHGRLAFIKGGLAYADAITTVSPTYAREIQTPAFGCGLDGLLRHRSGVLHGIVNGIDTTVWNPAADPHLAACYRKPDPAARAANRAALAQRIGLDGDTGERSGPLLGFVGRLVEQKGVDLILAALPRLLAGGARLALLGSGERELEEALRQAARHYPGRVGVHIGYDEGLAHLIEGGCDLFLMPSRFEPCGLNQLYSLRYGTPPVVTATGGLADTVMDVDTDPTAGNGFHLPAANAGALAATVERATAHWRRPAAWKRIQARGMGGDYSWDASAEAYLRLYRNTPGNNGS

SEQ ID NO: 4694 - DNA, 1497 bp, Bacillus thuringiensis serovar konkukian str
  CDS (1)..(1497)
atgaaaactcgaagggaggaagctgcaagggaagtagtagaagcttttcgtgcagtgggacaacaagtgaatattttatttgcagtatcagaatgtgtgccatttgtgaaatctggaggattagctgatgtagcaggtgcgctcccaaaagagctaaaaaaattaggtgtggaagttcgcattatacttccgaattatagtcttattccgcaaaaattaagggatggatgtacgctacataaagtaattaacgtcccgcttggctggagaaatcaatattgtggaattttaaaaggtgagcaagacgggattacgtattacttaatagataatgaatattattttaagagggattctctgtatggtcattatgatgatggagagcgtttttcttatttctcgaaagcagtattagagtgtattccgcatcttgatttcgaagtggatgttcttcatagccacgattggcatacagccatggtgaattttttactgcgtgaaaagtatcaagataacccgtcatatgagcatattaaaacggtatatacgattcataacttgcagttccaaggtgtattttctcctgaagtgatgtacgacttgttagaacttggtgatgaatattttcatagtgagcagttagagttttatggaaatgtgaactttatgaagggtggcattatcgcctctgatcaaattacagcggttagcccgacgtataaagaagaaattcaatatgaatttttcggtgagaagttagatggattactgcgaaaatataatgataagcttagcggcattgtaaatggaattgatacgagcgtgtacaatccagaaacggattcgtatattactgcgcagtacgatgcggattcattatatgaaaagaatgaaaataaacgcgcgttgcagcgttattttggtttgccagaaaaagaagatacaccaattatttcaatggtaacgagattaacgaagcaaaaaggtcttgatttagtacgtactgtattccgagaaataatggaagaagatgtacaatgtattattttagggtcaggtgattctgaatatgaacaattctttgagtggatggcatatgagtatcctgagaaggtaaaagtgtatatcggctttaatgaggagttagcgcaccaagtgtatgcgggaagtgatttattcttaatgccatcactgtttgagccgtgtggccttggacaacttatcgcattagcgtatggtacgattccaattgtaagggaaacaggcggattaaatgatacggtacaatcttatgacgaagaaactggagaaggaaatggtttcagtttcacgaactttaatgcacatgatatgttgcacacggttcttcgtgcaattgaattttatcatgataaaccggtatgggatcagcttgtaaaacaagcgatgactgaagattatagctgggagaaatcagctcttgcttataagaaattgtataaaagtctcatggaataa

SEQ ID NO: 4695 - protein, 498 aa, Bacillus thuringiensis serovar konkukian str
MKTRREEAAREVVEAFRAVGQQVNILFAVSECVPFVKSGGLADVAGALPKELKKLGVEVRIILPNYSLIPQKLRDGCTLHKVINVPLGWRNQYCGILKGEQDGITYYLIDNEYYFKRDSLYGHYDDGERFSYFSKAVLECIPHLDFEVDVLHSHDWHTAMVNFLLREKYQDNPSYEHIKTVYTIHNLQFQGVFSPEVMYDLLELGDEYFHSEQLEFYGNVNFMKGGIIASDQITAVSPTYKEEIQYEFFGEKLDGLLRKYNDKLSGIVNGIDTSVYNPETDSYITAQYDADSLYEKNENKRALQRYFGLPEKEDTPIISMVTRLTKQKGLDLVRTVFREIMEEDVQCIILGSGDSEYEQFFEWMAYEYPEKVKVYIGFNEELAHQVYAGSDLFLMPSLFEPCGLGQLIALAYGTIPIVRETGGLNDTVQSYDEETGEGNGFSFTNFNAHDMLHTVLRAIEFYHDKPVWDQLVKQAMTEDYSWEKSALAYKKLYKSLME

SEQ ID NO: 4696 - DNA, 1578 bp, Ostreococcus tauri
  CDS (1)..(1578)
atgaacatcgtgttcgtctcgagcgaagtcgcgccgtggtcgaagactgggggattgggcgacgtgtgcggagcgctgccgcaagcgctcgtcgcgcgcggacatcgcgtcatggtgatctcgccaaagtatcaaaacggatccaaggcggacgccctgtacaacggcgcgttagatacgtgcacgcgagcaaagattgggtgtttcggcgccgagcatgaggtgggattctttcatcaaattaaaaacggagtggattacgtcttcgtcgatcacgcatccttccatcgcaaggggagcttgtacggagattctttcggggtatacggagacaaccaattcagatttacgcttttagcgcacgcagcgtgcgaagcacccctgcagttggcgtttgaaggttgcggcgatcgatacggcaaggatatcgtcttcgtcgccaacgactggcacgccggtttagtccccactttggtcgcatcaaagtaccgtcctcacggtgtttacagggacgcgcgcacaatttgcgcaattcacaatatttttcaccaaggcgtcgagccatcgacgacgttcccgtgcctcggcgtaccgaccgagtggtacggcgcgctcgagtatcagtacccgcatcacatgcgagcgcacgaactcgacgagggtagagtggtgaacatcttaaagggggcgattgcgacctcggatcgcgtgctcaccgtctcccaaggctacgcttacgagatcacgaccccagagggaggcaagggcatggaagggttgctcctcagcagggcgaacaaactcgacggcatcgcgaacgggatagacatggacgagtggaacccggaggccgatccggactgcgccgctccttattccgtgatagatctcgccgggaagctcgagtgcaagcgcgcacttcaaaaggaacttgggctgcccgagcgagacgacgtcccactcatgggcttcatcgggcgtttggattggcaaaaggggccggatctgctccagcaagcgctccacgacatgatgcgcgaggacatccaggtggtgatgcttggaagcggcttgcccgagctcgaggatttcatgcgatgggccgagggtgagtacaaggacaagttccgcggatgggtcggcttttccgtcccgatggcgcaccgcatcacggcgggttgtgacctcttgctcatgccgtcgcgattcgagccttgcggtctgaaccaactgtacgcgatgcgttatggcactttgcccatcgcgcacgccaccggaggactgaaggatacgatcactccgcacaacgcgttcggagacgccgacaaggttctcgccggcacggcggacgtcaatcagggcgaaggcgtcggcaccggttggctgtttaacgacatgaacgccgacgcgctgatgtgggcgatccgatcggcgtgcgacgtttatcgatccgacaagaagttctggcgcgcaatgcagacgcaggcgatgacgcaagacttgtcttggaacaacgcggcgcgaaagtgggagcaggtcttcgagtgggccaagatggatcctccgcactgcggctaa

SEQ ID NO: 4697 - protein, 525 aa, Ostreococcus tauri
MNIVFVSSEVAPWSKTGGLGDVCGALPQALVARGHRVMVISPKYQNGSKADALYNGALDTCTRAKIGCFGAEHEVGFFHQIKNGVDYVFVDHASFHRKGSLYGDSFGVYGDNQFRFTLLAHAACEAPLQLAFEGCGDRYGKDIVFVANDWHAGLVPTLVASKYRPHGVYRDARTICAIHNIFHQGVEPSTTFPCLGVPTEWYGALEYQYPHHMRAHELDEGRVVNILKGAIATSDRVLTVSQGYAYEITTPEGGKGMEGLLLSRANKLDGIANGIDMDEWNPEADPDCAAPYSVIDLAGKLECKRALQKELGLPERDDVPLMGFIGRLDWQKGPDLLQQALHDMMREDIQVVMLGSGLPELEDFMRWAEGEYKDKFRGWVGFSVPMAHRITAGCDLLLMPSRFEPCGLNQLYAMRYGTLPIAHATGGLKDTITPHNAFGDADKVLAGTADVNQGEGVGTGWLFNDMNADALMWAIRSACDVYRSDKKFWRAMQTQAMTQDLSWNNAARKWEQVFEWAKMDPPHCG

SEQ ID NO: 4698 - DNA, 1470 bp, Desulfovibrio vulgaris
  CDS (1)..(1470)
atgcaacggcaggtcgtgttcgccacatcggagatgtaccccttctccaaaagcggggggctgggcgatgtgcttggtgcgctgccccttgccctgcaccgcatgggcgtgcccacggcggtggtgacacccttctatggcagattgcgaacggcggactatcccatccggctgacggtctccgactgccatgtgggctacccgtgggcccccatcacctgcgacgtcttcgaggccgactatcatggcatgccggtctacttcatccaccggggcgagtatttcgacaggcgttactactacaacgaccacaagggcgactacttcgacaactgcgaacgcttcgtcttcttctgccgcgcgctgctggcgctgatgcgccgtctggggcagcccccggcagtgctgcacgcccacgactggcagacggcacttgtgcccgcctttctctacttcctgcggcagaccgacccgttctggcaggatacgcgcagtgtgctcaccatacacaacctcgccttccaggggcgtttcgcctcgcgtcttttcgagacttcgggcctgcccccgcaggcatggagcgtggacggcgcggaattctggggcgacttcaacctgctcaaggcgggcatcgcctatgccgacaaggtgaccacggtcagccccagctatgcgcgtgagattctcggccccgcctatggcagcggtctcgacggtatcctgcggaagcgtgcccacgccctgcacggcatcctcaacggtgcggactacgacatctggtcgcccggcaacgaccgcttcctcccctgccgctatacgcccacggaccttgcaggaaaggcgcagtgcaagcgcgccctcatcgaagaactcggcctcgacccgcaccttgccaggcgtcccatcctcggcttcatcggcagactgcgcgggcagaaggggatagacctgctgctcgacatcctgccccgcctcatggagagcgacgtcggggtcatcatcctcggcgagggcaatctgacccatgaggcgcgggcccttgagctgatggaggcctaccggggccgggtgtgcaccatcgtcagctacaccgaagacctcgcccaccgcatccaggcgggcagcgacatctttctcatgccgtcgcggtacgaaccgtgcggcctcacccagatgtacgccctgcgctacggcacaccgcccgtggccacggccgtgggcgggctgcgcgacaccatcgtcccgtggccctcgccggagagcacgggcttcaccttcggccggtgcgagtccgcggcctttctgcgggccatcctcgatgcggtgcacctgtggaccacggcccccggcgactggcagggcatggtgcgacgcgccatggcacaggccttcacctgggaacgcgccggacgcgcctacctcgacctttacgcccaactgggggtctcccccggtgaggagggcgcgtga

SEQ ID NO: 4699 - protein, 489 aa, Desulfovibrio vulgaris
MQRQVVFATSEMYPFSKSGGLGDVLGALPLALHRMGVPTAVVTPFYGRLRTADYPIRLTVSDCHVGYPWAPITCDVFEADYHGMPVYFIHRGEYFDRRYYYNDHKGDYFDNCERFVFFCRALLALMRRLGQPPAVLHAHDWQTALVPAFLYFLRQTDPFWQDTRSVLTIHNLAFQGRFASRLFETSGLPPQAWSVDGAEFWGDFNLLKAGIAYADKVTTVSPSYAREILGPAYGSGLDGILRKRAHALHGILNGADYDIWSPGNDRFLPCRYTPTDLAGKAQCKRALIEELGLDPHLARRPILGFIGRLRGQKGIDLLLDILPRLMESDVGVIILGEGNLTHEARALELMEAYRGRVCTIVSYTEDLAHRIQAGSDIFLMPSRYEPCGLTQMYALRYGTPPVATAVGGLRDTIVPWPSPESTGFTFGRCESAAFLRAILDAVHLWTTAPGDWQGMVRRAMAQAFTWERAGRAYLDLYAQLGVSPGEEGA

SEQ ID NO: 4700 - DNA, 1323 bp, Thermus thermophilus
  CDS (1)..(1323)
atgggcgttatgcgcgtgctccacgtggcccccgaggcctaccccctggccaaggtgggagggcttgccgacgtggtgggggccctccccaaggccctggggcctttgggggtggaggcccatgtcctcctcccctggcacggggggctagaggccaggcgggtgggggaggtggcctttgccttcttcgggcgggaggagagggcccccttgggggagcgggtggagggtggggtgcggtttctcctcctcggggtggaggggtttgggcgggagcgggtctacggctaccccgacgacgccgagcgctacctccgcttcgccctggcggccaaggaggtggcgagagggtacgacctggtccacgcccacgactggacggcggccctcctcgccctctacgcccccacggtctacaccatccacaacctggcccaccagggtctcgtggacccggggctcttcttttcctggaccgggcttccctggagcctcttccacatggaggccctggagttctacggccgggtgaacctgatgaagggggggatcgtcttcgcccgccgggtcaccacggtgagcccctcctacgccgaggagatccagacccccgagttcggcatgggcctggacggggtcttgaggaggcacgccgggaagcttaggggcatcttgaacggcctggacacggaggtctttgaccccggcaaagacccctacctccccgccccctacacccgggaggacccctcggggaaggcccgggccaaggaggccttccgggagaggacggggcttaggccccccgtcctcgcctacgtgggccgcctggattaccagaagggcctggacctcgtcttaaaggccctcccccgcctcctggagatgggctttcgcctctacgtccagggcgtgggggacggggggcttcaggaggcgttcctccgggcggaggaggaaaaccccgaaggggtacgcttcctccccgcctacgacgaggccatggcccgcctggcctacgccggggcggaggcggtcttggtcccgagccgctttgagccctgcggcctggtgcagatgatcgcgagccgctacggcacccctcccgtggcccgggcggtgggggggctcaaggacaccgtggaggacgggagggccggggtcctttttgagacctaccaccccgaggggcttctttacggcgtgctccgcctcttccgcctgggggcggaggagatgggccttagggccatggagaaggacttctcctgggaggggccggcgcgggcctaccgggaggtgtaccgggaggccttgggctag

SEQ ID NO: 4701 - protein, 440 aa, Thermus thermophilus
MGVMRVLHVAPEAYPLAKVGGLADVVGALPKALGPLGVEAHVLLPWHGGLEARRVGEVAFAFFGREERAPLGERVEGGVRFLLLGVEGFGRERVYGYPDDAERYLRFALAAKEVARGYDLVHAHDWTAALLALYAPTVYTIHNLAHQGLVDPGLFFSWTGLPWSLFHMEALEFYGRVNLMKGGIVFARRVTTVSPSYAEEIQTPEFGMGLDGVLRRHAGKLRGILNGLDTEVFDPGKDPYLPAPYTREDPSGKARAKEAFRERTGLRPPVLAYVGRLDYQKGLDLVLKALPRLLEMGFRLYVQGVGDGGLQEAFLRAEEENPEGVRFLPAYDEAMARLAYAGAEAVLVPSRFEPCGLVQMIASRYGTPPVARAVGGLKDTVEDGRAGVLFETYHPEGLLYGVLRLFRLGAEEMGLRAMEKDFSWEGPARAYREVYREALG

SEQ ID NO: 4702 - DNA, 1431 bp, Bacillus cereus
  CDS (1)..(1431)
atgaatattttatttgcagtatcagaatgtgtaccatttgttaaatcgggaggattagctgatgtagcaggtgcgctcccaaaagagctaaaaaaattaggtgtggaagttcgcattatactcccgaattatagtcttattccgcaaaaattaagggatggatgtacgctacataaagtaattaacgtcccgcttggctggagaaatcaatattgcggaattttaaaaggtgagcaagacgggattacgtattacttaatagataatgaatattattttaagagggattctctgtatggtcattatgatgacggagagcgtttttcttatttttcgaaagcagttttagagtgtattcctcatcttgatttcgaagtggatgttcttcatagccatgattggcatacagctatggtaaatttcttactacgtgaaaagtatcaagataacccattatatgagcatattaaaacggtatatacgattcataacttgcagttccaaggtgtatttcctcctgaagtgatgtacgacttgctagaacttggtgatgaatattttcatagtgagcagttagaattttatgggaatgtgaactttatgaagggtggcattatcgcttctgatcaaattacagcggttagcccgacatacaaagaggaaatccaatatgagtttttcggtgagaagttagatggattactgcgaaaatataatggtaagcttagcggcattgtaaatggaattgatacgagcgtgtacaatccagaaacggattcgtatattactgctcagtacgatgcagattcattatatgaaaagagtaaaaataaacgcgcgttgcagcgttattttggtttgccagaaaaagaagatacaccaattatttctatggtaacgagattaacgaagcaaaaaggtcttgatttagtacgtactgtattccgagaaataatggaagaagatgtacaatgtattattttaggatcaggtgattcggaatatgagaaattctttgagtggatggcatatgagtatcctgagaaggtaaaagtgtatattggctttaatgaagaattagcccaccaagtatatgcgggaagtgatttattcttaatgccatcactatttgaaccatgtggacttggacaacttatcgcattagcgtacggtacgattccaattgtaagggaaacaggcggattaaatgatacggtacaatcttatgacgaagagactggagaaggaaatggtttcagtttcacgaactttaatgcacatgacatgttgcacacggttcgtcgtgcaattgaattttatcatgataaaccggtgtgggagcagcttgtaaaacaagcaatgactgaagattatagctggggaaaatcagctctggcttataagaaattgtataaaagtctcatggaataa

SEQ ID NO: 4703 - protein, 476 aa, Bacillus cereus
MNILFAVSECVPFVKSGGLADVAGALPKELKKLGVEVRIILPNYSLIPQKLRDGCTLHKVINVPLGWRNQYCGILKGEQDGITYYLIDNEYYFKRDSLYGHYDDGERFSYFSKAVLECIPHLDFEVDVLHSHDWHTAMVNFLLREKYQDNPLYEHIKTVYTIHNLQFQGVFPPEVMYDLLELGDEYFHSEQLEFYGNVNFMKGGIIASDQITAVSPTYKEEIQYEFFGEKLDGLLRKYNGKLSGIVNGIDTSVYNPETDSYITAQYDADSLYEKSKNKRALQRYFGLPEKEDTPIISMVTRLTKQKGLDLVRTVFREIMEEDVQCIILGSGDSEYEKFFEWMAYEYPEKVKVYIGFNEELAHQVYAGSDLFLMPSLFEPCGLGQLIALAYGTIPIVRETGGLNDTVQSYDEETGEGNGFSFTNFNAHDMLHTVRRAIEFYHDKPVWEQLVKQAMTEDYSWGKSALAYKKLYKSLME

SEQ ID NO: 4704 - DNA, 1476 bp, Treponema denticola
  CDS (1)..(1476)
atgaaaataatgatggttacaagcgagcttgttccttttgcaaaagtaggaggtttggctgatgccgttacagctttatcaatagctcttgcagaaaaaagacatgatgtaagggttgtaatgcctcgttattataaaatcgatcgaaaaaacttaaagcaaattccgggggctatggccgttcatcttgggccttatgaacactgggtaggagtttatgagtcaaatctgccttcttcaaaggtaaaggtttattttatagaccatgaacaagcctttggcagagatggcgtttacggttcagcttttgaacctgatttttccgataatacgaaaagattttcacttttagcccatgcagcttttcaagtttgcagaaaacaggcatggattcccgacgttgtacatgcccatgattgggctgcgggcttggtacccgtacttttacgctttacagaaaaaaatacggaatttaaaaatacggcaagtgtttttaccattcataatatgggttaccaaggtgtttattcaaagcatacctttcccgacacaggccttgattggaacgacttttatactacaggctttgaagactgggatagaataaactttttaaaagcggcccttgtttcttccgatatgcttacaaccgtttctccttcttatgcggaagaaattaaacgccccgaattcggctttaggatggatggtattttgcggtacagggaaaaagaactgacaggaattttaaatggggtagacacctcaatttggaatccttcaaaagacgagtatattccttaccgatacaattctaaaacccttgaggaaaaggaaaaaaataaatccgttttacaggaaaggttcggtctcgaaatagatatttccgttccggtattcggtatgataagccgattggttgatcaaaagggtatttcagagcttttcggacccatgtacggttcagcctttaagatatgttccgatataaaacttcaaatggttgttttgggctcaggtgaatcttggtgcgaaaaagagctcaattttctttcacaaaggctgcctaattttagatgttatataggctataatgaagaattaagtcatttaatcgaagccggaagcgactttttcttgatgccttcaagatatgaaccatgcggcttaaaccaaatgtattccctcctttacggaaccttgcccatagtccgaaagactggagggctcgcagatacggtagaaaactataatgaagaaacaggcgagggtacgggttttgtgcttgactacttaagccctcaaagtatttacgatacggtcggctgggcagcttatgcatggtataataaaaaagatcacataaaaaagatgagaaccaaggccatgagtaaaaagttcggatggaatatagccgcggaaaaatatttaaaagtatatgccgatgctattgaaaaaaaagcttccatgttatag

SEQ ID NO: 4705 - protein, 491 aa, Treponema denticola
MKIMMVTSELVPFAKVGGLADAVTALSIALAEKRHDVRVVMPRYYKIDRKNLKQIPGAMAVHLGPYEHWVGVYESNLPSSKVKVYFIDHEQAFGRDGVYGSAFEPDFSDNTKRFSLLAHAAFQVCRKQAWIPDVVHAHDWAAGLVPVLLRFTEKNTEFKNTASVFTIHNMGYQGVYSKHTFPDTGLDWNDFYTTGFEDWDRINFLKAALVSSDMLTTVSPSYAEEIKRPEFGFRMDGILRYREKELTGILNGVDTSIWNPSKDEYIPYRYNSKTLEEKEKNKSVLQERFGLEIDISVPVFGMISRLVDQKGISELFGPMYGSAFKICSDIKLQMVVLGSGESWCEKELNFLSQRLPNFRCYIGYNEELSHLIEAGSDFFLMPSRYEPCGLNQMYSLLYGTLPIVRKTGGLADTVENYNEETGEGTGFVLDYLSPQSIYDTVGWAAYAWYNKKDHIKKMRTKAMSKKFGWNIAAEKYLKVYADAIEKKASML

SEQ ID NO: 4706 - DNA, 1443 bp, Rhizobium loti
  CDS (1)..(1443): transl_table=11
atgcaggttctgtcggtcacgcccgagatttttccgctgatcaagaccggtgggctggccgacgtgaccggcgctctgcccatcgcgctcgctgccaagggcgtaaccatgcgcacgctcattccaggctttcccgtggtgatggctgctttcaagaaaaagaaagccgtctaccaatatccgctgttgcagggcggcaaggcttccgtccacgccgtgcagattgctgggctcgacctgttcgtgctcgacgcgccgcatctgttcgaccgcccgggcggcccctacggcaatgcttcggggcggactgccggacaattgcggcgcttcgcggcgctgagccaggttggtggcgatatcgccggcggcgccatctccggctatcagcctgacatcgtccacgcccatgactggcagtcggcgatgacgctggcctatatgcgctacggcaaggcggtcggcgttccgtcgatgatgaccgtccacaatctcgccttccagggccagttcggcgccggcatcttcggcgaactcggcctgccggctgttgcgatggcgctcgacggcgtcgaatattatggcggcgtcggcttcctaaaggccggtctgcaggccgcctgggcgatcaccacggtcagcccgacctatgcgcaggagatccggtcggcggagttcggcatgggcctcgacggcctgatcaacatgcgcgccagcgatctccatggcatcgtcaacggcatcgacaccgctatctgggatccgcaaacggacaagcatctggtgtcgaactataccgccgcgacgctcgaggcacgggcgcccaacagggccgccgtggaggaacgcttcggcctcgaccgcgacgacagcccgatcgtctgcgtcatcagccggctgacctggcagaagggcatggatattttggctacagtgatcgacggcgtcgtcgcgaccggcgcgcggctcgccatactgggctcgggcgacgccggcctcgaaggcgcgctgcttgcagccgccgcgcgccaccgtggccgcatcggcgtggtcatcggctacgacgaggggctgtcgcacaccatgcagggcggttgcgacgccatcgtcatcccgtcgcgcttcgaaccctgcggactgacgcagctttacggcctgcgctacggctgcgtgccggtggtcgcccgcactggcggcctcgccgacaccatcatcgacgccaacgaagcggcgatggcggccggcgtggcgacagggttccagttcgctcccaacaatggcggcgcgatgctgcacgccattgcccggctggccgacgctcacgcgaatcccgcggctttcgaaaccatccagcgtcagggcatgaagacggatgtgtcgtgggatcgaagcgccgaaaaatatgttggactctatcgcctgctgctttcgaaaagggttgcctga

SEQ ID NO: 4707 - protein, 480 aa, Rhizobium loti
MQVLSVTPEIFPLIKTGGLADVTGALPIALAAKGVTMRTLIPGFPVVMAAFKKKKAVYQYPLLQGGKASVHAVQIAGLDLFVLDAPHLFDRPGGPYGNASGRTAGQLRRFAALSQVGGDIAGGAISGYQPDIVHAHDWQSAMTLAYMRYGKAVGVPSMMTVHNLAFQGQFGAGIFGELGLPAVAMALDGVEYYGGVGFLKAGLQAAWAITTVSPTYAQEIRSAEFGMGLDGLINMRASDLHGIVNGIDTAIWDPQTDKHLVSNYTAATLEARAPNRAAVEERFGLDRDDSPIVCVISRLTWQKGMDILATVIDGVVATGARLAILGSGDAGLEGALLAAAARHRGRIGVVIGYDEGLSHTMQGGCDAIVIPSRFEPCGLTQLYGLRYGCVPVVARTGGLADTIIDANEAAMAAGVATGFQFAPNNGGAMLHAIARLADAHANPAAFETIQRQGMKTDVSWDRSAEKYVGLYRLLLSKRVA

SEQ ID NO: 4708 - DNA, 1443 bp, Agrobacterium tumefaciens
  CDS (1)..(1443): transl_table=11
atgaatgtcctttcggtttcatccgaaatttatcccctgatcaagaccggagggctcgccgacgttgtcggcgcgctccccatcgcgctcgaagcccatggcgtcagaacgcggacattgatacccggctatccggcggtgaaagccgccgtgacggaccccgtcaaatgttttgagttcaccgacctgcttggcgaaaaggccgatctgctcgaagtccaacacgagaggctagaccttttgatcctcgacgcgcccgcctattacgagcgttccggcggcccctatctcggccagaccggcaaggattatcctgataactggaagcgttttgcggcgctgtcactggcggcggcgcggatcggcgccggtgtgctccccggctggcggccggatatggtgcacgcgcatgactggcaggccgccatgacgcctgtctatatgcgttacgccgaaacaccggaaattccgagccttctcaccatccacaacattgcctttcagggccagttcggcgcaaacatcttcagcaaacttgccctgcccgcccacgccttcggcatggagggcatcgaatattacaacgacgtcagcttcctcaagggcggcttgcagacggcaaccgcgctcagcacggtcagcccatcctatgcggaagaaatcctgaccgcggaattcggcatggggcttgaaggggtgatcggcagccgcgcccatgtgctgcacggcatcgtcaacggcatcgacgccgatgtctggaacccggccaccgaccatctgatccacgacaattattccgccgccaatctcaagaaccgtgccctgaacaagaaggcggtcgccgaacatttccgtatcgatgatgatggcagcccgctattctgcgtcatctcccgcctcacctggcagaagggcatcgacctcatggcggaagccgtggatgagatcgtttccctcggcggccgcctggtcgtgctgggcgcgggcgatgtggcactggaaggcgcgcttcttgcggcggcatcccgccaccatggacgcgtcggtgttgccatcggttacaacgagccgctgtcgcatctcatgcaggcgggttgcgacgcgatcatcattccctctcgcttcgagccctgcggcctgacccagctttacgcgttgcgttacggctgcattccggtcgtcgcccgcaccggcggccttgccgacaccgtgattgacgccaaccatgccgccctcgccagcaaggcggcaactggcgtacaattttcacccgtcacacttgacggtctgaaacaggcgatccgccggaccgtccgttattatcacgacccgaaactgtggacacaaatgcagaaactcggaatgaaatccgatgtttcctgggaaaaaagcgccggtctctacgccgcgctttatagccagcttatttcgaaaggccattga

SEQ ID NO: 4709 - protein, 480 aa, Agrobacterium tumefaciens
MNVLSVSSEIYPLIKTGGLADVVGALPIALEAHGVRTRTLIPGYPAVKAAVTDPVKCFEFTDLLGEKADLLEVQHERLDLLILDAPAYYERSGGPYLGQTGKDYPDNWKRFAALSLAAARIGAGVLPGWRPDMVHAHDWQAAMTPVYMRYAETPEIPSLLTIHNIAFQGQFGANIFSKLALPAHAFGMEGIEYYNDVSFLKGGLQTATALSTVSPSYAEEILTAEFGMGLEGVIGSRAHVLHGIVNGIDADVWNPATDHLIHDNYSAANLKNRALNKKAVAEHFRIDDDGSPLFCVISRLTWQKGIDLMAEAVDEIVSLGGRLVVLGAGDVALEGALLAAASRHHGRVGVAIGYNEPLSHLMQAGCDAIIIPSRFEPCGLTQLYALRYGCIPVVARTGGLADTVIDANHAALASKAATGVQFSPVTLDGLKQAIRRTVRYYHDPKLWTQMQKLGMKSDVSWEKSAGLYAALYSQLISKGH

SEQ ID NO: 4710 - DNA, 1389 bp, Bradyrhizobium japonicum
  CDS (1)..(1389): transl_table=11
atggacgacttcgtccgcgtcggcggacttggagccgtttccgctgccctgcccagagcccttcgccccttcgccgatatccggatcatgttgcccggctatcgcgacatcatcgagcaactcacgcatattcagatcgttggccgctgcccgtcgtttgcggatctgccggcctgctcgctcggccgggccgcgaccaaggacggcctgccggtctatgtgctgttatgctcgcaactctacgaccggcccggcaatccctatggcgacgagtccggacgcgactggccggacaacgacatccgcttcgcacgctttgcctcggcagccgctgagctggccatgggcaagctggacaagaattgggcagcagacctgatccatgccaacgactggcaggcctcgctcgtgcccgcctatctcgcctggcgcggcgccaagctgccgtcgatcctgaccattcacaacctcgcctatcagggcctcttcccgaaggactcgctgcggcggatcggcgcaccggaaagcgccttccacatcgacggcctcgaattctacgaccaggtctccttcctcaaggctggcctcgtctacgcctcgcatctcaccaccgtcagcggcacctatgcgcgcgagatcaccacggccgagttcggctgcggcctggagggtctgctccggctgcgctcggacgccgccgagctcaccggcatcctcaacggcatcgacgagagctgggacccgcgctcctgcgcccagctcgcccagcaattcggcgccggcgactgggtcggcaagaaggccaatgcggactacgtgcgcaagcagttcgggctggcggtgtcgcgcggcccgatgttcggcatcgtcgcgcggctcgtgcaccagaagggcatcgatctcgtgctgtccgcggccgacgagatcatcgatgccggcggccagatcgtggtcaccggctccggcgagccggcgctcgagcaggcgctgatcgacgcacatcgccgccgccccgatgcgatcggcgttgcgatcggcttcaacgacgcccaggcgcggcgcatcttcgccggcagcgacttcaccctgatgccgtcgcgcttcgagccgtgcggcctcagccagatgtacgcccagcgcttcggctcgctgccgatcgggcaccagaccggcggcttggccgagaccatcaccgacggcgagaccggcttcctgttctcgagaccctcgcacgaatccttcctcggcggcgtccgccgggccttcgaagccttcatggcgcaggaccagctcgactccatgcgccgcagcgccatgggacggtcgttctcctggagcatctcggccgacagctatagcgcgctgtaccggaagctggcagcggtgtga

SEQ ID NO: 4711 - protein, 462 aa, Bradyrhizobium japonicum
MDDFVRVGGLGAVSAALPRALRPFADIRIMLPGYRDIIEQLTHIQIVGRCPSFADLPACSLGRAATKDGLPVYVLLCSQLYDRPGNPYGDESGRDWPDNDIRFARFASAAAELAMGKLDKNWAADLIHANDWQASLVPAYLAWRGAKLPSILTIHNLAYQGLFPKDSLRRIGAPESAFHIDGLEFYDQVSFLKAGLVYASHLTTVSGTYAREITTAEFGCGLEGLLRLRSDAAELTGILNGIDESWDPRSCAQLAQQFGAGDWVGKKANADYVRKQFGLAVSRGPMFGIVARLVHQKGIDLVLSAADEIIDAGGQIVVTGSGEPALEQALIDAHRRRPDAIGVAIGFNDAQARRIFAGSDFTLMPSRFEPCGLSQMYAQRFGSLPIGHQTGGLAETITDGETGFLFSRPSHESFLGGVRRAFEAFMAQDQLDSMRRSAMGRSFSWSISADSYSALYRKLAAV

SEQ ID NO: 4712 - DNA, 1482 bp, Methylococcus capsulatus
  CDS (1)..(1482): transl_table=11
atgaagatcctgttcgtctccagtgaggtcttccccctgatgaagaccggcggactcgcggacgtctccggcagcctgccggcggccttgtccgccctgggtcatgatgtgcgtatcctgatgccggcatacccggaagccatctccgccgccgaaacccccaacgcgctgagtctgcgtcaggcgggcagtcagctgaccctgctgtcgacgcgcttgccgggcaccaccgtgcccctctggctgctggacgcaccggcttcgttcggccgcttcggcaacccttacctggcacccaacggtgccccctggcccgacaatgccgaacgtttcgctctgctcgcgcgtgtcgccgtcgacctcacccaggaccggctcggcctcggctggaaacccgatgtcgtccattgcaatgactggcaaaccggtttgatcccgccgcttttgagcgacgagccgaatcgtccggccgtggtgttcaccgtccacaatctcgcctaccaaggtctgttcccctacgaaacctttcaacgcctggcgctccctccccgtctctggaagatggaggcactggagttctacggccagctttccttcatcaagggagggttggtattcgccgaccgcatcaacacggtgagtccaagctatgccgaagagatccagaccccggagttcggctgcggcctggacggtctgctcagaagccgcaagtcatgcctgagcgggattctcaacggtatcgacgacgtggcctggaatccggccaccgatccctatcttcccgcgccctacggcccggataccctggagcggaaaaaggtcaaccgcacggtgctcagacagcggtacggcctgccggacgacccggaggtcgccgtgctcggaatggtgggaaggatggtcgagcagaagggagtggacctgttgatcgacattctggatgatctgctgcagttgccggtccagctcgtcgtcctgggcagcggcgacaaggaattcgaacgctgcttcgaaagggccgccgcagcccgtccggagcgtatcgccgtcaccatcggctatgacgaaccgctggcccatctcatcgaagccggcgccgatatctttctgatgccttcccgcttcgagccctgcggcctgaaccaactctatagtcagcgctacggcaccgtaccgatcgtgcgcaaggtcggcggactcgcggacaccgtggaagatgccacgcccgagcgccttgcggccggacaggccagcggcatcgtgttcgagccggccaagcccgccttcctgctggaggccgtctaccgcgccctggcgctgtaccgggagcccgaggtctggcgggcggtctgcaagtgcggcatggccaaggatttttcctggcgcaagagtgcctcccggtatgtcggactctaccgggaggcactggccggaatgaatgccggctgctccatcgccgacccccgctgtgcggcctag

SEQ ID NO: 4713 - protein, 493 aa, Methylococcus capsulatus
MKILFVSSEVFPLMKTGGLADVSGSLPAALSALGHDVRILMPAYPEAISAAETPNALSLRQAGSQLTLLSTRLPGTTVPLWLLDAPASFGRFGNPYLAPNGAPWPDNAERFALLARVAVDLTQDRLGLGWKPDVVHCNDWQTGLIPPLLSDEPNRPAVVFTVHNLAYQGLFPYETFQRLALPPRLWKMEALEFYGQLSFIKGGLVFADRINTVSPSYAEEIQTPEFGCGLDGLLRSRKSCLSGILNGIDDVAWNPATDPYLPAPYGPDTLERKKVNRTVLRQRYGLPDDPEVAVLGMVGRMVEQKGVDLLIDILDDLLQLPVQLVVLGSGDKEFERCFERAAAARPERIAVTIGYDEPLAHLIEAGADIFLMPSRFEPCGLNQLYSQRYGTVPIVRKVGGLADTVEDATPERLAAGQASGIVFEPAKPAFLLEAVYRALALYREPEVWRAVCKCGMAKDFSWRKSASRYVGLYREALAGMNAGCSIADPRCAA

SEQ ID NO: 4714 - DNA, 1443 bp, Rhizobium meliloti
  CDS (1)..(1443): transl_table=11
atgaacatcctgtcagttgcgtccgaagtctacccgctggtgaagacggggggcctcgccgatgtcgtcggcgcgctgccctccgcacttctcccgcatggtgtgcggacgcgcacgctggtgcccggctatccctcggtgctgaagaagctgaagaagaaaaaaccggtcggccgattcgacaatctcttcggccatccagccacggtgcttgccgccgaggtcaacggagtggacctgctcgtcctcgaccagcccgcactctatgcacgggacggcggcccttatctcgattcgaccgggcgcgattatcccgataatttccggcgcttcgccgcactctcgctggcagctgcggagatcgcggggaacggcatcatccccaactggaagccggacatcgttcacgtccacgactggcagacggcgctcacccccgtctatatgcgcttcggcccggcgccggacctgccgacggtcatgacgatccacaacatcgccttccagggtcagttcggcgcctcggtgttcccggaactggcgctgccgccggatgccttctccacgcaattcgtcgaatattatggagatgtcggcttcctcaaaggcggcctgcagacggcaagcgcaatcaccacggtcagcccttcatatgcgcaggaaatcctgacgcccgaattcggcatgggccttgatgggctcctgtcgagccgtgtcgcggacctgacgggcatcgtcaacggcatcgacggagagacgtgggacccgcagacggacccgcacattccggcgcattacgggccgggaacgctcaaacggcgcgccggcaaccgcaaggcgctggaagagcgtttcggcctcgaaaaaggtccggggccgatcttctgcgtcatcagccgcctcacctggcagaaaggcatggacctcgtcgccgaagccgccgacgatatcgtggcactcggcggcaagctcgtcgtgctcggctcgggcgatccggcgctcgaaagcgcgcttatggcggccgcgtcgcgcaaccgcgggcatatcggcatggtgaccggttatgacgagccgctgtcgcacctcatgcaggcaggcgccgatgcgatcctcattccgtcgcgtttcgaaccctgcggcctgacgcagctctatggcctgcgctatggttgcgttccggtcgtggcccgcaccggcggtctcaccgacaccatcatcgacgccaacgaggcggcgctgtcggcgaagtgcgccaccggctttcatttcctgccggtgacgaccgacgggctaaggcttgcgatccggcgcgtcctgcgcgcatacaatgaacccaagctctgggcacgcctgcagtaccagggcatgaaatccgacgtttcctgggccaaaagcgcggaacgctacgtctcgctttactccgctcttctcgcgaaaggctaa

SEQ ID NO: 4715 - protein, 480 aa, Rhizobium meliloti
MNILSVASEVYPLVKTGGLADVVGALPSALLPHGVRTRTLVPGYPSVLKKLKKKKPVGRFDNLFGHPATVLAAEVNGVDLLVLDQPALYARDGGPYLDSTGRDYPDNFRRFAALSLAAAEIAGNGIIPNWKPDIVHVHDWQTALTPVYMRFGPAPDLPTVMTIHNIAFQGQFGASVFPELALPPDAFSTQFVEYYGDVGFLKGGLQTASAITTVSPSYAQEILTPEFGMGLDGLLSSRVADLTGIVNGIDGETWDPQTDPHIPAHYGPGTLKRRAGNRKALEERFGLEKGPGPIFCVISRLTWQKGMDLVAEAADDIVALGGKLVVLGSGDPALESALMAAASRNRGHIGMVTGYDEPLSHLMQAGADAILIPSRFEPCGLTQLYGLRYGCVPVVARTGGLTDTIIDANEAALSAKCATGFHFLPVTTDGLRLAIRRVLRAYNEPKLWARLQYQGMKSDVSWAKSAERYVSLYSALLAKG

SEQ ID NO: 4716 - DNA, 1449 bp, Bradyrhizobium japonicum
  CDS (1)..(1449): transl_table=11
atgacgcctgctcgcgtcctcgcggtcgcctccgaagtctatcccatcgtcaagaccggcggcctcgcggatgtcgccggcgcgctgccgattgcgctgaaggcgcacggcgtcgagatgcgcaccctgatgccgggctatcccgacgtgatgcggctgctctcgggcgcggaggagatccggcgctggccggattatttcggcgggccgggccggctgctcgccggcgcgcatgacgggctcgacctgttcgtgctcgacgtgccgcatctctacgcgcggccgggcaacccatacgtcacgacagagggggtcgactggccggacaacggcgtgcgctttgcggcgctgtcgcgcgtggcggccgacatcggccacggactcgttccggccttcgtgcccgacatcgtgcacgcccatgactggcaggccgggctcgcgcccgcttatctgcactacgacaatcgtccgcggcccggcaccgtgatgacgatccacaacatggcctatcagggcaagttcgctcctgagctgatcggtgcgatcggcctgccgtggagctccttcgacgtcaacggcctcgaatatttcggcggcatcagcttcctgaaggccggcctgcaattcgccgatcgcatcacgacggtgtccccgacctacgcgcgtgagatccagagcgacgaaggcggcatggggctcggcggcctgctgcgcgcgcgcgcgggcgcattgagcgggatcctcaacggcatcgacatcgcggtgtggaatccgcagaccgattcgcacatcgcctatcggttcggcgcggaggaccttacattccgcgctgcgaacaaggcggtgcttcagcaacaattcaatctcgattcctcggacgaagcccccctgctcggcgtcatcagccggctgtcctggcagaaggggctcgatctcctgctcgaggccattccgaccattttgggcgaaggcatgcagctcgcgctgctcggcagcggcgaccgcgatctccaggatcgctatcaggccgccgcccgcgcgaatcccggccggatcggggtcgtaatcggctacgacgagatcctggcgcatctgatccaggccggctcggacgcgctcatcgtgccgtcgcggttcgagccgtgcggcctgacccagctctgcgccctgcgctatggcgccgtgccgatcgtctcgcgcgtcggcggcctcgaggataccatcgtcgatatcggcgaggccggccgcgaggccaccggcttcaagttcggcccggtgacggcggatgccctcgccggcacgctgcgcaaggccaacacggctttccacgacaagctgacctggcggcagctgcaacgaaacggccttgcgaccgacgtctcctggcgcagccgcgccggcgactatgcagcgctgtatcggagcctgatcgaatcgcgccgcgcctag

SEQ ID NO: 4717 - protein, 482 aa, Bradyrhizobium japonicum
MTPARVLAVASEVYPIVKTGGLADVAGALPIALKAHGVEMRTLMPGYPDVMRLLSGAEEIRRWPDYFGGPGRLLAGAHDGLDLFVLDVPHLYARPGNPYVTTEGVDWPDNGVRFAALSRVAADIGHGLVPAFVPDIVHAHDWQAGLAPAYLHYDNRPRPGTVMTIHNMAYQGKFAPELIGAIGLPWSSFDVNGLEYFGGISFLKAGLQFADRITTVSPTYAREIQSDEGGMGLGGLLRARAGALSGILNGIDIAVWNPQTDSHIAYRFGAEDLTFRAANKAVLQQQFNLDSSDEAPLLGVISRLSWQKGLDLLLEAIPTILGEGMQLALLGSGDRDLQDRYQAAARANPGRIGVVIGYDEILAHLIQAGSDALIVPSRFEPCGLTQLCALRYGAVPIVSRVGGLEDTIVDIGEAGREATGFKFGPVTADALAGTLRKANTAFHDKLTWRQLQRNGLATDVSWRSRAGDYAALYRSLIESRRA

SEQ ID NO: 4718 - DNA, 1461 bp, Rhizobium meliloti
  CDS (1)..(1461): transl_table=11
atgcagatactgtctgtcacggccgaaatttttccgctcgtcaagaccgggggcctggcagatgtagcgggatcgctccccaaggcactcagggcccacggcatccacacgcgcagcttcgttccgggttaccccggcgtcatgcgcgcgctcagcgacgcgaccccggtcgccgagtttgaaagcctgttcggcgaacgcgccactctcatcgcggcgcgggctcacgggctggatctcttcgtgctcgatgcgccggccttctatgacaggcaaggggccctctacgtagacaggcatggccgggattatgcggacaactggaaacgcttcgccgccttctcgctggtcgcatcgcaaatcgcgcgcgggctcgttcccaactggcggccgcacatcattcacgcacatgactggcacgcggcgatgagcctcctctatctgaagtacgccggcgacgacaccattcctcgcgtcctaaccgtgcacaaccttgcgttccaggggcaattcccggcccactacttccccgagctcgggctcccggcggaagcatattcgatcgacggcgtcgaatattacggcgatatcgggttcctcaagggcggcctgcaggcagccgatgcgatcacggtcgtcagccccacctatgcgcgggaaatcatgtccccggccttcggcatggggctggaaggcgtgatgaacgaacggcatgcggatgtcgtgggcatcgtcaacggcatagacctggaagtatgggatccatcctcagatccctgcatcgagcatcactattcggcgcgcgtgccgctgcgccgcctgcccaaccggcaggtgctgctccggcatttcggcctgccggacacctgcggaccgatcttcgccagcgtcaaccggttgacatggcagaagggcatggaccttctcgctgcgaccgccggcgagattgtcaagaatggcggcaccctgatcatccatgggcaaggcgaggagaagctggaagccgcattcatggatctcatgcgacggttcccgcaaaacatcagtgtaagcatcggttatgacgagcacctcgcccacaggattcatgccggcgcggatgcaatgctcgttccgtcccggttcgagccctgcggcctcacgcagctttacgcgctacgctacggctgcgtaccggtcgtcgcccgcacgggcggcctgtcggagaccatcatcgatgccaacgatgccgcgctccatgcccatgtcgcgacgggcatacagtttgcgcccattgacgaggacggactacgccatgcactgcgccgcaccttccggctctaccggctgcgacgcgtctgggagggacttcgccgccagggcatgaaaaccgactgctcgtggcatcgcagtgcggcccgctatgcggacctttacagcgaactcctcaatcccgacatgcgcctggtcggcagcgcttga

SEQ ID NO: 4719 - protein, 486 aa, Rhizobium meliloti
MQILSVTAEIFPLVKTGGLADVAGSLPKALRAHGIHTRSFVPGYPGVMRALSDATPVAEFESLFGERATLIAARAHGLDLFVLDAPAFYDRQGALYVDRHGRDYADNWKRFAAFSLVASQIARGLVPNWRPHIIHAHDWHAAMSLLYLKYAGDDTIPRVLTVHNLAFQGQFPAHYFPELGLPAEAYSIDGVEYYGDIGFLKGGLQAADAITVVSPTYAREIMSPAFGMGLEGVMNERHADVVGIVNGIDLEVWDPSSDPCIEHHYSARVPLRRLPNRQVLLRHFGLPDTCGPIFASVNRLTWQKGMDLLAATAGEIVKNGGTLIIHGQGEEKLEAAFMDLMRRFPQNISVSIGYDEHLAHRIHAGADAMLVPSRFEPCGLTQLYALRYGCVPVVARTGGLSETIIDANDAALHAHVATGIQFAPIDEDGLRHALRRTFRLYRLRRVWEGLRRQGMKTDCSWHRSAARYADLYSELLNPDMRLVGSA

SEQ ID NO: 4720 - DNA, 1485 bp, Azoarcus sp
  CDS (1)..(1485): transl_table=11
atgaatgccaccaggaaagccgcccgactccgcgtgctgttcgcgacgcccgagtgcgcgccatgggccaagacgggcgggctcggcgacgtcagcgcgagcctgccggctgcgctggcggcgctcggactcgacgtgtgcgtgctgctgccgggttatccgtcggtgcgtcaggcggcgcgaaatgcgcgcaaggtcgcggacatccgctccgcgcacggcctgccgtccgcccgcctgctgcgcggtcggctgccgagcggcgtgccggcgctggtgctcgactgtccgtcgctgtaccggcgcgaaggcggtccgtaccaggacggtgagggcgtcgactacactgacaacgcgctgcgtttcggcctgctgtcgcacgtcgccgcgcggctggcgagcgccgcgagcccgctggtgtggcgcgcggacatcctgcactgcaacgactggcccacggcgctcgcaccggcgtacctgaagctcggcctgcccggggcggcgcccagcctcatcgtcgtccataacctcgcgttccaggggatcttcccgctcgacgtcgccgaacggctcggactgccgcccgagagcctgaagtccgaaggcgtcgagtactggggcaagctgtcgttcctgaaggccggcctctactatgcggaccgcatcgtcgccgtcagcccgacgtacgcgcgcgagatccgcaccgaagcgcacggctgcggcatgcaggggctgctcgagacgcgcgcgaaccgcctcgccggcatcctcaacggcatcgacatggatgcctggaacccgcgcaccgatccgcacctcgacacgaactacgacgcggacacgctcgaagacaaggcgccgaacaagcgcgcgctgcaggccgagttgggcctggcggccgacgacgatgcgctgctgctcggcatggtcacccgcctgaccgaccagaaaggcatcgacctggtgctcgatgcgctgccggaattgctggcgcggccggtgcagctcgcgctgctcggaggaggcgatgcgcgcttcgagcaggcgtggcgccaacgcgcggccgcgaggccggaccgtatcgctgcggtgatcggcttcgacgagcggctcgcgcaccgcatcgaggccggcgccgatgcgttcgtgatgccgtcgcgcttcgagccgtgcgggctgaaccagatgtacagccagcgctacggcacgccgccgatcgtgcgcgcgacgggagggctggtcgactcggtcggcgacttcagcgtcgatggcctgcatcgcggtgaagcgtcggggttcctgttcgccgaagcgacaccggcggcgctcgtcgaagcggtcgaccgcgcgctgaaagtgtttgccgaccgtgtggcgtggcgcacgctgtgctgcaacggcatggcgcgggacttcagctgggggggcagcgccggccgatacgcgcggctttacgtggcgatgcgagcagcggcggcagcctga

SEQ ID NO: 4721 - protein, 494 aa, Azoarcus sp
MNATRKAARLRVLFATPECAPWAKTGGLGDVSASLPAALAALGLDVCVLLPGYPSVRQAARNARKVADIRSAHGLPSARLLRGRLPSGVPALVLDCPSLYRREGGPYQDGEGVDYTDNALRFGLLSHVAARLASAASPLVWRADILHCNDWPTALAPAYLKLGLPGAAPSLIVVHNLAFQGIFPLDVAERLGLPPESLKSEGVEYWGKLSFLKAGLYYADRIVAVSPTYAREIRTEAHGCGMQGLLETRANRLAGILNGIDMDAWNPRTDPHLDTNYDADTLEDKAPNKRALQAELGLAADDDALLLGMVTRLTDQKGIDLVLDALPELLARPVQLALLGGGDARFEQAWRQRAAARPDRIAAVIGFDERLAHRIEAGADAFVMPSRFEPCGLNQMYSQRYGTPPIVRATGGLVDSVGDFSVDGLHRGEASGFLFAEATPAALVEAVDRALKVFADRVAWRTLCCNGMARDFSWGGSAGRYARLYVAMRAAAAA

SEQ ID NO: 4722 - DNA, 1431 bp, Bacillus cereus
  CDS (1)..(1431)
atgaatattttatttgcagtatcagaatgtgtaccgtttgtgaaatcgggaggattagctgatgtagcgggtgcgctcccaaaagagctaaaaaaattaggagtggacgttcgtattatacttccgaattatagtctcattccgcaaaagttaagagatggatgtacgttacataaagtaattaacgtccctcttgggtggagaaatcaatattgtggaattttaaaaggtgagcaagacggaattacgtattacttaatagataatgaatattattttaagagagattctctgtatggtcattacgatgacggagagcgtttttcttatttctcaaaagcagtgttagagtgtattccgcaccttgattttgaagtggatgttcttcatagccatgattggcatacggctatggttaatttcttacttcgtgaaaagtatcaagataacccgttatatgagcgtattaaaacggtatatacgattcataacttgcagttccaaggtgtatttcctcctgaagtgatctacgacttgttagagcttggtgatgaatattttcatagtgagcagctagagttttatggaaacgtaaactttatgaaaggcggtattattgcttcggatcaaattacagcggtgagcccgacgtataaagaagaaattcaatatgaatttttcggtgagaagttagatggattactgcgaaaatataatgataagcttagcggcattgtaaatggtattgatacgagcgtatataatccagaaacggattcgtatattaaggcccagtatgatgcagagtcattatatgaaaagagtgaaaataaacgcgccttgcagcgttattttggtttgccagaaaaagaggatacaccaattatttcaatggtaacgagattaacgaagcaaaaaggtcttgatttagtacgtactgtattccgcgaaataatggaagaagatgtacaatgtattattttaggttcaggtgattcggaatatgagcaattctttgagtggatggcatatgagtatccggagaaggtaaaagtttatatcggatttaatgaagaattagctcaccaagtgtatgcgggaagcgatttgtttttaatgccatcgctgtttgaaccgtgtggacttggacaacttatcgcattagcatacggtacgattccaattgtaagagaaacaggtgggttaaacgacacggtacattcttatgatgaagaaactggagaaggaaatggtttcagtttcacgaattttaatgcacatgacatgctgcatacgattcatcgtgcaattgaattctatcatgataaaccagtgtgggagcagcttgtaaaacaagcgatgactgaagattatagctgggagcaatcggctcttgcttataaggaattgtataaaagtctcatggaataa

SEQ ID NO: 4723 - protein, 476 aa, Bacillus cereus
MNILFAVSECVPFVKSGGLADVAGALPKELKKLGVDVRIILPNYSLIPQKLRDGCTLHKVINVPLGWRNQYCGILKGEQDGITYYLIDNEYYFKRDSLYGHYDDGERFSYFSKAVLECIPHLDFEVDVLHSHDWHTAMVNFLLREKYQDNPLYERIKTVYTIHNLQFQGVFPPEVIYDLLELGDEYFHSEQLEFYGNVNFMKGGIIASDQITAVSPTYKEEIQYEFFGEKLDGLLRKYNDKLSGIVNGIDTSVYNPETDSYIKAQYDAESLYEKSENKRALQRYFGLPEKEDTPIISMVTRLTKQKGLDLVRTVFREIMEEDVQCIILGSGDSEYEQFFEWMAYEYPEKVKVYIGFNEELAHQVYAGSDLFLMPSLFEPCGLGQLIALAYGTIPIVRETGGLNDTVHSYDEETGEGNGFSFTNFNAHDMLHTIHRAIEFYHDKPVWEQLVKQAMTEDYSWEQSALAYKELYKSLME

SEQ ID NO: 4724 - DNA, 1458 bp, Bacillus stearothermophilus
  CDS (1)..(1458): transl_table=11
atgaaggtcctatttgccgtttccgaatgtgcaccgtttgccaaatcagggggattggctgacgtcgccggcgcactgccgaaagagctgcgccggctcggcattgatgcccgcgtgatgttgccgaaatatgaaacgatcgcccctgaatggaaaaagaaaatgaaaaaagtcgccgagctcatcgtgccggttgggtggcggcgccaatattgcggcgtggaggagcttcggcatgacggagtcatctattactttatcgacaacgaatattattttaagcggccgcagctgtacggccattatgatgatggcgagcggttcgcctatttttgtcgggcggtgctcgaagtgttgccggaaattcagttccagcccgacgtaattcactgccatgactggcatacaggcatggtgccgtttttgcttcgggaacaataccggcatgagctgttttatgtcgacatgcgcaccgtctttacgattcataacttgcagtttcaagggctgtttccgcgcggcattttagaagacttattgaatttggatggtcgctatttcactgtggatcatcttgagttttatggctgcgtcagctttatgaaaggggcgctcgttgcttccgatttgattacaacagtgagcccgacgtataaagaggagattcaaaccgcctattacggcgagcggttagacggtttgctgcgggcgcggcgggatgatctgctcggcattttaaacggcattgacgatgagttttacaatccagaagcggatccgtttttgacggcgacgtatagcgtacatacgcgggaaagaaaacaactcaacaagcgtgccttgcagcggcagttcggcttgccggagtgggacgatgtaccgcttatcgcgatggtcacgagaatgacggcgcaaaaagggcttgatttagtaacatgcgtctttcatgagatgatgagtgaagatatgcagcttgtcgtactcggcacgggcgactggcggtttgaacaatttttctcgcaaatggctgcggcgtatccgggcaaagtcggcgtgtacatcggcttccatgaaccgctcgcccaccaaatttacgccggtgccgatttgtttttaatcccgtcgttatttgaaccgtgcgggctgagccaaatgatcgcgctccggtatggaacgatcccgatcgtccgggaaactgggggattaaacgatacggtgcaatcatacaatgagataacaaaagaaggaaatgggttcagctttaccaattttaacgctcatgacatgctgtatacgatccgccgggcgctgtcattttaccgccaaccatccgtttgggaacagttgacggaacgggcgatgcgcggtgattacagttggcgtcggtcggcaaaccaatataaacaagcctatgaacagctgatcaaaaaggaggagcacacgcttgttcacggataa

SEQ ID NO: 4725 - protein, 485 aa, Bacillus stearothermophilus
MKVLFAVSECAPFAKSGGLADVAGALPKELRRLGIDARVMLPKYETIAPEWKKKMKKVAELIVPVGWRRQYCGVEELRHDGVIYYFIDNEYYFKRPQLYGHYDDGERFAYFCRAVLEVLPEIQFQPDVIHCHDWHTGMVPFLLREQYRHELFYVDMRTVFTIHNLQFQGLFPRGILEDLLNLDGRYFTVDHLEFYGCVSFMKGALVASDLITTVSPTYKEEIQTAYYGERLDGLLRARRDDLLGILNGIDDEFYNPEADPFLTATYSVHTRERKQLNKRALQRQFGLPEWDDVPLIAMVTRMTAQKGLDLVTCVFHEMMSEDMQLVVLGTGDWRFEQFFSQMAAAYPGKVGVYIGFHEPLAHQIYAGADLFLIPSLFEPCGLSQMIALRYGTIPIVRETGGLNDTVQSYNEITKEGNGFSFTNFNAHDMLYTIRRALSFYRQPSVWEQLTERAMRGDYSWRRSANQYKQAYEQLIKKEEHTLVHG

SEQ ID NO: 4726 - DNA, 1533 bp, Bordetella bronchiseptica
  CDS (1)..(1533): transl_table=11
atgacgaccatacgtaccttggtggtggccgcggaggcgtttccgctggccaagacgggcggcctgggcgacgccgtggcgggcatggtgcaggcgctgggccaccggccgggcggtgtggacgtgcagtgcgagttgctgatgcccgcctatcgcggcacgctggacaggctgtaccggccgcgcacggtcgcgcggctgggcggactgcccggcggcccggccagtctggtgcgcggccattgcccgggctcgggattgtcggtgctgctgctgcgcaacgacgcgctgtacgaccggcccggcatttacgtggacgacagcggccagggctacccggacaatgcccgccgctatgcggccctggcccacgcggccgcccggctggcgcagggcctgcccgggctgcggccgccgcacgtggtgcacgcgcacgactggcatgccgcgctcgcgccgctgctcatccacgcggccggactgcactacgtcaagacgctgctcaccattcacaacctggcgttccagggtacgtttccggccgagctggccagcgcgctgggcatcccgctggcgtgccggcacgacgacggcgcgctgtccgatgaccgagtgaatttcctcaaggccggcatccgttatgcgacccgcgtcaccaccgtcagccgcgcctatgcgcgcgagattctcacgccggcgttcggttgcggattgcacggtttgctgcgcgcgcgcggcgccgacctgagcccggtgcccaatggcatcgacaccgcgctgtggaatccggccgccgacccgcatctgggcggcctgcgcttcgacgcgctggatatgcgcaacaaggcctgttgcaaggccgcgctgcaggccgagctgggcctgcagctgcgcgcggacgcgaccgtgctggccatgggcagccgcctgaccggccagaagatggccgacgtggccatcgccgccctgcccgccctgttggaggcgcacgaacacttgcagttcgcgctgatcggccgcggcgagccggacctcgaagcggcgctgcgcgccctggcggcgcgctacccgggccgctgcgcggtccacatcggctacgacgaaccgcttgcgcaccggctgcacgccggcgccgacctgctgctgcacggcagccgcttcgagcctttcggcctgaccccgctgtacgccatgcgctatgggaccctgccggtggcctcgcgggtgggcggcatggtcgataccatccgcgacccgggcccggcgatcgaagagtcctgcgccggccagggcacgggtttcctgttcgatggcagcgagcccgccgacatgcggcaggccgtgacgcgtgcgctgcgcgcgctggccaagccggcggtgcgcgacgccatgcgccgcaatgccatgcaggccgatttcagctggcgcacctcggcgcaggcttatgcggggctgtacgccaatctggccagcgggccgcagcgcggccgggtgcccgcgcccacgctgccgctgctggccaacgcggcctga

SEQ ID NO: 4727 - protein, 510 aa, Bordetella bronchiseptica
MTTIRTLVVAAEAFPLAKTGGLGDAVAGMVQALGHRPGGVDVQCELLMPAYRGTLDRLYRPRTVARLGGLPGGPASLVRGHCPGSGLSVLLLRNDALYDRPGIYVDDSGQGYPDNARRYAALAHAAARLAQGLPGLRPPHVVHAHDWHAALAPLLIHAAGLHYVKTLLTIHNLAFQGTFPAELASALGIPLACRHDDGALSDDRVNFLKAGIRYATRVTTVSRAYAREILTPAFGCGLHGLLRARGADLSPVPNGIDTALWNPAADPHLGGLRFDALDMRNKACCKAALQAELGLQLRADATVLAMGSRLTGQKMADVAIAALPALLEAHEHLQFALIGRGEPDLEAALRALAARYPGRCAVHIGYDEPLAHRLHAGADLLLHGSRFEPFGLTPLYAMRYGTLPVASRVGGMVDTIRDPGPAIEESCAGQGTGFLFDGSEPADMRQAVTRALRALAKPAVRDAMRRNAMQADFSWRTSAQAYAGLYANLASGPQRGRVPAPTLPLLANAA

SEQ ID NO: 4728 - DNA, 1533 bp, Bordetella parapertussis
  CDS (1)..(1533): transl_table=11
atgacgaccatacgtaccttggtggtggccgcggaggcgtttccgctggccaagacgggcggcctgggcgacgccgtgtcgggcatggtgcaggcgctgggccaccggccgggcggtgtggacgtgcagtgcgagttgctgatgcctgcctatcgcggcacgctggatatggtgtatcggccgcgcacggtcgcgcggctgggcggactgcccggcggcccggccagcctggtgcgcggccattgcccgggctcgggattgtcggtgctgctgctgcgcaacgacgcgctgtacgaccggcccggcatttacgtggacgacagcggccagggctacccggacaatgcccgccgctatgcggccctggcccacgcggccgcccggctggcgcagggcctgcccgggctgcggccgccgcacgtggtgcacgcgcacgactggcatgccgcgctcgcgccgctgctcatccacgcggccggactgcactacgtcaagacgctgctcaccattcacaacctggcgttccagggtacgtttccggccgagctggctagcgcgctgggcatcccgctggcgtgccggcacgacgacggcgcgctgtccgatgacagcgtgaatttcctcaaggccggcatccgttatgcgacccgcgtcaccaccgtcagccgcgcctatgcgcgcgagattctcacgccggcgttcggctgcggattgcacggtttgctgcgcgcgcgcggcgccgacctgagcccggtgcccaatggcatcgacaccgcgctgtggaatccggccgccgacccgcatctgggcggcctgcgcttcgacgcgctggatatgcgcaacaaggcctgttgcaaggccgcgctgcaggccgagctgggcctgcagccgcgcgcggacgcgaccgtgctggccatgggcagccgcctgaccggccagaagatggccgacgtggccatcgccgccctgcccgccctgctggaggcgcacgaacacttgcagttcgcgctgatcggccgcggcgagccggccctggagacggcactgcgcgccctggcggcgcgctacccgggccgttgcgcggtccacatcggctacgacgagccgctcgcccaccgtttgcacgcgggtgccgacctgctgctgcacggcagccgcttcgagcctttcggcctgaccccgttgtacgccatgcgctacggcaccctgccggtggcctcgcgggtgggcggcatggtcgataccatccgcgatcccggcccggcggtcgaggaatcctgcgccggccagggtacgggcttcctgttcgatggcagcgagcccgccgatatgcagctggccgtggcgcgcgcgctgcgcgcgctggccaagccggcggtgtgcgacgccatgcgccgcaacgccatgcaggccgatttcagctggcgcgcttcggcgcaggcctatgcgggcctgtacgccagcctggccagcgcgccgcagcgcggccgggtgcccgcgcccacgctgccgctgctggccaacgcggcctga

SEQ ID NO: 4729 - protein, 510 aa, Bordetella parapertussis
MTTIRTLVVAAEAFPLAKTGGLGDAVSGMVQALGHRPGGVDVQCELLMPAYRGTLDMVYRPRTVARLGGLPGGPASLVRGHCPGSGLSVLLLRNDALYDRPGIYVDDSGQGYPDNARRYAALAHAAARLAQGLPGLRPPHVVHAHDWHAALAPLLIHAAGLHYVKTLLTIHNLAFQGTFPAELASALGIPLACRHDDGALSDDSVNFLKAGIRYATRVTTVSRAYAREILTPAFGCGLHGLLRARGADLSPVPNGIDTALWNPAADPHLGGLRFDALDMRNKACCKAALQAELGLQPRADATVLAMGSRLTGQKMADVAIAALPALLEAHEHLQFALIGRGEPALETALRALAARYPGRCAVHIGYDEPLAHRLHAGADLLLHGSRFEPFGLTPLYAMRYGTLPVASRVGGMVDTIRDPGPAVEESCAGQGTGFLFDGSEPADMQLAVARALRALAKPAVCDAMRRNAMQADFSWRASAQAYAGLYASLASAPQRGRVPAPTLPLLANAA

SEQ ID NO: 4730 - DNA, 1449 bp, Clostridium perfringens
  CDS (1)..(1449)
atggaggggtttaaattgataaaagttttatttgcaacatcagaggcaaatccatttataaaaactgggggactaggtgatgtaatgggagcattacctaaggagcttaaaagaaagggaatagatgctagagtaattttgcctaaatatagtgctataaaaggagaacttttagataagcttagttttaaaaaatggtttatggttcctgttggttggagaaatcaatattgtggagtatatcagtgtgaatatgatgaagttatatattatttattagatagtgagttttatttccacagaaatggtttatatggagaaggtgatgatggagagagatttgctttctttgatagagctgttttagaaactttaaaagagattgattggtgtccagatattattcattgtaatgattggcaaacaggaatgataccagtacttcataaattagagtattctaaagatccattttataagaatattaagactgtgacttcaattcataatcttttattccaaggtaatttttcagcagatgttttaccagaactttttggatatgattatgaaccagtgagaaatggaagtttagaattttatggtggaatgagttttatgaagggagctataaattatagcgataggattttaactgtaagtgaaacttatgccaaggaaattaaaactccttactttggagaaaatttagatggcttattaagagaaagaggatatgcactaaaaggaatagtaaatggtatagattatgatgaatttaatcctagtaaggatagtttaatagctaaaaatttctcagtgaaaactatagaagataaagtgttaaataaattagctcttcaaaaggaattagggttacctataaatccagatatacctatgataagtattgtatctaggcttacaaatcaaaagggatgcgacttaatagttaatatagcaaatagattacttcaaagaaatgtgcaattagttatattaggaacaggtgattataattatgaaaatcattttaagggattgcaagagctttatccaactaaggtatctgcaaatataaagtttgataatggattagctcatagaatatatgcatcttcagatattttcttaatgccatcattatttgagccttgtggactaggacaacttatagcattaagatatggagctattccaatagttagagaaacaggtggattaaaggacacaattcattcctataataaatatactggaatagggaatggctttagtttcacaaattataatcataatgatttaatgcatgttattgaattagctttagaaacatatgatgataaagagatttggagatcattaattatacaagctatggattctgataatagttggaataagtcagcagaaaaatataaggaattatatgaagaattaatcaagtag

SEQ ID NO: 4731 - protein, 482 aa, Clostridium perfringens
MEGFKLIKVLFATSEANPFIKTGGLGDVMGALPKELKRKGIDARVILPKYSAIKGELLDKLSFKKWFMVPVGWRNQYCGVYQCEYDEVIYYLLDSEFYFHRNGLYGEGDDGERFAFFDRAVLETLKEIDWCPDIIHCNDWQTGMIPVLHKLEYSKDPFYKNIKTVTSIHNLLFQGNFSADVLPELFGYDYEPVRNGSLEFYGGMSFMKGAINYSDRILTVSETYAKEIKTPYFGENLDGLLRERGYALKGIVNGIDYDEFNPSKDSLIAKNFSVKTIEDKVLNKLALQKELGLPINPDIPMISIVSRLTNQKGCDLIVNIANRLLQRNVQLVILGTGDYNYENHFKGLQELYPTKVSANIKFDNGLAHRIYASSDIFLMPSLFEPCGLGQLIALRYGAIPIVRETGGLKDTIHSYNKYTGIGNGFSFTNYNHNDLMHVIELALETYDDKEIWRSLIIQAMDSDNSWNKSAEKYKELYEELIK

SEQ ID NO: 4732 - DNA, 1458 bp, Dechloromonas aromatica
  CDS (1)..(1458): transl_table=11
atgagctcgctctcgattctctttgccacctccgaaatggccccctgggtcaagaccggtggtctcggcgatgtcgccgccgccctgcctgccgccttgcgcaaggccggccacgacatccgcgtcctgctgccggcctacccggcgctgaaacaggctttcccgacagcgacgacggtcgctgaactgcccgccttcgccccgggactgccggcctcccggctgcttgccgcccagaccggcaagctggaattgctgctgctcgactgcccggaactctacgaccgcccgggcaacccctatctcgatgccactggccgcgactggcccgacaatgcgctgcgcttcggcctgctgtcgcgggttgccgcccgcctcggccagccggattcaccgctgagctggcagcccgacatcgtccacgccaacgactggcaaaccgccctcgcaccagcttacctgcattaccagggcggtgcggccagcgtcgtcaccgtgcacaacatcgccttccagggctgcttcggtcgcgaaatgctggccgcccttggcctgccggaacacgcctggcgtttcgatggggtcgaatatcacgaccagctatcgttcctgaaagccggcctgcaactcgcctcacagatttccacggtcagcccgacctatgcccgggaaatccaggacgagcatttcggctatggcctggccccgctgctgcgccaccgcagcgcggaactgcgcggcattttgaacggcgttgataccgacctctggaatccggccaccgacccggtactggcgaccggctatgcggccaaccgcctggctgccaagcggaccaacaaagcggcactgcaaaccgaaatggggctggaggtcaccgctgaccgcccgctgttcggtgtgatcagccgtctgaccagccagaaaggcctcgacctgctgctcaccgtcgccgaaggcctgcccgagctaccggcccaactggtcgtactgggcagcggtgacaagcttatggaggcgggtttcgttgagctggccaagcgcttcccggcgcagattgtcgtcaagatcggctttgatgaaggccttgcccatcgtatcgaagccggcgccgactgcttcgtgatgccatcgcgcttcgaaccctgcggcctgaaccagatgtacagcctgcgttacggcacgccgcccatcgttcgcgccaccggcggcctggccgatacggtcgtcgatgtctgtgaagacacgctggccgacaagtcggccaacggatttgtgctcgacggcgacacgccgcatgcactctggctgaccatcgagcatgtatgccgcacctggcaggacaagaaactgtggcagcgcatccagcagaacggcatgcgccgggatttttcctggacgcacgccgccaacgaatacgttgcgctctatcgcgacgccatcgctacccgagcttaa

SEQ ID NO: 4733 - protein, 485 aa, Dechloromonas aromatica
MSSLSILFATSEMAPWVKTGGLGDVAAALPAALRKAGHDIRVLLPAYPALKQAFPTATTVAELPAFAPGLPASRLLAAQTGKLELLLLDCPELYDRPGNPYLDATGRDWPDNALRFGLLSRVAARLGQPDSPLSWQPDIVHANDWQTALAPAYLHYQGGAASVVTVHNIAFQGCFGREMLAALGLPEHAWRFDGVEYHDQLSFLKAGLQLASQISTVSPTYAREIQDEHFGYGLAPLLRHRSAELRGILNGVDTDLWNPATDPVLATGYAANRLAAKRTNKAALQTEMGLEVTADRPLFGVISRLTSQKGLDLLLTVAEGLPELPAQLVVLGSGDKLMEAGFVELAKRFPAQIVVKIGFDEGLAHRIEAGADCFVMPSRFEPCGLNQMYSLRYGTPPIVRATGGLADTVVDVCEDTLADKSANGFVLDGDTPHALWLTIEHVCRTWQDKKLWQRIQQNGMRRDFSWTHAANEYVALYRDAIATRA

SEQ ID NO: 4734 - DNA, 1440 bp, Erwinia carotovora subsp
  CDS (1)..(1440): transl_table=11
atgcgggtcttacatgtttgttcagagctatttccactattgaaaaccggcggactggcggatgtggctggtgcgttgcccggcgcgcagattgcggcggggatggatgttcgcgtcatcttgcctgccttccccgatctgaaaaaaggcattgctaacctacaggttgtgcgtgagctggataccttcgccggacacgtgaccttgctgttcggccattttaacggcgtcggtatttatttgattgatgtgcccgagctatatgaacgcgcgggcagcccttatcacgacccggcgctttacgcttatgccgataactacctgcggttcgcgctgctggggtggatgggatgcgaaatggcgtgcgggctggaccactattggcggcccgatattgtgcatgcccatgactggcacgcggggctgacctgtgcttatctggcggctcgcaaccgcccagcgaaatcggtctttaccgttcacaatctcgcctatcagggactgttcgctgccggacatatggcgaatcttcacttgccgagcgacttctttcaggtctacgggctagagttctacggtcagatttcctacctcaaggcagggttgttctacgcggatcatattacgaccgtgagcccgacctacgcgcatgagatcacgctgccagcctatggctatggtatggaaggcttgctgaagacgcgtgaagaagaagggcgcctgtccggtatcctcaatggcgtagacgagacgatttggaatccgacgcacgatcctttactgactaaccattacagccgcgaggcgctggcgaacaaagccgaaaacaagcgacatctgcaaacggcgatgggcctgaaagtggacgataaggcgccggttttcgctatcgtcagccgcctgaccagccagaaaggactcgatatcgcgttaagcgcgatacccgatctgttggagcagggcggccaactggtagtgttgggcgcaggggatgccgatttgcaggaaggttttctggctgccgctgcggaatatcacggtcaggttggcgtacagattggctatcacgaagccttctcgcaccgcatcattggcggcgcggatgtcatcatggttcccagccgatttgagccttgcgggttaacgcagctctacggcttgaagtatggcacgttgccgctggtgcgccgaactggggggctggcggatacggtatccgactgttcgctggagaatttggcggatggtctggcaagcgggtttgtctttaacgattgcagcgtgggatcgctatcccgcgcgattcgtcgtgtgttcgtgttgtggtcccgacctacgctatggcgctatgtgcagcgtcaggcgatggcaatggactttggttggcaggtttctgctcaggcttatggtgcgctatatcaacgcttgcatacccactag

SEQ ID NO: 4735 - protein, 479 aa, Erwinia carotovora subsp
MRVLHVCSELFPLLKTGGLADVAGALPGAQIAAGMDVRVILPAFPDLKKGIANLQVVRELDTFAGHVTLLFGHFNGVGIYLIDVPELYERAGSPYHDPALYAYADNYLRFALLGWMGCEMACGLDHYWRPDIVHAHDWHAGLTCAYLAARNRPAKSVFTVHNLAYQGLFAAGHMANLHLPSDFFQVYGLEFYGQISYLKAGLFYADHITTVSPTYAHEITLPAYGYGMEGLLKTREEEGRLSGILNGVDETIWNPTHDPLLTNHYSREALANKAENKRHLQTAMGLKVDDKAPVFAIVSRLTSQKGLDIALSAIPDLLEQGGQLVVLGAGDADLQEGFLAAAAEYHGQVGVQIGYHEAFSHRIIGGADVIMVPSRFEPCGLTQLYGLKYGTLPLVRRTGGLADTVSDCSLENLADGLASGFVFNDCSVGSLSRAIRRVFVLWSRPTLWRYVQRQAMAMDFGWQVSAQAYGALYQRLHTH

SEQ ID NO: 4736 - DNA, 1470 bp, Francisella tularensis subsp
  CDS (1)..(1470): transl_table=11
atgcgcgttttacatgtatgtagtgaattatatccaattctaaaaacagggggtcttgcagatgttacagctgctttgcctcctgcactagctggttttggggttgatagtagggttttggttccaggatttccagcatttataaatgctatcaaggataagcagcttttgattaatattccttctcgctttggtgcagaagagataaatatatttttagctaagatttctaataccaaaattgacatatatgtaatagacgctcctagtctatttgctcgtccgggtaatccgtacgcagatagtagtaatcaagcttatgcagataattatcttagatttgctttattaggttgggtagcggcaagaatttctgaaggcttggatgctaagtggaagccagaaattgttcatagtcatgattggcatgctggattagtacctgcttatatcaaagcaagtgagctggcatctggcaaaaaagctgtaaaaacagtgttcactgtgcataaccttgcttaccaaggtctttttccaatgagtgtttttgcggagttagatttaccaggtatattcttgagtatgaatggtttagagttttatggtcaagtatcttttatgaaagctggattatactttgctgataaaattactacggttagcccaacatacgctaaagagattcagatttatgagcaaggctgtggtcttgagggtttgcttgcagatcgacataatgacctgtatggagttctaaatggcgtggatccacaaatatggaatcctaagaaagattctttaattgctactaattactcatctactacagtagcgacaggcaaagcaaagtgtaagttagcattacagcaaatgatgggcttagctgaaaaagaagatgcacttttatttggtatagtaactcggcttacagaacaaaagggtttaaatctcttaattgaagcaataggagaaattactagtagaggagggcagattgtcttattaggtagtggcgataaagctttagaagaagtatttctagctgctgcaaaaaaatattctaaatcaattgctgtacaaataggttatgatgaagagcaagctcatcgtataattgctggttcagatgtgataatggtaccgtcacgcttcgaaccatgtggtttaacccaactgtatggcttaacctatggtactttaccattagttcacaaagttggtggattagcagatactgttatagactcctctttagagaatttagctgatggtactgctactggatttgtctttgatgagtttagtgttgagtctctaactttagcaattcggagagcttttgctttatataaccgtaaaacagattggaaaaaagttagaaaaacagcgatgcaacagcaagtaacttgggactcttcagctgaaaaaatatatcaaatatataagaatttagtcagagaaaataattaa

SEQ ID NO: 4737 - protein, 489 aa, Francisella tularensis subsp
MRVLHVCSELYPILKTGGLADVTAALPPALAGFGVDSRVLVPGFPAFINAIKDKQLLINIPSRFGAEEINIFLAKISNTKIDIYVIDAPSLFARPGNPYADSSNQAYADNYLRFALLGWVAARISEGLDAKWKPEIVHSHDWHAGLVPAYIKASELASGKKAVKTVFTVHNLAYQGLFPMSVFAELDLPGIFLSMNGLEFYGQVSFMKAGLYFADKITTVSPTYAKEIQIYEQGCGLEGLLADRHNDLYGVLNGVDPQIWNPKKDSLIATNYSSTTVATGKAKCKLALQQMMGLAEKEDALLFGIVTRLTEQKGLNLLIEAIGEITSRGGQIVLLGSGDKALEEVFLAAAKKYSKSIAVQIGYDEEQAHRIIAGSDVIMVPSRFEPCGLTQLYGLTYGTLPLVHKVGGLADTVIDSSLENLADGTATGFVFDEFSVESLTLAIRRAFALYNRKTDWKKVRKTAMQQQVTWDSSAEKIYQIYKNLVRENN

SEQ ID NO: 4738 - DNA, 1386 bp, Fusobacterium nucleatum
  CDS (1)..(1386)
atgaaagttctttttgcaacaggagaagcttttccatttgttaaaacaggggggttaggagatgtgtcttattctctcccaaaaaccttaaaacaaaaggaaaatgttgatattagagttattttacctaagtatagtaaaatttcaaatgaattattaaaagatgctaggcacttaggacataaggaaatttgggttgcacatcataatgaatatgtaggaattgaagaggttgaactggaaggagttatttactattttgtagataatgaaagatattttaaaagacctaatgtttatggtgaatttgatgactgtgaaagatttttatttttctgcaaagcagttgttgaaactatggatatcacaaaatttaaacctgatatcattcattgtaatgattggcaatcagctcttatacctatatatttaaaggaaagaggaatatatgatgtaaaaactatttttactattcataatcttagatttcaaggttttttctttaataatgtaatagaagatttattagaaattgatagggcaaaatatttccaagaagatggtttaaaatattacgatatgatttctttcttaaaaggaggagttgtttattctgattatattacaacagtgagtgatagttatgctgaagaaataaaaactcaagagcttggtgaaggtatacatggattatttcaaaaatatgattataaattatcaggaatagtcaatggaattgataaaatttcatatccattatctaaaaaacctcataaaatattaaaggctgatttacaaaaaaaattaggtttagatgtagaagaggatacacctttaattgttattataactcgtttagatagacaaaagggcctagattatattgttgaaaaatttgatgaaatgatgagtttaggaatacaattcattcttttaggaacaggtgaaaaacgttatgaacatttctttgcttatcaagaatatctccataaaggacaagtatgttcatacattggttttaatcaagaattatctactgaaatctatgcaggagcagatatatttttaatgccttctgtttttgagccttgtggactttctcaaatgatagcaatgagatatggttgtatacctgttgttagagaaacaggaggcttaaaagatactgtaaaaccatataatgagtatacaggtgaaggagatggctttggttttaaacaagctaatgctgatgatatgataaaaactttaaaatatgcaattaaaatgtatcatagacctaatgtatggcaagagattattaagaatgctaagaaaagagataactcttgggataaacctgcaaagagatataaggaattataccaaaggttgatagaaggataa

SEQ ID NO: 4739 - protein, 461 aa, Fusobacterium nucleatum
MKVLFATGEAFPFVKTGGLGDVSYSLPKTLKQKENVDIRVILPKYSKISNELLKDARHLGHKEIWVAHHNEYVGIEEVELEGVIYYFVDNERYFKRPNVYGEFDDCERFLFFCKAVVETMDITKFKPDIIHCNDWQSALIPIYLKERGIYDVKTIFTIHNLRFQGFFFNNVIEDLLEIDRAKYFQEDGLKYYDMISFLKGGVVYSDYITTVSDSYAEEIKTQELGEGIHGLFQKYDYKLSGIVNGIDKISYPLSKKPHKILKADLQKKLGLDVEEDTPLIVIITRLDRQKGLDYIVEKFDEMMSLGIQFILLGTGEKRYEHFFAYQEYLHKGQVCSYIGFNQELSTEIYAGADIFLMPSVFEPCGLSQMIAMRYGCIPVVRETGGLKDTVKPYNEYTGEGDGFGFKQANADDMIKTLKYAIKMYHRPNVWQEIIKNAKKRDNSWDKPAKRYKELYQRLIEG

SEQ ID NO: 4740 - DNA, 1377 bp, Gloeobacter violaceus
  CDS (1)..(1377)
atgaaggtattgtttgcggcggcggagtgtgcccccttagccaaggtgggcggcatggcggacgtggtgggctcgttgcccctggccctggccgagatggggctcgatgtacggatcatcctgccctactacggctttttgggggagctgcccaagtccgagcagccggtctggaccggcggcgccatgttccagcaggtcgaaatttacgaagcgcgcctgcccggcagcgacatccccctctatctggtcggtcacccggcctttgccaacgagcgcatctacggttttgaggacgaagcctggcgcttcacgctcttctcgcgcacggtggccgaatttctctggcggggcggttgggatccgcaggtgctccactgccacgactggcacacgggactgttgcccctctggatgcggtcgatgccggtgatgacggtcttcaccatccacaacctcgcctaccagggaccgcccctgccgtactttcgcgccttcgtggacgtcccctacgacacgggcgcctggaacccgatggtggcggggatcatccacagcgacgcgatcacggcggtctcgcccacctatgcgcgcgaaatttgcacccccgagtacggcgagcgcctggacggcctgctcaggggccagggaaaccgcctgaccggtatcctcaacggcatcaacaccaaggccctcgacccggccaccgacaagcacctgacggtcaactacgacacgaccagtctcgatcggcgcgtcgagaacaaactggccctccagcgcgagttcggcttcgaggtcagtgccgatcgcttgctggtgggtatcgtctcgcggctggtggaccagaagggcttcgatttgctcgcgccgctctgggacaactggatgcacaccagcggcgcccaactggtcgtgctcggcagcggcgacccgttttacgaatttctgtttcgctcggcggcggagcgctacccggaccgcatcaaggcggtgctgagctacaacgtgcccatcgcccagcgcatctacggcggcgcggatctgtttttgatgccctcgcgcttcgagccctgcggcatcggccagatgattgcgctgcgctacggggcggtgcctttggtgcgcaagaccggtggcctcgccgacacggttttcttccacaatccgctcgatgaaaaaggcaacggctttttgttcgaccgctacgacccggccaacctgcttgccatgctctaccgcgccgaggaagcgtttcgctacaaagactactggcgacgactgcaattgcgcggcatggaagcggacctcagttggcgcgcctccgcccatcagtacgcggatctctacaagtcgctgattgctcgcctgggctaa

SEQ ID NO: 4741 - protein, 458 aa, Gloeobacter violaceus
MKVLFAAAECAPLAKVGGMADVVGSLPLALAEMGLDVRIILPYYGFLGELPKSEQPVWTGGAMFQQVEIYEARLPGSDIPLYLVGHPAFANERIYGFEDEAWRFTLFSRTVAEFLWRGGWDPQVLHCHDWHTGLLPLWMRSMPVMTVFTIHNLAYQGPPLPYFRAFVDVPYDTGAWNPMVAGIIHSDAITAVSPTYAREICTPEYGERLDGLLRGQGNRLTGILNGINTKALDPATDKHLTVNYDTTSLDRRVENKLALQREFGFEVSADRLLVGIVSRLVDQKGFDLLAPLWDNWMHTSGAQLVVLGSGDPFYEFLFRSAAERYPDRIKAVLSYNVPIAQRIYGGADLFLMPSRFEPCGIGQMIALRYGAVPLVRKTGGLADTVFFHNPLDEKGNGFLFDRYDPANLLAMLYRAEEAFRYKDYWRRLQLRGMEADLSWRASAHQYADLYKSLIARLG

SEQ ID NO: 4742 - DNA, 1431 bp, Haemophilus influenzae
  CDS (1)..(1431): transl_table=11
atgaaaatactacacgtttgttcggaactctatccgctcttaaaaacaggcgggcttgccgatgttttaggggcattaccccaagcacagaaccaaattgggctagatgctcgcgttttattgcctgcttatcccgcaattatagcaggcattcagaatactcaagtggttgccgaatttgacaacttcgctgggcacgtggtgttgcgttatggagaatataatggtgtcgggatctatttgattgacgcaccgcacttatacggtcgcgaaggcaatccttatcacgatgcctattacaacgactacggcgacaactacaaacgttttgctttgctcggttgggtgggggcagaattagccacaggtttagatagctggtggcgtgcagaagtggtacacgctcatgattggcacgcaggtttgtgtgcagcatatctgttcaacaaaggtcgccctgcgaaatcggtgttcaccattcacaacttggcatatcaagggcagttttcttatcatcatttgtatgaaatcggcttgccgacagggatgttccacgtagaaggcttggaattatttgggcagatttcttacttgaaatcaggtttgttctattctgatgcaagcacggcagttagcccaacttatgcagaagaaatcacgacaccagaatttgcctacggtttgcaaggcttgctttctggcttaaaagctcaaggtcgtttggtggggattttaaatggtgtggacgaaaatatttggcatccgaacgtggatcaatacattccgcaccattacaagctcaaatatatggcaggcaaaaagaaaaacaaagccgaactgcaagcctatttcaatttgccacaagatgaatctgccttggcatttgtgatggttacccgtttaaccgagcaaaaaggtgttgatttattaatcgaaagtgcagacgaaatcgtcaaacaaggcggtcagttgatgattttaggttcaggtgcaccgcactttgaacaaggtattcgtgagcttgctgaacgttatccgcaaaatattgcggtaaaaatcggctacgatgaagccctttcgcatttaatggtggcaggtggcgatgtgattttagtgccaagtcgtttcgagccttgtggcttaacccaactttatggtttgcaatatggcacactgccacttgttcgtaaaacaggtggtttagcggatacggtggtggatagcacttcagaaagcatcaaagctcgcaccgcaacaggttttgtgtttgaaagtgcaacgcctgaagctctccgccattgcttgcaacgtgcctttgccttatggcaaaaaccgcgtgcatgggcgatggttcgtacagatgcaatggaacaagacttcagctggcgtaaggctgcagagcaatatagaacactttatgaacgcttgtag

SEQ ID NO: 4743 - protein, 476 aa, Haemophilus influenzae
MKILHVCSELYPLLKTGGLADVLGALPQAQNQIGLDARVLLPAYPAIIAGIQNTQVVAEFDNFAGHVVLRYGEYNGVGIYLIDAPHLYGREGNPYHDAYYNDYGDNYKRFALLGWVGAELATGLDSWWRAEVVHAHDWHAGLCAAYLFNKGRPAKSVFTIHNLAYQGQFSYHHLYEIGLPTGMFHVEGLELFGQISYLKSGLFYSDASTAVSPTYAEEITTPEFAYGLQGLLSGLKAQGRLVGILNGVDENIWHPNVDQYIPHHYKLKYMAGKKKNKAELQAYFNLPQDESALAFVMVTRLTEQKGVDLLIESADEIVKQGGQLMILGSGAPHFEQGIRELAERYPQNIAVKIGYDEALSHLMVAGGDVILVPSRFEPCGLTQLYGLQYGTLPLVRKTGGLADTVVDSTSESIKARTATGFVFESATPEALRHCLQRAFALWQKPRAWAMVRTDAMEQDFSWRKAAEQYRTLYERL

SEQ ID NO: 4744 - DNA, 1431 bp, Haemophilus influenzae
  CDS (1)..(1431): transl_table=11
atgaaaatactacacgtttgttcggaactctatccgctcttaaaaacaggcgggcttgccgatgttttaggggcattaccccaagcacagaaccaaattgggctagatgcccgctttttattgcctgcttatcctgcaattacaacaggtattccgaatactcaagtggttgctgaatttgacaacttcgctgggcacgtggtgttgcgttatggagaatataatggtgtcgggatctatttgattgacgctccgcacttatacggtcgcgaaggcaatccttatcatgatgcctattacaatgactacggcgacaactacaaacgttttgccttgctcggttgggtgggggcagaattagccacaggtttagatagctggtggcgtgcagaagtggtacacgcccacgattggcacgcaggtttgtgtgtagcatatctgttcaacaaaggcaagccagcaaaatcggtgttcactattcataacttggcgtatcaaggtcagttttcttatcatcatttgtatgaaatcggcttgccaacaggaatgttccacgtagaaggcttggaattatttgggcagatttcttacttgaaatcaggcttgttctattccgatgcaagtacggcggtaagtccaacttatgcccaagaaatcacgacaccagaatttgcctacggtttgcaaggcttgctttctggcttaaaagctcaaggtcgtttggtggggatattaaacggcgtggacgaaaatatttggcatccgaacgtggatcaatacatcccacaccattacaagctgaaatatatggcaggtaaaaagaaaaacaaagctgaactgcaagcctatttcaatttgccacaagatgaatctgctttggcatttgtgatggttacccgtttaaccgagcaaaaaggtgttgatttattaatcgaaagtgcagacgaaatcgtcaaacaaggcgggcagttgatgattttaggttcaggtgcaccgcacttggaacaaggtattcgtgagcttgctgaacgttatccacaaaatattgcggtaaaaatcggctatgatgaagccctttcgcatttaatggtggcaggtggtgatgtgattttagtgccaagccgtttcgagccttgtggcttaacccaactttatggtttgcaatatggcacactgccacttgttcgtaaaacaggtggtttggcagatacggtggtggatagcacttcagaaagcatcaaagctcgcaccgcaacaggttttgtgtttgaaagtgcaacgcctgaagctctccgccattgcttgcaacgtgcctttgccttatggcaaaaaccgcgtgcgtgggcgatggttcgcaccgatgcaatggaacaagacttcagctggcgtaaggctgcagagcaatatagaacactttatgaacgcttgtag

SEQ ID NO: 4745 - protein, 476 aa, Haemophilus influenzae
MKILHVCSELYPLLKTGGLADVLGALPQAQNQIGLDARFLLPAYPAITTGIPNTQVVAEFDNFAGHVVLRYGEYNGVGIYLIDAPHLYGREGNPYHDAYYNDYGDNYKRFALLGWVGAELATGLDSWWRAEVVHAHDWHAGLCVAYLFNKGKPAKSVFTIHNLAYQGQFSYHHLYEIGLPTGMFHVEGLELFGQISYLKSGLFYSDASTAVSPTYAQEITTPEFAYGLQGLLSGLKAQGRLVGILNGVDENIWHPNVDQYIPHHYKLKYMAGKKKNKAELQAYFNLPQDESALAFVMVTRLTEQKGVDLLIESADEIVKQGGQLMILGSGAPHLEQGIRELAERYPQNIAVKIGYDEALSHLMVAGGDVILVPSRFEPCGLTQLYGLQYGTLPLVRKTGGLADTVVDSTSESIKARTATGFVFESATPEALRHCLQRAFALWQKPRAWAMVRTDAMEQDFSWRKAAEQYRTLYERL

SEQ ID NO: 4746 - DNA, 1440 bp, Lactobacillus plantarum
  CDS (1)..(1440)
atgactagggtattattcgcggcggcagaagcggcccctttttataagactggtggcttaggcgatgttagtatggcgttaccgcgcgccttgcaagcggaaggaatcgagacgcgtgtagtgattccgtattaccctcaccagatgccgaccgaatatcagcagcagttagtgccagtgacgcattttactgttcaagtgggtgaacatgcgatgtattgcggtattaaaactctgacagtcgcgcacgttcagtattatctaattgataatttagattattttggtcgtgaaggattatatggttattgggatgatggtgcacgctttgccttctttcagatggcggtttgtgaaatgatggagcagatcgattatatccctgatattttacaactcaatgattggcatacggcgtttattcctgtcttgctagctgaaaagtactattggatcgaagcgtatcgtgatattaaaacggtgctgacgattcataacttacagtttcaaggtgtctacgatccgattattttggatagtctctttcgaatcggaactgagacttacaccgaagccggcgtggcgttttacgatcaagtgaactggctgaagggcggtattaactttgcagatgccgttaatacggtgtcaccgacctacgcacaagagattcaaacaccagcttttggggaacgtctcgacggggtgctgcgggccaatcggtacaaactgagtgggattcttaatggcattgatatgcaattatacgatcccgcaaccgacctggcactaacggcgaattattcggctaaggatttgaaacctaagcgtcagaataaacgtgccttacagcgccgattagggttgcctgtcaaaaacatgccggtattggcagtcgtttctcggttaacgaagcaaaagggtatcgacctcttgctggatgcattgaatccattcttgcagcaacaagatgtgcaactcattgttttgggaacgggtgacccagcattggaacgcgcgttacgcacctatcagtcggcgtatccgcaaaaggtggtcgccgcgattcaatttgatacgcagctagctcagcaaatctatgcggccagtgatatctttcttatgccttctgcctttgaaccgtgtggcttgtcgcagatgatggcgatgcattacgggacgttaccgatcgtgcacgcggtcggtgggttgcgggacacggtcattccgtacaatcgctataccggtcagggaaccggctttagctttgacgactaccagccagcggttctacgtaaaattatgattctagccgtgaccttatatcggcagcatccactggtttggcggcagctgcaacaccaagcaatgacttgtgattttggctgggaacattctgcacagcagtaccgtgcgacttatcagaagctaatgcgttag

SEQ ID NO: 4747 - protein, 479 aa, Lactobacillus plantarum
MTRVLFAAAEAAPFYKTGGLGDVSMALPRALQAEGIETRVVIPYYPHQMPTEYQQQLVPVTHFTVQVGEHAMYCGIKTLTVAHVQYYLIDNLDYFGREGLYGYWDDGARFAFFQMAVCEMMEQIDYIPDILQLNDWHTAFIPVLLAEKYYWIEAYRDIKTVLTIHNLQFQGVYDPIILDSLFRIGTETYTEAGVAFYDQVNWLKGGINFADAVNTVSPTYAQEIQTPAFGERLDGVLRANRYKLSGILNGIDMQLYDPATDLALTANYSAKDLKPKRQNKRALQRRLGLPVKNMPVLAVVSRLTKQKGIDLLLDALNPFLQQQDVQLIVLGTGDPALERALRTYQSAYPQKVVAAIQFDTQLAQQIYAASDIFLMPSAFEPCGLSQMMAMHYGTLPIVHAVGGLRDTVIPYNRYTGQGTGFSFDDYQPAVLRKIMILAVTLYRQHPLVWRQLQHQAMTCDFGWEHSAQQYRATYQKLMR

SEQ ID NO: 4748 - DNA, 1434 bp, Mannheimia succiniciproducens
  CDS (1)..(1434): transl_table=11
atgaaagtattacatgtttgttccgaactttatcctttgttaaaaaccggcgggcttgcagatgtgctgggcgcattacctgcggcacaaaaagaaataggtcttgacgctcgaattttaattcctgcatatcccgcgatttcagccggcattcccgataccggcgtagtggcggaatttcataattccgctgccggtcatgtagtgttgcgctacggtgaatttaacggtgtcggcgtatatttaattgatgcgccaaacttatatgcccgcgaaggtaatccttatcatgaccaatggtataacgattatgccgacaactataaacgttttgccttattaggttgggttggagcggagcttgccaccggtttagacccttggtggatggcggaagtggtgcatgctcatgactggcacgccggcttaaccagcgcttatttggcgtataaaggccgcccggcaaaatcggtatttaccattcataacctggcttatcagggcttgtttgcttatcatcatttatttgaaatcggcttgcctacatccatgttcaacgtgaacggcttggagttttacggtcagatttcttatttaaaagcggggctttattattctgatgcggtcacagccgtcagtccgacttacgccagagaaattaccactcccgaatttgcttacggttttgaaggtttattgtcaaccttgcacagtcaaggcaaattagtgggaattttaaacggcgtggatgacaacatttggaatccgaatacggacggttatattcaggatcattacaaattaaaatccatgaccggcaaaaagaaaaacaaagccgcgttgcaagcgcatttcaatttgccggaaaaaccggatgcgctgttgtttgtgatgatcacgcgtttaaccgaacaaaaaggcgtggatttgcttattcaaagtgccgaaaatattatcaaacaaggcggacaacttgccttattgggttccggtgcgccttctcttgaatccgctttattggggcttgcccacaaacatccgaaaaatattgcggtgaaaatcggttatgatgagcctttatctcatttaatggttgcaggcggcgatgtgattctggtgcctagccgttttgaaccttgcggattaacccagctttacggcttgaaatacggcactctgccgttggttcgccaaaccggcggtttagccgacaccgtagtggacagcacggcggaaaatattaaagaacgtcgtgcaacgggctttgtgtttaatgaggcaaactcacaagcattaagccatgctatttcccgcgcattttccctttggaaaaaacaacgtacctggtttaccgtgcggacggttgccatggagcaggatttcagctggcaaatttccgcccgtcgttacgaagaactatatcgacgtatttag

SEQ ID NO: 4749 - protein, 477 aa, Mannheimia succiniciproducens
MKVLHVCSELYPLLKTGGLADVLGALPAAQKEIGLDARILIPAYPAISAGIPDTGVVAEFHNSAAGHVVLRYGEFNGVGVYLIDAPNLYAREGNPYHDQWYNDYADNYKRFALLGWVGAELATGLDPWWMAEVVHAHDWHAGLTSAYLAYKGRPAKSVFTIHNLAYQGLFAYHHLFEIGLPTSMFNVNGLEFYGQISYLKAGLYYSDAVTAVSPTYAREITTPEFAYGFEGLLSTLHSQGKLVGILNGVDDNIWNPNTDGYIQDHYKLKSMTGKKKNKAALQAHFNLPEKPDALLFVMITRLTEQKGVDLLIQSAENIIKQGGQLALLGSGAPSLESALLGLAHKHPKNIAVKIGYDEPLSHLMVAGGDVILVPSRFEPCGLTQLYGLKYGTLPLVRQTGGLADTVVDSTAENIKERRATGFVFNEANSQALSHAISRAFSLWKKQRTWFTVRTVAMEQDFSWQISARRYEELYRRI

SEQ ID NO: 4750 - DNA, 1488 bp, Nitrosomonas europaea
  CDS (1)..(1488): transl_table=11
atgtcttcatctccttcccgcaaaaatccacgggtgttgtttgtcacttccgaagtatttccgttatgcaaaaccggagggctgggtgatgtcagtgccgcattacctgccgcgctgcgtgaactgaaggcagatgtacgcttactcgtacccggctacccgtcagtactatccgggctcaaatacaaacgtaagctggcagaattcgatctcctgccgcacttccctccaaccacattattttcctcccggttacagatcaatgaatccgtcagtctgcccttatatgtgatccactgcccggaactctatcagcgaccaggcggcatctatctggatgacgacgggcaggactggccggataacgcacaacgcttcggcctgctgtcaaaaatgggtgcactcctcgccagtgatgccagcccgctctcctggataccggatatcatccattgcaatgactggcaaagcgggctcacacctgcttatctccactaccactccgggaagaaagcagccagcctgatgacactgcacaaccttgcttttcagggctgctttccacccgatgaagtagccaggctgggattgccacccgaaagcttcagcgtgcatggcgtcgaatactacggcaatctatcgttcctcaaggcgggaatctactatgcaacccggattactacggtcagccctacttacgcccgggaaatccagcatgagccgctgggattcggtttacagggattactggccgaacgcagcaacgccatcaccggaatcatcaacgggatcgataacaccgtctggaatccggcaaccgatccgcacatcgtaaaaaaatattcaagccgcaacctggcagcaaaaaaaattaacaagctcgctctgcaacgggagatggggctggaagaaaacgaaacgattccgctgtttgccggaatcagccgtctcagttaccagaaaggctacgatattctgttgcaggtcgcacccatgctggcagatctccctgctcaactggtattgctgggaaagggagatcaatctctggaaaaacaactcgttatgcttgcacaaaccaaccctgccagaattgccgtccgcatcgactacgacgaagcgctctcgcatcggatcaatgccagtgcggactgctttctgatgccttcccgctttgaaccgtgcggactgaaccagatgtacagccagcgctacggcactccgcccatcgtccatacaaccggcggactgatcgatacagtgactgatctggcccctgatactccagccggcgaatctgcaagcggattccattttcacgaaatgaccgcagatgcattcatgaatggaatcggacgggcaattgatgcctattacaacaccaggttatggaaaaccctgcagcacaatggcatgcgtaaggatttcagctggcgatccagtgctttggcatacctgtccatttactcgctgttgatgcagcgataa

SEQ ID NO: 4751 - protein, 495 aa, Nitrosomonas europaea
MSSSPSRKNPRVLFVTSEVFPLCKTGGLGDVSAALPAALRELKADVRLLVPGYPSVLSGLKYKRKLAEFDLLPHFPPTTLFSSRLQINESVSLPLYVIHCPELYQRPGGIYLDDDGQDWPDNAQRFGLLSKMGALLASDASPLSWIPDIIHCNDWQSGLTPAYLHYHSGKKAASLMTLHNLAFQGCFPPDEVARLGLPPESFSVHGVEYYGNLSFLKAGIYYATRITTVSPTYAREIQHEPLGFGLQGLLAERSNAITGIINGIDNTVWNPATDPHIVKKYSSRNLAAKKINKLALQREMGLEENETIPLFAGISRLSYQKGYDILLQVAPMLADLPAQLVLLGKGDQSLEKQLVMLAQTNPARIAVRIDYDEALSHRINASADCFLMPSRFEPCGLNQMYSQRYGTPPIVHTTGGLIDTVTDLAPDTPAGESASGFHFHEMTADAFMNGIGRAIDAYYNTRLWKTLQHNGMRKDFSWRSSALAYLSIYSLLMQR

SEQ ID NO: 4752 - DNA, 1458 bp, Novosphingobium aromaticivorans
  CDS (1)..(1458): transl_table=11
atgacgatcaaggtcctttccgtcgcctcagaggccgtcccgcttgtgaagactggcggcctcgccgacgttgccggcgccctgccctcggcagtggcgccacacggcgtcgggatgacgacgatcctccccggatatccggcggtgatgaaggcgctcgcccgcccgcgcgcccttcacacctggaacagcctgctgggagagaaggcccgcctcgtatccggaaagatcgacggccatcccctgctggtcctcgatgcgcccgcctttttccagcgcgacggaaccccctatgtcgacagctcgggccgggactgggcggacaattggcgccgcttcgccgcgttcggacgcgctgcggccgatgtcgctggcggtgcggtcaagggtcgcgccttcgatctcgtccacgcgcacgactggcaggcagccatggctctggcctacctccgcttcgcgccgccgcccgggggacgccgcgtgccctcggtcatgacgatccacaacatggctttccagggtcactacggcgcggacctcttccccgcgctcggcctcccgccccaggcctgggcgatggacggcgtcgagtatcacggcggggtcggctacctgaaggcgggcctcgaagccgccagcgccatcacgaccgtaagcccaacctacgcccgcgaaatccgcacgcccgaattcggcatgggcctcgaaggtctggtcgtcagccggggcaaccgcgtgtcgggcatcgtcaacggcatcgacacggcccagtggaaccctgaaaccgatccagcactcgccgcccgcttcggcgtcaagtcgctcgcccgccgggtgaccaacaagcgcgcgctcgaggccgaattcgcgctggaggccgatgatggaccgctcttcgtcgtcataacccgcctgacctggcagaagggcatcgacgtcctgctcgaatgcatcgaccacctcgtcggcatcggcggccggctcgccctgctcggctccggcgacaaggcgatggaaaacgctttccacgcagccgccacgcgccatcccggcaaggtcggggtgcggatcggctatgacgaagcgctgtcccaccgcatgcaggcggggggcgatgcgatcctcgtaccctctcgcttcgaaccctgcggcctcacccagctctatggccttgcctatggctgcgtacctgtcgtcgcacgaaccgggggccttgccgatacggtgatagatgccaacctggcagcggtcatggccggcgtcgcaaccggcgtgcaattcgaaggcgtgaactatcccagcgtgtcggacgctatcagccgggccgtaacgctctaccggcaaccggatgtctggcgcgcgatgcagcgagccggcatgaagaccgacttttcgtggagccgctcgggcaaggcctatgcggacctctacgccgccctcatcgcggaggaccaatga

SEQ ID NO: 4753 - protein, 485 aa, Novosphingobium aromaticivorans
MTIKVLSVASEAVPLVKTGGLADVAGALPSAVAPHGVGMTTILPGYPAVMKALARPRALHTWNSLLGEKARLVSGKIDGHPLLVLDAPAFFQRDGTPYVDSSGRDWADNWRRFAAFGRAAADVAGGAVKGRAFDLVHAHDWQAAMALAYLRFAPPPGGRRVPSVMTIHNMAFQGHYGADLFPALGLPPQAWAMDGVEYHGGVGYLKAGLEAASAITTVSPTYAREIRTPEFGMGLEGLVVSRGNRVSGIVNGIDTAQWNPETDPALAARFGVKSLARRVTNKRALEAEFALEADDGPLFVVITRLTWQKGIDVLLECIDHLVGIGGRLALLGSGDKAMENAFHAAATRHPGKVGVRIGYDEALSHRMQAGGDAILVPSRFEPCGLTQLYGLAYGCVPVVARTGGLADTVIDANLAAVMAGVATGVQFEGVNYPSVSDAISRAVTLYRQPDVWRAMQRAGMKTDFSWSRSGKAYADLYAALIAEDQ

SEQ ID NO: 4754 - DNA, 1434 bp, Oceanobacillus iheyensis
  CDS (1)..(1434)
atgaaaaacattttatttgtcacctcagaatgtacaccatttattaagacaggcggacttgcggatgtatctggatcgttgccacaagctcttcaggaacatggaggaatggaagtaagagtgatgttacctttatatgatgaaattgatcgttcttggaaggatcaatttgaatttgtgtgcgcttttacggtctcattagggtggagagaacaaactgcagagctatatcgttatcgttataatgacgtcacgtattatttcatcggaaacgattattattttactagaaaaggaatatacggctattacgatgatggagaacgatttgtattttttagtcaggctattatagcttctttagaatatatcgattttataccaagtgtattacatgcccatgattggcaaacagggatagctgttgcactagctaaaatctatcaacctattgaagaattgattaccgtttttaccattcataatatatattaccaagggacaatgcctttaacgacatttgatgatttttttcaattaggcagagaacatttagcaggcatggaatggaatcaaatgattaatagtttgaaatcaggcatttttcatgccgataaaataacgacagtaagtccaacctatgcagaagaaatactaacaccttattacggtgccggactggaagagatgctttggaatcggcgagaagacttgataggagtgctaaatgggattgatttaaaagattataatcctgctatagataaatctttaccagttaactaccgttctgcacggtcgaaaaaaatagagaatcgtaagttactctatgaagaaataggtttgaatcttaaagatggagtacctctttatattatggttactagactagtagaacagaaaggaattcatcttgttcaacgaattttagaggaatttttacaagaggatattcaattgattgttcttggaaatggagaacaggaatttgaatactatttcaaagacatcgaataccgttacccagataaaatgattacccacctgcattttaatgaatcattagctaggagattatatgcaagtgccgattttctcctgatgccatcgaagtttgagccatgtgggttatctcaattaattgctttacaatataaaaccgtacctattgtccgtgagacaggaggattaaaagatacgataattgcttttaatgaaattacaggagaaggaaatggctttcgatttgccaattataatgcacatgaacttttacatgtactgaagtactctctggagatttatcaacaaccttcactttggtcagtattaataaagaatgtaaataaaagtaaatttagttggaaggattccgcgtctgcatatgcagacgtatatcaacagctcgatgcttcatctgtatcttataaatag

SEQ ID NO: 4755 - protein, 477 aa, Oceanobacillus iheyensis
MKNILFVTSECTPFIKTGGLADVSGSLPQALQEHGGMEVRVMLPLYDEIDRSWKDQFEFVCAFTVSLGWREQTAELYRYRYNDVTYYFIGNDYYFTRKGIYGYYDDGERFVFFSQAIIASLEYIDFIPSVLHAHDWQTGIAVALAKIYQPIEELITVFTIHNIYYQGTMPLTTFDDFFQLGREHLAGMEWNQMINSLKSGIFHADKITTVSPTYAEEILTPYYGAGLEEMLWNRREDLIGVLNGIDLKDYNPAIDKSLPVNYRSARSKKIENRKLLYEEIGLNLKDGVPLYIMVTRLVEQKGIHLVQRILEEFLQEDIQLIVLGNGEQEFEYYFKDIEYRYPDKMITHLHFNESLARRLYASADFLLMPSKFEPCGLSQLIALQYKTVPIVRETGGLKDTIIAFNEITGEGNGFRFANYNAHELLHVLKYSLEIYQQPSLWSVLIKNVNKSKFSWKDSASAYADVYQQLDASSVSYK

SEQ ID NO: 4756 - DNA, 1443 bp, Pasteurella multocida
  CDS (1)..(1443): transl_table=11
atgaaagtattacatgcttgctcggagttataccccttgttaaaaaccggtgggttggcagatgtgatgggcgcattaccttttgcacaaaaagagattggaattgacgcacgtattgtcttaccggcgtatcctgcaattaaagcgggcattcctgagacgactgttgtcagtgaatttgataattttgcagggcatattgtgttgcgttatggtgaatataaaggtcttggtgtgtatttaattgatgcgcctcatttatatcaacgtgaaggcaatccttaccatgatcaatggtataacgattatgccgacaactataaacgttttgcattattgggctgggtcgcagcggaattagccacgggattagacagttggtggcatgcggatgtggtgcatgcacatgactggcatgccggattagccagtgcttatttgtttaataaaggtcgccctgccaaatctgttttcacgattcataatttagcctatcaaggacaatttgcttatcaccatttagttgaaattggtttacctgctggcatgttccatgtggatggattggaattgcacggtcagatttcttacttaaaagcaggactttattattctgatgcggtgacggcagtgagcccaacttatgcaaaagaaatcaccacgcctgaatttgggtatggcttacaagggctattaaccacattaaattcacaaggaaaattagtcgggattttaaatggtgtggatgatcaaatctggcatccaaatcatgatgcgtacattgagcatcattacaaattaaaagccatgacgggtaaacgtaaaaacaaagaggcattgcaagcttactttaacttaccacaagatccggacgcgttattatttgtgatggtgacacgtttaacagagcaaaagggggtggatctgttaattgacagtgccgaagaaattgtaaaacagggtgggcaattaacgattttaggttcaggatcgccgcatttagaagccggtatcttacatttagcccagcaatatccacaccaaattgcggtgaaaattggctatgatgaagccttatctcatttaatgattgcaggtggtgacgtcattttagtgccaagtcgttttgagccttgtggcttaacacagttatacggtttgaaatatggcaccttaccgttagtcagagccaccggtggtttggcggatacagtggtaaatgcgacagtagaaaacatcaagtcacgattagctacaggatttgtatttgagcaagcaaaccgtgaggcattacgccaagccttagtaaatgcctttgcgttatggcaaaaacagcgcctttggtttacggtgcgtagcgtcgcgatggaacaagattttagctggcaaatttcagcgacgggttatcatgccctatatcaacgtcttttatcgttcaactag

SEQ ID NO: 4757 - protein, 480 aa, Pasteurella multocida
MKVLHACSELYPLLKTGGLADVMGALPFAQKEIGIDARIVLPAYPAIKAGIPETTVVSEFDNFAGHIVLRYGEYKGLGVYLIDAPHLYQREGNPYHDQWYNDYADNYKRFALLGWVAAELATGLDSWWHADVVHAHDWHAGLASAYLFNKGRPAKSVFTIHNLAYQGQFAYHHLVEIGLPAGMFHVDGLELHGQISYLKAGLYYSDAVTAVSPTYAKEITTPEFGYGLQGLLTTLNSQGKLVGILNGVDDQIWHPNHDAYIEHHYKLKAMTGKRKNKEALQAYFNLPQDPDALLFVMVTRLTEQKGVDLLIDSAEEIVKQGGQLTILGSGSPHLEAGILHLAQQYPHQIAVKIGYDEALSHLMIAGGDVILVPSRFEPCGLTQLYGLKYGTLPLVRATGGLADTVVNATVENIKSRLATGFVFEQANREALRQALVNAFALWQKQRLWFTVRSVAMEQDFSWQISATGYHALYQRLLSFN

SEQ ID NO: 4758 - DNA, 1458 bp, Pseudomonas syringae pv
  CDS (1)..(1458): transl_table=11
atgtctcaggtcagcagacgcaaagtgttgttcgtgacctcggaattggccgacctggtgaaaaccggtgggttgggcgatgtatccgccgcattgccacgagcaatgcgccacctgcatgacgtgcgggttcttattccaggttatccgcaggtcatcaacagcggaaacccgatccatatcatcagccagctgggcgggcatgctgcactgccaccttgcaaggtgggtcgcatggacatgaaagatggccttgtgatctacgtgttgatctgccctgagctttacgagcgtgaaggcacgccttacgccgacagcgatggccgcgactggtccgataaccatattcgttttgcccgtctggggctcgcggctgccgaatttgcggctggcgaagtgaaaagccaatggtgccccgagctggtccatgcccatgactggcctgccggcctggcacctgcttatatgcgctggcgcgggcagtccacgccaagcatctttactattcacaatttggcctatcaagggaccgtgagtaccgcttcgagtcgtgaactgggcattccagatgaagcgatcaccccggaaggcatggagttctacggcaagctgtccttcatcaaggcaggcatggccttcgcgagccacattacgaccgtgagtgcaacctatgctcgggaaatcaccacgccagagtttggttgcggcctggaaggttttctgcagagcaaggctaacaagggtcagctcagcggcatccctaacggaatcgacgaaagctgggatgcagcgaccgacgaacacctgatctgccactttgcgcccaacgaatggacgcgcaaggaaatcaacgccgactatgtgcgtgagctgtttgagctggatgcctcgaccgggcccttgtatgcagtggtttcgcgccttgtgtatcaaaaaggcctggacctgaccatcggggttgccgagcacatcgtcaacaacggcggacaaatcgcaattatcggtcgcggcgagcccgaggaagaagatgccatgcgcgagctggccgcacgcttcccggggcgcattggtgtacgtatcggctttaatgaaaccgacgcacgacgcatgttcgccggcagcgattttctgttgatgccatcgcgctatgaaccctgtggtctgagccagatgtacgcgcaacgcttcggctccctgcctgtcgcacgcaacaccggcggcctggcggacacaatcgaggacggcgtgaccggcttcctgttcaaagaatcaaccatcgaaagctacaccgaagccctgaaccgcacgtttcaggtattcgcccaccgtgagctgctcaacgccatgcgctgccgtgcaatggctgctcccttcaactggcatcaggcagtagagccctacgcagatctctaccgtgacctgttgaagaaaaacgtgagcatttccagcaactactag

SEQ ID NO: 4759 - protein, 485 aa, Pseudomonas syringae pv
MSQVSRRKVLFVTSELADLVKTGGLGDVSAALPRAMRHLHDVRVLIPGYPQVINSGNPIHIISQLGGHAALPPCKVGRMDMKDGLVIYVLICPELYEREGTPYADSDGRDWSDNHIRFARLGLAAAEFAAGEVKSQWCPELVHAHDWPAGLAPAYMRWRGQSTPSIFTIHNLAYQGTVSTASSRELGIPDEAITPEGMEFYGKLSFIKAGMAFASHITTVSATYAREITTPEFGCGLEGFLQSKANKGQLSGIPNGIDESWDAATDEHLICHFAPNEWTRKEINADYVRELFELDASTGPLYAVVSRLVYQKGLDLTIGVAEHIVNNGGQIAIIGRGEPEEEDAMRELAARFPGRIGVRIGFNETDARRMFAGSDFLLMPSRYEPCGLSQMYAQRFGSLPVARNTGGLADTIEDGVTGFLFKESTIESYTEALNRTFQVFAHRELLNAMRCRAMAAPFNWHQAVEPYADLYRDLLKKNVSISSNY

SEQ ID NO: 4760 - DNA, 1473 bp, Pseudomonas fluorescens
  CDS (1)..(1473): transl_table=11
gtgctgccgctggcgcggcccaatcccaaccgcaagcgagtgctgttcgtcacctcggaaatcgccgacctggtgaagaccggcggcctgggcgacgtgtccgccgccctgcccagggccatggcccacctgcacgatgtgcgggtactgatccccggctacccccaggtgctgcatagcgaaaacccgatccacatcatcggggagctgggtggccacgcggcactgccggcctgcaagatcgggcgtatggacatgcccgacggcctggtgatctacgtgctgatctgcccggaactctacgagcgcgaaggcacgccctacggcgccaacaacggccgcgactggccggacaaccatatccgtttcgctcgcctggggctggccgccgccgacatcgcggccaacctggcgcagatccactggtgccccgacctggtgcacgcccatgactggcccgccgggctggcgccggcctacatgcactggcgcgggcaacgcacgccgaccctgttcaccattcataacctggcctatcagggcgtggtcagcctggcctcgtgcccggaactgggcatccccgagcatgccctgcaacaggaaggcatggagttctacggcaagctgtcgttcctcaaggccggcatggcctacgccagccacatcaccacggtgagcgccacctatgcccaggaaatcaccaccccggccttcggttgcgggcttgacggcttcctcgccagcaagacccagcagggcctgctcagcggcatccccaacggcatcgatgaaagctgggacgccgccaccgacgcgcacctgctcacgcctttcagcatcggcgactgggacggcaaggcagccaacgccgcccatgtgcggcagatgttcggcctcgacgcctccagcggcccgctgtttgccgtggtctcgcggctggtctaccagaaaggcctggacctgaccgaagcggtggccgagttcatcgtgcagtccggcggccagatcgccatcatcggccgcggcgagccggaggaagaacagtccatgcgcgccctggcccggcgcttccccggccgcatcggggtgcacatcggcttcaacgagaccgacgcccggcgcatgttcgccggcagcgatttcctgctcatgccctcgcgctacgagccctgcggcctgagccagatgtatgcccagcgcttcggctcgctgccggtggcgcgcaacaccggcggcctggcggacaccatcgagaacggcgtcaccggtttcctcttcgacgaatccaccgtggccagctaccaggaagccctgacccgggccttcaaggtgttcgcctacccggcgctgctcaatgccatgcgctgccgggccatggccgcgcccttcaactggtgcaaggcggtggaaccctacgccgaactctacgagcaactggtggccaaggccctgggacaggccgcccgacagtaa

SEQ ID NO: 4761 - protein, 490 aa, Pseudomonas fluorescens
MLPLARPNPNRKRVLFVTSEIADLVKTGGLGDVSAALPRAMAHLHDVRVLIPGYPQVLHSENPIHIIGELGGHAALPACKIGRMDMPDGLVIYVLICPELYEREGTPYGANNGRDWPDNHIRFARLGLAAADIAANLAQIHWCPDLVHAHDWPAGLAPAYMHWRGQRTPTLFTIHNLAYQGVVSLASCPELGIPEHALQQEGMEFYGKLSFLKAGMAYASHITTVSATYAQEITTPAFGCGLDGFLASKTQQGLLSGIPNGIDESWDAATDAHLLTPFSIGDWDGKAANAAHVRQMFGLDASSGPLFAVVSRLVYQKGLDLTEAVAEFIVQSGGQIAIIGRGEPEEEQSMRALARRFPGRIGVHIGFNETDARRMFAGSDFLLMPSRYEPCGLSQMYAQRFGSLPVARNTGGLADTIENGVTGFLFDESTVASYQEALTRAFKVFAYPALLNAMRCRAMAAPFNWCKAVEPYAELYEQLVAKALGQAARQ

SEQ ID NO: 4762 - DNA, 1560 bp, Pseudomonas putida
  CDS (1)..(1560): transl_table=11
atgatcagtgccgctgtcgagcctcacgtagacgctttcaaaccggataaccgcgagccgctcaccccggatttcgccacgacaggcaaggcacccggcgcccagcgccagcacaacccgaacaagcgcaagattctgttcgtgacctcggaaatcgccgacctggtgaaaaccggtggcctgggtgacgtgtccgctgccctgccccgtgccctggcgcacctgcacgatgtgcgggtcctcatccccggctaccgccaggtgatggaaagcgacaaccctatacatatcgtgggtgaactgggcggccatgcggccctgccgccctgcaagatcgggcgcatggacatggccgacggcctggtcatctatgtgttgatctgcccagaactgtaccagcgcgacggcacaccctatggtgccaacaatggccgcgactggcccgacaaccacatccgcttcgcccgcctgggcctggctgccgccgaaatcgcggccggcgaaggcaagatccactggacgccggaagtggtgcacgcgcatgactggccggccggcctggccccggcctacatgcactggcgtggcctgaatacgcccacgctgttcaccatccacaacctggcgtaccaaggtgtgtacagccgcggctgcagcccggagctggcaatacccgaacatgccatgcagcaagaaggcatggaattctacggcaagctgtcgttcctcaaggccggcctggcctactccagccacatcaccacagtcagcgccacctatgcccgggaaatcaccacccctgaatttggctgcggcctggacggtttcctcgccagcaaggcccagcaaggcctgctcggtggcatccccaacggcatcgacgaaagctgggactcggctaccgacaagcacctgcaacacaacttcagcatcaatgactgggagggcaaagcgcgtaacacccaggaggtgcgcgagctgttcggcctggacgattccgaaggcccgctgttcgccgtggtgtcacggctggtctatcaaaagggcctggacctgaccctgggcgtggccgactacatcgtcgagcaaggcgggcagatcgcgatcatcggccgcggcgagccggaagaggaacaggccatgcgcgagctggcgctgcgccacccaggccgcatcggtgtgcgtatcggcttcaatgaaaccgatgcccggcgcatgttcgccggcagcgatttcctgctgatgccgtcgcgctacgagccgtgcggcctcagccagatgtacgcgcaacgcttcggctcgctgccggtagcacgtaataccggtggcctggccgacaccatcgagtgcggcgtgacgggcttcctgttcaacgagtccaccgtcgagagctaccgcgaggcactcagccgcgccttctatgtttacggcaagaaggacctgctgaacgccatgcgctgcctgtcgatgacccagccgttcaactggtgccaggcggttgaaccctatgcccgcctgtacgaggacctggtcaagcagacacaactgagccattactga

SEQ ID NO: 4763 - protein, 519 aa, Pseudomonas putida
MISAAVEPHVDAFKPDNREPLTPDFATTGKAPGAQRQHNPNKRKILFVTSEIADLVKTGGLGDVSAALPRALAHLHDVRVLIPGYRQVMESDNPIHIVGELGGHAALPPCKIGRMDMADGLVIYVLICPELYQRDGTPYGANNGRDWPDNHIRFARLGLAAAEIAAGEGKIHWTPEVVHAHDWPAGLAPAYMHWRGLNTPTLFTIHNLAYQGVYSRGCSPELAIPEHAMQQEGMEFYGKLSFLKAGLAYSSHITTVSATYAREITTPEFGCGLDGFLASKAQQGLLGGIPNGIDESWDSATDKHLQHNFSINDWEGKARNTQEVRELFGLDDSEGPLFAVVSRLVYQKGLDLTLGVADYIVEQGGQIAIIGRGEPEEEQAMRELALRHPGRIGVRIGFNETDARRMFAGSDFLLMPSRYEPCGLSQMYAQRFGSLPVARNTGGLADTIECGVTGFLFNESTVESYREALSRAFYVYGKKDLLNAMRCLSMTQPFNWCQAVEPYARLYEDLVKQTQLSHY

SEQ ID NO: 4764 - DNA, 1455 bp, Pseudomonas syringae pv
  CDS (1)..(1455): transl_table=11
atgtctcaggtcaacaggcgcaaagtgctgttcgtgacctccgaactggccgacctggtgaaaaccggcgggctgggcgatgtgtctgccgcactgccacgcgccatgcgccacctgcacgacgttcgtgttctgattcctggttatccgcaagtgatcaacagcggcaacccgatccatatcatcagccagctgggtgggcatgctgcactgccgccctgcaaggttgggcgtatggatatgaaagatggcttggtcatctacgtgctgatctgcccggaactgtacgagcgcgaaggcacgccttacgctgacactaacggccgcgactggtccgacaaccacatccgttttgcccgtctgggcctggccgctgccgagtttgctgctggcgaagtgaaaagccagtggtgccccgagctggttcacgcccacgactggcctgccggtctggcgccggcttacatgcgctggcgcggacagtccacgccgagtattttcacggttcacaacctggcctatcaaggcaccgtgagtactgcgtcgagccgtgaactgggcatcccggatgaggcgatcaccccggaaggcatggaattttacggcaagctgtcgttcatcaaggccggcatggcgttcgcgaaccacatcaccacggtcagcgccacttacgcccgggaaatcaccacacctgaattcggctgcggccttgagggctttttgcagagcaaggccgacaaaggtcagctcagcggcattcccaacggtatcgatgaaagctgggacgccgccactgacgaacacctgatctgtcacttcgcgcccaatgagtggacgcgcaaggaaatcaacgccgattacgtccgcgagctgtttgagctggacgcctccagcgggccgctttacgcggtggtttcgcgcctcgtttaccagaaaggcctggacctgaccatcggcgtggccgagcacatcgtcaacaacggtgggcagattgcaatcatcggccgcggggagcccgaagaagaagatgccatgcgcgaactggcggcacgctttcctggccgtatcggtgtgcgtatcggtttcaacgaaaccgatgcacgacgcatgtttgccggcagtgattttctgctgatgccgtcgcgctatgaaccctgcggcttgagccagatgtacgcccagcgtttcggctcgctgcctgtcgcccgcaacaccggcggcctggcggacaccatcgaggatggcgttaccggctttctgttcaatgaatcaaccgtcgaaagctacaccgaagccctgaaccgcacgtttcaggtcttcgctcacccggaactgctcaatgccatgcgctgccgcgcaatggctgcccccttcaactggcatcaggcagtggagccctacgcagagctttatcgcgacctgttgaagaaaaacgtgagcatgaccagcaactaa

SEQ ID NO: 4765 - protein, 484 aa, Pseudomonas syringae pv
MSQVNRRKVLFVTSELADLVKTGGLGDVSAALPRAMRHLHDVRVLIPGYPQVINSGNPIHIISQLGGHAALPPCKVGRMDMKDGLVIYVLICPELYEREGTPYADTNGRDWSDNHIRFARLGLAAAEFAAGEVKSQWCPELVHAHDWPAGLAPAYMRWRGQSTPSIFTVHNLAYQGTVSTASSRELGIPDEAITPEGMEFYGKLSFIKAGMAFANHITTVSATYAREITTPEFGCGLEGFLQSKADKGQLSGIPNGIDESWDAATDEHLICHFAPNEWTRKEINADYVRELFELDASSGPLYAVVSRLVYQKGLDLTIGVAEHIVNNGGQIAIIGRGEPEEEDAMRELAARFPGRIGVRIGFNETDARRMFAGSDFLLMPSRYEPCGLSQMYAQRFGSLPVARNTGGLADTIEDGVTGFLFNESTVESYTEALNRTFQVFAHPELLNAMRCRAMAAPFNWHQAVEPYAELYRDLLKKNVSMTSN

SEQ ID NO: 4766 - DNA, 1446 bp, Rhizobium loti
  CDS (1)..(1446): transl_table=11
atgcaggttctgtcggtcacgcccgagatcttcccgctgatcaagaccggcgggcttgccgacgtgaccggtgcgctgcccgtcgcgctggcagccaagggcgtgaccatgcgcacgctcattccaggctttcccgcggtgatggaaggcttcaagaaaaggaaggctgtttaccaatacccgctgctccagggtggcaaggcttcgatccatgctgtccagatcgcagggctcgatcttttcgtgctcgacgcgccgcatctcttcgaccgtcccggcggtccctacggcaatgcttcgggcgccgactggccggacaattggcggcgttttgcggcactgagccaggccggcgccgatatcgccggcggcgccatctcgggctacttgcccgagatcgtccatgcccatgactggcagtcggcgatgacgctggcctatatgcgctacggcaaggcggtcggcacgccgtcgatgatgacggtccacaatctcgccttccagggccagttcggcgcaggcatcttcggcgagctcggcctgccggcggtggcgatggcgcttgacggtgtcgaatattatggcggagtcggcttcctcaaggccggcctgcaggccgcctgggcgatcaccacggtcagcccgacctatgcgcaggaaatccgctcgccggaattcggcatgggcctcgacggcctgatcaacatgcgctccagcgatctctacggcatcgtcaacggcatcgacaccgccatctgggatccggagacggacaagcatctggtatcgaactatacggccaccacgctcaaggcgcgggcgccgaacagggcggccgtggaggaacgcttcggcctcgaccgcgacgacagcccgattgtctgcgtcatcagccggctgacctggcagaagggcatggacatattggcgacggtgatcgacggcatcgtcgcgaccggcgcgcggctggccatattgggctcgggcgacgccggcctcgaaggcgcgctgcttgccgcagccgcacgccaccgtggccgcatcggcgtggtcatcggctatgacgaagggttgtcgcacaccatgcagggcggctgcgacgccatcatcatcccgtcgcgcttcgaaccctgcggattgacgcagctctacggcctccgctacggctgcgtgccggtggtcgcccggaccggcggcctagccgacaccatcatcgacgccaacgaagcggcgatggcggccggcgtggccacagggctccagttcgctcccaacaatggcggcgcgatgctgcacgccatccgccgcctggtcgatgcctacgccgaccccgcggccttcgagaccatccagcgccagggcatgaaggccgatgtgtcatgggacaagagcgcggaaaaatatcttgaactctatcgcctgctgctttcgaaaagggttgcctga

SEQ ID NO: 4767 - protein, 481 aa, Rhizobium loti
MQVLSVTPEIFPLIKTGGLADVTGALPVALAAKGVTMRTLIPGFPAVMEGFKKRKAVYQYPLLQGGKASIHAVQIAGLDLFVLDAPHLFDRPGGPYGNASGADWPDNWRRFAALSQAGADIAGGAISGYLPEIVHAHDWQSAMTLAYMRYGKAVGTPSMMTVHNLAFQGQFGAGIFGELGLPAVAMALDGVEYYGGVGFLKAGLQAAWAITTVSPTYAQEIRSPEFGMGLDGLINMRSSDLYGIVNGIDTAIWDPETDKHLVSNYTATTLKARAPNRAAVEERFGLDRDDSPIVCVISRLTWQKGMDILATVIDGIVATGARLAILGSGDAGLEGALLAAAARHRGRIGVVIGYDEGLSHTMQGGCDAIIIPSRFEPCGLTQLYGLRYGCVPVVARTGGLADTIIDANEAAMAAGVATGLQFAPNNGGAMLHAIRRLVDAYADPAAFETIQRQGMKADVSWDKSAEKYLELYRLLLSKRVA

SEQ ID NO: 4768 - DNA, 1443 bp, Rhizobium tropici
  CDS (1)..(1443): transl_table=11
atgaaggttctctcggtttcgtccgaagtcttccccttgatcaagacagggggtctggccgatgtggtcggcgccctgcctattgcactgaagccctatggcgtcgaaaccaagaccctcatcccaggctatcctgcggtcatgaaagccattcgcgatccggttgttcgtctggagcttccggatcttcttggcgaggccgccaccattctagaagtcgagcacgcgggcatttccttcctcgtgctcgacgcaccggcctattacagccgcaccggcggcccctatgtcgatgcgacgggcaaggactatcccgacaattggcgacgtttcgccgcgctgtcgctggccggcgcggaaattgcagctggtctcctgcccggctggcggccggatctcgtgcacgcacatgattggcagtcggcgctggtgccggtctatatgcgttactatccgacgccggaactgccgagcgttctgaccatccacaacatcgcattccagggccagttcggcgccgatatcttccccggccttcgtctgccggcgcatgctttctcggtggaaggcatcgaatattacggtgatgtcggcttcctgaaaggtgggctgcagacggcgcatgccctgaccaccgtcagcccttcctatgccgaggaaatcctgacgccggaattcggcatgggcctcgaaggcgtcatcgccagcaaggcctacaatctctacggcatcgtcaacggcatcgacgcagatatctggaatccggcgaccgatccgatgatcgcgcaaacctatagcgcggcgacgctgaaggagcgcgccatcaaccgccatcgggtcgtcgagcatttcggcctcgaagaggatgatggtccgatcttctgcgtcgtcagccgcctcacctggcagaagggcatggatattctggcggaggttgcgagcgaggtcgtccacatgggtggcaagctcgcaattctcggcgcaggcgacgcggcgctggagggcgcgctctttgccgcagccggccgtcaccgcggtcgcgtcggcgttgtcggcaggcacaacgagcccatgtcgcatctgatgcaggccggctgcgacgcgattatcatcccctcgcgtttcgaaccctgtggtctcacgcagctttatggcttacgttcaggctgcctgccaatcgttgcgcgaacgggcgggctgaacgatacgattatcgacgccaaccacgccgcgctgcaggcaaaagtcgcgaccggcattcaattttcacccgtcaccgcggaggggctgttgcaggccatgcgccgcgcgatgcacctcttccaggatcgaaaggtctggacgcagatgcaaaagcagggcatgaaatccgacgtatcctggggcaggagcgcagaacgctacgccgctctctactccagtctagtctcgagaggcgcttaa

SEQ ID NO: 4769 - protein, 480 aa, Rhizobium tropici
MKVLSVSSEVFPLIKTGGLADVVGALPIALKPYGVETKTLIPGYPAVMKAIRDPVVRLELPDLLGEAATILEVEHAGISFLVLDAPAYYSRTGGPYVDATGKDYPDNWRRFAALSLAGAEIAAGLLPGWRPDLVHAHDWQSALVPVYMRYYPTPELPSVLTIHNIAFQGQFGADIFPGLRLPAHAFSVEGIEYYGDVGFLKGGLQTAHALTTVSPSYAEEILTPEFGMGLEGVIASKAYNLYGIVNGIDADIWNPATDPMIAQTYSAATLKERAINRHRVVEHFGLEEDDGPIFCVVSRLTWQKGMDILAEVASEVVHMGGKLAILGAGDAALEGALFAAAGRHRGRVGVVGRHNEPMSHLMQAGCDAIIIPSRFEPCGLTQLYGLRSGCLPIVARTGGLNDTIIDANHAALQAKVATGIQFSPVTAEGLLQAMRRAMHLFQDRKVWTQMQKQGMKSDVSWGRSAERYAALYSSLVSRGA

SEQ ID NO: 4770 - DNA, 1524 bp, Rhodopirellula baltica
  CDS (1)..(1524)
atgaatatcgtctacctgacgaccgaagccgttccattcgccaaaaccggtggtctcgccgacgtctgtggcactctgcccaaagtggttgccgctcaagggcatcgctgtgcggtcatcatgcctgccttttcatcgatcgaacgatcgttgcaaccgatcgagacgaccgacatcagcttcgcggttccaatgtcggatcaaaagctgatcggttgccgcctattgaaaagccatctgccgaaagatcccaacgatccagaggactcggccgaggtcccggtttatttcatcgaccaaccgcaatacttccgacgcccctcgctctacggtgacgccaacggagactaccacgacaacgccgaacgattcattttttactgtcgtgccgcgatcatcgcgatgactcgattggggtatccggtcgatttggtgcactgcaacgattggcaatctgctttggtacccgcgctgttgcgagctgcgtcggacaacgtggcaaagacccaaccaattgcgacgatgctgtcgattcacaacatggcctatcaaggcaactttggtttcgatgcgtttccgtggactggtttgagttgggatcacttccgaccggaatcattcgagtactacaaccagctgaacttcctcaaaaccggtgttgtgacctccgatgttgtgtcgacggtcagccccacgtatgccttggaaatccaaacgccagagtacggctgcggactggattcgatcctgcaaggcatcccgcaacctgtcgcgggaatcatcaacggaatcgacacaaacatttggaatcccgaaaccgatccacacctcaaacgcaattacagcgtggtggattgggctgacgcaaagattgacaacaaacttgcgttgcaagccgaggtgggtttgccacaagatcctgacgttccgttgctgggattgattggtcgtttggcggatcaaaaagggtgggacctgatccttcccgttttaaaacaacacctcgccgaagcacgtccaacgcagtgggtcgtactaggcagcggcgatcccaaaatcgaggagcaactacgcgagctgaccgagcaacatcccgaacaactggccgcgtacatcggcttcagcgatgcattggctcatcgcatcgaagcgtcgagcgacatgttcatcatgcccagccactacgaaccctgcgggctcaatcaactctatagccttcggtacggtactccgtgcgttgtgaccaagaccggcggtttagcggacacaatcgtggatgcgactccggagaacgttgcggcaaatctcgccacagggttccatttgaatgacagcagcgccggtgcgcttgaccacgcgatcaaccgggctctgcagcttcgatatcactctcccgaaaaatggaaaaatcttgtcgaattcggtatgtcgcaggattggacgtggaggaaaagtgcagaccaatacattcaactttatgcccgcacaatttccctaaatcgtcgaaggcgatcgggaagctag

SEQ ID NO: 4771 - protein, 507 aa, Rhodopirellula baltica
MNIVYLTTEAVPFAKTGGLADVCGTLPKVVAAQGHRCAVIMPAFSSIERSLQPIETTDISFAVPMSDQKLIGCRLLKSHLPKDPNDPEDSAEVPVYFIDQPQYFRRPSLYGDANGDYHDNAERFIFYCRAAIIAMTRLGYPVDLVHCNDWQSALVPALLRAASDNVAKTQPIATMLSIHNMAYQGNFGFDAFPWTGLSWDHFRPESFEYYNQLNFLKTGVVTSDVVSTVSPTYALEIQTPEYGCGLDSILQGIPQPVAGIINGIDTNIWNPETDPHLKRNYSVVDWADAKIDNKLALQAEVGLPQDPDVPLLGLIGRLADQKGWDLILPVLKQHLAEARPTQWVVLGSGDPKIEEQLRELTEQHPEQLAAYIGFSDALAHRIEASSDMFIMPSHYEPCGLNQLYSLRYGTPCVVTKTGGLADTIVDATPENVAANLATGFHLNDSSAGALDHAINRALQLRYHSPEKWKNLVEFGMSQDWTWRKSADQYIQLYARTISLNRRRRSGS

SEQ ID NO: 4772 - DNA, 1452 bp, Rhodopseudomonas palustris
  CDS (1)..(1452): transl_table=11
atgacgacactggcggttctatctgttgcgtcggaactgtttccgctgatcaagaccgggggcctcgccgatgtggccggcgcattgccggccgccctgcgtgccaacgacgtcgccgtcacctcgctgctgccgggctacccggcggtgctcggcgggatcgaggatccgcagcaggtccacagcttcaacgagctgttcggcggcacggcgcggctgctggcggcgcgctgcggcgatctcgatctatttgtgctcgacgcgccgcatctctatgtccggcccggcaatccctatgtcggcccggacggcaaggattggccagacaacggcctgcgttttgcggcgttggcgcaggtcggcgccgcgctcggccagggcctgctgccgcactacaagccggatgtgctgcacgcccacgactggcagaccgggctgttgccggcctatctgaaatacagcggccggcctgggccgaagactgtcttcaccatccacaatctggcgttccaggggaggtttccctacgagctgctcggcaggctgggcctgccggagcgcgccttcggtctcgacggtatcgagtactacggcggtatcggttatctcaaggccggcctgcaactcgccgaccgcatcaccaccgtgtcgccgacctacgcggccgagatccagggttcggaagccggcatgggcctcgacggcctgctgcggctgcgcgccgatcggctgtccggcatcctcaacggcatcgacaccgacgtctggaatccggccagcgatgcgttgatctccgccacctacgatgtcgaaagcatcgcagcccgcgcccgcaacaagaaggtgctgcaggcgcggttcggtctgaagcccgagccgggcgcactgctgtacggcgtgatcagccggctgtcgtggcagaaggggctcgacctcttgctcgaagccctgccgcaattgatcggcggtggcgcccagctcgccctgctcggctccggcgatgccgaactcgaacagggctacgcggccgcggctcgcaagtatcccggccaggtcggcgcagtgatcggctacgacgaagcgctcgcgcatcagatccaggccggcgccgacgcgctgcttgtgccgtcgcgattcgaaccctgcggcctgacgcagctctgcgccttgcgctatggcgcggtgccggtggtggcgcgggtgggcggtctggccgatacggtggtcgacgccaacgagatggcgaccgccacaggcgtcgcgaccggcgtccagttcgcaccggtgacgactgacgcgctgatcaaggcgttcggcaaaacccgcgcgctgtttgcagacgtcgtcgcctggcgcaatctgcaaatcaacggcatgaccaccgatgtgtcgtggaagaacccggcgcagcactacgcgaagctgtatcgcgatctggtggcggagcgctga

SEQ ID NO: 4773 - protein, 483 aa, Rhodopseudomonas palustris
MTTLAVLSVASELFPLIKTGGLADVAGALPAALRANDVAVTSLLPGYPAVLGGIEDPQQVHSFNELFGGTARLLAARCGDLDLFVLDAPHLYVRPGNPYVGPDGKDWPDNGLRFAALAQVGAALGQGLLPHYKPDVLHAHDWQTGLLPAYLKYSGRPGPKTVFTIHNLAFQGRFPYELLGRLGLPERAFGLDGIEYYGGIGYLKAGLQLADRITTVSPTYAAEIQGSEAGMGLDGLLRLRADRLSGILNGIDTDVWNPASDALISATYDVESIAARARNKKVLQARFGLKPEPGALLYGVISRLSWQKGLDLLLEALPQLIGGGAQLALLGSGDAELEQGYAAAARKYPGQVGAVIGYDEALAHQIQAGADALLVPSRFEPCGLTQLCALRYGAVPVVARVGGLADTVVDANEMATATGVATGVQFAPVTTDALIKAFGKTRALFADVVAWRNLQINGMTTDVSWKNPAQHYAKLYRDLVAER

SEQ ID NO: 4774 - DNA, 1458 bp, Rhodospirillum rubrum
  CDS (1)..(1458): transl_table=11
atgaaggttttgttcgtgacttccgaggcctacccgctggtcaagaccggcggattgggcgatgtggcgggggctctgcccgccgccctgcgcgacatcggcgtcgatgcccgcattcttctgcccgcctatcccgacgccatgcgccgggcccgcctgacgggcaagaccgtaccgcttggtaatccgcttggcgttggcgagaccagactgcttgaagggacgatgcccgataccggctgccccttgtggttgctcgactgcccggcgatgtacgagcggaccggagggccctacatgatgtattcgggcgtcgactggcccgataacttccgaagattcgccttgttgtccaaggtcgcggcgatgatcggcaccgccggcgacctgatggactggcgccccgacgtgttgcacggccacgattggcagaccggactggttccggcctatctgaatgcctggggggcgcgccgtccgccctttttgttctcgatccacaacatggaataccgcgggttgttcggtcccgagatccttgatctgatcgggttgccgcgcagccagttctcgatcaacggcttggaattccatgggctggtctccacgctcaaggccgggatagtctatgcccaagccgtggccaccgttagcccaagttatgccgccgagataaagactccggtcggcggccaggggctggaaggcttgctgcaggcgcgggcgggcgatctttcgggaattctgaacggcatcgactccaacgcctggaacccgcaaaccgatccctatttggccgcgcccatcgacggggccgatccggcgccggggaagcggatcaacaaggacatgctcaagcggcggatgggactcgacgccgatggcgatcgcccgctgtttggtctggtcagccgtttcgtcgcccagaagggaatcgatctggtggtcgccgcgctgcccggcatgatcgccggcggcgcccaggtcgccattctcggcgccggcgacaccggccttgaagcggccttgaacgacatcgtcgggcgctatcccggggcggcggccgtccatgtcggctatgacgagcatctggcccatctgatcgaaggggcggccgatttcctgctggtgccttcgcgcttcgagccctgcgggctgacccagctttacgccttgcgctatggcaccattccggtggtgcgccgcaccggtgggctggccgattcggtgagccatctcgatgatggtccgaacggaacgggcatcgtgttcgaccatgcgcttcccgacgccctggagtgggcgatcggtcgggcgatgacgctgtatcgcgacaaggcgacgctgaacaaagttcgccagcgggggatgtcccaggatttcagttggaaacgctccgccaaagagtaccttagagtctacggctccatggtgggcggggatgttcaccggccttga

SEQ ID NO: 4775 - protein, 485 aa, Rhodospirillum rubrum
MKVLFVTSEAYPLVKTGGLGDVAGALPAALRDIGVDARILLPAYPDAMRRARLTGKTVPLGNPLGVGETRLLEGTMPDTGCPLWLLDCPAMYERTGGPYMMYSGVDWPDNFRRFALLSKVAAMIGTAGDLMDWRPDVLHGHDWQTGLVPAYLNAWGARRPPFLFSIHNMEYRGLFGPEILDLIGLPRSQFSINGLEFHGLVSTLKAGIVYAQAVATVSPSYAAEIKTPVGGQGLEGLLQARAGDLSGILNGIDSNAWNPQTDPYLAAPIDGADPAPGKRINKDMLKRRMGLDADGDRPLFGLVSRFVAQKGIDLVVAALPGMIAGGAQVAILGAGDTGLEAALNDIVGRYPGAAAVHVGYDEHLAHLIEGAADFLLVPSRFEPCGLTQLYALRYGTIPVVRRTGGLADSVSHLDDGPNGTGIVFDHALPDALEWAIGRAMTLYRDKATLNKVRQRGMSQDFSWKRSAKEYLRVYGSMVGGDVHRP

SEQ ID NO: 4776 - DNA, 1434 bp, Rhodobacter sphaeroides
  CDS (1)..(1434)
atggagacggcgcgcggacgggtgttgtcggtggcttccgaatgcgtgccgctgctgaagaccggggggctcgccgatgtggtgggcgcgcttccgggggcgctggcggcggaaggctgggagatgcgggtgctgatgccctgctaccggccgctgaaatggcggctcgaggagatggaggaggtcttcgccgaagaggatctcttcggggggccggggcgggtgatggcgggcgaggtggccgggcggaagatgctgctccttgatgcgccgcatctctacgaccgagggcggccctatgcgggtccggacggcgactggggcgacaatgcgcagcggtttgcggcgctttcctggatcggcgcgggatcgcgcgcgaggggctcggggacgggctggcggccggatgtggttcatgcccacgactggcaggcgggcttcacgccggcctatatgaactattggggcagcggcggagcgagttcggtgctgacggtgcacaacatcgccttccagggctgggcgccggcgagccttctgtcggcgctgcgcctgccgccgcagaagttccatccggccgcgctcgaatattacggcgggctctcgtcgctgaaggcggggctggtctcggccgatcatatcaccaccgtctcgcccacctatgcctgcgagctgatgcggcccgagttcggcatgggcctgcagggcgtgattgcccagcgggctgggcaggtgaccggcatcctgaacggggtcgacaccgacatctggtcgcccgaggtcgaggagcggccctatgacgccgagagcctgaaggccaaggcggagaaccgcgccgtgctgtcgggcgccttcaaactgtcggtgccggggccgcttgcgatcctcgtgagccgcctgacctatcagaagggcatcgacctcatccccgaggtgctgccggacttcatcgccgcgggcgggggccttgcagttctgggcacgggtgacgcgccgctcgaggcggcgatgcgcgagctcgaggtgcgctttccgggtcgggtcggggtgcggatcggctatgacgaagggctgtcgcatctgatgttcgcgggcggcgatgcggttttggtgccctcgcggttcgagccctgcgggctcacgcagatgtacgggctgcgctacggggccattccggtggtggccctgacagggggccttgccgacacgatcatcaacgccaatccggccgccatggccgcgggctgtgcgaccggcctcaccttccatccgaccgagccgcccgccttcgccgaggcgctgaggcggctgatccatctttatgccgatcccgcggcctgggagacggtgcaacggaatgcgatgcgccatccggtgggctgggagacctcggccgcggcctatgcggcgctctaccgggagctcgtcgcgtga

SEQ ID NO: 4777 - protein, 477 aa, Rhodobacter sphaeroides
METARGRVLSVASECVPLLKTGGLADVVGALPGALAAEGWEMRVLMPCYRPLKWRLEEMEEVFAEEDLFGGPGRVMAGEVAGRKMLLLDAPHLYDRGRPYAGPDGDWGDNAQRFAALSWIGAGSRARGSGTGWRPDVVHAHDWQAGFTPAYMNYWGSGGASSVLTVHNIAFQGWAPASLLSALRLPPQKFHPAALEYYGGLSSLKAGLVSADHITTVSPTYACELMRPEFGMGLQGVIAQRAGQVTGILNGVDTDIWSPEVEERPYDAESLKAKAENRAVLSGAFKLSVPGPLAILVSRLTYQKGIDLIPEVLPDFIAAGGGLAVLGTGDAPLEAAMRELEVRFPGRVGVRIGYDEGLSHLMFAGGDAVLVPSRFEPCGLTQMYGLRYGAIPVVALTGGLADTIINANPAAMAAGCATGLTFHPTEPPAFAEALRRLIHLYADPAAWETVQRNAMRHPVGWETSAAAYAALYRELVA

SEQ ID NO: 4778 - DNA, 1434 bp, Salmonella choleraesuis
  CDS (1)..(1434): transl_table=11
atgcaggttttacatgtatgttcagagatgttccccttgctgaagactggggggctggcggatgtgataggcgcgttgcctgcggcacaaattgcggatggtgttgatgttcgcgttctgcttccagggtttcccgatatccgtcgggggatacccgatgcgcatgtggtgagccgccgcgatactttcgcaggtaagatatcgctgctgttcgggcattataacggcgtgggcatttatctgatcgacgcgccgcatctgtacgagcgtccaggcagtccctatcacgatacgaatttatatgcctataccgataacgtgctgcgctttgccctgttagggtgggtcggctgtgaaatggcctgcggacttgatccattctggcgccccgacgtggtgcacgcccatgactggcacgccgggctggcgcccgcctatctggcggcgcgcgggcggccggcgaaatcggtctttaccgtacacaacctggcctatcaaggcatgttttatgcaaagcatatggatgacatcgaactgccgtggtcattctttaatatgcatgggctggagttcaacggacaactctcctttttgaaggccggtttgtactatgccgaccatattacggcggtgagcccgacctatgcgcgtgaaattactgaaccgcagtttgcttatggtatggaaggactgctgcgccagcgtcatctggaagggcgcttgtccggcatactgaacggcgtggatgagaagatctggaacccggaatccgatctgctgctggcgtcgcgctacaagcgcgataccctggaagagaaggcggaaaacaagcgtcagctacaaattgcgatggggttgaaggttaacgacaaagtgccgctgttcgccgtggtaagccgtctgaccaaccagaaaggtctggatctggtgctggaggcgttaccggggctgctggagcagggcgggcagttggcgctactcggcgcgggtgatccggtgcttcaggaagggttcctcgcggcggcggcggaacacccagggcaggttggcgtacagatcggctatcacgaagctttctcgcatcgtattatgggcggcgcggacgtcattctggtgcccagtcgtttcgaaccgtgcggcttaacgcagttatatggcttaaagtatggcacgctgcctctggtgcggcgtaccggggggttggccgatacggtctccgacagttcgctggaaaatctggcggacggtatcgccagcggttttgtctttgaagacagtaatgcctggtcgttgctacgcgcgattcggcgtgcttttgtgttgtggtcacggccttcgctttggcggtttgtacaacggcaggcgatggcgatggattttagctggcaagttgccgcgaaatcataccgcgagctgtactatcgcttgaaatag

SEQ ID NO: 4779 - protein, 477 aa, Salmonella choleraesuis
MQVLHVCSEMFPLLKTGGLADVIGALPAAQIADGVDVRVLLPGFPDIRRGIPDAHVVSRRDTFAGKISLLFGHYNGVGIYLIDAPHLYERPGSPYHDTNLYAYTDNVLRFALLGWVGCEMACGLDPFWRPDVVHAHDWHAGLAPAYLAARGRPAKSVFTVHNLAYQGMFYAKHMDDIELPWSFFNMHGLEFNGQLSFLKAGLYYADHITAVSPTYAREITEPQFAYGMEGLLRQRHLEGRLSGILNGVDEKIWNPESDLLLASRYKRDTLEEKAENKRQLQIAMGLKVNDKVPLFAVVSRLTNQKGLDLVLEALPGLLEQGGQLALLGAGDPVLQEGFLAAAAEHPGQVGVQIGYHEAFSHRIMGGADVILVPSRFEPCGLTQLYGLKYGTLPLVRRTGGLADTVSDSSLENLADGIASGFVFEDSNAWSLLRAIRRAFVLWSRPSLWRFVQRQAMAMDFSWQVAAKSYRELYYRLK

SEQ ID NO: 4780 - DNA, 1434 bp, Salmonella paratyphi
  CDS (1)..(1434): transl_table=11
atgcaggttttacatgtatgttcagagatgttccccctgctgaagactggggggctggcggatgtgataggcgcgttgcctgcggcacaaattgcggatggtgttgatgttcgcgttctgcttccagggtttcccgatatccgtcgggggatacccgacgcgcatgtggtgagccgccgcgatactttcgcaggtaagatatcgctgctgtttgggcattataacggcgtaggcatttatctaatcgacgcgccgcatctgtacgagcgtccaggcagtccctatcacgatacgaatttatatgcctataccgataacgtgctgcgctttgccctgttagggtgggtcggctgtgaaatggcctgcggacttgatccattctggcgccccgacgtggtgcacgcccatgactggcacgctgggctggcgcccgcctatctggcggcgcgcgggcggccggcgaaatcggtctttaccgtacacaacctggcctatcaaggcatgttttatgcaaagcatatggatgacatcgaactgccgtggtcattctttaatatgcatgggctggagttcaacggacaactctcctttttgaaggccggtttgtactatgccgaccatattacggcggtgagcccgacctatgcgcgtgaaattaccgaaccgcagtttgcttatggtatggaaggcctgctgcgccagcgtcatctggaagggcgcttgtccggcatactgaacggcgtggatgagaagatctggaacccggaatccgatctgctgctggcgtcgcgctacacgcgcgataccctggaagagaaggcggaaaacaaacgtcagctacaaattgcgatggggttgaaggttaacgacaaagtgccgctgtttgccgtggtaagccgtctgaccaaccagaaaggtctggatctggtgctggaggcgttaccggggctgctggagcagggcgggcagttggcgctactcggcgcgggcgatccggtgcttcaggaagggttcctcgcggcggcggcggaacacccagggcaggttggcgtacagatcggctatcacgaagctttctcgcatcgcattatgggcggcgcggacgttattctggtgcccagtcgtttcgaaccgtgcggcttaacgcagttatatggcttaaagtatggcacgctgcctctggtgcggcgtaccggggggttggccgatacggtctccgacagttcgctggaaaatctggcggacggtatcgccagcggttttgtcttcgaagacagtaatgcctggtcgttgctacgcgcgattcggcgtgcttttgtgttgtggtcacggccttcgctttggcggtttgtacaacggcaggcgatggcgatggattttagctggcaagttgccgcgaaatcataccgcgagctgtactatcgcttgaaatag

SEQ ID NO: 4781 - protein, 477 aa, Salmonella paratyphi
MQVLHVCSEMFPLLKTGGLADVIGALPAAQIADGVDVRVLLPGFPDIRRGIPDAHVVSRRDTFAGKISLLFGHYNGVGIYLIDAPHLYERPGSPYHDTNLYAYTDNVLRFALLGWVGCEMACGLDPFWRPDVVHAHDWHAGLAPAYLAARGRPAKSVFTVHNLAYQGMFYAKHMDDIELPWSFFNMHGLEFNGQLSFLKAGLYYADHITAVSPTYAREITEPQFAYGMEGLLRQRHLEGRLSGILNGVDEKIWNPESDLLLASRYTRDTLEEKAENKRQLQIAMGLKVNDKVPLFAVVSRLTNQKGLDLVLEALPGLLEQGGQLALLGAGDPVLQEGFLAAAAEHPGQVGVQIGYHEAFSHRIMGGADVILVPSRFEPCGLTQLYGLKYGTLPLVRRTGGLADTVSDSSLENLADGIASGFVFEDSNAWSLLRAIRRAFVLWSRPSLWRFVQRQAMAMDFSWQVAAKSYRELYYRLK

SEQ ID NO: 4782 - DNA, 1434 bp, Salmonella typhi
  CDS (1)..(1434): transl_table=11
atgcaggttttacatgtatgttcagagatgttccccctgctgaagactggggggctggcggatgtgataggcgcgttgcctgcggcacaaattgcggatggtgttgatgttcgcgttctgcttcctgggtttcccgatatccgtcgggggatacccgatgcgcatgtggtgagccgccgcgatactttcgcaggtaagatatcgctgctgttcgggcattataacggcgtgggcatttatctgatcgacgcgccgcatctgtacgagcgtccaggcagtccctatcacgatacgaatttatatgcctatatcgataacgtgctgcgctttgccctgttagggtgggtcggctgtgaaatggcctgcggacttgatccattctggcgccccgacgtggtgcacgcccatgactggcacgccgggctggcgcccgcctatctggcggcgcgcgggcggccggcgaaatcggtctttaccgtacacaacctggcctatcaaggcatgttttatgcaaagcatatggatgacatcgagctgccgtggtcattctttaatatgcatgggctggagttcaacggacaactctcctttttgaaggccggtttgtactatgccgaccatattacggcggtgagcccgacctatgcgcgtgaaattaccgaaccgcagtttgcttatggtatggaaggcctgttgcgtcagcgtcatctggaagggcgcttgtccggcatactgaacggcgtggatgagaagatctggaacccggaatccgatctgctgctggcgtcgcgctacacgcgcgataccctggaagagaaggcggaaaacaaacgtcagctacaaattgcgatggggttgaaggttaacgacaaagtgccgctgttcgccgtggtaagccgtctgaccaaccagaaaggtctggatctggtgctggaggcgttaccggggctgctggagcagggcggccagttggcgctacttggcgcgggcgatccggtgcttcaggaggggttcctcgcggcggcggcggaacacccagggcaggctggcgtacagatcggctatcacgaagctttctcgcatcgcattatgggcggcgcggacgttattctggtgcccagtcgtttcgaaccgtgcggcttaacgcagttatatggcttaaagtatggcacgctgcctctggtgcggcgtaccggggggttggccgatacggtctccgacagttcgctggaaaatctggcggacggtatcgccagcggttttgtctttgaagacagtaatgcctggtcgttgctacgcgcgattcggcgtgcttttgtgttgtggtcacggccttcgctttggcggtttgtacaacggcaggcgatggcgatggattttagctggcaagttgccgcgaaatcataccgcgagctgtactatcgcttgaaatag

SEQ ID NO: 4783 - protein, 477 aa, Salmonella typhi
MQVLHVCSEMFPLLKTGGLADVIGALPAAQIADGVDVRVLLPGFPDIRRGIPDAHVVSRRDTFAGKISLLFGHYNGVGIYLIDAPHLYERPGSPYHDTNLYAYIDNVLRFALLGWVGCEMACGLDPFWRPDVVHAHDWHAGLAPAYLAARGRPAKSVFTVHNLAYQGMFYAKHMDDIELPWSFFNMHGLEFNGQLSFLKAGLYYADHITAVSPTYAREITEPQFAYGMEGLLRQRHLEGRLSGILNGVDEKIWNPESDLLLASRYTRDTLEEKAENKRQLQIAMGLKVNDKVPLFAVVSRLTNQKGLDLVLEALPGLLEQGGQLALLGAGDPVLQEGFLAAAAEHPGQAGVQIGYHEAFSHRIMGGADVILVPSRFEPCGLTQLYGLKYGTLPLVRRTGGLADTVSDSSLENLADGIASGFVFEDSNAWSLLRAIRRAFVLWSRPSLWRFVQRQAMAMDFSWQVAAKSYRELYYRLK

SEQ ID NO: 4784 - DNA, 1431 bp, Streptococcus mutans
  CDS (1)..(1431)
atgaaaatcttatttgtagcagcggaaggggctccttttgcaaagacaggcggtctgggcgatgttattggtgccttgcccaaatcccttgtgaaaaataataatgaagtcagtgttatccttccttattatgatgttgttgatgctaaatttggtgaccaaatagaagatctgttctactttttcaccaatgtcggctggcgtcgtgaatatgttggtatcaaacatatcttcagagatggcgttgacttttactttattgacaataagcattatttttatcgtggtcaaatctatggtgaatttgatgatggtgaacgctttgcttacttccaattagctgctttagaagctatggaaaaaattcaatttattccggatattcttcatgtccatgattatcacaccgccatgattccttacttgctaaaggaaaaatatcattggattaatgcttatcatgggattaagacagtatttaccattcataatatcgagtttcaaggtcaattcaatccttctatgttaggagagctttttggagttggtgatgagcgttatcgtgatgggacgctgcggtggaatgattgcctcaactggatgaaggcagcggtgctctatgcagatcgtgtcaccactgtttcaccatcttatgctaaagaaattatgactcctgaatttggtaaaggactggatcaaattatgcggatggaatcaggtaagttaagtggtgttgtcaatggtattgacacggacttatttgatccggaaacagatccacatctggcagtgcatttttcaaaagatgatctgtcaggtaaagctaaaaataaagcagccttgcaggagcgtgttggtttaccagtacgtgaggatgttcctttggttggtattgtctctcgtctgacagatcagaagggttttcagttggttgttgatcaacttaatacaatgatgcaactggatttacagattgttttactaggaacaggctatgctgattttgaaaatgcttttgcttggttcggtcatgcttatccagacaaaatgtcagccaatatcacttttgatttagaattagctcagcaaatttatgctgccagcgatattttcttaatgccgagtgcatttgagccttgtggcttgtcacaaatgatggctatgcgttatggtaccttaccgcttgtacatgaagtaggcggacttcgggatactgttattccttataatgagtttgaaaagacaggaacaggttttggtttccaagacttctcaggttattggctgaccaaaacgcttgaagctgcgctagatgtctattataatagaaaagaagactggaaaattctccaaaaaaatgcgatgacaactgacttctcttgggatacagccagtcaatcttatgaacatctatataaagaactagcttag

SEQ ID NO: 4785 - protein, 476 aa, Streptococcus mutans
MKILFVAAEGAPFAKTGGLGDVIGALPKSLVKNNNEVSVILPYYDVVDAKFGDQIEDLFYFFTNVGWRREYVGIKHIFRDGVDFYFIDNKHYFYRGQIYGEFDDGERFAYFQLAALEAMEKIQFIPDILHVHDYHTAMIPYLLKEKYHWINAYHGIKTVFTIHNIEFQGQFNPSMLGELFGVGDERYRDGTLRWNDCLNWMKAAVLYADRVTTVSPSYAKEIMTPEFGKGLDQIMRMESGKLSGVVNGIDTDLFDPETDPHLAVHFSKDDLSGKAKNKAALQERVGLPVREDVPLVGIVSRLTDQKGFQLVVDQLNTMMQLDLQIVLLGTGYADFENAFAWFGHAYPDKMSANITFDLELAQQIYAASDIFLMPSAFEPCGLSQMMAMRYGTLPLVHEVGGLRDTVIPYNEFEKTGTGFGFQDFSGYWLTKTLEAALDVYYNRKEDWKILQKNAMTTDFSWDTASQSYEHLYKELA

SEQ ID NO: 4786 - DNA, 1317 bp, Thermus caldophilus
  CDS (1)..(1317)
atgatacgcgtgctccacctggcccccgaggcctaccccctggccaaggtgggagggcttgccgacgtggtgggggccctccccaaggccctgaggcctttgggggtggaggcccatgtcctcctcccctggcacggggggctagaggccaggcgggtgggggaggtggccttcgccttcttcgggcgggaggagagggcccccttgggggagcgggtggagggtggggtgcggtttctcctcctcggggtggaggggtttgggcgggagcgggtctacggctaccccgacgacgccgagcgctacctccgcttcgccctggcggccaaggaggtggcgagggggtacgacctggtccacgcccacgactggacggcggccctcctcgccctctacgcccccacggtctacaccatccacaacctggcccaccagggcctcgtggacccggggctcttcttttcctggaccgggcttccctggagcctcttccacatggaggccctggagttctacggccgggtgaacctgatgaagggggggatcgtcttcgcccgccgggtcaccacggtgcgcccctcttacgccgaggagatccagacccccgagttcggcatgggcctggacggggtcttgaggaggcacgccgggaagcttaggggcatcttgaacggcctggacacggaggtctttgaccccggcaaagacccctacctccccgccccctacacccgggaggacccctcggggaaggcccgggccaaggaggtcttccgggagaggacggggcttaggccccccgtcctcgcttacgtgggccgcctggattaccagaagggcctggacctcgtcttaaaggccctcccccgcctcctggagatgggctttcgcctctacgtccagggcgtgggggacggggggcttcaggaggcgttcctccgggcggaggaggaaaaccccgaaggggtacgcttcctccccgcctacgacgaggccatggcccgcctggcctacgccggggcggaggcggtcttggtcccgagccgctttgagccctgcggcctggtgcagatgatcgcgagccgctacggcacccctcccgtggcccgggcggtgggggggctcaaggacaccgtggaggacgggagggccggggtcctttttgagacctaccaccccgaggggcttctttacggcgtgctccgcctcttccgcctgggggcggaggagatgggccttagggccatggagaaggacttctcctgggaggggccggcgcgggcctaccgggaggtgtaccgggaggccttgggctag

SEQ ID NO: 4787 - protein, 438 aa, Thermus caldophilus
MIRVLHLAPEAYPLAKVGGLADVVGALPKALRPLGVEAHVLLPWHGGLEARRVGEVAFAFFGREERAPLGERVEGGVRFLLLGVEGFGRERVYGYPDDAERYLRFALAAKEVARGYDLVHAHDWTAALLALYAPTVYTIHNLAHQGLVDPGLFFSWTGLPWSLFHMEALEFYGRVNLMKGGIVFARRVTTVRPSYAEEIQTPEFGMGLDGVLRRHAGKLRGILNGLDTEVFDPGKDPYLPAPYTREDPSGKARAKEVFRERTGLRPPVLAYVGRLDYQKGLDLVLKALPRLLEMGFRLYVQGVGDGGLQEAFLRAEEENPEGVRFLPAYDEAMARLAYAGAEAVLVPSRFEPCGLVQMIASRYGTPPVARAVGGLKDTVEDGRAGVLFETYHPEGLLYGVLRLFRLGAEEMGLRAMEKDFSWEGPARAYREVYREALG

SEQ ID NO: 4788 - DNA, 1458 bp, Vibrio parahaemolyticus
  CDS (1)..(1458)
atggctactaacaacttatccattctgtttgtagcttctgaggttgaaggtcttattaaaagtggtggcttggcagatgttgccaaggcactgccggaagcccttcaaaacctacagcaagatgtaagaattacgattcctgcgtacaccagtatcgaaagattagcggacgcagaagttgtgctagaaacaaatctaacgtcatggccgcatacaaagtatcgagttctattgcttacgttaggaaacaatcctgtctatctgattgattgtgatccgtacttcaatcggccatcaatgtatgcagagaacaaccaagcgtataccgataatggtgaacgttttgcatttttcagcgctgcatgcctcgacatgttgccgaaactggcgtttcaacctgatatcatccatgcaaatgattggcacacagggctggttccgtttttgcttaagcacaggtatggcaatgatcccttttttgctcatacaaaaagcgtcatttcaattcataatgcggtctttaaaggcgtatttagttacgacgacgtacagtgtttgcctgagtttcactgccgaaacgttcccgatgcggcggtgagtgcaacgcatattactatgctcaaagctggcgtaatgaatgccgataagataaatgcagtcagcccaacgtacgctgaagagctaaagacagaacttggcagtcatggaatggcatgggagtttcagcaacgagcaggggatctagtcggaattttaaatggttgcgattacagtgcttggaatccggaaactgatatttatttgccaatgaactatagtgccgacaaacaaagtatggttctaggtaaaaacacttgtaagcgcgcattacagcagaggctaaaccttgctgaaaaagacgtagccatgtttggtatggtttgtcgtttgactcagcaaaaaggcgtgcattacttgctgccggctttggcggattttttgaagcatgatgttcaagtcgttgttgttgggacgggtgatcccgttttggctgcacaattggaagaggttgcggcgcaattctccgacaagtttgtgtttgttgaggcgtatgacaatgaactcgcgcatttagttgaagctggttcggatttcttcttaatgccttctgaattcgaaccatgtggcttaaatcagatctacagcatggcttatggcaccttgcctatcgtgagaggggtaggtggcttaaaagacagtgtgaatgattacgacgtagacccttgcgacgctactggatttgtattttatgaaccgacgtctcaagcgctgctacttactatgctgcgagcgttgctgttgtatgcgcaaaacctgacggaagtgcaaagagtacaactgcatgcaatgcaaaaagatttctgctggcggaaggccgcagaatcgtatttgcaactctatcgttcagcgttaaattga

SEQ ID NO: 4789 - protein, 485 aa, Vibrio parahaemolyticus
MATNNLSILFVASEVEGLIKSGGLADVAKALPEALQNLQQDVRITIPAYTSIERLADAEVVLETNLTSWPHTKYRVLLLTLGNNPVYLIDCDPYFNRPSMYAENNQAYTDNGERFAFFSAACLDMLPKLAFQPDIIHANDWHTGLVPFLLKHRYGNDPFFAHTKSVISIHNAVFKGVFSYDDVQCLPEFHCRNVPDAAVSATHITMLKAGVMNADKINAVSPTYAEELKTELGSHGMAWEFQQRAGDLVGILNGCDYSAWNPETDIYLPMNYSADKQSMVLGKNTCKRALQQRLNLAEKDVAMFGMVCRLTQQKGVHYLLPALADFLKHDVQVVVVGTGDPVLAAQLEEVAAQFSDKFVFVEAYDNELAHLVEAGSDFFLMPSEFEPCGLNQIYSMAYGTLPIVRGVGGLKDSVNDYDVDPCDATGFVFYEPTSQALLLTMLRALLLYAQNLTEVQRVQLHAMQKDFCWRKAAESYLQLYRSALN

SEQ ID NO: 4790 - DNA, 1458 bp, Vibrio vulnificus
  CDS (1)..(1458)
atggctactaaccctttgtcgattctgtttgtagcatctgaagtagaaggtttgatcaaaagtggtggcttggcggatgttgccaaggcactgcctgaagctttagtaaaccttcagcatgatgcgagaattgccattccggcttataccgcaattcctaatgtgtgtgatgatgaagtcatcctcgatacacatctagaaacctggccacatactcattatcaagtcaaaaaacgtttcttaggtgacaaccctgtctacttaattgcgtgtgggcattattttgaccgtccgtcgatgtacgctgagaataatcaggcgtataccgataacggtgagcgctttgctttttttagtgctgcttgtttggatatgttaccaaaaattggtttccagcctgacatcgtgcatgccaatgattggcatacaggcttagtgccatttttgcttaagcaccgttacggtcaagatccgttttttgcacaaacaaagagtattttatctatccataatgcggtctttaaaggtgtctttcactatgatgagatgcagtgtttacctgaatttcattgccgaaatgtacccgatgccgctgtcagctctacgcatatgacgatgctgaaagcaggggttatgaatgctgataaaatcaacgcagtgagcccaacttatgcagaggagctgaaaactgaacttggcagtcacggaatggcttgggagtttcagcaacgcgcgggtgatctcgtcgggattctaaacggctgcgattattctgcatggcatccagatactgacagctatttacccatcaactacaaagcaactaagcagagtatggtgagagggaaaaatggctgtaaacgtgcgcttcaagagcaagtcggcctacctgtaaaggacgtcgctatgtttggtatggtgtgtcgcttgacgcatcagaaaggggtgcattacctattgccagtattaactgagttcctgaagttggatgttcagttggttttggttgggaccggtgatccgttgcttgctgcgcaattacgtgatgttgcagcacagtttggtgaaaagtttgtctttgttgaagcttataacaatcaactcgcacacttagttgaggctgcatccgatttctttttaatgccttcagaatttgaaccttgtggcttaaaccaaatctatagcatggcgtatggctccttgccgatcgtgagaggcgttgggggtctcaaagacagtgtatgcgattatgatgtgaaccctgagactgcgacaggatttgtgttctatgaacctacagcacaagcgttgttgattaccatgcaaagagcgttgttgctgtatgcacagaacctaacagagcttcgacgagttcagctatacgcgatggaacgagatttttgctggaacaaggcagcagagcaatatgtggagttgtatcgttctgcgctgaaatag

SEQ ID NO: 4791 - protein, 485 aa, Vibrio vulnificus
MATNPLSILFVASEVEGLIKSGGLADVAKALPEALVNLQHDARIAIPAYTAIPNVCDDEVILDTHLETWPHTHYQVKKRFLGDNPVYLIACGHYFDRPSMYAENNQAYTDNGERFAFFSAACLDMLPKIGFQPDIVHANDWHTGLVPFLLKHRYGQDPFFAQTKSILSIHNAVFKGVFHYDEMQCLPEFHCRNVPDAAVSSTHMTMLKAGVMNADKINAVSPTYAEELKTELGSHGMAWEFQQRAGDLVGILNGCDYSAWHPDTDSYLPINYKATKQSMVRGKNGCKRALQEQVGLPVKDVAMFGMVCRLTHQKGVHYLLPVLTEFLKLDVQLVLVGTGDPLLAAQLRDVAAQFGEKFVFVEAYNNQLAHLVEAASDFFLMPSEFEPCGLNQIYSMAYGSLPIVRGVGGLKDSVCDYDVNPETATGFVFYEPTAQALLITMQRALLLYAQNLTELRRVQLYAMERDFCWNKAAEQYVELYRSALK

SEQ ID NO: 4792 - DNA, 1425 bp, Xanthomonas axonopodis
  CDS (1)..(1425)
atgttcgtggtgtcggaaatggcggacttcatcaaggctggcgggttgggcgacgtggcggccgcgctgccgcgcgcgctgcgccaccgctacgacgtccgcgtgctgattcccggctaccgtgccgtgctcgagcgcgcaggcaaggtggagatcgttggtcgcgtgttggcgcatgccgcgctgccggcctgcgacatcggccgcatcgtgcaatcggacgggctgccgatctacatcctgttgtccaaggaactgttcgagcgcgacggctcgccctatgtgagcaccagcggttcggagttcgaagacaacgcgattcgctttgccaccttgtcgcatgccgccgcgcagatcgcggccggccatgccggcctgggctggaagccgcgcctgctgcatctgaacgactggccgtgcgcgctggcggccggctatgtgcgctggtccggcggcaccacgccgtgcctgctgaccatccataacctggcctaccagggcctggtgccgtattcgatggccgccgcgctgggcatccccgccgagcgggtggccgagttggagttctacgggcagatgtcgttcctgcgcggtggcatcgtcaacgccgaccacgtcaacacggtcagcgtcagctacgccaagcagatcaccggcccggcacagggctgcggcctggaccggctgttggccgggcgcgccgccaagggcgcgctcaccggcatcgtcaacggcatcgacgccagctgggacccgcgcaccgaccaatacctggattcgcacttcagcgtgaaccaatggcagggccgccaggccaacgcagcgcaggtacgcaaggcattcgggctgcgcgagagcgctggcccactgtttgcggtggtctcgcggttggtgcatcagaagggcctggacctgatctgcgaggtggccccgcaaatcgtggccgctggcggccagatcgcggtgatcggcggcggcgagccggagatcgaacagcaggtggccgagctgaccaggcgctatcccggccaggtgggcgccttcatcggcttcgaggaaggcctggcccggcggatgttcgccggtgccgacttcctgctgatgccctcgcgcttcgagccctgcggcctgagccagatgtatgcgcagcgcttcggctgcctgccgatcgcccacgcgaccggcgggctgatcgataccgtggacgacggcgtgaccggcttcctgttccagcacgccagcgtcgaagccctgcgccgctgcctggagcgcgccttccgcaccttccgcctgcccagcctgttgtctgcgatgcggcgcgcagccatgctgcgtcccagcggttgggacgtggcaggcaagaaatacctctcgctctacgaacacaccgctgccaccgcgcccgcgctcgcgacggtgccatga

SEQ ID NO: 4793 - protein, 474 aa, Xanthomonas axonopodis
MFVVSEMADFIKAGGLGDVAAALPRALRHRYDVRVLIPGYRAVLERAGKVEIVGRVLAHAALPACDIGRIVQSDGLPIYILLSKELFERDGSPYVSTSGSEFEDNAIRFATLSHAAAQIAAGHAGLGWKPRLLHLNDWPCALAAGYVRWSGGTTPCLLTIHNLAYQGLVPYSMAAALGIPAERVAELEFYGQMSFLRGGIVNADHVNTVSVSYAKQITGPAQGCGLDRLLAGRAAKGALTGIVNGIDASWDPRTDQYLDSHFSVNQWQGRQANAAQVRKAFGLRESAGPLFAVVSRLVHQKGLDLICEVAPQIVAAGGQIAVIGGGEPEIEQQVAELTRRYPGQVGAFIGFEEGLARRMFAGADFLLMPSRFEPCGLSQMYAQRFGCLPIAHATGGLIDTVDDGVTGFLFQHASVEALRRCLERAFRTFRLPSLLSAMRRAAMLRPSGWDVAGKKYLSLYEHTAATAPALATVP

SEQ ID NO: 4794 - DNA, 1425 bp, Xanthomonas campestris
  CDS (1)..(1425)
atgttcgtggtgtcggagatggcggacttcatcaaggccggcggcctgggtgatgtggcggcggcactgccgcgcgcattgcgccatcgctacgacgtgcgcgtgttgatccccggctaccgcgcggtgctggcgcgcgcgggcaaggtggagatcgtgggtcgtgtgctggcgcatgccgcgctgccggcctgcgacatcggccgcatcgtgcaatcggacggcctgccgatctacatcctgctgtccaaggaactgttcgaacgcgatggctcgccgtatgtgagcaccagcggttcggagttcgaagacaacgcaatccgctttgccaccttgtcgcacgctgccgcgcagatcgccgccggccgtgccgggctgggctggcggccgcgcctgctgcatctcaacgactggccgtgtgccctggctgccgcctacgtgcgctggtccggcggcaccacgccgtgcctgctgaccatccataacctggcctaccagggcctggtgccgtattcgatggccgccgcactgggcatcccggccgagcgcgtctcggagctggagttctacgggcagatgtcgttcctgcgcggtggcatcgtgcatgccgaccacgtcaacacggtgagcgtcagctacgcgcagcagatcaccggcccggcgcagggctgcgggctggaccgcctgctggccggccgcgccgccaagggcgcgctgagcggcatcgtcaacggcatcgacgccagctgggacccgcgcaccgacgaatacctggacagccatttcagcgtgaaccactggcagggccgccaggccaacgccgcgcaggtgcgcaaggccttcggtctgcgtgagagcaccggcccgctgttcgcggtggtgtcgcgcctggtgcaccagaagggcctggacctgatttgcgaggtcgccccgcagatcgtggccgctggcggccagatcgcggtgatcggcggcggtgagccggagatcgaacaacaggtggccgagctgacccggcgctatcccggccaggtcggtgcgttcatcggttttgaggaaggcctggcgcggcgcatgttcgccggcgccgacttcctgctgatgccctcgcgcttcgagccgtgcggcctgagccagatgtacgcgcagcgcttcggctgcctgccgatcgcgcatgccaccggcgggctgatcgacaccgtggacgatggtgtcaccgggttcctgttccagcaggccagcgccgaagcgctgcggcgctgcctggagcgcgccttccgcaccttccgcctgcccagcctgctgtcggcgatgcgccgcgccgcgatgctgcggcccagcggctgggatgtggcgggcaagaaatacatctcgctatacgagcgcaccgctgcaaccgcacccgctgttgcgacggtgtcatga

SEQ ID NO: 4795 - protein, 474 aa, Xanthomonas campestris
MFVVSEMADFIKAGGLGDVAAALPRALRHRYDVRVLIPGYRAVLARAGKVEIVGRVLAHAALPACDIGRIVQSDGLPIYILLSKELFERDGSPYVSTSGSEFEDNAIRFATLSHAAAQIAAGRAGLGWRPRLLHLNDWPCALAAAYVRWSGGTTPCLLTIHNLAYQGLVPYSMAAALGIPAERVSELEFYGQMSFLRGGIVHADHVNTVSVSYAQQITGPAQGCGLDRLLAGRAAKGALSGIVNGIDASWDPRTDEYLDSHFSVNHWQGRQANAAQVRKAFGLRESTGPLFAVVSRLVHQKGLDLICEVAPQIVAAGGQIAVIGGGEPEIEQQVAELTRRYPGQVGAFIGFEEGLARRMFAGADFLLMPSRFEPCGLSQMYAQRFGCLPIAHATGGLIDTVDDGVTGFLFQQASAEALRRCLERAFRTFRLPSLLSAMRRAAMLRPSGWDVAGKKYISLYERTAATAPAVATVS

SEQ ID NO: 4796 - DNA, 1431 bp, Yersinia pestis
  CDS (1)..(1431): transl_table=11
atgagggttttacatgtatgttctgagctgttccctttactaaaaacaggcgggttggctgatgttatcggtgctttacccgcagctcagcttgccgagggggctgatgtgcggatcatcttgcccgccttcccggatttgcgtagagggatccctgagaccgtactggtcagggagattgacacttttgcggggcgggtagcattacgctatggccattatcgggggattggcatttatctgattgatgcgccagcgctctatgatcgtgcgggtagcccttatcacgatgcttctttatatgcctatagcgataactatctacgctttgccttgctgggatggatggcgtgcgaactggcttgtggcctggacggttactggcgtccagaggttgtccatgcccatgattggcacgcgggattaacctgtgcttatctggctgcgcgtgggcggcctgcacgatcggtgtttaccgtccataatttggcttatcaggggctattttctgcagatcacttatctgaattacacctgcccgctgagtttttccagatctatgggctggagttttacgggcagatctcttatctgaaagccgggttgttctttgccgaccatgtcacgaccgtcagcccgacctatgcaaaagagatcactcagcctgcttttggctatggcatggaggggttgctacaagcattggcgcgtcaaggccggttgacggggatcctgaacggggtcgacagtgatatttgggatccgcagagcgataccttgctacctactcgttatgatgcggagaacctgcaagcaaaggccatcaataaaacacatttgcaaacggctatgggtttgcaactggcagaaaataaacccatttttgctgttgtcagtcgattgaccgtccagaaagggttggatctggtattggaagcactgcccgaattactggcactgggggggcagttggtcgtcttggggagcggagatgccacgctgcaagaggcatttctagccgccgcagcagagcattctggccaggttggggtgcaaataggttatcacgaggcattctctcatcgaattattgccgggtcggatgtcattctggtgcccagccgctttgaaccctgtgggctaacacagttgtatgggttgaaatatggcacgttgccgctggtgcgacataccggtgggctggctgataccgtggtggattgcgcgttggaaaacctggctgacggcagcgcttcgggatttgtattcaatgaatgtgaggcgcaagccttagtgaaggcgatacgccgtgcctttgtactgtggagcaggccgaagcattggcgtcacgtccagcgccatgcgatgaggctcgactttggttggcaacttgccgccgtagattatttgtcactttatcgacgtctgtaa

SEQ ID NO: 4797 - protein, 476 aa, Yersinia pestis
MRVLHVCSELFPLLKTGGLADVIGALPAAQLAEGADVRIILPAFPDLRRGIPETVLVREIDTFAGRVALRYGHYRGIGIYLIDAPALYDRAGSPYHDASLYAYSDNYLRFALLGWMACELACGLDGYWRPEVVHAHDWHAGLTCAYLAARGRPARSVFTVHNLAYQGLFSADHLSELHLPAEFFQIYGLEFYGQISYLKAGLFFADHVTTVSPTYAKEITQPAFGYGMEGLLQALARQGRLTGILNGVDSDIWDPQSDTLLPTRYDAENLQAKAINKTHLQTAMGLQLAENKPIFAVVSRLTVQKGLDLVLEALPELLALGGQLVVLGSGDATLQEAFLAAAAEHSGQVGVQIGYHEAFSHRIIAGSDVILVPSRFEPCGLTQLYGLKYGTLPLVRHTGGLADTVVDCALENLADGSASGFVFNECEAQALVKAIRRAFVLWSRPKHWRHVQRHAMRLDFGWQLAAVDYLSLYRRL

SEQ ID NO: 4798 - DNA, 25 bp, Artificial sequence
  primer
atgcaggttttacatgtatgttcag

SEQ ID NO: 4799 - DNA, 26 bp, Artificial sequence
  primer
ttatttcaagcgatagtaaagctcac

SEQ ID NO: 4800 - protein, 544 aa, Artificial sequence
  consensus sequence
  Variant (2)..(5): Xaa in position 2 to 5 is any amino acid
  Variant (7)..(8): Xaa in position 7 to 8 is any amino acid
  Variant (10)..(11): Xaa in position 10 to 11 is any amino acid
  Variant (13)..(13): Xaa in position 13 is any amino acid
  Variant (17)..(17): Xaa in position 17 is any amino acid
  Variant (20)..(21): Xaa in position 20 to 21 is any amino acid
  Variant (25)..(25): Xaa in position 25 is any amino acid
  Variant (27)..(37): Xaa in position 27 to 37 is any amino acid
  Variant (38)..(42): Xaa in position 38 to 42 is any or no amino acid
  Variant (44)..(44): Xaa in position 44 is any amino acid
  Variant (46)..(89): Xaa in position 46 to 89 is any amino acid
  Variant (90)..(110): Xaa in position 90 to 110 is any or no amino acid
  Variant (112)..(113): Xaa in position 112 to 113 is any amino acid
  Variant (114)..(120): Xaa in position 114 to 120 is any or no amino acid
  Variant (122)..(124): Xaa in position 122 to 124 is any amino acid
  Variant (127)..(143): Xaa in position 127 to 143 is any amino acid
  Variant (144)..(155): Xaa in position 144 to 155 is any or no amino acid
  Variant (157)..(158): Xaa in position 157 to 158 is any amino acid
  Variant (161)..(173): Xaa in position 161 to 173 is any amino acid
  Variant (174)..(186): Xaa in position 174 to 186 is any or no amino acid
  Variant (188)..(188): Xaa in position 188 is any amino acid
  Variant (191)..(193): Xaa in position 191 to 193 is any amino acid
  Variant (196)..(215): Xaa in position 196 to 215 is any amino acid
  Variant (216)..(228): Xaa in position 216 to 228 is any or no amino acid
  Variant (230)..(230): Xaa in position 230 is any amino acid
  Variant (231)..(244): Xaa in position 231 to 244 is any or no amino acid
  Variant (246)..(246): Xaa in position 246 is any amino acid
  Variant (248)..(256): Xaa in position 248 to 256 is any amino acid
  Variant (259)..(260): Xaa in position 259 to 260 is any amino acid
  Variant (263)..(263): Xaa in position 263 is any amino acid
  Variant (266)..(270): Xaa in position 266 to 270 is any amino acid
  Variant (272)..(272): Xaa in position 272 is any amino acid
  Variant (274)..(275): Xaa in position 274 to 275 is any amino acid
  Variant (277)..(277): Xaa in position 277 is any amino acid
  Variant (279)..(284): Xaa in position 279 to 284 is any amino acid
  Variant (285)..(286): Xaa in position 285 to 286 is any or no amino acid
  Variant (288)..(288): Xaa in position 288 is any amino acid
  Variant (291)..(291): Xaa in position 291 is any amino acid
  Variant (294)..(294): Xaa in position 294 is any amino acid
  Variant (296)..(297): Xaa in position 296 to 297 is any amino acid
  Variant (298)..(298): Xaa in position 298 is any or no amino acid
  Variant (300)..(300): Xaa in position 300 is any amino acid
  Variant (302)..(303): Xaa in position 302 to 303 is any amino acid
  Variant (305)..(305): Xaa in position 305 is any amino acid
  Variant (306)..(321): Xaa in position 306 to 321 is any or no amino acid
  Variant (323)..(334): Xaa in position 323 to 334 is any amino acid
  Variant (336)..(344): Xaa in position 336 to 344 is any amino acid
  Variant (345)..(351): Xaa in position 345 to 351 is any or no amino acid
  Variant (354)..(355): Xaa in position 354 to 355 is any amino acid
  Variant (359)..(359): Xaa in position 359 is any amino acid
  Variant (361)..(378): Xaa in position 361 to 378 is any amino acid
  Variant (379)..(384): Xaa in position 379 to 384 is any or no amino acid
  Variant (386)..(386): Xaa in position 386 is any amino acid
  Variant (388)..(390): Xaa in position 388 to 390 is any amino acid
  Variant (391)..(391): Xaa in position 391 is any or no amino acid
  Variant (393)..(402): Xaa in position 393 to 402 is any amino acid
  Variant (404)..(408): Xaa in position 404 to 408 is any amino acid
  Variant (409)..(409): Xaa in position 409 is any or no amino acid
  Variant (411)..(413): Xaa in position 411 to 413 is any amino acid
  Variant (415)..(421): Xaa in position 415 to 421 is any amino acid
  Variant (424)..(424): Xaa in position 424 is any amino acid
  Variant (426)..(427): Xaa in position 426 to 427 is any amino acid
  Variant (429)..(429): Xaa in position 429 is any amino acid
  Variant (439)..(439): Xaa in position 439 is any amino acid
  Variant (441)..(445): Xaa in position 441 to 445 is any amino acid
  Variant (448)..(449): Xaa in position 448 to 449 is any amino acid
  Variant (451)..(455): Xaa in position 451 to 455 is any amino acid
  Variant (459)..(459): Xaa in position 459 is any amino acid
  Variant (462)..(466): Xaa in position 462 to 466 is any amino acid
  Variant (467)..(489): Xaa in position 467 to 489 is any or no amino acid
  Variant (492)..(492): Xaa in position 492 is any amino acid
  Variant (494)..(520): Xaa in position 494 to 520 is any amino acid
  Variant (521)..(526): Xaa in position 521 to 526 is any or no amino acid
  Variant (528)..(532): Xaa in position 528 to 532 is any amino acid
  Variant (534)..(536): Xaa in position 534 to 536 is any amino acid
  Variant (538)..(539): Xaa in position 538 to 539 is any amino acid
  Variant (541)..(542): Xaa in position 541 to 542 is any amino acid
LXXXXEXXPXXKXGGLXDVXXALPXAXXXXXXXXXXXXXXXXPXYXXXXXXXXXXXXXXXXXXXXXXXXXXXXXXXXXXXXXXXXXXXXXXXXXXXXXXXXXXXXXXXXXYXXXXXXXXXDXXXRFXXXXXXXXXXXXXXXXXXXXXXXXXXXXXHXXDWXXXXXXXXXXXXXXXXXXXXXXXXXXTXHNXXXQGXXXXXXXXXXXXXXXXXXXXXXXXXXXXXXXXXEXXXXXXXXXXXXXXXKXGXXXXXXXXXVSXXYAXEIXXXXXGXGXXGXLXXXXXXXXLXGIXNGXDXXXWXPXXDXXXXXXXXXXXXXXXXXKXXXXXXXXXXXXLXXXXXXXXXXXXXXXXRLXXQKGXDXXXXXXXXXXXXXXXXXXXXXXXXGXGXXXXEXXXXXXXXXXPXXXXXXIXXXEXXXXXXXAGXDXXLXPSRFEPCGLXQXXXXXYGXXPXXXXXGGLXDTXXXXXXXXXXXXXXXXXXXXXXXXXXXXGFXFXXXXXXXXXXXXXXXXXXXXXXXXXXXXXXXXXMXXXXXWXXXAXXYXXLY

SEQ ID NO: 4801 - protein, 57 aa, Artificial sequence
  protein pattern
  Variant (2)..(15): Xaa in position 2 to 15 is any amino acid
  Variant (16)..(19): Xaa in position 16 to 19 is any or no amino acid
  Variant (21)..(22): Xaa in position 21 to 22 is any amino acid
  Variant (23)..(23): Xaa in position 23 is Ile, Leu, Met or Val
  Variant (24)..(24): Xaa in position 24 is any amino acid
  Variant (27)..(27): Xaa in position 27 is any amino acid
  Variant (28)..(28): Xaa in position 28 is Phe or Tyr
  Variant (33)..(33): Xaa in position 33 is Ile or Leu
  Variant (34)..(34): Xaa in position 34 is Gly, Asn, Ser or Thr
  Variant (36)..(36): Xaa in position 36 is Phe, Ile, Leu or Met
  Variant (37)..(37): Xaa in position 37 is any amino acid
  Variant (38)..(38): Xaa in position 38 is Ala, Gly or Ser
  Variant (39)..(40): Xaa in position 39 to 40 is any amino acid
  Variant (41)..(41): Xaa in position 41 is Phe or Tyr
  Variant (42)..(42): Xaa in position 42 is any amino acid
  Variant (43)..(43): Xaa in position 43 is Ala, Cys, Ser or Thr
  Variant (44)..(44): Xaa in position 44 is Ile, Leu, Pro or Val
  Variant (46)..(46): Xaa in position 46 is Ile, Leu or Val
  Variant (47)..(47): Xaa in position 47 is Ala, Gly or Val
  Variant (48)..(49): Xaa in position 48 to 49 is any amino acid
  Variant (50)..(50): Xaa in position 50 is Thr or Val
  Variant (54)..(54): Xaa in position 54 is any amino acid
  Variant (55)..(55): Xaa in position 55 is Asp or Glu
  Variant (56)..(56): Xaa in position 56 is Ser or Thr
  Variant (57)..(57): Xaa in position 57 is Ile, Leu or Val
IXXXXXXXXXXXXXXXXXXDXXXXPSXXEPCGXXQXXXXXXXXXPXXXXXGGLXXXX

SEQ ID NO: 4802 - protein, 38 aa, Artificial sequence
  protein pattern
  Variant (2)..(8): Xaa in position 2 to 8 is any or no amino acid
  Variant (10)..(10): Xaa in position 10 is Ala, Gly or Ser
  Variant (11)..(11): Xaa in position 11 is Ala or Gly
  Variant (12)..(12): Xaa in position 12 is Ile, Leu, Met or Val
  Variant (13)..(14): Xaa in position 13 to 14 is any amino acid
  Variant (15)..(15): Xaa in position 15 is Ala or Ser
  Variant (16)..(19): Xaa in position 16 to 19 is any amino acid
  Variant (20)..(20): Xaa in position 20 is Ala, Thr or Val
  Variant (23)..(24): Xaa in position 23 to 24 is any amino acid
  Variant (27)..(27): Xaa in position 27 is any amino acid
  Variant (29)..(29): Xaa in position 29 is Ile or Leu
  Variant (30)..(34): Xaa in position 30 to 34 is any amino acid
  Variant (35)..(35): Xaa in position 35 is Ala, Gly or Ser
  Variant (36)..(37): Xaa in position 36 to 37 is any amino acid
  Variant (38)..(38): Xaa in position 38 is Phe, Ile, Leu or Met
LXXXXXXXKXXXXXXXXXXXVSXXYAXEXXXXXXXXXX

SEQ ID NO: 4803 - protein, 27 aa, Artificial sequence
  protein pattern
  Variant (2)..(5): Xaa in position 2 to 5 is any amino acid
  Variant (6)..(8): Xaa in position 6 to 8 is any or no amino acid
  Variant (10)..(11): Xaa in position 10 to 11 is any amino acid
  Variant (12)..(12): Xaa in position 12 is Asp, Gly or Pro
  Variant (13)..(14): Xaa in position 13 to 14 is any amino acid
  Variant (16)..(16): Xaa in position 16 is any amino acid
  Variant (20)..(20): Xaa in position 20 is Ala or Gly
  Variant (22)..(24): Xaa in position 22 to 24 is any amino acid
  Variant (25)..(25): Xaa in position 25 is Ala, Gly or Ser
LXXXXXXXEXXXXXKXGGLXDXXXXLP

SEQ ID NO: 4804 - protein, 9 aa, Artificial sequence
  protein pattern
  Variant (2)..(2): Xaa in position 2 is Ile or Val
  Variant (5)..(6): Xaa in position 5 to 6 is any amino acid
  Variant (7)..(7): Xaa in position 7 is Phe, His or Tyr
TXHNXXXQG

SEQ ID NO: 4805 - protein, 9 aa, Artificial sequence
  protein pattern
  Variant (2)..(2): Xaa in position 2 is any amino acid
  Variant (4)..(4): Xaa in position 4 is Ile or Val
  Variant (5)..(5): Xaa in position 5 is Leu, Pro or Val
  Variant (8)..(8): Xaa in position 8 is any amino acid
LXGXXNGXD

SEQ ID NO: 4806 - DNA, 1182 bp, Escherichia coli K12
  CDS (1)..(1182): transl_table=11
atgtcgaaaagcaatccgtctgaagtgaaattggccgtaccgacatccggtggcttctccgggctgaaatcactgaatttgcaggtcttcgtgatgattgcagctatcatcgcaatcatgctgttctttacctggaccaccgatggtgcctacttaagcgcccgtaacgtctccaacctgttacgccagaccgcgattaccggcatcctcgcggtaggaatggtgttcgtcataatttctgctgaaatcgacctttccgtcggctcaatgatggggctgttaggtggcgtcgcggcgatttgtgacgtctggttaggctggcctttgccacttaccatcattgtgacgctggttctgggactgcttctcggtgcctggaacggatggtgggtcgcgtaccgtaaagtcccttcatttattgtcaccctcgcgggcatgttggcatttcgcggcatactcattggcatcaccaacggcacgactgtatcccccaccagcgccgcgatgtcacaaattgggcaaagctatctccccgccagtaccggcttcatcattggcgcgcttggcttaatggcttttgttggttggcaatggcgcggaagaatgcgccgtcaggctttgggtttacagtctccggcctctaccgcagtagtcggtcgccaggctttaaccgctatcatcgtattaggcgcaatctggctgttgaatgattaccgtggcgttcccactcctgttctgctgctgacgttgctgttactcggcggaatgtttatggcaacgcggacggcatttggacgacgcatttatgccatcggcggcaatctggaagcagcacgtctctccgggattaacgttgaacgcaccaaacttgccgtgttcgcgattaacggattaatggtagccatcgccggattaatccttagttctcgacttggcgctggttcaccttctgcgggaaatatcgccgaactggacgcaattgcagcatgcgtgattggcggcaccagcctggctggcggtgtgggaagcgttgccggagcagtaatgggggcatttatcatggcttcactggataacggcatgagtatgatggatgtaccgaccttctggcagtatatcgttaaaggtgcgattctgttgctggcagtatggatggactccgcaaccaaacgccgttcttga

SEQ ID NO: 4807 - protein, 393 aa, Escherichia coli K12
MSKSNPSEVKLAVPTSGGFSGLKSLNLQVFVMIAAIIAIMLFFTWTTDGAYLSARNVSNLLRQTAITGILAVGMVFVIISAEIDLSVGSMMGLLGGVAAICDVWLGWPLPLTIIVTLVLGLLLGAWNGWWVAYRKVPSFIVTLAGMLAFRGILIGITNGTTVSPTSAAMSQIGQSYLPASTGFIIGALGLMAFVGWQWRGRMRRQALGLQSPASTAVVGRQALTAIIVLGAIWLLNDYRGVPTPVLLLTLLLLGGMFMATRTAFGRRIYAIGGNLEAARLSGINVERTKLAVFAINGLMVAIAGLILSSRLGAGSPSAGNIAELDAIAACVIGGTSLAGGVGSVAGAVMGAFIMASLDNGMSMMDVPTFWQYIVKGAILLLAVWMDSATKRRS

SEQ ID NO: 4808 - DNA, 1485 bp, Klebsiella pneumoniae
  CDS (1)..(1485)
ttgagcgcgttcgcgagcgcgggcttggcgtcatcatcatcagtcacaacatggaagacgttcgcgccgtcgccgaccgtatcgtggtgctgcgtctcgggcgcaacaaagggatcttcacgcccgatgcttctaatcaggatctggtcgccgcgatcaccggcgcgacggaaaacgccgtctcacgccgggttgaacgtaaatcacagccaacgacttccggagcgatgtaattttatgaacagtaagaccgcatcccacaccgcgctggatcgcagcgatgagcgcgttcgtcacgacgaggggctgttcggcgccctacgcgcgcagataacccgcatcaaaaccggcgatctcggcaccgcgccggtgatagccgggctgattgtgatttccctggttttcaccttcctcaacccggtctatatcgcgccgaataacctggtgaacctgctgtttgactgcgcgacggtcgggtttatctcgctcggcatcgtctgcgtgctaatgcttggtgagatagacctgtcggtcggctccatgagcggcctggcatcggctatcgtcggcgtgctgtgggtgaacgcaggatggccgctggcgggagccatcgccgtggcgctggcctgcggcgtggccgtcgggttggtctatgcgctgctgtatacccgcgtcggaatgccgagtttcgtcgccactctcgccggcctgctggcgctgctgggtatgcagctgtatatcctcgggccgagcggcagcatcaacctgccctatacttcgccgctggtgcgctttggccaactgctggtgatgcccggctggttctcacacctgatggcattgctgccagggctggcgatccttatttttggcctgaaaaaacgctcgcggcgcctggcggccaatctttccgccgagggagtcagctcgctagtggcgcgcgcgatcgcgctgacgattatcttcgaggccgcggtgctttacctcaatcaggggcgcggtattccatggattttcggtctctttgtcgcctgcgtgatgatcctcaactacgcgctgaaacggacaaaatggggtcgctcgatgttcgcggttggcggcaaccgtgaagcggcgcgccgttcgggcattaacgtgcgggcgatttatgtgagcgctttcgtcctgtgtaccacgcttgcgaccttcggcggcattctcgcggcgtcgcgactggcttccgccagccagcaggccggcaccggcgacgtcaacctcaacgccatcgccgcggcggtgatcggcggcaccagcctgttcggcggacgcggcagcgcctggtccgcgctattggggatcatcgtgattcagtcgatttcaaatgggctgacgctgttgaacctgccgtcttcgctgcgctatatcattaccggcgcggtactggcgattgcggtaatcattgattctctggctcgccgttcacgcgtgtcgcacggccgcgcctga

SEQ ID NO: 4809 - protein, 494 aa, Klebsiella pneumoniae
LSAFASAGLASSSSVTTWKTFAPSPTVSWCCVSGATKGSSRPMLLIRIWSPRSPARRKTPSHAGLNVNHSQRLPERCNFMNSKTASHTALDRSDERVRHDEGLFGALRAQITRIKTGDLGTAPVIAGLIVISLVFTFLNPVYIAPNNLVNLLFDCATVGFISLGIVCVLMLGEIDLSVGSMSGLASAIVGVLWVNAGWPLAGAIAVALACGVAVGLVYALLYTRVGMPSFVATLAGLLALLGMQLYILGPSGSINLPYTSPLVRFGQLLVMPGWFSHLMALLPGLAILIFGLKKRSRRLAANLSAEGVSSLVARAIALTIIFEAAVLYLNQGRGIPWIFGLFVACVMILNYALKRTKWGRSMFAVGGNREAARRSGINVRAIYVSAFVLCTTLATFGGILAASRLASASQQAGTGDVNLNAIAAAVIGGTSLFGGRGSAWSALLGIIVIQSISNGLTLLNLPSSLRYIITGAVLAIAVIIDSLARRSRVSHGRA

SEQ ID NO: 4810 - DNA, 966 bp, Escherichia coli
  CDS (1)..(966)
atgacaacccagactgtctctggtcgccgttatttcacgaaagcgtggctgatggagcagaaatcgcttatcgctctgctggtgctgatcgcgattgtctcgacgttaagcccgaactttttcaccatcaataacttattcaatattctccagcaaacctcagtgaacgccattatggcggtcgggatgacgctggtgatcctgacgtcgggcatcgacttatcggtaggttctctgttggcgctgaccggcgcagttgctgcatctatcgtcggcattgaagtcaatgcgctggtggctgtcgctgctgctctcgcgttaggtgccgcaattggtgcggtaaccggggtgattgtagcgaaaggtcgcgtccaggcgtttatcgctacgctggttatgatgcttttactgcgcggcgtgaccatggtttataccaacggtagcccagtgaataccggctttactgagaacgccgatctgtttggctggtttggtattggtcgtccgctgggcgtaccgacgccagtctggatcatggggattgtcttcctcgcggcctggtacatgctgcatcacacgcgtctggggcgttacatctacgcgctgggcggcaacgaagcggcaacgcgtctttctggtatcaacgtcaataaaatcaaaatcatcgtctattctctttgtggtctgctggcatcgctggccgggatcattgaagtggcgcgtctctcctccgcacaacccacggcggggactggctatgagctggatgctattgctgcggtggttctgggcggtacgagtctggcgggcggaaaaggtcgcattgttgggacgttgatcggcgcattaattcttggcttccttaataatggattgaatttgttaggtgtttcctcctattaccagatgatcgtcaaagcggtggtgattttgctggcggtgctggtagacaacaaaaagcagtaa

SEQ ID NO: 4811 - protein, 321 aa, Escherichia coli
MTTQTVSGRRYFTKAWLMEQKSLIALLVLIAIVSTLSPNFFTINNLFNILQQTSVNAIMAVGMTLVILTSGIDLSVGSLLALTGAVAASIVGIEVNALVAVAAALALGAAIGAVTGVIVAKGRVQAFIATLVMMLLLRGVTMVYTNGSPVNTGFTENADLFGWFGIGRPLGVPTPVWIMGIVFLAAWYMLHHTRLGRYIYALGGNEAATRLSGINVNKIKIIVYSLCGLLASLAGIIEVARLSSAQPTAGTGYELDAIAAVVLGGTSLAGGKGRIVGTLIGALILGFLNNGLNLLGVSSYYQMIVKAVVILLAVLVDNKKQ

SEQ ID NO: 4812 - DNA, 969 bp, Pasteurella multocida
  CDS (1)..(969)
atgacaactcaagcaaaaccattccaattcggtaaattcttaattgaacaacgttccatcattgccttactggtgctgattgcgatcgtctcaatgatcaatcctgactttttcagtgtggataatattctcaatattttacgccaaacttcagtcaacgcaattattgccgtcgggatgacatttgtgatcttgattgccgggatcgatctttcggtcggttcggtacttgcattaacgggggctattgccgcctcgatggtcagtactgagttaccaatactgctcgtcattccagtcacactcttgattggtacattactgggcgggatcagcggtgttattgtcgcgaaagggaaagtacaagccttcattgctactctcgtaaccatgaccttattacgtggtgtgaccatggtttataccgatggacgcccaattagtacaggcttttcggaaggtgcggatacgttttcgctgttaggcacgggttatgtattcggtatccctgtcccaatttggattatggcatttgtctttgctgcctcttggtatgtattaaaacatacacgtattgggcgttatatttatgcacttggggggaatgaagccgccacccaattatctggcattaacgtcaataaaattaaaatctttgtttttgccgtcagtggcttcttatctgcccttgccggtctgattgtcacttcacgtttatcctctgctcaaccgactgccggtgtgtcatatgagcttgatgcgattgccgcggttgtagtcggcggaacaagcttaatgggcggaaaaggacgcgtcatgggcactttaattggcgcattgattattggtttcttaaataacgcgctgaatttactggatatttcctcttactatcaaatgattgcaaaagcattagttatcttagtcgcggttttagcggataactatttaggcaccaaaaaagtttaa

SEQ ID NO: 4813 - protein, 322 aa, Pasteurella multocida
MTTQAKPFQFGKFLIEQRSIIALLVLIAIVSMINPDFFSVDNILNILRQTSVNAIIAVGMTFVILIAGIDLSVGSVLALTGAIAASMVSTELPILLVIPVTLLIGTLLGGISGVIVAKGKVQAFIATLVTMTLLRGVTMVYTDGRPISTGFSEGADTFSLLGTGYVFGIPVPIWIMAFVFAASWYVLKHTRIGRYIYALGGNEAATQLSGINVNKIKIFVFAVSGFLSALAGLIVTSRLSSAQPTAGVSYELDAIAAVVVGGTSLMGGKGRVMGTLIGALIIGFLNNALNLLDISSYYQMIAKALVILVAVLADNYLGTKKV

SEQ ID NO: 4814 - DNA, 966 bp, Salmomella typhi
  CDS (1)..(966)
atgacaacccaggctgtttctggtcgccgttatttcactaaagcgtggcttcttgagcagaagtcgctcattgccctgctggtgttgatcgcgattgtttcgacgttgagccccaacttttttaccgttaataatctgttcaatattcttcaacagacctccgtcaacgccattatggcggtggggatgacgttggtgattctgacatcggggatcgatctgtccgtcggttccctgctggcactcaccggtgcggttgccgcttcaatcgtcggcgttgaagtgaatgcgctggtcgcggttgccgccgcgctggcgctgggcgctgcgattggcgccgtcactggcgttatcgtcgcgaagggccgcgtacaggcgtttatcgctacgctggtgatgatgctgctactgcgtggcgtgacgatggtttacaccgacggtagcccggtcaacaccggctttaccgataacgccgatctgtttggctggttcggtatcggtcgtccgctgggcgttcctacgccggtctggatcatggctatcgtctttatcgccgcctggtatatgctgcatcacacccgtctgggacgctatatctacgcgctgggcggtaacgaagcggcgacgcgtctgtctggcattagcgtgagcaaagtgaaaattatcgtctattcactttgcggcctgacagcatcgctggcgggcatcattgaagtggcgcgcctctcttccgcgcagccgacggcgggtaccggctatgagctggatgctattgccgccgtggtgctgggcggcaccagccttgcaggtggtaaagggcgcattgttgggacattgatcggcgcattgattctcggcttccttaataatggtttgaatttgttaggtgtttcctcctattaccagatgatcgtcaaagcggtggtgattttgctggcggtactggtagacaacaaaaagcagtaa

SEQ ID NO: 4815 - protein, 321 aa, Salmomella typhi
MTTQAVSGRRYFTKAWLLEQKSLIALLVLIAIVSTLSPNFFTVNNLFNILQQTSVNAIMAVGMTLVILTSGIDLSVGSLLALTGAVAASIVGVEVNALVAVAAALALGAAIGAVTGVIVAKGRVQAFIATLVMMLLLRGVTMVYTDGSPVNTGFTDNADLFGWFGIGRPLGVPTPVWIMAIVFIAAWYMLHHTRLGRYIYALGGNEAATRLSGISVSKVKIIVYSLCGLTASLAGIIEVARLSSAQPTAGTGYELDAIAAVVLGGTSLAGGKGRIVGTLIGALILGFLNNGLNLLGVSSYYQMIVKAVVILLAVLVDNKKQ

SEQ ID NO: 4816 - DNA, 999 bp, Vibrio cholerae
  CDS (1)..(999)
atgaaacaaggatacagcatgagtacccgaaccatgactaatacgacatctgataaccgtaaaaaactgctcagcaaagagtggttgattgaacaaaaatcgctgatcgcactgctgtttttagtggttgtcgtctctttcttaaacccgaattttttcacggttgataacttactgaatattctgcgccaaacttcggtcaacgcgatcatcgcggtgggtatgaccttggtcatcttaaccgcagggattgatttgagcgttggctcagtattagcactgtgtggcgcttttgcggccaccttagtggcgatggaagttcctgttctggtagctgtgcctacggctttgctggctggtgctgcgcttggcgcaatcagcggcatcatcattgccaaaggcaaagtgcaggcctttatcgcgacgttagtgacgatgactctgctgcgcggtgtcactatggtgtacaccgatgggcgtccgatttcgaccggattcactgatacggcggacacctttgcatggtttggtacaggctacacattgggcattccggttccggtatggctgatggtcgtggtatttgccggcgcttggtacttgctcaatcacactcgctttggccgctatgtgtatgcagtgggcggcaacgaatcagcaactcgcctttcaggtatcaacgtagatcgcgtcaaaatcggcgtgtatgccatctgtggtttactggctgcgctagcaggcatcatcgtcacatctcgcctttcttctgcgcaacctactgcgggtatgggctatgagttggatgcgattgcggctgtggtgctagggggcaccagtttgatgggcggtaaaggtcgcatcatgggcacgctgatcggcgctctcatcatcggatttttaaacaacgcattgaacttgctcgatgtttcctcctactaccaaatgattgcgaaagctgtggttattttgctggcggtcttggtagacaacaaaaaataa

SEQ ID NO: 4817 - protein, 332 aa, Vibrio cholerae
MKQGYSMSTRTMTNTTSDNRKKLLSKEWLIEQKSLIALLFLVVVVSFLNPNFFTVDNLLNILRQTSVNAIIAVGMTLVILTAGIDLSVGSVLALCGAFAATLVAMEVPVLVAVPTALLAGAALGAISGIIIAKGKVQAFIATLVTMTLLRGVTMVYTDGRPISTGFTDTADTFAWFGTGYTLGIPVPVWLMVVVFAGAWYLLNHTRFGRYVYAVGGNESATRLSGINVDRVKIGVYAICGLLAALAGIIVTSRLSSAQPTAGMGYELDAIAAVVLGGTSLMGGKGRIMGTLIGALIIGFLNNALNLLDVSSYYQMIAKAVVILLAVLVDNKK

SEQ ID NO: 4818 - DNA, 996 bp, Mesorhizobium loti MAFF303099
  CDS (1)..(996): transl_table=11
atggctgagatgacaacgggacaaggattggcgtcgatccggccggggtcggtgggtcggttgcgaggctgggcgcaaagccttggcctgctctgggtcctgatagtgttgtgcgccttcgcagtgtatctgtcgccgagcttcatccagaccggcaacatgttgaatgtcggccgccaggtcgcgctgtttggcatcgtcagcgtcggcatgaccttcgtgattctgacacgcggcatcgatctttccgtcggttccatcgtcggtgtcgtcgcggttgccacagcgctgatgctctcatctggcgttccaatcccgttggcgatgattgcggcgctggggatgggagccgtgttcggcgccatcaacggagcaggcgtcgttttctttggcatgccgcccttcatcatgaccctcggcacgctggtgatggggcgcggcattgccatgaccatcgccaacggcgagccgaagacgcttggcgatgcctcggatgccttctcctatctgggaagcggttttctcttcggcattcccgtaccgatctggatcttcgttgccatagccgccgtggctttcgttgtcctacgacacacgcctttcggtcgccaaatctacgcggtcggttcaaacaccgaggcggcgcggcttgccggcatcaacgtgccgcgcgtgctgatgtcggtctatgccatctcgggcgtgctgtcggcgctgaccgccctggtttttgtctcacggctcaccgttggtgagcccaccgctggcaccaatctcgaactcgaggccatctcgatcgtcgtcatcggcggcaccagcctgtttggcggcgaaggcggcgtcatcggcaccgtgatcggcgccgcaatcattgccgtcatggctaatatattgaatttgctaggtatatcgccattcacacagcagatcgtgaagggcgccatcatcatcgccgcggtgatgttcgaggtctaccgtcacaaaagacggtcctga

SEQ ID NO: 4819 - protein, 331 aa, Mesorhizobium loti MAFF303099
MAEMTTGQGLASIRPGSVGRLRGWAQSLGLLWVLIVLCAFAVYLSPSFIQTGNMLNVGRQVALFGIVSVGMTFVILTRGIDLSVGSIVGVVAVATALMLSSGVPIPLAMIAALGMGAVFGAINGAGVVFFGMPPFIMTLGTLVMGRGIAMTIANGEPKTLGDASDAFSYLGSGFLFGIPVPIWIFVAIAAVAFVVLRHTPFGRQIYAVGSNTEAARLAGINVPRVLMSVYAISGVLSALTALVFVSRLTVGEPTAGTNLELEAISIVVIGGTSLFGGEGGVIGTVIGAAIIAVMANILNLLGISPFTQQIVKGAIIIAAVMFEVYRHKRRS

SEQ ID NO: 4820 - DNA, 1332 bp, Mesorhizobium loti MAFF303099
  CDS (1)..(1332): transl_table=11
atgaccgacacgacctctaatcaaccggtcggcagcactgcggcggacagggcgcgtgcatccgaactcagcgccgtcgggcggttcctcaaggctaccgagctcgatacgcgcatgctcggcatggtcggcgcgctgctggtcatctgggtcggcatccatatcctgtcgggcgggcttttcctgacgccgcgcaatctgtggaacctgtcggtgcagacctcgtcggtcgcgatcatggcgaccggcatggtgctggtcatcgtcatgcgcaacatcgacctctcggtcggatccgtcgaaggcgtgatcggcatgatcatgggcgtggcgcaggctgaattcctcatccgcgtcgtcggtttccagcttggaaatccctggctctggatcatcgcgctggcggccggcgtggtgcttggcctcctgatcggcgcattccagggcttcatcatcgcctatatggaggttccggccttcatcgtgacgctgggcggcctgctggtctggcgcggcatggcatggctgatcaccagcggccgcacggtcgcgccgctcgacacaaccttccaactgatgggcggcggaccacgcggctcgatcggcgccaccgccagctggatcgtcggaatcgtcgcttgcgcggctgtcgccttcgcgctgctcaacggccggtcacagcgcaaacggttccactttccactgcgcccggtttgggccgagattttgcttggcggggttgcctgcgccgctatccttggcgccgtctggatcgccaattcctatccatggccgatcggcatcgtgcgccagtatgcccagcagaacggcattaccgttcccgaaggcgggctgtacatcgcgcatggcattgccataccggtgctgatggcggtggccgtgggcattatcatgacgttcatcaccaagcgcacgcgtttcggccgctatgttttcgccattggcggcaatccggaggcggccgaacttgccggtatcaacacccgctgggtgaccatgaaggttttcatgatcatgggcgtgctggccgcgatcagcgcggcgatctcttcggcccggctcaacgcatcgaccaatgcgctgggcacgctggacgagcttctggtcatcgccgccgccgtcatcggcggcacgtcgctcgccggcggcgccggcacggtgatgggcgccatgctgggcgcgcttctgatgcagtcattgcagtcgggcatggtgctgctcggcatcgactcgccgctgcagagcatcgtcgtcggcgccgtgctggtcatcgcggtgtggctcgacaccgtctatcgcaagcgggtttag

SEQ ID NO: 4821 - protein, 443 aa, Mesorhizobium loti MAFF303099
MTDTTSNQPVGSTAADRARASELSAVGRFLKATELDTRMLGMVGALLVIWVGIHILSGGLFLTPRNLWNLSVQTSSVAIMATGMVLVIVMRNIDLSVGSVEGVIGMIMGVAQAEFLIRVVGFQLGNPWLWIIALAAGVVLGLLIGAFQGFIIAYMEVPAFIVTLGGLLVWRGMAWLITSGRTVAPLDTTFQLMGGGPRGSIGATASWIVGIVACAAVAFALLNGRSQRKRFHFPLRPVWAEILLGGVACAAILGAVWIANSYPWPIGIVRQYAQQNGITVPEGGLYIAHGIAIPVLMAVAVGIIMTFITKRTRFGRYVFAIGGNPEAAELAGINTRWVTMKVFMIMGVLAAISAAISSARLNASTNALGTLDELLVIAAAVIGGTSLAGGAGTVMGAMLGALLMQSLQSGMVLLGIDSPLQSIVVGAVLVIAVWLDTVYRKRV

SEQ ID NO: 4822 - DNA, 1287 bp, Mesorhizobium loti MAFF303099
  CDS (1)..(1287): transl_table=11
atgagcaccgacagcgcccccgccccgcagggcaacatcgcagaggaccagcgtccacgcatcgccgtctcggcgctgacgacgaacctgcgcgaatacggtctcatcatcgcgctgatcgtcatcatgctgttcttccagttcaccacgtcgggaacgctgttcaagccggtcaacctcagcaatttggtgcagcagaactcgttcatcatcgtgatggcgctgggcatgctgctggtcatcgtttccggctatatcgacctcagcgtcggatcggtcgccggtttcatcggcgcgctggcggcaaacatgatggtcatctggcagctcggaccgctcagcaatccgctggtggtttcgatcgtctgcctgatcgtgggcggcctgatcggtgcggcgcaaggctattggatcgcctaccaccggataccgagcttcatcgtgacattggccggcatgctgatcttccgcggcatctgccaggcgctgctgggcggcggctcttcggtgggcccccttccggacggcttcaaggcgctgagctccggcttcatcccggacgttatcggcccgctgacgctgatcccgccgacggtgaacgccgccggcaagaccatcgtgggcagcggcctgacactgcacatgacgacgatcgtgctcggtctgatcgccgtggtggcctatgcctatttcggggtgaggacacgacgcaagcgcgaacgccacggctatgaagccgagcccttccccctgttcgtcatcaaaacgctggtcgccagcgcgctggcgctgttcctggtctatgagttcgccagctacaggggcctgccggtggtgctgctcgtcatgggcgtactgatctcgctgttcgtcttcgtcaccaagcgcatgaccatcggccgccgcatctacgcgatgggcggcaatcccaaggcggcgcagctgtcgggcatcaacaccgagcggctgacgctgctggtgttcatcaatatgggcgtgctgtcggcgctgggcggcctcatcatcgcggcgcgtctcggccaggccgtgccggcggccggtctgggctcagagctcgacgtcatcgccgccgtcttcatcggcggcgcctcggcgatgggcggcgtcggccaagtcatcggcgccgtggtcggcggcttcatcatgggcgtgatgaacaacggcatgtcgatcatgggtgtcaatgtcgactggcagcaggtggtcaaaggcctggtgctgctcggcgccgtgatcttcgacgtctacaacaagaacaaggcctga

SEQ ID NO: 4823 - protein, 428 aa, Mesorhizobium loti MAFF303099
MSTDSAPAPQGNIAEDQRPRIAVSALTTNLREYGLIIALIVIMLFFQFTTSGTLFKPVNLSNLVQQNSFIIVMALGMLLVIVSGYIDLSVGSVAGFIGALAANMMVIWQLGPLSNPLVVSIVCLIVGGLIGAAQGYWIAYHRIPSFIVTLAGMLIFRGICQALLGGGSSVGPLPDGFKALSSGFIPDVIGPLTLIPPTVNAAGKTIVGSGLTLHMTTIVLGLIAVVAYAYFGVRTRRKRERHGYEAEPFPLFVIKTLVASALALFLVYEFASYRGLPVVLLVMGVLISLFVFVTKRMTIGRRIYAMGGNPKAAQLSGINTERLTLLVFINMGVLSALGGLIIAARLGQAVPAAGLGSELDVIAAVFIGGASAMGGVGQVIGAVVGGFIMGVMNNGMSIMGVNVDWQQVVKGLVLLGAVIFDVYNKNKA

SEQ ID NO: 4824 - DNA, 999 bp, Mesorhizobium loti MAFF303099
  CDS (1)..(999): transl_table=11
atgaagctcaggaccttcatcgcgctgattgccgtgctggtgttcttctccatcgccgccccgaacttcctgtccgccgccaatctgatcctgatggccaagcatgtggcgctcaacgccttcctcgccatgggcatgaccttcgtcatcatcaccggcggcatcgacctttcggtcggctcgatcgtcggcctgtgcggcatggtggccggctatctcgtgctcaacggcatcgacctgcaattcggctacaccatctacttcaacgtggtggagatcgcattgatcaccctggcggtcggcattttgatcggcgccgtcaacggactgctgatcacccggctcaacgtcgcacccttcatcgccacgctcggcgtcctctatgtggcgcgcggcctggcgctgctgtcgtctgacggccgcaccttccccaatctggtcggcaagccggaactcggcaccaccggcttcggcttcctcggcgcaggccggctcgtcggcttgcccgtctcgatctggatcctgatcgtggtggcgctgggcgcggcgtatctcgcccggtacacgccgctcggccgccacatcttcgccgtcggtggaaacgagcgcgcggcgcgcatttcgggcgtacgcgtcaacatggtcaagatgttcgtctacatgttctccggcttctgcgcggcgatcgtcggcctgatcatctcgtcggagctgatggcctcgcatcctgcaacaggcgagagcttcgaactgaatgccatcgctgcggcggtgcttggaggcacctcgatgtcgggcggccgcggcacgatcggcggcaccatcgtcggcgccttcgtcatcggcatcctgtcggatgggctggtgatgatgggcgtgagctccttctggcagatggtgatcaaaggcctcgtcatcatcgtcgccgtcgtcgtcgaccaggcacagcgccggcttcagcagcgtgtcaccctgatgcagatggcaaaggcgggttga

SEQ ID NO: 4825 - protein, 332 aa, Mesorhizobium loti MAFF303099
MKLRTFIALIAVLVFFSIAAPNFLSAANLILMAKHVALNAFLAMGMTFVIITGGIDLSVGSIVGLCGMVAGYLVLNGIDLQFGYTIYFNVVEIALITLAVGILIGAVNGLLITRLNVAPFIATLGVLYVARGLALLSSDGRTFPNLVGKPELGTTGFGFLGAGRLVGLPVSIWILIVVALGAAYLARYTPLGRHIFAVGGNERAARISGVRVNMVKMFVYMFSGFCAAIVGLIISSELMASHPATGESFELNAIAAAVLGGTSMSGGRGTIGGTIVGAFVIGILSDGLVMMGVSSFWQMVIKGLVIIVAVVVDQAQRRLQQRVTLMQMAKAG

SEQ ID NO: 4826 - DNA, 954 bp, Thermotoga maritima MSB8
  CDS (1)..(954): transl_table=11
ttggcttcgaaatttaagaagagaactttcagagaactcggtcctttagttgctctcgtcagtctggctgtttttacggctatcttgaatcctcgctttctgacggcattcaatcttcaggctctcggaaggcagatcgcgatctttggccttttagctatcggggaaacctttgtcatcatctccgggggaggagccatcgacctctcccccggttccatggtggcgctcacaggggtaatggttgcatggctcatgactcacggtgttcccgtgtggatctctgtaattctcattctgttgttctctataggagcaggtgcgtggcatggcttgtttgtcacaaagctcagagttcccgcttttatcatcacccttggaactctgacgatcgcccgaggcatggcagccgtgatcacaaagggatggcctatcatcggactcccgtcttctttcttgaaaatcgggcagggtgaatttttgaagataccgatcccggtgtggattctccttgcagtggctcttgtggcagatttcttcctcagaaagaccgtttatggaaaacacctgagggcttccggcggtaacgaagtcgccgcaagattttccggagtgaacgtagacagagtgcgaatgatagcgttcatggtatcgggattcctcgccggtgtggtggggataatcattgcggcaaggctttctcaagggcaaccaggtgtcggtagtatgtacgaactctatgccatagcctccactgtaatcggtggaacgagtctcacgggaggagaaggaagtgttttaggagcaatcgtaggcgcgagtatcataagtcttctctggaacgctctcgttcttctcaacgtttcgacgtactggcacaacgtagtcatcggaatcgtcatagttgtggcagtaactctcgacatattgagaaggagacttgcaagcaaataa

SEQ ID NO: 4827 - protein, 317 aa, Thermotoga maritima MSB8
MASKFKKRTFRELGPLVALVSLAVFTAILNPRFLTAFNLQALGRQIAIFGLLAIGETFVIISGGGAIDLSPGSMVALTGVMVAWLMTHGVPVWISVILILLFSIGAGAWHGLFVTKLRVPAFIITLGTLTIARGMAAVITKGWPIIGLPSSFLKIGQGEFLKIPIPVWILLAVALVADFFLRKTVYGKHLRASGGNEVAARFSGVNVDRVRMIAFMVSGFLAGVVGIIIAARLSQGQPGVGSMYELYAIASTVIGGTSLTGGEGSVLGAIVGASIISLLWNALVLLNVSTYWHNVVIGIVIVVAVTLDILRRRLASK

SEQ ID NO: 4828 - DNA, 996 bp, Thermotoga maritima MSB8
  CDS (1)..(996): transl_table=11
atgcaggtcgagagatccagagcgaagatttcgtggtatcaaaggatatctcgctatcagtcgattttcatacttcttggtcttatcgtcttgttcagttttctgtccaatcgatttctcactcttgaaaatttctggatcattctcagacaaacagctgttaacctctgtatagctgtgggtatgacgtttgtcattctcacgggaggaatagatctatctgttggttctatccttggattctcgggggctgtaaccgcaaaacttttgaagtatggtctgatactaagtgcgtttggtgtcgtgctcaagttcaatcctcttggtgcatcaataattggagtcttggctggttttgcaataggattgttcaatgggtttattatcacaagattcaatattcccccatttgtggccacactgggaacaatgacagcagttagaggattcatcatgcttctgactaaaggacatcctataacgcgattgggtgatagttttgacttcataggttctgggtggtttttagggattccaatgccagtctggatagccgctatagccacaggagtaggcatttttattctcagaaaaactcagtttggaagatatgtatatgctgttggaggtaatgaaaaagcagcagttctctctggtgtgaattcaaaactgacgaaactctgggtgtacgcgatatcgggtatcctctcggctgttgcaggtctaatagttaccgcccgtttagattcagcccagccaaatgctggtttgatgtacgagctagatgcaatagccgcaacagttattggaggagcctctctttcaggtggaaaaggaactctcataggaactgttgtaggtgcattgataattggtgttttgaacgatgggttggtactcgttggtgtttctcctttctggcaacaggttgcaaagggattcataataatagctgctgtgatagcagaaaaactcggtagaggggaaaaggagtga

SEQ ID NO: 4829 - protein, 331 aa, Thermotoga maritima MSB8
MQVERSRAKISWYQRISRYQSIFILLGLIVLFSFLSNRFLTLENFWIILRQTAVNLCIAVGMTFVILTGGIDLSVGSILGFSGAVTAKLLKYGLILSAFGVVLKFNPLGASIIGVLAGFAIGLFNGFIITRFNIPPFVATLGTMTAVRGFIMLLTKGHPITRLGDSFDFIGSGWFLGIPMPVWIAAIATGVGIFILRKTQFGRYVYAVGGNEKAAVLSGVNSKLTKLWVYAISGILSAVAGLIVTARLDSAQPNAGLMYELDAIAATVIGGASLSGGKGTLIGTVVGALIIGVLNDGLVLVGVSPFWQQVAKGFIIIAAVIAEKLGRGEKE

SEQ ID NO: 4830 - DNA, 1014 bp, Vibrio cholerae O1 biovar eltor str. N16961
  CDS (1)..(1014): transl_table=11
atgactatggatgctgtcaaatcatttgcaattaaacatttaaaagagggcgcaatctacgcagtgctgtttattctgctggcgattattgtgattcaagagccctcatttctaagcttacgtaacctcagtaatatcctgactcaatcctcggtgcgcgtgattattgcgttgggggtagcaggtttgattgtgactcaaggcactgacttatcagctggtcgccaagtgggtctcgccgcggtgatttccgctactttgttgcaatcaatggataacgtgaacaaagtattcccaagcttgggtgaaattccgattcttgcggtcatcattagtgtctgcttgattggtgcgattatcggtttggtcaacggtgtgatcgtcgcttacctcaaagtaacgccgtttatcgcgaccttaggcaccatgatcatcgtctacggcattaactcgctgtactacgactcggtcggtgcatcaccgattgcgggttttgatgaacgcttcactaccttcactcaaggctttatccgaattggggattttcggttctcctacatcaccttctacgccattatcgcgatcatttttatgtgggtactgtggaataaaaccgtgttcggcaaaaacatttttgcggttggtggaaacccagaagcggcgaaagtgtcgggtgttaacgtgcctttgactctgcttaaagtgtatgcgctttccggtgtgttctatgcgtttggcggtatgctcgaagcgggacgaattggtagtgctaccaacaacttaggcttcttatatgagttggatgcgattgcggcgtgtgtggtgggcggtgtctcattcgctggcggggtggggagtatcgctggggtcgtaaccggggtactgatcttcacagtaatcaactacggtatgacctacatcggcgttagcccatactggcagtacatcattaaaggctcgatcatcatcttcgctgtagcgctggattcaatgaaatacgccaataagaagtaa

SEQ ID NO: 4831 - protein, 337 aa, Vibrio cholerae O1 biovar eltor str. N16961
MTMDAVKSFAIKHLKEGAIYAVLFILLAIIVIQEPSFLSLRNLSNILTQSSVRVIIALGVAGLIVTQGTDLSAGRQVGLAAVISATLLQSMDNVNKVFPSLGEIPILAVIISVCLIGAIIGLVNGVIVAYLKVTPFIATLGTMIIVYGINSLYYDSVGASPIAGFDERFTTFTQGFIRIGDFRFSYITFYAIIAIIFMWVLWNKTVFGKNIFAVGGNPEAAKVSGVNVPLTLLKVYALSGVFYAFGGMLEAGRIGSATNNLGFLYELDAIAACVVGGVSFAGGVGSIAGVVTGVLIFTVINYGMTYIGVSPYWQYIIKGSIIIFAVALDSMKYANKK

SEQ ID NO: 4832 - DNA, 1167 bp, Bacillus halodurans C-125
  CDS (1)..(1167): transl_table=11
atgaagttagctgaacttttaaaaaataatatgcgttcctatgggatgatcgtcgcgcttatgtttatcattttgttattcagcgtgttgtccgacggaattttgttacgtccactaaatgtaacaaatttaattttgcaaaacagttatattttagttcttgcgatcggtatggtgatggtgattattgcggggcatatcgatttgtccgttggttccgtctgtgcttttgttggggcaattgcggccattttaatgattgatatgcagcttcctacagctcttgctgtactaatctgcttattgctaggtgctcttatcggtgcatggcacggattttttattgcttacttaaaaatgccgtcttttatcgtcacattggccggcatgcttctatttagagggctgacgatggtcgtgttaggcggtcaatcaaagtccccctatccacctgaatttatcttgattagttcaggcttcctacctgatatcccttttttaggattggcctcttatcatacattaacgatgttgatcggtgtggtgctttctctgtttgttatctttagcgagcttaaagaacgacgagtccagataaacaatcaatttatggtacttcccaaagggttttttatcgcaaaattgatcgggatggtagcgattattaacatttttacgtttgtcttagcttcttatagagggattccaaatattcttgtgattctttttgtgcttattgttctcttttcgtttgtcatgaataaaacggtgatcggacgccacatttatgcaacaggaggaaatcaaaaagccgcagagttatccggtgtcaagacgaagcgagtgacgttttgggtttttgttaacatgggttttttatcggccatggcaggattaatttacgccgcccgcctaaactcagcaaccccgagagccggtacgatgtttgagcttgatgcgattgccgctgcttttatcggtggagcttcaatggccggaggagtcgggacgattgtcggtgctgttgttggggggctcgtaatgggggttatgaacaacggaatgtcattacttgggattagtatagactggcaacaagccattaaaggactcgttctgctagccgcggtcggttttgacatttataatcgaaacaaagcaaaatga

SEQ ID NO: 4833 - protein, 388 aa, Bacillus halodurans C-125
MKLAELLKNNMRSYGMIVALMFIILLFSVLSDGILLRPLNVTNLILQNSYILVLAIGMVMVIIAGHIDLSVGSVCAFVGAIAAILMIDMQLPTALAVLICLLLGALIGAWHGFFIAYLKMPSFIVTLAGMLLFRGLTMVVLGGQSKSPYPPEFILISSGFLPDIPFLGLASYHTLTMLIGVVLSLFVIFSELKERRVQINNQFMVLPKGFFIAKLIGMVAIINIFTFVLASYRGIPNILVILFVLIVLFSFVMNKTVIGRHIYATGGNQKAAELSGVKTKRVTFWVFVNMGFLSAMAGLIYAARLNSATPRAGTMFELDAIAAAFIGGASMAGGVGTIVGAVVGGLVMGVMNNGMSLLGISIDWQQAIKGLVLLAAVGFDIYNRNKAK

SEQ ID NO: 4834 - DNA, 945 bp, Bacillus halodurans C-125
  CDS (1)..(945): transl_table=11
atgtccgacaataaacaaataaagtcgctgcttactactattggaccgtttataggattgttttttatcgttttgatcattagtttcttaaaccctgatttcctctcattatcaaatattatgaacgtcttacggcaagtgtcgatcaacgccttaattgccttcgggatgacctttgttattttaacaggcgggattgatttatccgttggggccattctcgctctgtccagtgctgtcacagcatggttaatggtcaacagcgtcgatccgatcttagccgttctgatcggtctattggccggtactctctttggtgcgattaacggattggtgatttccaaagggaaggtagccccttttattgccacattggcgacgatgacgatttatcgaggactcacactcgtgtttaccgatggtcgtccgatttcaggatttgagtcgtcgacgatgtttgaaatgctcggcagaggatatttcttcggaattccggttcctgccgtgacaatgatcattagcttcatcattctttacctcattttaaagaaaacgacgttcggtcgtcgcgtgtatgctgttggtggtaaccaagaagcggcgatcttatcagggattaaagtagaccgaatcaaaatttatgtctactcattaaccggttttttatcggcccttgccggtatgattttaacctcccgtttatattcggctcagcctactgctggaagcatgtatgagcttgatgcgattgctgccgttgtccttggtgggacgagcttaacgggaggccgaggttggatcgtcggtaccttaatcggtgccttgatcataggagtcctaaacaatggactgaacttgttgggcgtaagctcatttttccagcaagttgtcaaagggagtgtcattttactcgcggtcttattggatcgtagaaaatcagcgtaa

SEQ ID NO: 4835 - protein, 314 aa, Bacillus halodurans C-125
MSDNKQIKSLLTTIGPFIGLFFIVLIISFLNPDFLSLSNIMNVLRQVSINALIAFGMTFVILTGGIDLSVGAILALSSAVTAWLMVNSVDPILAVLIGLLAGTLFGAINGLVISKGKVAPFIATLATMTIYRGLTLVFTDGRPISGFESSTMFEMLGRGYFFGIPVPAVTMIISFIILYLILKKTTFGRRVYAVGGNQEAAILSGIKVDRIKIYVYSLTGFLSALAGMILTSRLYSAQPTAGSMYELDAIAAVVLGGTSLTGGRGWIVGTLIGALIIGVLNNGLNLLGVSSFFQQVVKGSVILLAVLLDRRKSA

SEQ ID NO: 4836 - DNA, 1044 bp, Pasteurella multocida subsp. multocida str. Pm70
  CDS (1)..(1044): transl_table=11
atgaataggtattgtatgacaaatttaagaaaaattttctcaaaattaggcatcggtatcattttactgttaatgattattggtatgtcgttaagttccgatgtgtttttgtccacgaataatattatcaatatcttattacaggtttcgattatttgtgtcatttctgtgggtatgacctatgtcattttaaccggtggcattgatctgtcagttggctctattgtcgcactcagtgccgtttgtttaggggtttttacacattggggaatggattggttaggtgaaaatccttccagcttttctgtcttaatgattgtcattagcgcgattatcgcaacaatttttgttggtatcctttgtggttatgttaatggattagtgattgtgtatggtaaagtgacgccctttatcacaacattgggtatgatggggattgcgagaggacttgcgttaaccatttcagatggcaaaactatctataattttccagatacattgcgttttttaggaaatgggcgtattgcactgacggaaacatttgcgctcccggtacccgttattattgcgttacttgtcgtgttagtgagtttttacgtgctaacacaaacgatgtttggtcgacagatttatgcgttaggcggaaaccgtgaagcagttcgattgtccggtattaatattgagaaacttgaaattaaagcttatgtgattaatggcgcattagcggcaattggtgccatcattttagttggacgtttaaatgcggcacagcctatcgctggaaacggttatgaattagatgctatcgctgcaaccgtgataggcgggacaagtttgatgggcggcgtgggatcggtggtcagtacttctattggggcgcttattatgggggtgttacaaaatgggctgacgttattgaacgtcacctcgtatttgcagcgcttgattattggtttagtgattattttagcggtatttttagatcaattacgtcgtggcgaagtatcaacacgccgtttgaaacggttattttttagagaataa

SEQ ID NO: 4837 - protein, 347 aa, Pasteurella multocida subsp. multocida str. Pm70
MNRYCMTNLRKIFSKLGIGIILLLMIIGMSLSSDVFLSTNNIINILLQVSIICVISVGMTYVILTGGIDLSVGSIVALSAVCLGVFTHWGMDWLGENPSSFSVLMIVISAIIATIFVGILCGYVNGLVIVYGKVTPFITTLGMMGIARGLALTISDGKTIYNFPDTLRFLGNGRIALTETFALPVPVIIALLVVLVSFYVLTQTMFGRQIYALGGNREAVRLSGINIEKLEIKAYVINGALAAIGAIILVGRLNAAQPIAGNGYELDAIAATVIGGTSLMGGVGSVVSTSIGALIMGVLQNGLTLLNVTSYLQRLIIGLVIILAVFLDQLRRGEVSTRRLKRLFFRE

SEQ ID NO: 4838 - DNA, 972 bp, Pasteurella multocida subsp. multocida str. Pm70
  CDS (1)..(972): transl_table=11
atgggaacaacacaaccggttaaaccgggttttaaaaaactggcaattgcagatgcgatgcaggcaatggggattttacccatcttgattttaattgtgatcgtgttttcttttgtggcaccaaactttatgacagaagctaatatgatgaatattactcgtcaagcatcaattaatattgtgttagccgcagggatgacatttgtgattttaacgggcgggattgacctttcagttggttcgattttaggggtgacggcggtgattggactggttacctcgctcaatcccgcattggcagaatttgcggtcccgttagcgttactcgcgggtttaggtatgggggtatttaatggtttattggttgcgtatgcaggtctacctccatttattgtcacgctaggtacatatactgcattacgtggcgcagcctatttagtagcagatgggacaacggtgatcaactctaaaatctcattcagttggataggaaatggttatcttggctcggtaccttggctagtgattatcgcctttgccgtgattgccgtgtgctggtttattttacgtcgcacgacgttaggcacccatatttatgcggtcgggggtaacttgcaagccgcacgtttaacaggtatcaaagtctctttagtcttaatcttcgtttacgctgccagcggattattatctggcttaggcggcgtaatgagtgcatctcgtttgtatagcgccaatggtaatcttggtgtaggctatgaacttgatgcaattgcagccgttattttaggtggcacgagtttcgtgggcggtatcggaaccattacggggacgctcatcggtgcattaattattgcgactttaaataatggtatgactttaatgggagtgtcatatttctggcagctcgttattaaaggtggggtaatcatcgtggcagtattgatcgacaagtaccgtacccgttcagcttaa

SEQ ID NO: 4839 - protein, 323 aa, Pasteurella multocida subsp. multocida str. Pm70
MGTTQPVKPGFKKLAIADAMQAMGILPILILIVIVFSFVAPNFMTEANMMNITRQASINIVLAAGMTFVILTGGIDLSVGSILGVTAVIGLVTSLNPALAEFAVPLALLAGLGMGVFNGLLVAYAGLPPFIVTLGTYTALRGAAYLVADGTTVINSKISFSWIGNGYLGSVPWLVIIAFAVIAVCWFILRRTTLGTHIYAVGGNLQAARLTGIKVSLVLIFVYAASGLLSGLGGVMSASRLYSANGNLGVGYELDAIAAVILGGTSFVGGIGTITGTLIGALIIATLNNGMTLMGVSYFWQLVIKGGVIIVAVLIDKYRTRSA

SEQ ID NO: 4840 - DNA, 966 bp, Escherichia coli O157:H7 EDL933
  CDS (1)..(966): transl_table=11
  misc_feature (601)..(601): s is g or c
atgacaacccagactgtctctggtcgccgttatttcacgaaagcgtggctgatggagcagaaatcgcttatcgctctgctggtgctgatcgcgattgtctcgacgttaagcccgaactttttcaccatcaataacttattcaatattctccagcaaacctcagtgaacgccattatggcggtcgggatgacgctggtgatcctgacgtcgggcatcgacttgtcggtaggttctctgttggcgctaaccggcgcagttgctgcatctatcgtcggcattgaagtcaatgcgctggtggctgtcgctgccgctctcgcgttaggtgccgcaattggtgcggtaaccggagtgattgtagcgaaaggtcgcgtccaggcgtttatcgctacgctggttatgatgcttttactgcgcggcgtgaccatggtttataccaacggtagcccagtgaataccggctttactgagaacgccgatctgtttggctggtttggtattggtcgtccgctgggcgtaccgacgccagtctggatcatggggattgtcttcctcgcggcctggtacatgctgcatcacacgcgtctggggcgttacatctacscgctgggcggcaacgaagcggcaacgcgtctttctggtatcaacgtcaataaaatcaaaatcatcgtctattctctttgtggtctgctggcatcactggccgggatcattgaagtggcgcgtctctcctccgcacaacccacggcggggactggctatgagctggatgctattgctgcggtggttctgggcggtacgagtctggcgggcggaaaaggtcgcattgttgggacgttgatcggcgcattaattcttggcttccttaataatggattgaatttgttaggtgtttcctcctattaccagatgatcgtcaaagcggtggtgattttgctggcggtgctggtagacaacaaaaagcagtaa

SEQ ID NO: 4841 - protein, 321 aa, Escherichia coli O157:H7 EDL933
  misc_feature (201)..(201): The Xaa at location 201 stands for Ala, or Pro.
MTTQTVSGRRYFTKAWLMEQKSLIALLVLIAIVSTLSPNFFTINNLFNILQQTSVNAIMAVGMTLVILTSGIDLSVGSLLALTGAVAASIVGIEVNALVAVAAALALGAAIGAVTGVIVAKGRVQAFIATLVMMLLLRGVTMVYTNGSPVNTGFTENADLFGWFGIGRPLGVPTPVWIMGIVFLAAWYMLHHTRLGRYIYXLGGNEAATRLSGINVNKIKIIVYSLCGLLASLAGIIEVARLSSAQPTAGTGYELDAIAAVVLGGTSLAGGKGRIVGTLIGALILGFLNNGLNLLGVSSYYQMIVKAVVILLAVLVDNKKQ

SEQ ID NO: 4842 - DNA, 999 bp, Escherichia coli O157:H7
  CDS (1)..(999): transl_table=11
atgtctgcttcgtcattaccattgccgcagggcaagagcgtctcgctcaaacaatttgtcagtcaccatattaatgagatcggtttgctggtggtgattgccattctttatctggtcttctccctgaacgcgcctggctttatctcattgaataaccagatgaacgtgctgcgcgatgccgccaccattgggattgccgcctgggcgatgacgctgattattatctccggtgaaattgatgtcagcgttgggccgatggtggcttttgtctcggtatgcctggcatttttgctgcaatttgaagttccgttggcgattgcttgtctgctggtgttgctgttaggcgcgctgatgggaacgctcgccggggtgctgcgtggcgtgtttaacgtgccaagtttcgtggccacgctggggctgtggagcgccctgcgcggaatgggcttgtttatgaccaacgctctgccagtgccgattgacgaaaacgaggtgctggactggctgggcggacaatttctcggtgtgccggtatccgcgctgatcatgatggtgctgtttgcgctgtttgtgttcattagccgcaaaaccgccttcgggcgctcggtttttgccgttggcggtaatgccacggcggcgcagttgtgcggtattaacgttcgtcgggtacgcattcttatctttaccctttcgggattattagcggcggtgaccggcattttgttggcggcgcgcctcggttccggtaacgcaggtgccgcaaacggtctggagtttgacgtcatcgccgcggtcgtggtcggcggtacggcgctttccggtggtcgcggctcgttgttcggtacgctgcttggcgtactggtgattacgctaatcggtaacggtctggtgctgctcgggattaactcctttttccagcaggtggtgcgcggcgtcatcatcgtggtggcggtgctggcgaatatcttgctgacccagcgtagcagtaaagcgaaacgctaa

SEQ ID NO: 4843 - protein, 332 aa, Escherichia coli O157:H7
MSASSLPLPQGKSVSLKQFVSHHINEIGLLVVIAILYLVFSLNAPGFISLNNQMNVLRDAATIGIAAWAMTLIIISGEIDVSVGPMVAFVSVCLAFLLQFEVPLAIACLLVLLLGALMGTLAGVLRGVFNVPSFVATLGLWSALRGMGLFMTNALPVPIDENEVLDWLGGQFLGVPVSALIMMVLFALFVFISRKTAFGRSVFAVGGNATAAQLCGINVRRVRILIFTLSGLLAAVTGILLAARLGSGNAGAANGLEFDVIAAVVVGGTALSGGRGSLFGTLLGVLVITLIGNGLVLLGINSFFQQVVRGVIIVVAVLANILLTQRSSKAKR

SEQ ID NO: 4844 - DNA, 975 bp, Escherichia coli O157:H7
  CDS (1)..(975): transl_table=11
atgacgacctctgcaaaaacctctgccaaaaaaatgctgatgagcgatctgatgcaaacggtcggcatcttgcccattttgattctgatcgtggcggtatttggctttatcacgccaaacttttttaccgaaagcaacctgctgaatattacccgccaggcatcgatcaacattgttctggcggcggggatgaccttcatcattttgaccggcgggatcgatctttccgtgggttcgatcctcggcaccacagcggtggcggcgatggtcgtctcccttagccctgagttcgccatgctgtcgatcccggcagcgctgatgctcggcctgctgctggggctgttcaacggcgcgctggtggcctttgccggattgccaccgtttatcgttacgcttggcacctatacggcgctgcgcggggcggcgtatctgctggcggacggcaccacggttatcaactccaacattaatttcgagtggataggcaacaactatctcgggccggtcccatggctggtggtgattgcgctggcggtgatcgtggtgtgctggtttattctgcgccgcaccacgcttggcgttcatatctacgccgtcggcggcaatatgcaggcggcgcgtcttaccggcattaaggtctggctggtgctgctgtttgtttatggcatgagcggcctgctttctgggcttggtgggattatgagcgcctcacggctgtacagcgccaacggcaacttaggcatgggttacgaactggatgccattgcagcggtgatcctcggcggcaccagttttgtcggcggcatcggcaccatcaccggcacgctggtcggcgcgctaattatcgccacgctcaacaatggcatgaccttaatgggcgtctcttacttctggcaactggtgatcaaaggggcgatgatcatcattgcggtgctgatcgacaaataccgtacccgacaccatcaaagtgcataa

SEQ ID NO: 4845 - protein, 324 aa, Escherichia coli O157:H7
MTTSAKTSAKKMLMSDLMQTVGILPILILIVAVFGFITPNFFTESNLLNITRQASINIVLAAGMTFIILTGGIDLSVGSILGTTAVAAMVVSLSPEFAMLSIPAALMLGLLLGLFNGALVAFAGLPPFIVTLGTYTALRGAAYLLADGTTVINSNINFEWIGNNYLGPVPWLVVIALAVIVVCWFILRRTTLGVHIYAVGGNMQAARLTGIKVWLVLLFVYGMSGLLSGLGGIMSASRLYSANGNLGMGYELDAIAAVILGGTSFVGGIGTITGTLVGALIIATLNNGMTLMGVSYFWQLVIKGAMIIIAVLIDKYRTRHHQSA

SEQ ID NO: 4846 - DNA, 1917 bp, Mycoplasma pulmonis UAB CTIP
  CDS (1)..(1917): transl_table=4
ttgccattggaacaaaacaaaatgaaaggagtcaagcaaatgtccaataactatagtcaaagtgaaattcaaaaaattaatgaacttaggaaaataaaccttgaaaaacgcaaagttcgtgatcaaaaagaaaaagctaagttagattctaaaaacaaaaaaaacgaagcaaaatttcaaaaattaaaaacaaattttgactcttttgctaagtcaaaaaatcaaagactaaacaaagtagttaaatctattgaaactaaatttgatcaaaaaattagcactttaaaacaaagtctttcaacaactaaaacaaatgaacaagagctaaaagactcaaaagctctttataacaaaaagaaaaaatactacgaaagtagaattgcaaaaaatgaagctaaatatgaaaatttaatcaaaaagcttcaatataaaattgacacttatgcccttgataaacaagaaggtcaacaaaaaattgatcagctttatcttgatcttggccaaataaacaaaagatggtcattaaaaatagcttctttaaatatcgaagatacaaaaatcaaacttgaaaagcaaattaaaaaactagaagaaaaaaaacaacttcaaattaaaacaattgaaaaaagaagagaagtttcacccggatcttcttttgtttcgaatctaagaaacagaatagcagatgaaaaatctcgttacattggaaattattcaattgactatattttcaaaaaaatatcagccaacattagaaaatactcaatgttctacattttggcccttattcttttgatctttggatctttaactaaattccaaaatataactccttctaatattgaagttatctttagaaataatacatatgttctaatcattggaatgggaatgctccttgtaattgttggtggaaacattgacctttctgttggccagctccttagtttactcggggccatatcggttattatttataatggagtaagtagaacattttcaaataatagctctcttggtggactttatttaattattaccttaattggtactgcatttataggtgctttaattggtatttctcaaggatttttaattggatatttcaaaataccttcatttatcgttactttagggggaatgttaatttttaaagggctagctctttttgcagttcctctaaacaacataacccctgaaggaggatcccaatcagcttatgttagggctattattagaacaatctttgatgttcaagttggtggtttttacattatttcatttttaatttttattgtctcacttgctttaatagttctttttctagtttatggtagaaacaagaaaataaaatttggtttactagttgactctggttttgtattttgactaaaaatagttgttatatcagtgtttatgattttactaggttatgcttttggaaaaattggagttaaatgatacttgctttacattatgatcttgcttgttatctttgtatttttaactcaaaacacagtttttggaagaaaagtttatgccattggtggtaataaaaaatcagcagagctctcaggtatcgatgttagaaaaactactactttaatctttatgattaatggaataatggttgcaattgcctcaataatctttactggtattgtaacttcagctacagctaccgctggtgaaggatttgaattagacgttatttcatctgtctttgttggtggagcttctatggctggaggaataggaacaactattggaactctaattggtggatttatccttggatttattaacaatggaatcttgcttttagcccttaatgttggaactcaacgtgttgttaaaggtgttgttcttgtcttagctgttgcctatgatatttatgcaaacagaaaaattagttaa

SEQ ID NO: 4847 - protein, 638 aa, Mycoplasma pulmonis UAB CTIP
MPLEQNKMKGVKQMSNNYSQSEIQKINELRKINLEKRKVRDQKEKAKLDSKNKKNEAKFQKLKTNFDSFAKSKNQRLNKVVKSIETKFDQKISTLKQSLSTTKTNEQELKDSKALYNKKKKYYESRIAKNEAKYENLIKKLQYKIDTYALDKQEGQQKIDQLYLDLGQINKRWSLKIASLNIEDTKIKLEKQIKKLEEKKQLQIKTIEKRREVSPGSSFVSNLRNRIADEKSRYIGNYSIDYIFKKISANIRKYSMFYILALILLIFGSLTKFQNITPSNIEVIFRNNTYVLIIGMGMLLVIVGGNIDLSVGQLLSLLGAISVIIYNGVSRTFSNNSSLGGLYLIITLIGTAFIGALIGISQGFLIGYFKIPSFIVTLGGMLIFKGLALFAVPLNNITPEGGSQSAYVRAIIRTIFDVQVGGFYIISFLIFIVSLALIVLFLVYGRNKKIKFGLLVDSGFVFWLKIVVISVFMILLGYAFGKIGVKWYLLYIMILLVIFVFLTQNTVFGRKVYAIGGNKKSAELSGIDVRKTTTLIFMINGIMVAIASIIFTGIVTSATATAGEGFELDVISSVFVGGASMAGGIGTTIGTLIGGFILGFINNGILLLALNVGTQRVVKGVVLVLAVAYDIYANRKIS

SEQ ID NO: 4848 - DNA, 1035 bp, Agrobacterium tumefaciens str. C58
  CDS (1)..(1035): transl_table=11
gtgaggaacgacatggccaatattgcagaacccaagaagggcttcgccgtcagcgatcgtcagaaggacatcatccagaaatttgcggcgctcggcagcctctttgcgctggtcgcggtcttctccgcgaccagtaacgccttcttcaccgtcaataatggcatgacgatcgcgctgcaggtgacttctattgcgctgctcggcattggtgccacctgtgtcatcatcaccggcggcatcgatctttccgtcggttcggtgcttgcgcttgccggcgtcgttgccgcccttgcggtgaaggaactcggcatgccggtgcccatcggcatgttgctcggcattctgacggggtcgctttgtggcctcatcaacggtcttctggtgacgcgcttcaagctgccgcccttcatcgccactcttggcatgatgctgattgcccgcggtgtggccctgcagatcaccggtgcgcgcgccgtatccggccttggcgaatccttcggtgaactcggcaatggcgcactcttccgtatcgtcactatcggtgacgatggctttccgaatgtcgtgtttcccggcattccctatccggtcatcctgatggtggtgattgcgcttgcggtttccttcatgcttaaccgctccatcctcggccgccacatctatgccgtgggttccaatgcggatgctgcccgcctttccggcgtcaacgtcgctcgcgtcaccaatttcacctacatcctgtccggcacgctcgccgggctgacgggctgcgtgctgatgtcgcgtctcgttaccgcccagccgaacgaaggcgtgatgtatgagctggatgccattgccagtgcggtcatcggcggcacatcgctgatcggcggcgtgggcacgatttccggcacggccatcggcgcctttgtcatcggcattttgcgtaacggtctcaatatgaacggcgtttccgccttcacgcaacagatcatcattggccttgtcattctggtcaccgtctggatcgaccagctgcgcaaccgccgctga

SEQ ID NO: 4849 - protein, 344 aa, Agrobacterium tumefaciens str. C58
MRNDMANIAEPKKGFAVSDRQKDIIQKFAALGSLFALVAVFSATSNAFFTVNNGMTIALQVTSIALLGIGATCVIITGGIDLSVGSVLALAGVVAALAVKELGMPVPIGMLLGILTGSLCGLINGLLVTRFKLPPFIATLGMMLIARGVALQITGARAVSGLGESFGELGNGALFRIVTIGDDGFPNVVFPGIPYPVILMVVIALAVSFMLNRSILGRHIYAVGSNADAARLSGVNVARVTNFTYILSGTLAGLTGCVLMSRLVTAQPNEGVMYELDAIASAVIGGTSLIGGVGTISGTAIGAFVIGILRNGLNMNGVSAFTQQIIIGLVILVTVWIDQLRNRR

SEQ ID NO: 4850 - DNA, 1377 bp, Agrobacterium tumefaciens str. C58
  CDS (1)..(1377): transl_table=11
ttgggcgccgcgtcacgaacaggtggcgcggcgcctttcagatgtaaggaggaccggcagtccatggccgacatgacacaatccaattccacgacgtcccccaagacggaaaagaccggctcgatttcgcgtttcatcagtgccacggagctcgatacgcggctgcttggcatggtcggcgcgcttcttctgatctggatcggtttccatattctttcgggtggactgttcctgacgccgagaaacctctggaacctctccgtccagaccgcttcggtcgcggtgatggcgacgggcatggtgcttgttatcgttacccgcaacatcgatctgtcggtcgggtcgatcctcggcttttccggcatgatcatgggtgtcatgcaggcggaaatcctgccgcaaatcctcggcttcgaacattgggcgacatggatcgtcacgcttctggtcggtattctcgtcggcggcgcaatcggcatgctgcagggctcgatcatcgccttcctcaacgtgccgtccttcatcgtaacacttggtggcctgctcgtctggcgcggcggcacctggttcgtcaccagcggccgcaccgtggcaccgatggattccaccttccgcctgatgggcggcggcaccagcggctcgatcggcgcgacatggagctggatcgcagcgatcgtcgcctgcgtcgctattgtcgcggcgatcctcaattcccgtcaccagcgccgccgtttcggctttccgctgcggcccgtctgggcggaatatttcctggtggcgcttggctgcttcgtcgtcgtcggtttcgtggctgtcgtcaacagctatccctggccgatcaacattgcccgcaactatgccgatgccaatggcatagcctggccggatggcggcctgttcattccgcacggcattgccattcctgtgctgatggcgctcgcagtcggtgccgtcatgaccttcatcgcgacgaggctgcgcttcggacgttatgttttcgccatcggcggcaacccggaagcggcggaactggccggcatcaagacccgctgggtcacggtgaagatattcacgctgatgggcgttctgtgcgccatcgccgcggcaatttccactgcccgcctcaacgctgccaccaatgcccagggtgaactcgacgaactttatacgatcgcggccgcggtcatcggcggcacctcgcttgccggcggcgtcggcaccatagcgggcgcgatgctcggcgcgctcgtcatgcaatcgctgcaatccggcatggtgctggtgggcatcgatacgcccttccagcgcatcgtcgtcggtgtggtcctggtcgtcgccgtctggctcgacaccatctaccgcgcccgcgccaagtaa

SEQ ID NO: 4851 - protein, 458 aa, Agrobacterium tumefaciens str. C58
MGAASRTGGAAPFRCKEDRQSMADMTQSNSTTSPKTEKTGSISRFISATELDTRLLGMVGALLLIWIGFHILSGGLFLTPRNLWNLSVQTASVAVMATGMVLVIVTRNIDLSVGSILGFSGMIMGVMQAEILPQILGFEHWATWIVTLLVGILVGGAIGMLQGSIIAFLNVPSFIVTLGGLLVWRGGTWFVTSGRTVAPMDSTFRLMGGGTSGSIGATWSWIAAIVACVAIVAAILNSRHQRRRFGFPLRPVWAEYFLVALGCFVVVGFVAVVNSYPWPINIARNYADANGIAWPDGGLFIPHGIAIPVLMALAVGAVMTFIATRLRFGRYVFAIGGNPEAAELAGIKTRWVTVKIFTLMGVLCAIAAAISTARLNAATNAQGELDELYTIAAAVIGGTSLAGGVGTIAGAMLGALVMQSLQSGMVLVGIDTPFQRIVVGVVLVVAVWLDTIYRARAK

SEQ ID NO: 4852 - DNA, 975 bp, Sinorhizobium meliloti 1021
  CDS (1)..(975): transl_table=11
atgagtgtggaaacggttgaaagcgcgggaccgacgccgaagaaaggcgtcagcatcctgttcggtctgacgctcgtgggattgctggtcgtcctgtggctgctcctcggcctggcgaccaacgccttctggacgccgaacaacatcagcaacctcctgcgtcagggggcgatgaccgcgattctcgccgtcggccagaccttcgtcatcatcacggccggcatcgacctttcggtcggcgccgtcgtcggtttcaccagcgtcatcgtcgcctggctgctcgcggcgggggttccgctctggctcgcgatcatcgcgacgctggcgatcggcgtgctgatcggcgccttccatgccttcggcatcgtccgcatggggctgccgcccttcatcatcacgcttgcgacgctgacctcgcttcgcggcatcggtctcctgatcaccaacggctcgaccatctcgatcaccaacgacgccttcaccacgttctcacgggccgacttcctcggaattcccagtctcttctggatggtgatcgtcgttgcgattccggcttacgtcttcctgcatcttagccgcttcggccgttatctcttcgccgtcggctccaacagcgaggcggcgcgcctttccggcgtcaacgtcaaccgcacgatctatctggcctatatcctgtcatcgacgtgcgccgccttcgtcgggctgctgctcgcctcgcgcatcggcatcggcaacgccacgcaggccgaaggctgggagctgcaggcgatcgcttcgtcggtcatcggcggcacgagccttttcggcgccgtcggctcggtccacggtcccctgctcggcgccttcatccttgcgacgatcaacaacggcgccaatctcctgaacgtaaattccttctggcagcgcatcatcaccgggctgctgatcatcgtgatcgtctatttcgaccagttgcggcggcggggggcgcggtga

SEQ ID NO: 4853 - protein, 324 aa, Sinorhizobium meliloti 1021
MSVETVESAGPTPKKGVSILFGLTLVGLLVVLWLLLGLATNAFWTPNNISNLLRQGAMTAILAVGQTFVIITAGIDLSVGAVVGFTSVIVAWLLAAGVPLWLAIIATLAIGVLIGAFHAFGIVRMGLPPFIITLATLTSLRGIGLLITNGSTISITNDAFTTFSRADFLGIPSLFWMVIVVAIPAYVFLHLSRFGRYLFAVGSNSEAARLSGVNVNRTIYLAYILSSTCAAFVGLLLASRIGIGNATQAEGWELQAIASSVIGGTSLFGAVGSVHGPLLGAFILATINNGANLLNVNSFWQRIITGLLIIVIVYFDQLRRRGAR

SEQ ID NO: 4854 - DNA, 1005 bp, Sinorhizobium meliloti 1021
  CDS (1)..(1005): transl_table=11
atgagcgaggcgaatgtgactatggcagcatccaccccgcaagccgcgctcggcaggaagctcgtggccgcagcggcaaattcccgcgaattgtccgtcatcctggctgcgctcgccatgttcgtcgcgctttcactttcgacggacacgttctttaccgaactaaatctgctgaaccttctgaggcagatatccgtcatcggcattcttgccgtcggcagcaccttcatctttatctccggcgagattgatttgtcggtcggcgcattgcttgggctgctggcgatgatctgcgccgccttggcgatcaagatggagggcaacatctacggtgccgcgctcgtcgtggtggctctgggcgcgatattgtcgggcatcaacggtgtcatcacgacgaaactgcgcattccctccttcatcaccacgctcggcatgctcagcatctacagcggcgcgacactggtgctctccaagggcatgccgatctccggcctgcaaaacgaccttttccgctccctcgtcgccggccggctcttcggggtcgttccagcgcaggtgatctggatggtggccgcgggcatattcggcacctacctcctgctgtttacccgcttcggctataacgtctttgccacaggcggcaacaagaacgcggccaaggccgtcggcatcaacaccgaccgggtgaagattctcgccttcgtggtcagcggtatcatggtcggcgtcacctccttcattctcgtcggctggttccgtggcgtggacccgcagaccggcaacggcctggaactcagcgtcatcgcggcggtcatcatcggcggcaccggcctgttcggggggcagggaagtgtcctcggcacgctggtgggcgcgctgatcatcggcatgatatcgaacggcaccgtcctgctgggcgtggattcctattatgagcctgtggcgcatggaacggtcatcctgcttgccgtcatcatcgatatctgggtgcgcaggcagcggtga

SEQ ID NO: 4855 - protein, 334 aa, Sinorhizobium meliloti 1021
MSEANVTMAASTPQAALGRKLVAAAANSRELSVILAALAMFVALSLSTDTFFTELNLLNLLRQISVIGILAVGSTFIFISGEIDLSVGALLGLLAMICAALAIKMEGNIYGAALVVVALGAILSGINGVITTKLRIPSFITTLGMLSIYSGATLVLSKGMPISGLQNDLFRSLVAGRLFGVVPAQVIWMVAAGIFGTYLLLFTRFGYNVFATGGNKNAAKAVGINTDRVKILAFVVSGIMVGVTSFILVGWFRGVDPQTGNGLELSVIAAVIIGGTGLFGGQGSVLGTLVGALIIGMISNGTVLLGVDSYYEPVAHGTVILLAVIIDIWVRRQR

SEQ ID NO: 4856 - DNA, 1050 bp, Sinorhizobium meliloti 1021
  CDS (1)..(1050): transl_table=11
atggatatgcgtgcggaaaagaacccggacatcccggccggtggggctggtgcccgcaagacgaagttgaaggcggtcgtctttcaggctggtccgctgatcgccctggtcctgctcatggcctatctcgcctttgccacatccaacttcctgacgctcgacaacctttccaacgtggcgcggcagtccgcattcgtcgccattctcgcggtcgggcagacattcgtcatcctgacgggcggcatagatctttcggtcgcggccatcgcggcgctttccgcctcgataaccgccgtcctactcacgcagccgctcgtgctgttcggtatcgatttcggcttcgtgccgccgccggtggcgatcctcatcgggattctcatcggcatggccgccggtgcgctcaacggctggctcatctccaagttcaagatcccggacttcatcgcgacgctcggcacgatgacggcgttccgcggcgcggcgctgctggtcaccgacggcctgcctgtcccctccttcaatgccggccggcaacttcccgaaagcctgatctgggtcggcggcggccagctcttcggggtgccggtgagcgcgctcatcgctctgctctgcgcggctgccggctggtacgtgctccgctacaccgcgctcgggcgagcgatctacgctgtcggcggcaaccgtgcggccgcccattcgtccggcatcagcatttcgcgcaccaagatcatgacctatgccatttccggccttctggccgcgatcgcgggcatcatcctggtcgggcgcctcaactccgccaatgcgcttatggcggatggcgaggagctgcgttccatcgcctccgtcgtcatcggcggcaccaatctcttcggcggcgaaggcggtgtatggggatcgatcatcggcgcggccatcatcggcgtgctcggcaacggcctcaacctgctcgatgtcagcccgttctggcagcgcatcgcgcagggcgtcgtcatcgtggtcgtcgtgatcttcgaccaatggcgccgtcgcagcatgacgcgcgtttga

SEQ ID NO: 4857 - protein, 349 aa, Sinorhizobium meliloti 1021
MDMRAEKNPDIPAGGAGARKTKLKAVVFQAGPLIALVLLMAYLAFATSNFLTLDNLSNVARQSAFVAILAVGQTFVILTGGIDLSVAAIAALSASITAVLLTQPLVLFGIDFGFVPPPVAILIGILIGMAAGALNGWLISKFKIPDFIATLGTMTAFRGAALLVTDGLPVPSFNAGRQLPESLIWVGGGQLFGVPVSALIALLCAAAGWYVLRYTALGRAIYAVGGNRAAAHSSGISISRTKIMTYAISGLLAAIAGIILVGRLNSANALMADGEELRSIASVVIGGTNLFGGEGGVWGSIIGAAIIGVLGNGLNLLDVSPFWQRIAQGVVIVVVVIFDQWRRRSMTRV

SEQ ID NO: 4858 - DNA, 1185 bp, Yersinia pestis CO92
  CDS (1)..(1185): transl_table=11
atgtcacaagctaatcaatctgaatttaactcaccagaaaatggggataaaaagccattttttcggcttaaatccttaaatttacaagtttttgtcatgctggccgcgatcgccattattatgttgttcttcaccttcacgacagaaggggcctatctcagcgccagaaatatctctaacttgctgcgccagacggcgatcaccggcatcttggcggtcggtatggtgtttgtcattatctccgccgaaattgacttgtctgttggctcaatgatggggttattgggtggcatagcggccatttttgatgtctggctcggctggccgttgccgctgaccattgtcgttacgctggcgctggggctggtattaggggcatggaacggttggtgggtcgcgtatcgcaaagtgccttcgtttattgttacgctcgcgggcatgttggcttttcgtggcattttaattggtatcaccaatggcacgacggtttcgccgaccagtaatgcgatgtcgcagattggccagagctatctgccaagtggcattggttttggcatcggtgctattggcctgatgttgtttgtggcctggcaatggcgtcggcgtaatcaccgcatccgcttggggttaccggttgccgccccgcaaggggatgtgactcgccaaactattaccgcagttatcgttctgggtgccatatatttattgaatgattatcgtggtgtacctacgccggtactaatccttactgcattaatgctggcgggggtatttatggctactcgcaccgcttttggtcgccggatctacgctattggcggcaatattgatgcggcgcgcctgtctggaattaatgtagagcgcactaaactggcagtattcgcgattaacggactgatggtggcgatggctggtttgatcctcagttcacgtttaggcgcaggttcgccttctgcgggcaatatcgctgaactggatgcgattgcggcgtgtgtcattggcggtaccagcctggccggaggcgttggcagtgtggcgggggccgtaatgggcgcatttattatggcttctctcgataatgggatgagcatgctagatgtgccgacgttctggcagtacattgtcaaaggcgcaattttgctgctggccgtgtggatggattccgccaccaaacggcgggtgtga

SEQ ID NO: 4859 - protein, 394 aa, Yersinia pestis CO92
MSQANQSEFNSPENGDKKPFFRLKSLNLQVFVMLAAIAIIMLFFTFTTEGAYLSARNISNLLRQTAITGILAVGMVFVIISAEIDLSVGSMMGLLGGIAAIFDVWLGWPLPLTIVVTLALGLVLGAWNGWWVAYRKVPSFIVTLAGMLAFRGILIGITNGTTVSPTSNAMSQIGQSYLPSGIGFGIGAIGLMLFVAWQWRRRNHRIRLGLPVAAPQGDVTRQTITAVIVLGAIYLLNDYRGVPTPVLILTALMLAGVFMATRTAFGRRIYAIGGNIDAARLSGINVERTKLAVFAINGLMVAMAGLILSSRLGAGSPSAGNIAELDAIAACVIGGTSLAGGVGSVAGAVMGAFIMASLDNGMSMLDVPTFWQYIVKGAILLLAVWMDSATKRRV

SEQ ID NO: 4860 - DNA, 1065 bp, Sinorhizobium meliloti 1021
  CDS (1)..(1065): transl_table=11
atgacgacggcaacgaccaccaccaacgcaactgacgcgacgagcggctcggtactgctcaccttgatgaagctcaggacgttcatcgccctcttcgcggttgtcgccttcttctcgatcttcgcgccgaactttctttcgaccgccaatctaatcctgatgtcaaagcatgtggcgctcaacgccttcctcgccatgggcatgaccttcgtcatcatcaccggcggcatcgacctttccgtcggttcgatcgtcgggctctgcggcatggtggccggcgggctcatcctcaacggcatcgatctgcagttcggctacacggtctatttcaacgtcgtcgaggtctgcctcatcacgctcgccgtcgggatcgtcatcggcgcggtcaacgggctgctgattaccaagctcaacgtcgcacccttcatcgccacgctcggcacgctctatgtcgcgcgtggctttgcgctgctttcatcgggcggccagacattccccaacctcgtcggcaagccggaactcgcgacgacgggcttcgccttcctcggttcgggccggcttctcggcctgccggtttcgatctgggtcctcatcgtcgtggcgctcgccgccgcatacgttgccaggtatacgccgatcggccggcacatcttcgccgtcggcggcaacgagcgtgccgcccgcatgtccggcatccgggtcgaccgggtgaagatgttcgtctacatgttctccggcttctgcgcggcgatcgtcggactggtcatctcgtcggaactgatggcgtcgcacccggcgacgggcaattccttcgaactcaatgccatcgccgcagcggttctcggaggcacgtcgatgtccggcggccgcgggacgatcggtggcaccatcatcggcgccttcgtcatcggcattctttccgacggtctcgtgatgatgggcatctcgtccttctggcaaatggtcatcaaggggatcgtgatcatcgtcgccgtcgtggtggatcaggcgcaacgccggctgcagcaacaggtcacgctgatgcagcttgcgaaaaaggggtga

SEQ ID NO: 4861 - protein, 354 aa, Sinorhizobium meliloti 1021
MTTATTTTNATDATSGSVLLTLMKLRTFIALFAVVAFFSIFAPNFLSTANLILMSKHVALNAFLAMGMTFVIITGGIDLSVGSIVGLCGMVAGGLILNGIDLQFGYTVYFNVVEVCLITLAVGIVIGAVNGLLITKLNVAPFIATLGTLYVARGFALLSSGGQTFPNLVGKPELATTGFAFLGSGRLLGLPVSIWVLIVVALAAAYVARYTPIGRHIFAVGGNERAARMSGIRVDRVKMFVYMFSGFCAAIVGLVISSELMASHPATGNSFELNAIAAAVLGGTSMSGGRGTIGGTIIGAFVIGILSDGLVMMGISSFWQMVIKGIVIIVAVVVDQAQRRLQQQVTLMQLAKKG

SEQ ID NO: 4862 - DNA, 963 bp, Sinorhizobium meliloti 1021
  CDS (1)..(963): transl_table=11
atgacacagaacacagcagccaaagccgccctggttcgggctctcaagcaatatggcggcatcttcctttcgctggtgatgctctgcatcgtcttttccttcttcaacccgcgcttcatgacggttgtaaacttcatgaacatcctgcagcaggtcgccgttgttgcgatcgcggccttcgggatgacatgggtgatcctgctcggcgagatcgatctttccgtcggctcgatcatcgcggtggcaggaatggtcggggcgcaatgctttgccttcggaatgggtttcgcgccggcaatcgcgctgacgctcgccgccggcgccctgatgggaatgttgaacggggtgctgacggccaaactgctcttgccgtccttcatcgtcacggtcgcgaccatgggtatctatcgcggcatggtcagcctgccgaccaacggagcaccggccatgatcgagaacgaaacctggaccgcaatcggtaccgagagcttcctgggactgccgatcatcatctgggtcgtcgccgttctcttcgtcatcaatcagatcgtgctcagcaagacgagcttcggccggcgcgcctatctgaccggcggcaaccgtgaggcggccgtctactccggtatcaaggtcgaccggctgaagatcctgatcttcatgatctccggcgtgatggcggccatcagcggcgtgctgctttcctcccgcctgttctccgcacagaccaatgcgggcatgagctacgagcttgacgccatcgccgcggccgttctcggcggcaccagccttgcgggcggcgtcggaaccatggtcggcacgctgatcggcgcgctcatcatcggcgtcatgaacaacggcatgaacatgctctccgtcccctacttctaccagctgatcgtcaagggactggtgatcctcgtcgccgtctggctcgacgtccgtgccaagcaggcaaagcgctga

SEQ ID NO: 4863 - protein, 320 aa, Sinorhizobium meliloti 1021
MTQNTAAKAALVRALKQYGGIFLSLVMLCIVFSFFNPRFMTVVNFMNILQQVAVVAIAAFGMTWVILLGEIDLSVGSIIAVAGMVGAQCFAFGMGFAPAIALTLAAGALMGMLNGVLTAKLLLPSFIVTVATMGIYRGMVSLPTNGAPAMIENETWTAIGTESFLGLPIIIWVVAVLFVINQIVLSKTSFGRRAYLTGGNREAAVYSGIKVDRLKILIFMISGVMAAISGVLLSSRLFSAQTNAGMSYELDAIAAAVLGGTSLAGGVGTMVGTLIGALIIGVMNNGMNMLSVPYFYQLIVKGLVILVAVWLDVRAKQAKR

SEQ ID NO: 4864 - DNA, 996 bp, Sinorhizobium meliloti 1021
  CDS (1)..(996): transl_table=11
atgacccacacaacagacacagtgatgccgcaggaacagaagggttttgtcgactatcactccatcgttcagcgtttcgggaccctggcgatctttctcgtgctcgtcgccgtagcgacctggtggtcggacagttttctcactcgcggcaacctcctcaacgtattgcggcaggttgcctcgacagccggcatcatggccgtcggcatgctgttcgtcatcctgacgcgcggcattgacctttcggttggatcggtcatggccctgggttccgtactcacgggctacttctgcgcgatgttaggctatggcaccggggccaccatttttcttgtcttgttgtgcggcgctgcctgcggcctggtaacgggcggtttcatcgcgtatctcaggctgccgtcctttgtcatgtcgcttgccatgatggcagtcgcgcgcggcctttccctgatcatttccgaggggcgaccaattccgctcagcgatgcgggcgcagctttcagcagtttcggttccggcttcgtgctgggcattccccaaccagtcattttgatgttcgcaatctatatcgccggcggtgtcgtcctcaacttcacccggttcggacgcgtcattacggcaatcggttccaacgaggaggctgtccgactctccggtatcgccgtcccgcgctatatcgtcgccgtctatgtgatctccggtttgctcgccggtttggcaggtatcatcgccgcgagccgcacaggcgtcggctctgctcaggtcggcatcggggccgaactcaatgtgatcgccgccgtcgttatcggcggggcgagcctgatgggcgggaagggcggcgtcatcaacacgctgcttggcgctttggtcatgggaattatcaccaacatcatgaaccttgcgggcgtgcccgggtatcaccagcaggtttatatgggagcgatcatcgtcgttgccatgctgttgcagtacagcaccggctctctgaagcgatga

SEQ ID NO: 4865 - protein, 331 aa, Sinorhizobium meliloti 1021
MTHTTDTVMPQEQKGFVDYHSIVQRFGTLAIFLVLVAVATWWSDSFLTRGNLLNVLRQVASTAGIMAVGMLFVILTRGIDLSVGSVMALGSVLTGYFCAMLGYGTGATIFLVLLCGAACGLVTGGFIAYLRLPSFVMSLAMMAVARGLSLIISEGRPIPLSDAGAAFSSFGSGFVLGIPQPVILMFAIYIAGGVVLNFTRFGRVITAIGSNEEAVRLSGIAVPRYIVAVYVISGLLAGLAGIIAASRTGVGSAQVGIGAELNVIAAVVIGGASLMGGKGGVINTLLGALVMGIITNIMNLAGVPGYHQQVYMGAIIVVAMLLQYSTGSLKR

SEQ ID NO: 4866 - DNA, 1215 bp, Sinorhizobium meliloti 1021
  CDS (1)..(1215): transl_table=11
atggtcgccgatacgagcaccgaaaccaccaaaccgtcgatcggtgactacctcaggaacaacattcgcgaatacggcctgctggtcgcgctcgtcatcatcatgctgttcttccagttcgtcaccaacggcgtcctcttcaggcccgtcaacatcacgaacctggtgctgcagaactcgttcatcgtcatcatggcgctgggcatgctgctgatcatcgttgccgggcacatcgatctgtcggtcggctccatcgtggccttcatcggcgcgatttcggcgatcatgctcgtcaaatggggcttgcctgcctttgtggtcattcccgcctgcctgatcgtgggcggtatcatgggcgcggcgcagggctactgggtcgcctatcagaagatcccttccttcatcgtcacgctcgccggcatgctggtgttccggggaatgacctatgtggtcctcggcggccgtccgatcggaccgtttccgaaggacttccagatactgtcgaccggattcgttcccgactttctttacttcctcagcccgagcccggagacgatcaagaacatggtcgccctggtcgccgtgctgttgctcgtcggctatgcgatctttgccggggttcgcaatcgccggatcaacgagcagcacggcacggagaacgagccgttcgtcttcttcgcgatccagatggcggtcatcagcctggtggcactgttcctcggcttccagctttcgacctatcggggcctgcccaacgtcctagtcgtcatgggcgtgctgatcgccgtctacaccttcgtcaccacgcgttcgacgatcggccgccggatatacgcgatgggcggcaacgagaaggcgaccaagctctccggcatcaataccgaacggctgaccttctacgccttcgtgaacatgggcgcgctcgcggcgcttgccggcatgatcatcacggcccgtctgaactcggcgaccccgaaagccggcgtcggcttcgagctcgacgtgatcgcggcctgcttcatcggcggtgcgtccgcctcgggtggcgtcggcaagattaccggcgcggtgatcggcgctttcatcatgggcgtcatgaacaacggcatgtccatcatgggcatcggcatcgactaccagcaattgatcaagggcctcgtgctgctcgcagccgtgttcttcgacgtctacaacaagaacaagggcaagggctga

SEQ ID NO: 4867 - protein, 404 aa, Sinorhizobium meliloti 1021
MVADTSTETTKPSIGDYLRNNIREYGLLVALVIIMLFFQFVTNGVLFRPVNITNLVLQNSFIVIMALGMLLIIVAGHIDLSVGSIVAFIGAISAIMLVKWGLPAFVVIPACLIVGGIMGAAQGYWVAYQKIPSFIVTLAGMLVFRGMTYVVLGGRPIGPFPKDFQILSTGFVPDFLYFLSPSPETIKNMVALVAVLLLVGYAIFAGVRNRRINEQHGTENEPFVFFAIQMAVISLVALFLGFQLSTYRGLPNVLVVMGVLIAVYTFVTTRSTIGRRIYAMGGNEKATKLSGINTERLTFYAFVNMGALAALAGMIITARLNSATPKAGVGFELDVIAACFIGGASASGGVGKITGAVIGAFIMGVMNNGMSIMGIGIDYQQLIKGLVLLAAVFFDVYNKNKGKG

SEQ ID NO: 4868 - DNA, 1362 bp, Sinorhizobium meliloti 1021
  CDS (1)..(1362): transl_table=11
atggccatggccgacatcacaaaagccaaccagacacgggccgatcagaaaccgggcgcgcaggccggccgcgcccgcacgacggacgaaaacccggtgaaacgcttcttccgtgccaccgaaatcgatacccggctgctcggcatggtcggcgcgctgatcatcatatggctcggtttccaggtgatgaccggcggactgttcgacggcctgttcctgaaaccgcgcaacctgtggaacctgaccgtccagacctcatccgtcgccgtcatggcgaccggcatggtgctggtcatcgtcacccgcaacatcgacctctcggttggctccgtgctcggcttctgcggcatgatcatgggcgtcctgcaggcgcaggtcctgccgcaatatctcggcctcggccatcccgccacctgggcgatcacccttgcctgcggcatcgccgtcggcggcgccatcggcgcgcttcacggatcgatcatcgccttcctcaacgttcccgctttcatcgtgacgctcggcggcctgctggtctggcgcggcgcaacctggttcgtgacgagcggccagacggttgcgccgatggacgccaccttccgtctcatgggcggcggcaccgagggttccatcggcgcgacggcaagctggatcgtcggctccctcgcctgtatcgccatcgtcggcgccattttgaattcgcgcaagcagcgcaagcgctttggcttcccgctacgccctgtctgggccgagtatttcctgtcgatcctcggctgcgccctggtgcttggcgcagtcgccgtggccaaccattattactggccggtcaatatcgcccgcagatatgccgatgcgaacggcatcgcctggccggacggaggcctgcagatctcgcacggcattgccattcctgtcctggtcgcgattgtcgtcggcatcgtcatgaccttcatcgccacccgccttcgcttcggccgctacgtcttcgcactcggcggcaaccccgaagcggccgagctcgccggcatcaagacgcgctgggtcaccgtcaagatcttcacgctgatgggcgtgctctgcgccatcgcagcggccatctcgacggcgcgcctcaacgcggcgaccaatgcccagggcgagctcgacgagctctacacgatcgcggccgcagtcatcggcgggacctcgcttgccggcggcgtcggcaccattgccggcgcgatgatcggcgcgctcgtcatgcaatccctgcagtcgggcatggtccttctggggatcgatacgcccttccagcggatcgtcgtcggcgtcgtgctcgtcaccgccgtctggctcgacaccgtctaccgcgcccgtgcaaaataa

SEQ ID NO: 4869 - protein, 453 aa, Sinorhizobium meliloti 1021
MAMADITKANQTRADQKPGAQAGRARTTDENPVKRFFRATEIDTRLLGMVGALIIIWLGFQVMTGGLFDGLFLKPRNLWNLTVQTSSVAVMATGMVLVIVTRNIDLSVGSVLGFCGMIMGVLQAQVLPQYLGLGHPATWAITLACGIAVGGAIGALHGSIIAFLNVPAFIVTLGGLLVWRGATWFVTSGQTVAPMDATFRLMGGGTEGSIGATASWIVGSLACIAIVGAILNSRKQRKRFGFPLRPVWAEYFLSILGCALVLGAVAVANHYYWPVNIARRYADANGIAWPDGGLQISHGIAIPVLVAIVVGIVMTFIATRLRFGRYVFALGGNPEAAELAGIKTRWVTVKIFTLMGVLCAIAAAISTARLNAATNAQGELDELYTIAAAVIGGTSLAGGVGTIAGAMIGALVMQSLQSGMVLLGIDTPFQRIVVGVVLVTAVWLDTVYRARAK

SEQ ID NO: 4870 - DNA, 1323 bp, Sinorhizobium meliloti 1021
  CDS (1)..(1323): transl_table=11
atgaatttcctgaaggctctctcgcgcacgaaactctattgggggctgatcgccattttcctgatcggagtcctgtcctcaccgctgacgtcatcgggcaggaacatctttctctcctccggcaatctcctcgacgtgttgcggcaggtatcggccaccgggctgatcgccaccggcatgacggccgtcattctgaccggcggcatagacctttctgtcggctcgctgatggcgatctgcaccgtcgtctgcgcgatgctcttgaccgttccgggggacacggccgccctctatctggggctgccggccgtcggacttgccgtcctggtcgtcggtgcggcggccgtacgcttcgtcttcctgaatatcgagaaatcccgtgcgggcgtgacgcatatccgcgacatccagcttgaccggacacgcggtaccgttctgcctgccgcagccggcatcgttctctgtgccctggttctgagcttcctcttgcctcagatgcagacgaaattcggcgtgctcggcgttctgctcgttgcgccggcggtcggcctcatgttcggcgcagtcaacggcgtgatcatcgtggtcggacggttgcagccattcatcgtcacgcttgccatgatggtcacggcgctcggcatcgcccggctcaccgccgggcagaacaacgccgttctgccggtctataccggcagcaatgccaccgccgacttcgatatgctgcggcagctagtcttcggcatcgtgccgatgcccggcatattcttcatcgtcgcgattcttctctacggtgcggtgctgcgcttcacgcctttcggccgctatgtctacgccatcggcggaaacgaggaggcggcgcgcctttccggcatcaatgcgggccgggtgaagatcgtcacctatgcggtatcgggtctcctcgcgggcatcgccgcggtgctctatgtggcgcagtaccgccagggcaagccggacgccggcgcgggcctcgaactggatgcgatcgcggcagtggtcatcggcgggacgagcctgatgggaggacgcgggagccttgccgggacgttctgcggcgtcctgatcttcggcctgctctccaacatcctgcagctccacaacatcaattccaatcttcagctggtgctgaagggcgtgatcatcatcggcaccgtgctcgttcaggagcgcaatgcctacgatcttctcgcgcagttgcggctgccgggcgcaggccggcgcccggctcaaggagacacgtccgtggaggagcggacgtcgagagagacgttgtccataacaatgggaggaaagaagaaatga

SEQ ID NO: 4871 - protein, 440 aa, Sinorhizobium meliloti 1021
MNFLKALSRTKLYWGLIAIFLIGVLSSPLTSSGRNIFLSSGNLLDVLRQVSATGLIATGMTAVILTGGIDLSVGSLMAICTVVCAMLLTVPGDTAALYLGLPAVGLAVLVVGAAAVRFVFLNIEKSRAGVTHIRDIQLDRTRGTVLPAAAGIVLCALVLSFLLPQMQTKFGVLGVLLVAPAVGLMFGAVNGVIIVVGRLQPFIVTLAMMVTALGIARLTAGQNNAVLPVYTGSNATADFDMLRQLVFGIVPMPGIFFIVAILLYGAVLRFTPFGRYVYAIGGNEEAARLSGINAGRVKIVTYAVSGLLAGIAAVLYVAQYRQGKPDAGAGLELDAIAAVVIGGTSLMGGRGSLAGTFCGVLIFGLLSNILQLHNINSNLQLVLKGVIIIGTVLVQERNAYDLLAQLRLPGAGRRPAQGDTSVEERTSRETLSITMGGKKK

SEQ ID NO: 4872 - DNA, 1197 bp, Ralstonia solanacearum GMI1000
  CDS (1)..(1197): transl_table=11
atgtcgaaccttctgcataccgaactcgcccgcaacggcggcagcggcccgcgcctcgatggccgcaccatccagcaactcttcgtgcgctacaaggtgctggccttgctgctggccgtggcgctgatctggatcttcttctggagccagaccaacggcaccttcctgcggccgaacagcatttccaacctgttcctgcagatgtccgtcacgggcatgctggcctgcggcatggtgttcgtcatcatcgccggggagatcgacctgtcggtcggctcgctgctcggcctgctgggcgggctggtcgccatcctgacggtcaaccacggctggaacacctgggtctcggtgggcgtggtgctggcggcgggcgcggccatcggcgcggccaacggcttcatcaccaccaagctgcgcgtgccctcgttcatcgtcggcctgggcggcatgctggccttccgcggcctgctgcaatggagcaccgacagcgtgacgatcgcaccggtgcccgacgacctgggcaacatcgcgcagagcttcgtgccggcctggctcgcgtggagcctggccaccgccatcgtcgcgctgtcggtggtgctgacgctgcgccggcgtgccgagcgcgcgcgcctgtcgctgtcgctgccgccgatgtgggccgacgcgctcaagctgctggccatcgcggccgcctcgttcggcttcgttgcggtgctcaatcaggccaacggcgtgccgctgccggtgctgatcctgctggtgatgctgggcgtgttctcctacgtcgccacgcagaccgtgttcggccgccacgtctacgcggtgggcggcaacatggaagcgacccgcctgtcgggcgtgaacgtggcgcgcgtcaagctgctggtgttcgtcctgatgggcctgatgtgcgccttcgcgggcatcgtcaccacggcgcgctcggcggctggctcgccctccgcgggcgtgggcggcgagctcgatgccatctccgcctgcttcatcggcggcacctcgatgcgcggcggctcgggcacggtctacggtgcgctgatcggcgcgctggtgatggccagcctcgacaacggcatgcagcagatgaacgtcgatgcctcgtggcagatgatcgtcaagggcgtcgtgctggtgctggcggtgtggatcgacgtgctgtccggctccaaccgcggctga

SEQ ID NO: 4873 - protein, 398 aa, Ralstonia solanacearum GMI1000
MSNLLHTELARNGGSGPRLDGRTIQQLFVRYKVLALLLAVALIWIFFWSQTNGTFLRPNSISNLFLQMSVTGMLACGMVFVIIAGEIDLSVGSLLGLLGGLVAILTVNHGWNTWVSVGVVLAAGAAIGAANGFITTKLRVPSFIVGLGGMLAFRGLLQWSTDSVTIAPVPDDLGNIAQSFVPAWLAWSLATAIVALSVVLTLRRRAERARLSLSLPPMWADALKLLAIAAASFGFVAVLNQANGVPLPVLILLVMLGVFSYVATQTVFGRHVYAVGGNMEATRLSGVNVARVKLLVFVLMGLMCAFAGIVTTARSAAGSPSAGVGGELDAISACFIGGTSMRGGSGTVYGALIGALVMASLDNGMQQMNVDASWQMIVKGVVLVLAVWIDVLSGSNRG

SEQ ID NO: 4874 - DNA, 1197 bp, Agrobacterium tumefaciens str. C58
  CDS (1)..(1197): transl_table=11
atgagttcggcaaacaccacaaacgaagaaagcaacgtcatctcggtcgggtcgtatattcgatccaatatccgcgaatacggcatgctgatcgcgctcgtcgccatcatggttttcttccagttctacaccggcggcatcctgttccgccctgtgaacctgaccaacctcatcctgcagaactcgttcatcgtcatcatggcgcttggcatgctgctcgtcatcgtggccgggcatatcgacctttcggtcggttccatcgtcgccttcgtcggcgcgatcgcggccatattgaccgtgcaatggggcatgaacccgtttctggcggcgctgatttgtctcgtcatcggcggcatcatcggtgctgcccagggttactggatcgcctatcaccgcattccgtcgttcatcgtgacgctggcgggcatgctggtgttccgcggcctgacgcttttcgtgctcggcggcaagaatatcggtcctttcccgaccgatttccaggtcatcagcaccggcttcctgcctgatatcggcggcatcgaaggtctgaacaccacgtcgatgatcctgaccgtgctgattacggtcgcgctgttctatctggcgtggcgccgtcgcgtggtgaacgtgaagcatggcatcgacgtggagccgttcggtttcttcatcgtgcagaatctgctgatctccggcgctatcctgttcctgggttaccagctgtcgacctatcgtggcctgccgaacgttctgatcgtgatgctggttctgatcgcgctttacagcttcgtgacgcgccgcacgaccatcggccgtcgcgtttacgccatgggcggcaatgagaaggcgaccaagctttccggtatcaacaccgaacgcctgagcttcctcaccttcgtcaacatgggcgtgctggccggtcttgccggcatgatcatcgcgacccgcctcaactcggcgacgccgaaggcaggcgtgggcttcgagcttgacgtgatcgcggcctgcttcatcggcggtgcttcggcctccggcggcgttggcaagatcaccggggccgttatcggcgccttcatcatgggtgtgatgaataacggcatgtcgatcgtcggtctcggcatcgatttccagcagatggtcaagggcctcgtgctgctcgccgctgtgttcttcgacgtctacaacaagaacaagggctga

SEQ ID NO: 4875 - protein, 398 aa, Agrobacterium tumefaciens str. C58
MSSANTTNEESNVISVGSYIRSNIREYGMLIALVAIMVFFQFYTGGILFRPVNLTNLILQNSFIVIMALGMLLVIVAGHIDLSVGSIVAFVGAIAAILTVQWGMNPFLAALICLVIGGIIGAAQGYWIAYHRIPSFIVTLAGMLVFRGLTLFVLGGKNIGPFPTDFQVISTGFLPDIGGIEGLNTTSMILTVLITVALFYLAWRRRVVNVKHGIDVEPFGFFIVQNLLISGAILFLGYQLSTYRGLPNVLIVMLVLIALYSFVTRRTTIGRRVYAMGGNEKATKLSGINTERLSFLTFVNMGVLAGLAGMIIATRLNSATPKAGVGFELDVIAACFIGGASASGGVGKITGAVIGAFIMGVMNNGMSIVGLGIDFQQMVKGLVLLAAVFFDVYNKNKG

SEQ ID NO: 4876 - DNA, 1023 bp, Agrobacterium tumefaciens str. C58
  CDS (1)..(1023): transl_table=11
atggccaatattgcagaacccaagaagggcttcgccgtcagcgatcgtcagaaggacatcatccagaaatttgcggcgctcggcagcctctttgcgctggtcgcggtcttctccgcgaccagtaacgccttcttcaccgtcaataatggcatgacgatcgcgctgcaggtgacttctattgcgctgctcggcattggtgccacctgtgtcatcatcaccggcggcatcgatctttccgtcggttcggtgcttgcgcttgccggcgtcgttgccgcccttgcggtgaaggaactcggcatgccggtgcccatcggcatgttgctcggcattctgacggggtcgctttgtggcctcatcaacggtcttctggtgacgcgcttcaagctgccgcccttcatcgccactcttggcatgatgctgattgcccgcggtgtggccctgcagatcaccggtgcgcgcgccgtatccggccttggcgaatccttcggtgaactcggcaatggcgcactcttccgtatcgtcactatcggtgacgatggctttccgaatgtcgtgtttcccggcattccctatccggtcatcctgatggtggtgattgcgcttgcggtttccttcatgcttaaccgctccatcctcggccgccacatctatgccgtgggttccaatgcggatgctgcccgcctttccggcgtcaacgtcgctcgcgtcaccaatttcacctacatcctgtccggcacgctcgccgggctgacgggctgcgtgctgatgtcgcgtctcgttaccgcccagccgaacgaaggcgtgatgtatgagctggatgccattgccagtgcggtcatcggcggcacatcgctgatcggcggcgtgggcacgatttccggcacggccatcggcgcctttgtcatcggcattttgcgtaacggtctcaatatgaacggcgtttccgccttcacgcaacagatcatcattggccttgtcattctggtcaccgtctggatcgaccagctgcgcaaccgccgctga

SEQ ID NO: 4877 - protein, 340 aa, Agrobacterium tumefaciens str. C58
MANIAEPKKGFAVSDRQKDIIQKFAALGSLFALVAVFSATSNAFFTVNNGMTIALQVTSIALLGIGATCVIITGGIDLSVGSVLALAGVVAALAVKELGMPVPIGMLLGILTGSLCGLINGLLVTRFKLPPFIATLGMMLIARGVALQITGARAVSGLGESFGELGNGALFRIVTIGDDGFPNVVFPGIPYPVILMVVIALAVSFMLNRSILGRHIYAVGSNADAARLSGVNVARVTNFTYILSGTLAGLTGCVLMSRLVTAQPNEGVMYELDAIASAVIGGTSLIGGVGTISGTAIGAFVIGILRNGLNMNGVSAFTQQIIIGLVILVTVWIDQLRNRR

SEQ ID NO: 4878 - DNA, 1005 bp, Agrobacterium tumefaciens str. C58
  CDS (1)..(1005): transl_table=11
ttgaccgtctataccgaacgcgccaaaggctcgccgctctcggatttcttcgccgagaatgcacaggtgctttccatcgcagccttttttgccctctgcatggtgttcttctccgtgaccacggatacgtttctgacggccggcaatcttctgaacgtcgtccgtcaggccgcaccgatcctgatcgtctccgtcgcgatgacattcgtcatcatcacgggcggtatcgatctgtctgtcggctcgatggtcgccctgatcaacgccgttggcgccatcctgctcgcggccggttacccctggccgctggttgtcgttgccatgctggtgctcggcggcgggcttggcctggtgcagggctggttcattgcctatcaaggtattccggccttcatcgtcacgcttgccggtctctccatcctgcgcggtgtcgccctctacatcacacagggatattccgttccgataccggatgcgccggggttcttttacctcggcaggggtgattttctcggtatgcccgtccctgccctgatcggcgtcgtcgttaccgtgatcgcctatatcgttctttcgagcacccgctatggtcgtcgtgtcgtcgcggtcggctccaatccggaagcggcgcgccgcgtgggaatgcccgccaaatggattctcgcctcggtctatctggccgcaggcgtggcttcagccattgccgggctcatgattgcggcgcggctggggtcaggatcgtcgaatgcggcagtcgggttcgagcttcaggtggtggcggccgtggttctgggcggcacgtcgctgatgggcggacgcggcaccattcttggcacggtactgggcaccatgaccatcgccgttatcggcaacggtcttatcctcatgcacatctctcccttcttcacccagatcgtgacgggcgccatcatccttgccgcaatctggctcaacacacgcatcttcaccgcgaacttccgccttggcgtgaagagaaagggctga

SEQ ID NO: 4879 - protein, 334 aa, Agrobacterium tumefaciens str. C58
MTVYTERAKGSPLSDFFAENAQVLSIAAFFALCMVFFSVTTDTFLTAGNLLNVVRQAAPILIVSVAMTFVIITGGIDLSVGSMVALINAVGAILLAAGYPWPLVVVAMLVLGGGLGLVQGWFIAYQGIPAFIVTLAGLSILRGVALYITQGYSVPIPDAPGFFYLGRGDFLGMPVPALIGVVVTVIAYIVLSSTRYGRRVVAVGSNPEAARRVGMPAKWILASVYLAAGVASAIAGLMIAARLGSGSSNAAVGFELQVVAAVVLGGTSLMGGRGTILGTVLGTMTIAVIGNGLILMHISPFFTQIVTGAIILAAIWLNTRIFTANFRLGVKRKG

SEQ ID NO: 4880 - DNA, 1314 bp, Agrobacterium tumefaciens str. C58
  CDS (1)..(1314): transl_table=11
atggccgacatgacacaatccaattccacgacgtcccccaagacggaaaagaccggctcgatttcgcgtttcatcagtgccacggagctcgatacgcggctgcttggcatggtcggcgcgcttcttctgatctggatcggtttccatattctttcgggtggactgttcctgacgccgagaaacctctggaacctctccgtccagaccgcttcggtcgcggtgatggcgacgggcatggtgcttgttatcgttacccgcaacatcgatctgtcggtcgggtcgatcctcggcttttccggcatgatcatgggtgtcatgcaggcggaaatcctgccgcaaatcctcggcttcgaacattgggcgacatggatcgtcacgcttctggtcggtattctcgtcggcggcgcaatcggcatgctgcagggctcgatcatcgccttcctcaacgtgccgtccttcatcgtaacacttggtggcctgctcgtctggcgcggcggcacctggttcgtcaccagcggccgcaccgtggcaccgatggattccaccttccgcctgatgggcggcggcaccagcggctcgatcggcgcgacatggagctggatcgcagcgatcgtcgcctgcgtcgctattgtcgcggcgatcctcaattcccgtcaccagcgccgccgtttcggctttccgctgcggcccgtctgggcggaatatttcctggtggcgcttggctgcttcgtcgtcgtcggtttcgtggctgtcgtcaacagctatccctggccgatcaacattgcccgcaactatgccgatgccaatggcatagcctggccggatggcggcctgttcattccgcacggcattgccattcctgtgctgatggcgctcgcagtcggtgccgtcatgaccttcatcgcgacgaggctgcgcttcggacgttatgttttcgccatcggcggcaacccggaagcggcggaactggccggcatcaagacccgctgggtcacggtgaagatattcacgctgatgggcgttctgtgcgccatcgccgcggcaatttccactgcccgcctcaacgctgccaccaatgcccagggtgaactcgacgaactttatacgatcgcggccgcggtcatcggcggcacctcgcttgccggcggcgtcggcaccatagcgggcgcgatgctcggcgcgctcgtcatgcaatcgctgcaatccggcatggtgctggtgggcatcgatacgcccttccagcgcatcgtcgtcggtgtggtcctggtcgtcgccgtctggctcgacaccatctaccgcgcccgcgccaagtaa

SEQ ID NO: 4881 - protein, 437 aa, Agrobacterium tumefaciens str. C58
MADMTQSNSTTSPKTEKTGSISRFISATELDTRLLGMVGALLLIWIGFHILSGGLFLTPRNLWNLSVQTASVAVMATGMVLVIVTRNIDLSVGSILGFSGMIMGVMQAEILPQILGFEHWATWIVTLLVGILVGGAIGMLQGSIIAFLNVPSFIVTLGGLLVWRGGTWFVTSGRTVAPMDSTFRLMGGGTSGSIGATWSWIAAIVACVAIVAAILNSRHQRRRFGFPLRPVWAEYFLVALGCFVVVGFVAVVNSYPWPINIARNYADANGIAWPDGGLFIPHGIAIPVLMALAVGAVMTFIATRLRFGRYVFAIGGNPEAAELAGIKTRWVTVKIFTLMGVLCAIAAAISTARLNAATNAQGELDELYTIAAAVIGGTSLAGGVGTIAGAMLGALVMQSLQSGMVLVGIDTPFQRIVVGVVLVVAVWLDTIYRARAK

SEQ ID NO: 4882 - DNA, 984 bp, Agrobacterium tumefaciens str. C58
  CDS (1)..(984): transl_table=11
ttgaacatgtcgcttgatgcaaacaccggcgttgccgcgaaaacgggcggtttcagtttcagtgccatgctgcgctcgccgctcgccctgccgctggcgggtctcatcgtcgtatccatcctcatgggtcttgcgagcgacaatttcttcagcgtcaacaacatcatgaacgtgctgcggcaggtttccgtcgttggcattctcgctgttggcatgaccttcgtcatcctgaccggcggcatcgatctttcggtcggtgcggtcatggcgctggtcggcacgctgtcggccggcctgatggtgaatacgggcctgtctcccgcgattgccctgccggccggcctcttcatcgggctcggcattggcatcttcaacggggcgctggtcgcttggggcaggatgccggccatcatcgtcacgctcgccaccatgggcatggcccgtggcctcggcctcatctattccggcggctacccggtcagcggcattccgagctggatttcctggttcggcgttggccgcgtcggcatcgttccggtgcccgtcatcatcatggtggtgatctatgcggtggcctgggtgctgttgcagcgcacagccttcggccgccacgtctatgcgcttggcggtaacgaactggcggcccgtctttcgggtgtgaagacccggcgcgtcaagcttgccgtctatggcatctcgggtgtcacggcagctttcgccgccctcatactgaccggtcgcctgatgagcggccagcccaatgccggcgtcggcttcgaactggacgccattgcggcggtcgttctgggcggcacggcgattgccggcggcaggggcctcatcctcggcacgctcatcggcgcggtgctgcttggcatcctcaataacggcctcaacctgatgggcatcaacccctatcttcaggatgtcatcaagggcggcatcattctgttggccatctatatcgggcgcgaatggcgctga

SEQ ID NO: 4883 - protein, 327 aa, Agrobacterium tumefaciens str. C58
MNMSLDANTGVAAKTGGFSFSAMLRSPLALPLAGLIVVSILMGLASDNFFSVNNIMNVLRQVSVVGILAVGMTFVILTGGIDLSVGAVMALVGTLSAGLMVNTGLSPAIALPAGLFIGLGIGIFNGALVAWGRMPAIIVTLATMGMARGLGLIYSGGYPVSGIPSWISWFGVGRVGIVPVPVIIMVVIYAVAWVLLQRTAFGRHVYALGGNELAARLSGVKTRRVKLAVYGISGVTAAFAALILTGRLMSGQPNAGVGFELDAIAAVVLGGTAIAGGRGLILGTLIGAVLLGILNNGLNLMGINPYLQDVIKGGIILLAIYIGREWR

SEQ ID NO: 4884 - DNA, 1170 bp, Brucella melitensis 16M
  CDS (1)..(1170): transl_table=11
atgacgttgacaggcaaaagcctcagaaaatttctctcagaatacaaaatcgtggcactgctgattgttgtcgccctgatctgggcattcttcgccatcatgacctacgatcccgagatgggccggtcgcagtttctcaccgcgcgcaatttctccaatcttttgcgccagatggcaatcaccggcatgctggcttcagccatggtgtttgtcatcgtggcgggtgaaatcgatctgtcggtgggggctttgctcggcctgttaggcggtgtcgcggcggtgctcgatgtggtttacggctggccgttatgggccactatcgctacggttctggtgctgggtggagtgcttggcggtttcaacggctggctcaccgcctatctcggcattccgtccttcatcgttacgctgggcgggcaattggtgtttcgcggtattgtgctgggtatcatgggcggtgtcaccattgcgccgatttcgcccgagttcaaatatatcgggcaaggctatttgcccggctggcttggcaatgtctgtgccatggcgctgtttacagtgcttgtcctgattacgctcagaacccgttccagcaagcgcaaacacaatttgcaaacgctttcaccggcgatggaaaccgctcgccttctgggcacgggtatcctgatccttggttttatcctggtcctcaacagctatcagggcgtaccggttccggttcttgtgctgctggttattcttggcgtcttcaccgttatttcccgccagactgttttcggccggcatatttatgcggtcggttccaatcctgaagccacgcgcttttccggtgtcaacgtgaatttcgtcaaaatggccgtgtttgcgctgatgggacttatggcggcagtggcgggcctcaccacgactgcgcgccttgcggccggtacgccatcggcaggtttgggcggcgaacttgatgccatcgcatcatgctttatcggcggcacatccatgcgcggcggcgtgggatccgtgattgctgcgctggtcggtgcgcttatcatgtcaagcctcgataatggtatgtcgatgctgggcgtcgatacattctggcagcaaatcatcaagggcagtattcttgtgctggccgtttatctcgatatcgtatcatcaggcacacgtcgcgcctga

SEQ ID NO: 4885 - protein, 389 aa, Brucella melitensis 16M
MTLTGKSLRKFLSEYKIVALLIVVALIWAFFAIMTYDPEMGRSQFLTARNFSNLLRQMAITGMLASAMVFVIVAGEIDLSVGALLGLLGGVAAVLDVVYGWPLWATIATVLVLGGVLGGFNGWLTAYLGIPSFIVTLGGQLVFRGIVLGIMGGVTIAPISPEFKYIGQGYLPGWLGNVCAMALFTVLVLITLRTRSSKRKHNLQTLSPAMETARLLGTGILILGFILVLNSYQGVPVPVLVLLVILGVFTVISRQTVFGRHIYAVGSNPEATRFSGVNVNFVKMAVFALMGLMAAVAGLTTTARLAAGTPSAGLGGELDAIASCFIGGTSMRGGVGSVIAALVGALIMSSLDNGMSMLGVDTFWQQIIKGSILVLAVYLDIVSSGTRRA

SEQ ID NO: 4886 - DNA, 1191 bp, Brucella melitensis 16M
  CDS (1)..(1191): transl_table=11
atgagcgagaatgtaatccagagcggccagcagagcagcgtggggcgctatctcaagaacaatctgcgtgaatccgggatgctgctttcgctcgttgcaatcatgatcttcttccatatcgtgaccggcggcgttctcatgaagccgctgaacctcaccaatctcgttttgcagaacagctatatcgtcatcatggcgcttggaatgctgctcatcatcgtcacgggccatatcgatctttcggtcggttcggtctgcggctttatcggggcgctcgctgccgtcatgatggtaaagctcggcattccctttcccattgcggccattctctgcctcattgtcggcgggttgatcggcgcgatccagggtttttgggtcgcctatttcaatatcccctccttcattgtgacattggccggtatgctcgtgttcaaggggctgatgcttgccgttctgggcggacagtcggtcggaccttttccggtcgtgttccagaagctctcgtcgggcttcattccagaggtgatcggcacgtttgacggcgtttatctcacctcgctcatcatcggcgttctgcttgcggttttcctcatctggcagagcatgcggtcgcgcgcgcgccatattgcccatgaggtggagaccgagcccttcggccttttcgtggtcaagtgcatcctctatttcgtcgcaattgcctatctttcgctgctcatttcctcacatcgcggtatgccgaacgtactcatcatcatggcggtgctgattgccgcctatgcgtttctcaccaatcgcaccgtgatcggccgccagatctatgcggtgggcggcaatcgtcacgccgccaagctttccggcgtgaaaaccgagcggctgacgtttctcaccttcgtcaatatgggtgtgctggcagcacttgcgggtctcgtcttcgccgcccgtctcaatacggcgacgccgaaagctggcatcggctttgaactggacgtcatcgcggcctgcttcatcggtggcgcttcggcctatggcggtgtggggcgggttacgggtgccgtgatcggcgcgctcatcatgggcgtgatgaacaacggcatgtcgatcctcggcatcggtatcgactatcagcaggtcatcaagggtatcgtgctgctgggggcggtttgtatcgacgtctataaccagaaacgctga

SEQ ID NO: 4887 - protein, 396 aa, Brucella melitensis 16M
MSENVIQSGQQSSVGRYLKNNLRESGMLLSLVAIMIFFHIVTGGVLMKPLNLTNLVLQNSYIVIMALGMLLIIVTGHIDLSVGSVCGFIGALAAVMMVKLGIPFPIAAILCLIVGGLIGAIQGFWVAYFNIPSFIVTLAGMLVFKGLMLAVLGGQSVGPFPVVFQKLSSGFIPEVIGTFDGVYLTSLIIGVLLAVFLIWQSMRSRARHIAHEVETEPFGLFVVKCILYFVAIAYLSLLISSHRGMPNVLIIMAVLIAAYAFLTNRTVIGRQIYAVGGNRHAAKLSGVKTERLTFLTFVNMGVLAALAGLVFAARLNTATPKAGIGFELDVIAACFIGGASAYGGVGRVTGAVIGALIMGVMNNGMSILGIGIDYQQVIKGIVLLGAVCIDVYNQKR

SEQ ID NO: 4888 - DNA, 1197 bp, Brucella melitensis 16M
  CDS (1)..(1197): transl_table=11
gtgcgccacgataaaggcgtttctggcgccatccgcacctttatcgaccgggtcaagtcgggcgatctcggttcattgccggtcattattggccttctcatcatctggacagttttccagacgttgaacccggttttcctttccagcaacaacctcgtgaacctgctattcgattgctcgaccatcggcgtcatttcgctcggcatcgtctgcgtattgatgctgggtgagatcgacctttcggtcggttccattagtgggctttcttcggctatcatcggtgtattatgggtcaataatggctggccggtgggcgtcgccatcattgcagcactttgcgcaggcgcactggctggcttcctctacgcgctcctctataaccgcttcagcatgccaagcttcgtttccacactggctgggctgctcgcagcccttgggcttcagctttacctcctcggcaatacaggctccatcaatctgccttacggttcgtggctggtcagcttcggccagcttctggtaatgccgcgtccgctttcttatgcgctggcgctggtcgcgggacttgcgatctttttcacgggttttcgcgccgcgcagcgccgccgcacggcagggctttccgctccctcggctgcgggcattgcgctcaaagctttggtcatcacgctcattatcggctgtggggtattttatctcaaccagtcgcgcggcgtgccatggatgtttgccctgttcgtggcgctggtgatcgcgatgaactatgcgcttacgcgcaccagatggggccgctgcgtgcaggcggttggcggcaatcgcgaggctgcgcgtcgtgccggcatcaatgtgaatttcatctatgtctcggccttcatggcctgctccacactcgcggctgccggtggtatcatggcggcggcgcgtctggcctcatccagccagcaggcaggcaccggtgacgtcaacctcaatgctatcgcggcagcggttatcggcggtaccagcctattcggcgggcgcggcagcgcgtggtcggccctgctcggtattatcgtcatccagtcgattgcgagcggtttgacgcttctcgatctgtcgtcttcgcttcgctacatgattacgggtgcagtgcttgccatcgccgtgattgtcgattcccttgcccgccgttcgcgccagtcgcacggccgcgcctag

SEQ ID NO: 4889 - protein, 398 aa, Brucella melitensis 16M
MRHDKGVSGAIRTFIDRVKSGDLGSLPVIIGLLIIWTVFQTLNPVFLSSNNLVNLLFDCSTIGVISLGIVCVLMLGEIDLSVGSISGLSSAIIGVLWVNNGWPVGVAIIAALCAGALAGFLYALLYNRFSMPSFVSTLAGLLAALGLQLYLLGNTGSINLPYGSWLVSFGQLLVMPRPLSYALALVAGLAIFFTGFRAAQRRRTAGLSAPSAAGIALKALVITLIIGCGVFYLNQSRGVPWMFALFVALVIAMNYALTRTRWGRCVQAVGGNREAARRAGINVNFIYVSAFMACSTLAAAGGIMAAARLASSSQQAGTGDVNLNAIAAAVIGGTSLFGGRGSAWSALLGIIVIQSIASGLTLLDLSSSLRYMITGAVLAIAVIVDSLARRSRQSHGRA

SEQ ID NO: 4890 - DNA, 936 bp, Clostridium perfringens str. 13
  CDS (1)..(936): transl_table=11
atgaaagcgaatgttaaagcaaatatatctaaatataaatcccttataggactagtattattatgtatagttattactatagttactccaaactttttaagtgtatctaatataactaacgtatttacacaggtttcagttaatgcaatcatagcaataggtatgactttcgtaattttaactggtggaatagacttatcagttggatctactttagctattagtggtgccgtaggggcttctattgttaagtcgactggaaacgtattcttagcaattatagtggcagctgttattggtatagcagttggattaataaatggtttattagtatcaaaaggaaaactacaagcattcatagttactttagctacaatgacaatatttagaggagctactttagtatttacagatggtactccaatatcaaaattacctgaagcttttgttaaaataggaaatggtaaacttggatttatgccaataccagttataataacaataataatagcaatcatagcagtatatgctttatcacaaacaagatttggaagatatttatatgctttaggtggaaatgaagatgcttcaagattatcaggaataaatacagataagataaaaactttagtttatgtggtatcaggttttgcctcagctattgcaggggtaataataacaagtagaataggatctgcttcacctaatgcaggaacaggatttgaattagatgctatcgctgctgtagtaataggaggaacttctttagcagggggagaaggaacaatcacaggtactttaataggtgctcttattataggtgtacttaataatggattaaaccttatgaatgtatcaccattctatcaatcaatagtaaaaggtttagttatattaatagcagtacttttagataaaaagagcagaaaaaattaa

SEQ ID NO: 4891 - protein, 311 aa, Clostridium perfringens str. 13
MKANVKANISKYKSLIGLVLLCIVITIVTPNFLSVSNITNVFTQVSVNAIIAIGMTFVILTGGIDLSVGSTLAISGAVGASIVKSTGNVFLAIIVAAVIGIAVGLINGLLVSKGKLQAFIVTLATMTIFRGATLVFTDGTPISKLPEAFVKIGNGKLGFMPIPVIITIIIAIIAVYALSQTRFGRYLYALGGNEDASRLSGINTDKIKTLVYVVSGFASAIAGVIITSRIGSASPNAGTGFELDAIAAVVIGGTSLAGGEGTITGTLIGALIIGVLNNGLNLMNVSPFYQSIVKGLVILIAVLLDKKSRKN

SEQ ID NO: 4892 - DNA, 915 bp, Corynebacterium glutamicum ATCC 13032
  CDS (1)..(915): transl_table=11
atgctcaataacggtgcgttggtggggctgattgcactgtgtgttggactttttattgcaacaccccactttctcaccattcctaacctgatcaacatcggtatccaatcggcgacggtggcgatcctggcgttcggcatgaccttcgtcatcgttaccgcaggcattgatttgtctgtgggatcagtggctgcgttgggtgcgatgacctcggcgtatttcttcgcggaagttggtttgccgggctggatcacgctgctgattggcctgttcatcggattgttggcgggtgcgatctctggcatttctattgcttatggcaagttgcctgcgtttattgccaccttggccatgatgtcgatcgccaggggaatcaccttggtcatttcccaaggctcaccaattcccagtgcaccagctgtgaacgctttggggcgcacctactttggcatcccgatgccgattctgatgatggcactggctggcattgtgtgttggtttattttgagccgcaccgtgctgggacggtccatgtacgccattggcggaaacatggaagcagcccgactatctggtctgccagtgaagaaaatcctggtcatggtctatgcactggctggtgtgtatgcagcacttgcgggtctggtcatgacgggacgcttgtcgtccgcgcagccgcaggcaggcgtgggatacgaactcgatgcgattgccgccgtggtcattggtggtgcgtcacttgctggcggaaccggaaaagcaacgggcactttgattggtgccatcttgttggccgtgatccgcaatggcttgaacattttgaacgtgtcctcgttctggcagcagattgtcatcggttgtgtcatcgcgcttgcggtgggcttcgatgtcatccgaaacaaaacctctaagtaa

SEQ ID NO: 4893 - protein, 304 aa, Corynebacterium glutamicum ATCC 13032
MLNNGALVGLIALCVGLFIATPHFLTIPNLINIGIQSATVAILAFGMTFVIVTAGIDLSVGSVAALGAMTSAYFFAEVGLPGWITLLIGLFIGLLAGAISGISIAYGKLPAFIATLAMMSIARGITLVISQGSPIPSAPAVNALGRTYFGIPMPILMMALAGIVCWFILSRTVLGRSMYAIGGNMEAARLSGLPVKKILVMVYALAGVYAALAGLVMTGRLSSAQPQAGVGYELDAIAAVVIGGASLAGGTGKATGTLIGAILLAVIRNGLNILNVSSFWQQIVIGCVIALAVGFDVIRNKTSK

SEQ ID NO: 4894 - DNA, 957 bp, Thermoanaerobacter tengcongensis MB4
  CDS (1)..(957): transl_table=11
ttgaagctaccgaacgaaaaagcaatgaaaataaatattggtgagttgcttttaaaagcgaaatctttaataggtttattgggattaattatcgcgttttcaatattatctccacgttttttggattactataaccttacaaatgtattaagacaaacctctctaaatgcaataatggctgtagggatgacatttgtgatattgacaggtgggatagacctatctgtgggttctatattggcgttttcaagtgcagttacagccggtatgttgaaagatggtatgcccctaatcatagctttattggcgggattgataataggtactggtttaggattgtttaatggttttgttataatcaggtggaatattcctccatttattgctacatttgctatgatgacaatagcaagagggcttacgcttgtgtatactaatggccaaccaataactggcttaggaaaagctttcggatatatcggcaatgggtatgttggttccattcctgttccaataattatcacaattctcgtttttgtaataggatactatattttaaaaaacaacagattaggaagatatgtatatgcaaccggaggaaatttacaagctgctaaactggcaggaattaatactaataaaataattctatttgtatatgctttaagtggttttttagcagcagtaagtggcttaataattacttcaagattaaactcagctgccccaacagctggacaaggtgcagagcttgatgcaatagctgctgttgtactaggaggtacaagtttatctgggggcgaaggtggaataattgggactttgataggtgctttaataataggtgtgttgaacaatggtctgaatttgcttaacgtttcacctttttatcaatatattgtaaaaggtgtagtaatattacttgctatagctttagacaaaaaagaaagtgagtaa

SEQ ID NO: 4895 - protein, 318 aa, Thermoanaerobacter tengcongensis MB4
MKLPNEKAMKINIGELLLKAKSLIGLLGLIIAFSILSPRFLDYYNLTNVLRQTSLNAIMAVGMTFVILTGGIDLSVGSILAFSSAVTAGMLKDGMPLIIALLAGLIIGTGLGLFNGFVIIRWNIPPFIATFAMMTIARGLTLVYTNGQPITGLGKAFGYIGNGYVGSIPVPIIITILVFVIGYYILKNNRLGRYVYATGGNLQAAKLAGINTNKIILFVYALSGFLAAVSGLIITSRLNSAAPTAGQGAELDAIAAVVLGGTSLSGGEGGIIGTLIGALIIGVLNNGLNLLNVSPFYQYIVKGVVILLAIALDKKESE

SEQ ID NO: 4896 - DNA, 1191 bp, Thermoanaerobacter tengcongensis MB4
  CDS (1)..(1191): transl_table=11
atgagatctttttatgggcatttaaaagagtttttaagggaaaatgtcagagactatgcaatgtttattgctttattggttataatgatagtttttgcaattctctctggcggcgattttctcctgcccgttaatataagcaacttggtggatcagacaggttatattgcggttttgtcaattggggagaccttgataatagtcatacgtcatatagacctttctgtagggtttttgtcaggatttttaggggcaattgccgccattctgatgcagtttcaccatttttcagcttttactgctatactcatagtcctgatattgggtactttagcagggcttttaaacgggtcattggtagcttatcttagaattcctgcttttgtggcaacactagcaggatggcttgcttatagaggagcacttcttcttgctacaaaagggcctggtaccataataataacaaataagacctttaatgctataggaaatgacttcataccagatttgccttttttgaagaatttcatgccaggttatcacaaactcacccttttgataggcataataggagtagtgttaattgtatatttttcgcttaagaacagaaatgagcaagcaagaaggggatttgatgtactgccatgggatatgttccttttaaaaatggtatttataagtgggctgttgttgtatttgacctttactttggctcgctacagaggtatttcctggacatttgtaatagttttgattgtaacagcagtatacagttttataacaaatagaacggtattaggaaggcatatatacgctgtagggggaaaccctgaagcagctgcgttaagtggtatagacgttaataagataactctcattgtatttgcctccatgggatttctctcagggctttctggagtactttttgcatccagacttcaatctgctacgactactgccggtaccttgtttgagctttacgctattgctggtgccttcataggaggagtgtcagcaagcggcggtgtgggtaaagttgtaaattctctcattggagcttttgtgatgagtaccttgacaaacggcatgaacttgctgggagtcgatatttcacttcagtatataattttagggctggttttagctacagctgtgatattcgatgtggcaactagaagcagaggaagataa

SEQ ID NO: 4897 - protein, 396 aa, Thermoanaerobacter tengcongensis MB4
MRSFYGHLKEFLRENVRDYAMFIALLVIMIVFAILSGGDFLLPVNISNLVDQTGYIAVLSIGETLIIVIRHIDLSVGFLSGFLGAIAAILMQFHHFSAFTAILIVLILGTLAGLLNGSLVAYLRIPAFVATLAGWLAYRGALLLATKGPGTIIITNKTFNAIGNDFIPDLPFLKNFMPGYHKLTLLIGIIGVVLIVYFSLKNRNEQARRGFDVLPWDMFLLKMVFISGLLLYLTFTLARYRGISWTFVIVLIVTAVYSFITNRTVLGRHIYAVGGNPEAAALSGIDVNKITLIVFASMGFLSGLSGVLFASRLQSATTTAGTLFELYAIAGAFIGGVSASGGVGKVVNSLIGAFVMSTLTNGMNLLGVDISLQYIILGLVLATAVIFDVATRSRGR

SEQ ID NO: 4898 - DNA, 975 bp, Thermoanaerobacter tengcongensis MB4
  CDS (1)..(975): transl_table=11
atgcaaaatttggataaaaaagtagtaacttcggaaccaaataacaaaagaaaattttctactagattacaattattttctacgtggggagcgcttgctattttggtagtatttttcagtattacttctgacaagtttttaacagtagataatttgttaacagtagctttgcaaacctctataatagcaataatagcaatgggccaaacttatgtaattattactggtggtatagatctttctattggttccaatatagcgttaggtggtgtggtagcagcgcttttaatggctaatggattttctattcctgtttctatagtgatagcattattggtaggactatttgtaggaacgttaaatggtacattgattgcatacggtaagattcctcctttcatagtaactttgggagcaatgagtataattagagggacggcatatgtgttaacaggtggtattccaataacaaacgtgccactagaattttctgcttttgggatggggagaatactcagaataccagtgcctgttataataatggtcatcttgattgcaatttttggttttatcctcgcaaaaactaaattaggtagatacatttatgcagtgggaagcaatagagaagcagctcgattagcaggaataaatattcctacagttttaattgcagtatatgcaataagtggatttttagcagtatgggctggaataattgtagctggtaggataatttcaggtcaaccggcagctggaatgggctatgaattagatgctgtagctgcttcagttataggtggggcaagtctttttggtggtgaaggaactattttaggaacaattgcaggtgcttttgtaatgggtgtgttaagaaatggtttaaacttgttaaatgtgtctgctttttggcagcaaatcataattggagctgtaattatcggagcagtgttcttagatactataagaaggcgttag

SEQ ID NO: 4899 - protein, 324 aa, Thermoanaerobacter tengcongensis MB4
MQNLDKKVVTSEPNNKRKFSTRLQLFSTWGALAILVVFFSITSDKFLTVDNLLTVALQTSIIAIIAMGQTYVIITGGIDLSIGSNIALGGVVAALLMANGFSIPVSIVIALLVGLFVGTLNGTLIAYGKIPPFIVTLGAMSIIRGTAYVLTGGIPITNVPLEFSAFGMGRILRIPVPVIIMVILIAIFGFILAKTKLGRYIYAVGSNREAARLAGINIPTVLIAVYAISGFLAVWAGIIVAGRIISGQPAAGMGYELDAVAASVIGGASLFGGEGTILGTIAGAFVMGVLRNGLNLLNVSAFWQQIIIGAVIIGAVFLDTIRRR

SEQ ID NO: 4900 - DNA, 1245 bp, Streptomyces coelicolor A3(2)
  CDS (1)..(1245): transl_table=11
atgagcacggacgtgaccgccaagaccccggcaccggcgccgcccggcagagagggctcggcctccggcggcgggctgctgcagctgatgctcgacggcatgcgccgcaacatgcgccagtacggcatgctgatggccctcggtctgatcgtggtgctgttcgcggtgtggtcggacggcgacctgctgctgccgcgcaacgtctccaacctggtgctgcagaacagctacatcctgatcctcgcgatcggcatgatgctcgtcatcatcgcgggccacatcgacctgtcggtgggttcgctgaccgccttcgtcggcgcgaccgccgccgtcctgatggtcaaccacgacctgccctggccggtggcggtgatcctctgcctggccatcggcgccgccgccggtgccgtgcagggcttcttcatcgcctatctcggcataccgtcgttcatcgtgaccctcgcgggcatgctgctcttccgcggtctgacggagatcttcctcaagggccagaccctcggcccgttccccaaggaccttcagaagatcgccaacggcttcctgcccgaggtcggcccgaacaccaactaccacaacctcaccctgctgctgggcttcgccctgatcgccttcgtggtgtaccaggaggtccgcgaccgcaagcggcagctggagttctccctcgacgtgccgccgctcaagctgttcctgctcaagctggtcgcgctggtcgccgcggtcctcgtggtcacgctgctgctggccagctacaagggcgcgccgatcgtgctgctcatcctgggcgtgctggtggtcggcttcggctatctgatgcgcaacgcgatcatcggccgccacatctacgccatcggcggcaacctgcccgcggccaagctgtcgggcgtgaaggacaagaaggtcaccttcctggtcttcctgaacatgggcatgctcgcggccctggcgggtctggtcttcgccgcccgcttcaacgcggcctcgcccaaggcgggcctcaacttcgagctggaggccatcgccgcctcgttcatcggcggcgcgtcgatgagcggcggcgtcggcacggtcctcggcgcgatcatcggcggtctggtcctgggtgtgctcaacaacggcatgaacctcgtcggcatcggcaccgactggcagcaggtcatcaagggcgcggtgctgctggcggcggtcgggttcgacgtgtggaacaagcgcagggtcggttcgtaa

SEQ ID NO: 4901 - protein, 414 aa, Streptomyces coelicolor A3(2)
MSTDVTAKTPAPAPPGREGSASGGGLLQLMLDGMRRNMRQYGMLMALGLIVVLFAVWSDGDLLLPRNVSNLVLQNSYILILAIGMMLVIIAGHIDLSVGSLTAFVGATAAVLMVNHDLPWPVAVILCLAIGAAAGAVQGFFIAYLGIPSFIVTLAGMLLFRGLTEIFLKGQTLGPFPKDLQKIANGFLPEVGPNTNYHNLTLLLGFALIAFVVYQEVRDRKRQLEFSLDVPPLKLFLLKLVALVAAVLVVTLLLASYKGAPIVLLILGVLVVGFGYLMRNAIIGRHIYAIGGNLPAAKLSGVKDKKVTFLVFLNMGMLAALAGLVFAARFNAASPKAGLNFELEAIAASFIGGASMSGGVGTVLGAIIGGLVLGVLNNGMNLVGIGTDWQQVIKGAVLLAAVGFDVWNKRRVGS

SEQ ID NO: 4902 - DNA, 1956 bp, Streptomyces coelicolor A3(2)
  CDS (1)..(1956): transl_table=11
gtggccactgacacgctcaagagcaagccgggcgcgcagggcgccacgggcggtctgcgccgcctgctgctcgacaacggcgcgctgaccgcgctgatcgtcctcgtcgtcgtcatgtcggcgctgtccggggacttcctgaccgccgacaacctcctcaacgtcggcgtccaggccgccgtcaccgcgatcctcgcgttcggcgtcaccttcgtcatcgtctcggcgggcatcgacctgtcggtcggctcggtcgccgcgctgtcggccaccgtgctggcctggagcgccaccgaggccgggatgccggtcgcgctcgcggtgctgctgtccgtcctgacgggcatcgcctgcggtctggtgaacggtttcctcatctcgtacgggaagctgccgccgttcatcgcgacgctcgccatgctgtcggtgggccgcggtctgtcgctggtcatctcgcagggctcgccgatcgccttcccggactcggtctcgcacctcggtgacacgctcggcgggtggctgccggtgccggtgctcgtgatgatcgtgatggggctgatcaccgcgttcgtcctcggccggacctacatcggccggtccatgtacgccatcggcggcaacgaggaggcggcgcggctgtccgggctgcgggtgaagcggcagaagctcgccatctacgccttctccggcctgttcgccgccgccgcgggcatcgtgctcgcctcccggctctcctccgcgcagccgcaggccgcgcagggctacgagctggacgccatcgccgccgtcgtcatcggcggcgcctcgctggcgggcggcaccggcaaggcctcgggcacactgatcggcgcgctgatcctcgcggtgctgcgcaacggcctcaacctgctgtccgtctccgcgttctggcagcaggtcgtcatcggtgtcgtcatcgcgctcgcggtgctcttcgacacgctgcgccgcaaggcgggcgcggtcactccggcggccggggcgtcgggcggcggcaaccggggcaggcaggcactcacgtacgtgatcgcggccgtcgtcgcggtggccgtggtcggcgccacctcgctgctgcacaacggctcctccggcggcaagagccagaagatagggctgtcgctgtccacgctgaacaacccgttcttcgtgcagatcaggaacggcgcggaggaggaggcgaagaagctgggcgtggacctgacggtcacggacgcccagaacgacgcctcccagcaggccaaccagctccagaacttcgtcagcggcagcctgtccgcggtcatcgtcaacccggtggactccgacgcggccggtccctcggtgcgctccgccaacaaggacgacatcccggtcatcgccgtggaccgcggcgtcaacaaggcggagacgtccgcgctggtcgcctccgacaacgtcgagggcggtgagctgggcgccaaggcgctcgccgagaagctcggcggcaagggcaccatcgtcatcctccagggccaggccggcacctccgccagccgggagcgcggggcgggcttcgcggccgggctcaaggcgtacccgggcatcaaggtcgtcgccaagcagcccgcggacttcgaccgcaccaagggcctggacgtgatgacgaacctgctccaggcgcacccggacgtcgacggcgtcttcgcggagaacgacgagatggcgctgggcgcgatcaaggcactgggttccaaggccggcaagtcggtccaggtcgtcggcttcgacggcaccccggacgggctgaaggcggtccaggacggcacgttgtacgcgtcggtggcgcagcagccgaaggaactgggcaggatcgccgtacggaacgcgctgcgggcggccgaggacaagaaggtggagcagacggtgaaggtgcccgtgaaggtcgtcacccagcagaacgtggcgggtttcgagggctga

SEQ ID NO: 4903 - protein, 651 aa, Streptomyces coelicolor A3(2)
MATDTLKSKPGAQGATGGLRRLLLDNGALTALIVLVVVMSALSGDFLTADNLLNVGVQAAVTAILAFGVTFVIVSAGIDLSVGSVAALSATVLAWSATEAGMPVALAVLLSVLTGIACGLVNGFLISYGKLPPFIATLAMLSVGRGLSLVISQGSPIAFPDSVSHLGDTLGGWLPVPVLVMIVMGLITAFVLGRTYIGRSMYAIGGNEEAARLSGLRVKRQKLAIYAFSGLFAAAAGIVLASRLSSAQPQAAQGYELDAIAAVVIGGASLAGGTGKASGTLIGALILAVLRNGLNLLSVSAFWQQVVIGVVIALAVLFDTLRRKAGAVTPAAGASGGGNRGRQALTYVIAAVVAVAVVGATSLLHNGSSGGKSQKIGLSLSTLNNPFFVQIRNGAEEEAKKLGVDLTVTDAQNDASQQANQLQNFVSGSLSAVIVNPVDSDAAGPSVRSANKDDIPVIAVDRGVNKAETSALVASDNVEGGELGAKALAEKLGGKGTIVILQGQAGTSASRERGAGFAAGLKAYPGIKVVAKQPADFDRTKGLDVMTNLLQAHPDVDGVFAENDEMALGAIKALGSKAGKSVQVVGFDGTPDGLKAVQDGTLYASVAQQPKELGRIAVRNALRAAEDKKVEQTVKVPVKVVTQQNVAGFEG

SEQ ID NO: 4904 - DNA, 1293 bp, Streptomyces coelicolor A3(2)
  CDS (1)..(1293): transl_table=11
gtgagcatcgacaagacctccaccccggccgaggaccacgcggtggagaaccccgccgcggccgccggcgccgccgccgcggtcgacccgcggctgctggtgcgcgagcagggcttcgcgggctatctgagcgagttcaagcggaagatgaaggccggtgacctcgggtccatcccggtcgtcgtcggtctgctgatcatctgggccatcttcaccagcctgaactccaacttcctcaccgccggcaacttctccgacatgtcggtcgccatggtcggcaccggcatgatcgccgtcggtatcgtcttcgtcctgctgctcggcgagatcgacctgtcggtcggctcggtcagcggtgtcgcgggcgccaccttcgcggtgctgagcgtcacgcacgggatgaacgagtggctcgccctgctgctgtccgtcctcaccggcaccgtggccggtgccatccacggcttcgtcttcgcccgcatcggcgtgccggccttcgccgtgacgctggccggactgctgttctggcagggcttcatgctgcagatcctgggcagcaacggcacgatcaacctcgactccgagggcatcgtcgtcaagatgaccagctactacttcagcgacgtggccgccgcctacggcctggcggtcgtcgtgaccgcggggtacttcctcagcgcgttcttcgacagccggcgccgcgaggccgccggggtgccctcgcggccgctgaacgagatcatcgtgcgcacggtgctgctggcgatcctggcgttcgtcgtggcgatcgtcttcaaccagtacaagggcctgccgctggccgtggtgatcttcctggcgttcctgctgctcacggacttcgtcctgcgccgcaccgcctacggtcgcaagatcttcgccctcggtggcagcgtcgaggcgtcccgccgcgccggcatcaacgtggagctgatccggatctcggtcttcgcgatcgccggcggcttcgccgcgataggcggcctcttcgtggcctcgaagatcgccgccgccaaccagggcgcgggcaccggtgagttcctgatgaacgtcatcgccgcggccgtgatcggcggcacgtccctcttcggcggccgcggccgcacctgggacgcgctgctcggtgtcatggtcatcgtctcgatccagtacggcctcgccctggagggcatcgcctcgccggtccagtacatgatcaccggtggcgtgctgctggcgaccgtcgtcatcgacgcgatcacccgcaagacgcagaagacggccggccgcgcgtag

SEQ ID NO: 4905 - protein, 430 aa, Streptomyces coelicolor A3(2)
MSIDKTSTPAEDHAVENPAAAAGAAAAVDPRLLVREQGFAGYLSEFKRKMKAGDLGSIPVVVGLLIIWAIFTSLNSNFLTAGNFSDMSVAMVGTGMIAVGIVFVLLLGEIDLSVGSVSGVAGATFAVLSVTHGMNEWLALLLSVLTGTVAGAIHGFVFARIGVPAFAVTLAGLLFWQGFMLQILGSNGTINLDSEGIVVKMTSYYFSDVAAAYGLAVVVTAGYFLSAFFDSRRREAAGVPSRPLNEIIVRTVLLAILAFVVAIVFNQYKGLPLAVVIFLAFLLLTDFVLRRTAYGRKIFALGGSVEASRRAGINVELIRISVFAIAGGFAAIGGLFVASKIAAANQGAGTGEFLMNVIAAAVIGGTSLFGGRGRTWDALLGVMVIVSIQYGLALEGIASPVQYMITGGVLLATVVIDAITRKTQKTAGRA

SEQ ID NO: 4906 - DNA, 1146 bp, Yersinia pestis KIM
  CDS (1)..(1146): transl_table=11
atgatgaaagcaacaactggcacggcgttggcgagtcacctgcccggtggagcgtcatggtcacgggaaaatatgctgctgcttctgttaaagatgcgcacctttattgccctgtttctgatcctgggtttcttttcaatcatggtccctgggttcttagccacggggagtttgatcatcatggtgaagcatattgcgattaatgccttcctcgcattaggcatcacctttgtcattatcaccgcaggtatcgatctctccatcggcgcgacgctggggctgtgcggcatgattgccggttggatgatcacccaaggcattgtcttgccgatgtttggcatcgctatcttccccagtgtttgggttgtggttccggtggtgttagttatcggggcactcatcggtgcggttaatggctggatcattactcgctacaacgtcgccccgtttatttgcacccttggcaccatgtatgtggtgcgaggtgcctcgatgttgatctctggtggcgaaaccttccccggcttacaaggcaatccgcaactggggaataccggttttgacctgctgggctcgggaacgctactggggttgccgatcgccatctggatcatgttcattctggcgctggtgattgcttacgttgcccgccgccttccgtttggccgccatgtttatgccatcggggataacgaacgcgctgctgaactttctggtgtcaaagtgcgtcaggtgaaagtctgggtttacaccctatccggcttctgtgccgcgatagcggggattatcgtgtctgcccaattggttgccagccacccggccaatggcagtggcttcgaaatgaatgctatcgccgctgttgttctgggcgggacatcgctggcaggcgggcgagggaccattcttggtacgctgattggcgcttttgttatcggcatcttggctgatgggctggtgatgatgggcatcagtgaattctggcaaatggtgatcaaaggcatcgtgattatcgtggccgtgattatcgatcagatgcaaaaccggatgcagcacaaggcggcgattgtgtcgcaaaaagtgaccgccatcccctctgacgtcacctctcaggcgggaatcatctctcagacggtaaaaagtgagtag

SEQ ID NO: 4907 - protein, 381 aa, Yersinia pestis KIM
MMKATTGTALASHLPGGASWSRENMLLLLLKMRTFIALFLILGFFSIMVPGFLATGSLIIMVKHIAINAFLALGITFVIITAGIDLSIGATLGLCGMIAGWMITQGIVLPMFGIAIFPSVWVVVPVVLVIGALIGAVNGWIITRYNVAPFICTLGTMYVVRGASMLISGGETFPGLQGNPQLGNTGFDLLGSGTLLGLPIAIWIMFILALVIAYVARRLPFGRHVYAIGDNERAAELSGVKVRQVKVWVYTLSGFCAAIAGIIVSAQLVASHPANGSGFEMNAIAAVVLGGTSLAGGRGTILGTLIGAFVIGILADGLVMMGISEFWQMVIKGIVIIVAVIIDQMQNRMQHKAAIVSQKVTAIPSDVTSQAGIISQTVKSE

SEQ ID NO: 4908 - DNA, 1011 bp, Yersinia pestis KIM
  CDS (1)..(1011): transl_table=11
ttggtaatgtctctgacacggaccagtaaattcaggaaggccattcatcaatacgggatcatacttgcctttgttggcttgtgtgcggtcattgctctggctggtgaatttgcagtaaacagcgggacatggagcgagaattattttttatcacgggataatacactcattattctgcgccaggtctcgatcaacggcatcctggccattgggatgacgttcgttattatcaccgcgggtgttgatctctccgttggcgcggttttaggcttggccggtattgtcgccgcgcgttttgcgacgaataacagtgccatcgccttaggggggaccgattggccactgttagtacccatcgtgattgccattggcatcggtttagtctgcggcgctatcaatggctttatcttaggcaaatatcgtctgcaaccctttattgtcacaatggggatgttatctgtcgcccgtggcctgacattactgactactggcggaaacccggtatcacaattaaccgatgaattccgttggttaggtaacggttatattttgggtattcccgtaccggtgttgatctttattattctgttcgccattgcctggtttgtcttgaataagatgacgtttggccgttacgtctacgcggtgggcgggaatgaaaaaagtgcccgcacatccgggatcaacgtattacgtattaaagtggcggtatataccctttgcggtattttggcggcgatcgcgggtttaattttaaccgcacgtactggctcggcacaaactggcgctggcgtatcctatgaattggatgctatcgcggcggtcgttattggcggcaccagtatggctggcggtattggaactctgcgcggaaccttatttggtgtgctgataataggtgtgatgaacaatgggcttgatttactcggcgtacaatcctattaccagcaaattatcaaaggtgttctgattgtctttgctgtcatgcttgacccatcccgtaagcaataa

SEQ ID NO: 4909 - protein, 336 aa, Yersinia pestis KIM
MVMSLTRTSKFRKAIHQYGIILAFVGLCAVIALAGEFAVNSGTWSENYFLSRDNTLIILRQVSINGILAIGMTFVIITAGVDLSVGAVLGLAGIVAARFATNNSAIALGGTDWPLLVPIVIAIGIGLVCGAINGFILGKYRLQPFIVTMGMLSVARGLTLLTTGGNPVSQLTDEFRWLGNGYILGIPVPVLIFIILFAIAWFVLNKMTFGRYVYAVGGNEKSARTSGINVLRIKVAVYTLCGILAAIAGLILTARTGSAQTGAGVSYELDAIAAVVIGGTSMAGGIGTLRGTLFGVLIIGVMNNGLDLLGVQSYYQQIIKGVLIVFAVMLDPSRKQ

SEQ ID NO: 4910 - DNA, 1194 bp, Yersinia pestis KIM
  CDS (1)..(1194): transl_table=11
gtgaaacccatgtcacaagctaatcaatctgaatttaactcaccagaaaatggggataaaaagccattttttcggcttaaatccttaaatttacaagtttttgtcatgctggccgcgatcgccattattatgttgttcttcaccttcacgacagaaggggcctatctcagcgccagaaatatctctaacttgctgcgccagacggcgatcaccggcatcttggcggtcggtatggtgtttgtcattatctccgccgaaattgacttgtctgttggctcaatgatggggttattgggtggcatagcggccatttttgatgtctggctcggctggccgttgccgctgaccattgtcgttacgctggcgctggggctggtattaggggcatggaacggttggtgggtcgcgtatcgcaaagtgccttcgtttattgttacgctcgcgggcatgttggcttttcgtggcattttaattggtatcaccaatggcacgacggtttcgccgaccagtaatgcgatgtcgcagattggccagagctatctgccaagtggcattggttttggcatcggtgctattggcctgatgttgtttgtggcctggcaatggcgtcggcgtaatcaccgcatccgcttggggttaccggttgccgccccgcaaggggatgtgactcgccaaactattaccgcagttatcgttctgggtgccatatatttattgaatgattatcgtggtgtacctacgccggtactaatccttactgcattaatgctggcgggggtatttatggctactcgcaccgcttttggtcgccggatctacgctattggcggcaatattgatgcggcgcgcctgtctggaattaatgtagagcgcactaaactggcagtattcgcgattaacggactgatggtggcgatggctggtttgatcctcagttcacgtttaggcgcaggttcgccttctgcgggcaatatcgctgaactggatgcgattgcggcgtgtgtcattggcggtaccagcctggccggaggcgttggcagtgtggcgggggccgtaatgggcgcatttattatggcttctctcgataatgggatgagcatgctagatgtgccgacgttctggcagtacattgtcaaaggcgcaattttgctgctggccgtgtggatggattccgccaccaaacggcgggtgtga

SEQ ID NO: 4911 - protein, 397 aa, Yersinia pestis KIM
MKPMSQANQSEFNSPENGDKKPFFRLKSLNLQVFVMLAAIAIIMLFFTFTTEGAYLSARNISNLLRQTAITGILAVGMVFVIISAEIDLSVGSMMGLLGGIAAIFDVWLGWPLPLTIVVTLALGLVLGAWNGWWVAYRKVPSFIVTLAGMLAFRGILIGITNGTTVSPTSNAMSQIGQSYLPSGIGFGIGAIGLMLFVAWQWRRRNHRIRLGLPVAAPQGDVTRQTITAVIVLGAIYLLNDYRGVPTPVLILTALMLAGVFMATRTAFGRRIYAIGGNIDAARLSGINVERTKLAVFAINGLMVAMAGLILSSRLGAGSPSAGNIAELDAIAACVIGGTSLAGGVGSVAGAVMGAFIMASLDNGMSMLDVPTFWQYIVKGAILLLAVWMDSATKRRV

SEQ ID NO: 4912 - DNA, 933 bp, Streptococcus agalactiae 2603V/R
  CDS (1)..(933): transl_table=11
atgatgaaatatatatcagagttaacaaccctgattgcgttagctggtttaatggttattatcacactcattaatcctaatttcctcacaaccaataatctactcaatttattattacaagtaactgcaaatggttttatcgctttcgggatgaccttcgttattttgactggcggtattgatttatcagtcgggtccatattagccctatctagtgcattaacagctggattaatcggccacggagtacccgttggtattgctatcgttttatctgttgccttaggtggcatcttgggaatgctaaacggactcttcatttcttacggaaaattagcaccatttatcgttacactggcaacaatgactatctttagaggagcaacgctagtttattcaaacggcaacccaattaccgctggcttatccgatagttttctattccaatttttgggacaaggctatattgttggtatcccattcccagtcattctcatgtttcttacttttattattttgtatattttgttacataaaacagccttcgggaaatctgtttacgctttaggaggtaatgaaaaagcagcgtatatctcgggtattaagttaaacaaagttaaaattatcatctacactatctcaggtatcatggcttccatttctgggttaattatcacatcacgccttagctcagcacaaccaacagctggagcaagttatgagatggatgctattgccgccgttgtcttaggtggaacgtctttatctggtgggaaaggacgtatcattggaacattgattggtgctcttattattggtgtcctgaacaatggattaaacatcattggtgtctctgcattttggcaacaagttgtgaaaggtatcgttattttaatggctgttttacttgatcgctttaaagtagcaaaatag

SEQ ID NO: 4913 - protein, 310 aa, Streptococcus agalactiae 2603V/R
MMKYISELTTLIALAGLMVIITLINPNFLTTNNLLNLLLQVTANGFIAFGMTFVILTGGIDLSVGSILALSSALTAGLIGHGVPVGIAIVLSVALGGILGMLNGLFISYGKLAPFIVTLATMTIFRGATLVYSNGNPITAGLSDSFLFQFLGQGYIVGIPFPVILMFLTFIILYILLHKTAFGKSVYALGGNEKAAYISGIKLNKVKIIIYTISGIMASISGLIITSRLSSAQPTAGASYEMDAIAAVVLGGTSLSGGKGRIIGTLIGALIIGVLNNGLNIIGVSAFWQQVVKGIVILMAVLLDRFKVAK

SEQ ID NO: 4914 - DNA, 939 bp, Oceanobacillus iheyensis HTE831
  CDS (1)..(939): transl_table=11
atgaataataataaaatggcttcgatgtggcaaaaagtaatcccgttaatagctttagtattgctaataatcactgttacgatcatgaacccggcatttttagatccagctaatattatgaatctactaagacaaatttccattaatggattaattgcttttggtatgacttttgtaattctaacaggtggaattgatttatcggtaggatctattcttgcattgtctagtgctttagctgcaataatgatgacatcgggcattgatccaattttagcagtaattataggtgtattattaggtgcagtatttggtgcattgaatggtattttggtttcaaaaggtaacttagcaccgtttatcgttacattagcaacaatgacgatatttagagggttaacattagtatttacagatggaaaaccgataactggattaggagactcctatgcttttcaattatttggtaaaggatactttttaggaataccagtaccagcagtaacgatgatcattgcatttgtaattctttggtttttacttcataaaatgtcatttgggcgtaaaacatatgcaatcggcggaaatgagaaggcggcaaaaatttcaggtataaaagtagatcgtgtcaaaatctttatttattctattagtggaatgatggcagctctagcaggaatgattcttacttcccgccttaattctgctcaaccaactgcaggtacttcttatgaaatggatgctattgcggcagtagttctaggtggtacaagccttgctggcgggaaaggtcgtatagcaggtacgtttatcggagtattaattatcggtattttaaataatggaatgaacttacttggaatttcctctttctatcaacaagtagtaaaaggtgttgttatcttaatcgcagtgctactagatcgtaaaaaatcctaa

SEQ ID NO: 4915 - protein, 312 aa, Oceanobacillus iheyensis HTE831
MNNNKMASMWQKVIPLIALVLLIITVTIMNPAFLDPANIMNLLRQISINGLIAFGMTFVILTGGIDLSVGSILALSSALAAIMMTSGIDPILAVIIGVLLGAVFGALNGILVSKGNLAPFIVTLATMTIFRGLTLVFTDGKPITGLGDSYAFQLFGKGYFLGIPVPAVTMIIAFVILWFLLHKMSFGRKTYAIGGNEKAAKISGIKVDRVKIFIYSISGMMAALAGMILTSRLNSAQPTAGTSYEMDAIAAVVLGGTSLAGGKGRIAGTFIGVLIIGILNNGMNLLGISSFYQQVVKGVVILIAVLLDRKKS

SEQ ID NO: 4916 - DNA, 1218 bp, Bifidobacterium longum NCC2705
  CDS (1)..(1218): transl_table=11
atgagcgccgcaactgcaacacctgcaaagaaagaagaaaagaccggcctgctggccacggtcgccaacaatgcccgtcaatacggtattgtcggcgcactgctgatcatcgtcgtggccttcgagatcctgaccggaggtgtgctgctgaagccgaactccttcgtgtccctgatccagcagaacgcctacgtgatcatcctggccattggtatggtgatggtcatcatcgccacccacatcgacctttcggttggttccttggtggccttcatcggtggtgtgtgtgcactgctgatggaacgcgccggagtcaactggatgctcgccatcgtcatcgctctggtcgtcggcctgatcgtcggcgtctggcagggcttctgggtcgccgtcatcggcatcccgggcttcattaccactctggccggcatgttgatcttccgtggtctcgccaccgtgatcgtcggcgaatccgtgccgattacctccctcgaattccgtggcattgcccgtaactacctgcccaacatccttggctggtggggtccgttcgacggtctgaccattgtgctcggcatcctgtgcattgtcggctttgcctggagccagctgcgcaagcgcgcccgtgtggccaaggtcggcctggtgcccgagccgatgagcctgaccgtcctcaagattgtgcttgtcgcggtcgtcatcgccttcgtcacctacctgctggcttcctccggtaacgctgatcagggtggtaccccgatcatgctggtgatcgtcggtgtgctggtcttcatctacaacttcatcctgaccaagaccgtgttcggtcgccacgtgtacgccgttggtggcaaccgcaaggccgccatcctctccggtatcaacacccgccgcgtggacttcctgctgttcgtccacatgggcttcctgtccgcagtggccgctgtctgcatgctttcccgtctggcttccgcaactgctcaggccggtatggagttcgagatggacgccatcgctgcctgcttcatcggtggcacggccgtcaccggtggtattggtaccatcccgggcgctgtgattggtgcattcgtgatgggtgttatcaaccagggtctgtcgattatgggtgttgacaccgccgtggtgaagaccatcaagggcctcgtgctcctgctggccgtcgccgtggacatcatatccaagcgcaagaagagctga

SEQ ID NO: 4917 - protein, 405 aa, Bifidobacterium longum NCC2705
MSAATATPAKKEEKTGLLATVANNARQYGIVGALLIIVVAFEILTGGVLLKPNSFVSLIQQNAYVIILAIGMVMVIIATHIDLSVGSLVAFIGGVCALLMERAGVNWMLAIVIALVVGLIVGVWQGFWVAVIGIPGFITTLAGMLIFRGLATVIVGESVPITSLEFRGIARNYLPNILGWWGPFDGLTIVLGILCIVGFAWSQLRKRARVAKVGLVPEPMSLTVLKIVLVAVVIAFVTYLLASSGNADQGGTPIMLVIVGVLVFIYNFILTKTVFGRHVYAVGGNRKAAILSGINTRRVDFLLFVHMGFLSAVAAVCMLSRLASATAQAGMEFEMDAIAACFIGGTAVTGGIGTIPGAVIGAFVMGVINQGLSIMGVDTAVVKTIKGLVLLLAVAVDIISKRKKS

SEQ ID NO: 4918 - DNA, 1239 bp, Brucella suis 1330
  CDS (1)..(1239): transl_table=11
atgaacgatatcaatacgctgcttgatcgtcaggatgtacgggtgcgccacgataaaggcgtttctggcgccatccgcacctttatcgaccgggtcaagtcgggcgatctcggttcattgccggtcattgttggccttctcatcatctggactgttttccagacgttgaacccggttttcctttccagcaacaacctcgtgaacctgctattcgattgctcgaccatcggcgtcatttcgctcggcatcgtctgcgtattgatgctgggtgagatcgacctttcggtcggttccattagtgggctttcttcggctatcatcggtgtattatgggtcaataatggctggccggtgggcgtcgccatcattgcagcactttgcgcaggcgcactggctggcttcctctacgcgctcctctataaccgcttcagcatgccaagcttcatttccacactggctgggctgctcgcagctcttgggcttcagctttacctcctcggcaatacaggctccatcaatctgccttacggttcgtggctggtcagcttcggccagcttctggtaatgccgcgtccgctttcttatgcgctggcgctggtcgcgggacttgcgatctttttcacgggttttcgcgccgcgcagcgccgccgcacggcagggctttccgctccctcggctgcgggcattgcgctcaaagctttggtcatcacgctcattatcggctgtggggtattttatctcaaccagtcgcgcggcgtgccatggatgtttgccctgttcgtggcgctggtgatcgcgatgaactatgcgcttacgcgcaccagatggggccgctgcgtgcaggcggttggcggcaatcgcgaggctgcgcgtcgtgccggcatcaatgtgaatttcatctatgtctcggccttcatggcctgctccacactcgcggctgccggtggtatcatggcggcggcgcgtctggcctcatccagccagcaggcaggcaccggtgacgtcaacctcaatgctatcgcggcagcggttatcggcggtaccagcctattcggcgggcgcggcagcgcgtggtcggccctgctcggtattatcgtcatccagtcgattgcgagcggtttgacgcttctcgatctgtcgtcttcgcttcgctacatgattacgggtgcagtgcttgccatcgccgtgattgtcgattcccttgcccgccgttcgcgccagtcgcacggccgcgcctag

SEQ ID NO: 4919 - protein, 412 aa, Brucella suis 1330
MNDINTLLDRQDVRVRHDKGVSGAIRTFIDRVKSGDLGSLPVIVGLLIIWTVFQTLNPVFLSSNNLVNLLFDCSTIGVISLGIVCVLMLGEIDLSVGSISGLSSAIIGVLWVNNGWPVGVAIIAALCAGALAGFLYALLYNRFSMPSFISTLAGLLAALGLQLYLLGNTGSINLPYGSWLVSFGQLLVMPRPLSYALALVAGLAIFFTGFRAAQRRRTAGLSAPSAAGIALKALVITLIIGCGVFYLNQSRGVPWMFALFVALVIAMNYALTRTRWGRCVQAVGGNREAARRAGINVNFIYVSAFMACSTLAAAGGIMAAARLASSSQQAGTGDVNLNAIAAAVIGGTSLFGGRGSAWSALLGIIVIQSIASGLTLLDLSSSLRYMITGAVLAIAVIVDSLARRSRQSHGRA

SEQ ID NO: 4920 - DNA, 1191 bp, Brucella suis 1330
  CDS (1)..(1191): transl_table=11
atgagcgagaatgtaatccagagcggccagcagagcagcgtggggcgctatctcaagaacaatctgcgtgaatccgggatgctgctttcgctcgttgcaatcatgatcttcttccagatcgtgaccggcggcgttctcatgaagccgctgaacctcaccaatctcgttttgcagaacagctatatcgtcatcatggcgcttggaatgctgctcatcatcgtcacgggccatatcgatctttcggtcggttcggtctgcggctttatcggggcgctcgctgccgtcatgatggtaaagctcggcattccctttcccattgcggccattctctgcctcattgtcggcgggttgatcggcgcgatccagggtttttgggtcgcctatttcaatatcccctccttcattgtgacattggccggtatgctcgtgttcaaggggctgatgcttgccgttctgggcggacagtcggtcggaccttttccggtcgtgttccagaagctctcgtcgggcttcattccagaggtgatcggcacgtttgacggcgtttatctcacctcgctcatcatcggcgttctgcttgcggttttcctcatctggcagagcatgcggtcgcgcgcgcgccatattgcccatgaggtggagaccgagcccttcggccttttcgtggtcaagtgcatcctctatttcgtcgcaattgcctatctttcgctgctcatttcctcacatcgcggtatgccgaacgtactcatcatcatggcggtgctgattgccgcctatgcgtttctcaccaatcgcaccgtgatcggccgccagatctatgcggtgggcggcaatcgtcacgccgccaagctttccggcgtgaaaaccgagcggctgacgtttctcaccttcgtcaatatgggtgtgctggcagcacttgcgggtctcgtcttcgccgcccgtctcaatacggcgacgccgaaagctggcatcggctttgaactggacgtcatcgcggcctgcttcatcggtggcgcttcggcctatggcggtgtggggcgggttacgggtgccgtgatcggcgcgctcatcatgggcgtgatgaacaacggcatgtcgatcctcggcatcggtatcgactatcagcaggtcatcaagggtatcgtgctgctgggggcggtttgtatcgacgtttataaccagaaacgctga

SEQ ID NO: 4921 - protein, 396 aa, Brucella suis 1330
MSENVIQSGQQSSVGRYLKNNLRESGMLLSLVAIMIFFQIVTGGVLMKPLNLTNLVLQNSYIVIMALGMLLIIVTGHIDLSVGSVCGFIGALAAVMMVKLGIPFPIAAILCLIVGGLIGAIQGFWVAYFNIPSFIVTLAGMLVFKGLMLAVLGGQSVGPFPVVFQKLSSGFIPEVIGTFDGVYLTSLIIGVLLAVFLIWQSMRSRARHIAHEVETEPFGLFVVKCILYFVAIAYLSLLISSHRGMPNVLIIMAVLIAAYAFLTNRTVIGRQIYAVGGNRHAAKLSGVKTERLTFLTFVNMGVLAALAGLVFAARLNTATPKAGIGFELDVIAACFIGGASAYGGVGRVTGAVIGALIMGVMNNGMSILGIGIDYQQVIKGIVLLGAVCIDVYNQKR

SEQ ID NO: 4922 - DNA, 1170 bp, Brucella suis 1330
  CDS (1)..(1170): transl_table=11
atgacgttgacaggcaaaagcctcagaaaatttctctcagaatacaaaatcgtggcactgctgattgttgtcgccctgatctgggcattcttcgccatcatgacttacgatcccgagatgggccggtcgcagtttctcaccgcgcgcaatttctccaatcttttgcgccagatggcaatcaccggcatgctggcttcagccatggtgtttgtcatcgtggcgggtgaaatcgatctgtcggtgggggctttgctcggcctgttaggcggtgtcgcggcggtgctcgatgtggtttacggctggccgttatgggccactatcgctacggttctggtgctgggtggagtgcttggcggtttcaacggctggctcaccgcctatctcggcattccgtccttcatcgttacgctgggcgggcaattggtgtttcgcggtattgtgctgggtatcatgggcggtgtcaccattgcgccgatttcgcccgagttcaaatatatcgggcaaggctatttgcccggctggcttggcaatgtctgtgccatggcgctgtttacagtgcttgtcctgattacgctcagaacccgttccagcaagcgcaaacacaatttgcaaacgctttcaccggcgatggaaaccgctcgccttctgggcacgggtatcctgatccttggttttatcctggtcctcaacagctatcagggcgtaccggttccggttctcgtgctgctggttattcttggcgtcttcaccgttatttcccgccagactgttttcggccggcatatttatgcggtcggttccaatcctgaagccacgcgcttttccggtgtcaacgtgaatttcgtcaaaatggccgtgtttgcgctgatgggacttatagcggcagtggcgggcctcaccacgactgcacgccttgcggccggtacgccatcggcaggtttgggcggcgaacttgatgccatcgcatcatgctttatcggcggcacatccatgcgcggcggcgtgggatccgtgattggtgcgctggtcggtgcgcttatcatgtcaagcctcgataatggtatgtcgatgctgggcgtcgatacattctggcagcaaatcatcaagggcagtattcttgtgctggccgtttatctcgatatcgtatcatcaggcacacgtcgcgcctga

SEQ ID NO: 4923 - protein, 389 aa, Brucella suis 1330
MTLTGKSLRKFLSEYKIVALLIVVALIWAFFAIMTYDPEMGRSQFLTARNFSNLLRQMAITGMLASAMVFVIVAGEIDLSVGALLGLLGGVAAVLDVVYGWPLWATIATVLVLGGVLGGFNGWLTAYLGIPSFIVTLGGQLVFRGIVLGIMGGVTIAPISPEFKYIGQGYLPGWLGNVCAMALFTVLVLITLRTRSSKRKHNLQTLSPAMETARLLGTGILILGFILVLNSYQGVPVPVLVLLVILGVFTVISRQTVFGRHIYAVGSNPEATRFSGVNVNFVKMAVFALMGLIAAVAGLTTTARLAAGTPSAGLGGELDAIASCFIGGTSMRGGVGSVIGALVGALIMSSLDNGMSMLGVDTFWQQIIKGSILVLAVYLDIVSSGTRRA

SEQ ID NO: 4924 - DNA, 999 bp, Shigella flexneri 2a str. 301
  CDS (1)..(999): transl_table=11
atgtatgcttcgtcattaccattgccgcagggcaagagcgtctcgctcaaacaatttgtcagtcgccatattaatgagatcggtttgctggtggtgattgccattctttatctggtcttctccctgaacgcgcctggctttatctcattgaataaccagatgaacgtgctgcgcgatgccgccaccattgggattgccgcctgggcgatgacgctgattattatctccggtgaaattgatgtcagcgttgggccgatggtggcttttgtctcggtgtgcctggcatttttgctgcaatttgaagttccgttggcgattgcttgtctgctggtgttgctgttaggcgcgctgatgggaacgctcgccggggtgctgcgcggcgtgtttaacgtaccaagtttcgttgccacactggggctgtggagcgctctgcgcggaatggggctgtttatgaccaacgcactgccagtgccgattgacgaaaacgaggtgctggactggctgggcggacaatttctcggtgtgccagtatccgcgctgatcatgatggtgttgtttgcgctgtttgtgttcattagccgaaaaaccgccttcgggcgctcggtttttgccgttggcggtaatgccacggcggcgcagttgtgcggtattaacgttcgtcgagtgcgcattcttatctttaccctttcgggattattagcggcggtgaccggcattttgttggcggcacgcctcggttccggtaacgcaggtgccgcaaacggtctggagtttgacgtcatcgccgcggtcgtggtcggcggtacggcactttccggcggtcgcggttccctgttcggtacattgcttggtgtgctggtgattacgctaatcggtaacggtctggtgctgctcggtattaactcctttttccagcaggtggtacgcggcgtcatcatcgtggtggcggtgctggcgaatatcttgctgacccagcgaagcagtaaagcgaaacgctaa

SEQ ID NO: 4925 - protein, 332 aa, Shigella flexneri 2a str. 301
MYASSLPLPQGKSVSLKQFVSRHINEIGLLVVIAILYLVFSLNAPGFISLNNQMNVLRDAATIGIAAWAMTLIIISGEIDVSVGPMVAFVSVCLAFLLQFEVPLAIACLLVLLLGALMGTLAGVLRGVFNVPSFVATLGLWSALRGMGLFMTNALPVPIDENEVLDWLGGQFLGVPVSALIMMVLFALFVFISRKTAFGRSVFAVGGNATAAQLCGINVRRVRILIFTLSGLLAAVTGILLAARLGSGNAGAANGLEFDVIAAVVVGGTALSGGRGSLFGTLLGVLVITLIGNGLVLLGINSFFQQVVRGVIIVVAVLANILLTQRSSKAKR

SEQ ID NO: 4926 - DNA, 966 bp, Shigella flexneri 2a str. 301
  CDS (1)..(966): transl_table=11
atgataacccagactgtctctggtcgccgttatttcacgaaagcgtggctgatggagcagaaatcgcttatcgctctgctggtgctgatcgcgattgtctcgacgttaagcccgaactttttcaccatcaataacttattcaatattctccagcaaacttcggtgaacgccattatggcggtcgggatgacgctggtgatcctgacgtcgggcatagacttgtcggtaggttctctgttggcgctaaccggcgcagttgctgcatctatcgtcggcattgaagtcaatgcgctggtggctgtcgctgctgctctcacgttaggtgccgcaattggtgcggtaaccggggtgattgtagcgaaaggtcgcgtccaggcgtttatcgctacgctggttatgatgcttttactgcgcggcgtgaccatggtttataccaacggtagcccagtgaataccggctttactgagaacgccgatctgtttggctggtttggtattggtcgtccgctgggcgtaccgacgccagtctggatcatggggattgtcttcctcgcggcctggtacatgctgcatcacacgcgtctggggcgttacatctacgcgctgggcggcaacgaagcggcaacgcgtctttctggtatcaacgtcaataaaatcaaaatcatcgtctattctctttgtggtctgctggcatcgctggccgggatcattgaagtggcgcgtctctcctctgcacaacccacggcggggactggctatgagctggatgctattgctgcggtggttctgggcggtacgagtctggcgggcggaaaaggtcgcattgttgggacgttgatcggcgcattaattcttggcttccttaataatggattgaatttgttaggtgtttcctcctattaccagatgatcgtcaaagcggtggtgattttgctggcggtgctggtagacaacaaaaagcagtaa

SEQ ID NO: 4927 - protein, 321 aa, Shigella flexneri 2a str. 301
MITQTVSGRRYFTKAWLMEQKSLIALLVLIAIVSTLSPNFFTINNLFNILQQTSVNAIMAVGMTLVILTSGIDLSVGSLLALTGAVAASIVGIEVNALVAVAAALTLGAAIGAVTGVIVAKGRVQAFIATLVMMLLLRGVTMVYTNGSPVNTGFTENADLFGWFGIGRPLGVPTPVWIMGIVFLAAWYMLHHTRLGRYIYALGGNEAATRLSGINVNKIKIIVYSLCGLLASLAGIIEVARLSSAQPTAGTGYELDAIAAVVLGGTSLAGGKGRIVGTLIGALILGFLNNGLNLLGVSSYYQMIVKAVVILLAVLVDNKKQ

SEQ ID NO: 4928 - DNA, 942 bp, Streptococcus agalactiae NEM316
  CDS (1)..(942): transl_table=11
gtgaaaaatatgatgaaatatatatcagagttaacaaccctgattgcgttagctggtttaatggttattatcacactcattaatcctaatttcctcacaaccaataatctactcaatttattattacaagtaactgcaaatggttttatcgctttcgggatgaccttcgttattttgactggcggtattgatttatcagtcgggtccatattagccctatctagtgcattaacagctggattaatcggccacggagtacccgttggtattgctatcgttttatctgttgccttaggtggcatcttgggaatgctaaacggactcttcatttcttacggaaaattagcaccatttatcgttacactggcaacaatgactatctttagaggagcaacgctagtttattcaaacggcaacccaattaccgctggcttatccgatagttttctattccaatttttgggacaaggctatattgttggtatcccattcccagtcattctcatgtttcttacttttattattttgtatattttgttacataaaacagccttcgggaaatctgtttacgctttaggaggtaatgaaaaagcagcgtatatctcgggtattaagttaaacaaagttaaaattatcatctacactatctcaggtatcatggcttccatttctgggttaattatcacatcacgccttagctcagcacaaccaacagctggagcaagttatgagatggatgctattgccgccgttgtcttaggtggaacgtctttatctggtgggaaaggacgtatcattggaacattgattggtgctctcattattggtgtcctgaacaatggattaaacatcattggtgtctctgcattttggcaacaagttgtgaaaggtatcgttattttaatggctgttttacttgatcgctttaaagtagcaaaatag

SEQ ID NO: 4929 - protein, 313 aa, Streptococcus agalactiae NEM316
MKNMMKYISELTTLIALAGLMVIITLINPNFLTTNNLLNLLLQVTANGFIAFGMTFVILTGGIDLSVGSILALSSALTAGLIGHGVPVGIAIVLSVALGGILGMLNGLFISYGKLAPFIVTLATMTIFRGATLVYSNGNPITAGLSDSFLFQFLGQGYIVGIPFPVILMFLTFIILYILLHKTAFGKSVYALGGNEKAAYISGIKLNKVKIIIYTISGIMASISGLIITSRLSSAQPTAGASYEMDAIAAVVLGGTSLSGGKGRIIGTLIGALIIGVLNNGLNIIGVSAFWQQVVKGIVILMAVLLDRFKVAK

SEQ ID NO: 4930 - DNA, 999 bp, Escherichia coli CFT073
  CDS (1)..(999): transl_table=11
atgtctgcttcgtcattaccattgccgcagggcaagagcgtctcgctcaaacaatttgtcagtcgccatattaatgagatcggtttgctggtggtgattgccattctttatctggtcttctccctgaatgcgcctggctttatctcattgaataaccagatgaacgtgctgcgcgatgccgccaccattgggatcgccgcctgggcgatgacgctgattattatctccggtgaaattgatgtcagcgttgggccgatggtggcttttgtttcagtgtgcctggcgtttttgctgcaatttgacgttccgctggcgattgcttgtctgctggtgttgctgttaggtgcgctgatgggaacgctcgccggggtgctgcgcggcgtgtttagcgtgccaagttttgttgccacgctgggtttatggagcgccctgcgcggaatggggctgtttatgacgaacgccttgccagtgccaattaacgaaaacgaagtgctggattggctgggcggacaatttctcggtgtgccggtatccgcgctgatcatgatggtgttatttgcgctgtttgtgttcattagccgcaaaactgccttcgggcgctcggtttttgctgttggcggtaatgccactgcagcgcagttgtgcggtattaacgttcgtcgggtacgcattcttatttttaccctttcgggattattagcggcggtgaccggcattttgttggcggcccgcctcggttccggtaacgcaggtgccgcaaacggtctggagtttgacgtcatcgccgcggtcgtggtcggcggtacggcgctttccggcggtcgcggctcgttgttcggtacgctgcttggcgtactggtgattacgctaatcggtaacggtctggtgctgctcgggattaactcctttttccagcaggtggtgcgcggcgtcatcatcgtggtggcggtgctggcgaatatcttgctgacccagcgtagcagtaaagcgaaacgctaa

SEQ ID NO: 4931 - protein, 332 aa, Escherichia coli CFT073
MSASSLPLPQGKSVSLKQFVSRHINEIGLLVVIAILYLVFSLNAPGFISLNNQMNVLRDAATIGIAAWAMTLIIISGEIDVSVGPMVAFVSVCLAFLLQFDVPLAIACLLVLLLGALMGTLAGVLRGVFSVPSFVATLGLWSALRGMGLFMTNALPVPINENEVLDWLGGQFLGVPVSALIMMVLFALFVFISRKTAFGRSVFAVGGNATAAQLCGINVRRVRILIFTLSGLLAAVTGILLAARLGSGNAGAANGLEFDVIAAVVVGGTALSGGRGSLFGTLLGVLVITLIGNGLVLLGINSFFQQVVRGVIIVVAVLANILLTQRSSKAKR

SEQ ID NO: 4932 - DNA, 990 bp, Escherichia coli CFT073
  CDS (1)..(990): transl_table=11
atgacagagaaaactcttgccagtccgaaaccttcggaaattcccattgcaaataattttaaaaaagtcttcaggcaatatggtggtatcctcagtggaatggtggtgttaatcattctgttcagttttattaatgacagtttttttaccgccaataacattactaatattattcttcaggtttcgataattgcaattaccgcctatggaatgacttatgtgcttttgcttggcgatattgatttatcggtcggttcaaccattgcattgattggcacatttgctgcgcttggggcttcatggggaattccatttgttttattggtcccattatccattattgcagcactggctttggggatgataaatggtggcttgacggctatagcggggatcccttcgtttattgtcaccgttgctactatggggatcttccgtggtatcgcttatatagtgaccgatggtatgcccatcatgattaaagatgatgcttttctggcgctggggaatggagaatttctctatatacctattcctatatggatattaatcatcttattgctgataaaccacttcattcttactaaaacaacctttggacgaaaaatttatatcactggtggtaataaagaagcggcaatttattcagggataaatgtcacccgcttgaaaattaaagtctttatgattacagccgtgctggcaggtatcagcgggatgatccttgcctcacgcctctattccgggcaaccgaattccgcgttgagctacgaactggatgctattgccgcggctgtactgggaggcaccagcctgaatggcggctatggaaccgtggtggggacggtgatcggcgcattaaccatcggcgttattaataatggcatgaacttaatgaatgttccttatttttaccagatggtggttaaaggattagtcattcttgtagccgtttattttgacgtaagaaataaaagaaaacgcagctaa

SEQ ID NO: 4933 - protein, 329 aa, Escherichia coli CFT073
MTEKTLASPKPSEIPIANNFKKVFRQYGGILSGMVVLIILFSFINDSFFTANNITNIILQVSIIAITAYGMTYVLLLGDIDLSVGSTIALIGTFAALGASWGIPFVLLVPLSIIAALALGMINGGLTAIAGIPSFIVTVATMGIFRGIAYIVTDGMPIMIKDDAFLALGNGEFLYIPIPIWILIILLLINHFILTKTTFGRKIYITGGNKEAAIYSGINVTRLKIKVFMITAVLAGISGMILASRLYSGQPNSALSYELDAIAAAVLGGTSLNGGYGTVVGTVIGALTIGVINNGMNLMNVPYFYQMVVKGLVILVAVYFDVRNKRKRS

SEQ ID NO: 4934 - DNA, 987 bp, Vibrio vulnificus CMCP6
  CDS (1)..(987): transl_table=11
atgagtagtgaaatcatgagcaaaagaaaatcaaatgagacaaacaaaacttggatcagtaaagagtggctcattgagcagaaatcgctcatcgcgttacttttcctcatcgtggtggtctcttttctcaatccaaactttttcaccgtagacaacattctcaacattcttcgtcaaacctcggtgaacgcgatcatcgccgtggggatgaccttggttattctgactgcgggcatcgatttgagtgtggggtcggtgttggccctatgtggcgcgtttgctgctagccttgtcgcgatggaagtcccggtattcatcgcggtgccaaccgcgctgttagcgggggcaacgttgggggccattagcggcattattatcgccaaaggcaaagttcaagcctttatcgccacactggtgacgatgaccttgctgcgtggtgtcaccatggtgtataccgatggccgtcctatctctacgggttttaccgatactgccgatgcgtttgcttggtttggcactggctatgcgctaggcattccggtaccggtttggttgatggtggtggtgtttgcggccgcttggtatctgcttaatcacacccgctttggtcgctatgtgtatgcactgggtgggaacgagtctgccactcgtctatccggtatcaacgtcgacaaagtcaaaatcggtgtttacgcgatttgcggcctacttgctgctttggcaggcatcatcgtcacatcacgtctatcttcggctcaaccaacggcagggatgggctatgagcttgatgcgattgccgccgtggtgcttggtggtaccagtttaatgggtggtaaaggacggattatgggtacgttgattggtgcgttaatcatcggtttcctaaacaacgcgctgaacttactcgatgtttcttcttactaccaaatgatcgccaaagctgctgttattttgctggcggtaatggtggataacaaaaataaatga

SEQ ID NO: 4935 - protein, 328 aa, Vibrio vulnificus CMCP6
MSSEIMSKRKSNETNKTWISKEWLIEQKSLIALLFLIVVVSFLNPNFFTVDNILNILRQTSVNAIIAVGMTLVILTAGIDLSVGSVLALCGAFAASLVAMEVPVFIAVPTALLAGATLGAISGIIIAKGKVQAFIATLVTMTLLRGVTMVYTDGRPISTGFTDTADAFAWFGTGYALGIPVPVWLMVVVFAAAWYLLNHTRFGRYVYALGGNESATRLSGINVDKVKIGVYAICGLLAALAGIIVTSRLSSAQPTAGMGYELDAIAAVVLGGTSLMGGKGRIMGTLIGALIIGFLNNALNLLDVSSYYQMIAKAAVILLAVMVDNKNK

SEQ ID NO: 4936 - DNA, 978 bp, Bradyrhizobium japonicum USDA 110
  CDS (1)..(978): transl_table=11
atgaccgacatcaccaaggaggcgatcgtgccgccccgctccttcctgtcgcaggacgcgatccaggtgttctatcgcctgctcgcagctttgctgatctgcgccgtgctggccgtgctcagcgattccttcctgagcctcggcaacatcctcaatgtgctgaggcaggcgagcctgaccttcttcatcgcctccggcctgacgctggtggtgctgaccgcgggcctcgatctctccgtcggcgccaatgtcgcgctgtcggcctgtatcgccggaaccgtgatccacaagaccggctcgccggcactcggcatcctcaccggccttgcctgcggcggcatcgtcggccttctcaacggtgtcatggtcaccgcgctgcgcatcccctccttcatcgcgacctatggcatgctctgggtgctgaacggcctgacctactggtacatggcgggcgagacccttcacggttttccggcaggcttccgccagatcggcagcggctatctgttcggcctgccgatcccggtctacctgctgctggtcttcctcggcatcggaacgctgtttgcccagcgcacgatctggggccaggagatctacgcgatcggcgccaatccggtcgcggcgcggctctccggcattccggtcgcgcggcgcctgctgctggtctatgccgtctccggcaccatggcggggctcgcctcgatcatcttcctgtcgcggctcaattcggccgaggccgacatcggcgagagcctgacgctaccggcaatcgcggccgtgctgatcggcggcacctcgctgttcggcggtgtcggcaccgtgttcggcaccttcatcggcgcgttgatcctgacgctggtgctgaacggcatgaacctgctctcggtcagcgccaactggcagccgctcgtcaccggcgtcatcgtcatcctcgcggtctggctcgacatgaagacccgccgccgcgcgcaatga

SEQ ID NO: 4937 - protein, 325 aa, Bradyrhizobium japonicum USDA 110
MTDITKEAIVPPRSFLSQDAIQVFYRLLAALLICAVLAVLSDSFLSLGNILNVLRQASLTFFIASGLTLVVLTAGLDLSVGANVALSACIAGTVIHKTGSPALGILTGLACGGIVGLLNGVMVTALRIPSFIATYGMLWVLNGLTYWYMAGETLHGFPAGFRQIGSGYLFGLPIPVYLLLVFLGIGTLFAQRTIWGQEIYAIGANPVAARLSGIPVARRLLLVYAVSGTMAGLASIIFLSRLNSAEADIGESLTLPAIAAVLIGGTSLFGGVGTVFGTFIGALILTLVLNGMNLLSVSANWQPLVTGVIVILAVWLDMKTRRRAQ

SEQ ID NO: 4938 - DNA, 1191 bp, Bradyrhizobium japonicum USDA 110
  CDS (1)..(1191): transl_table=11
atgaccgacaagacggtttcgctgcccgaggagcgccggcacggcagcttcatcaagaataatttgcgcaattacggcatgctgatgtcgctgatcgcgatcatgctgttcttccaggtcatgaccggcggcacgctgctccagccgctcaatttgaccaacctggtgctccagaacagctacatcgtcatcatggcgctcggcatgctgctggtgatcgtcaccggccatatcgacctctcggtcggttcggtcgcgggcttcgtcggcgcggtggccgccgtgctgatggtgacctacaaggtcgactacacgctggccttcatcgcctgcctgctgctgggcgccgcgatcggcgcggcgcagggctattgggtggcctatttcaagatcccgtccttcatcgtgacgctggccggcatgctcgtgttcaagggtcttgcgcttgcggtgttgcagggccagtcgctcgggccgttcccggcgaccttccagaaactgtcctcgggcttcattccggagatcctgcccgaggccggcacgctgcatccgacctccatgctgatcggcgccgtgctcgcgctcggcctcgtttatgtcagcgccaagggccggtcgcgcgagcagtcgcacggcatcgaggtcgagccttatgccttcttcctcggcaagagcattttgctggcctgcgccgtgctctacttcacctatctgatcgcctcgcatcgcggcctgcccaacgtgctggtgatcatgggcgcgctgatcgcgctctacggcttcgtcacccgtcgcaccgtgatcgggcggcagatctacgcggtcggtggcaatgccaaggcggcaagcctgtcgggcatcaagaccgagcggctgaccttcctcaccttcgtcaacatgggcgtgctggccgcgctcgccggcctcgtcttcgccgcgcgtctcaacaccgcgacgccgaaggcgggcctgggcttcgagctcgacgtcatcgccgcctgcttcatcggcggcgcctcggcctatggcggcgtgggccgcgtcggcggcgccgtggtcggcgccatgatcatgggcgtgatgaacaacggcatgtccatcctcggcatcggcatcgactatcagcaggtcatcaagggcctggtgctgctgggagcggtgtgcatcgacgtgtataatcagcggcggtga

SEQ ID NO: 4939 - protein, 396 aa, Bradyrhizobium japonicum USDA 110
MTDKTVSLPEERRHGSFIKNNLRNYGMLMSLIAIMLFFQVMTGGTLLQPLNLTNLVLQNSYIVIMALGMLLVIVTGHIDLSVGSVAGFVGAVAAVLMVTYKVDYTLAFIACLLLGAAIGAAQGYWVAYFKIPSFIVTLAGMLVFKGLALAVLQGQSLGPFPATFQKLSSGFIPEILPEAGTLHPTSMLIGAVLALGLVYVSAKGRSREQSHGIEVEPYAFFLGKSILLACAVLYFTYLIASHRGLPNVLVIMGALIALYGFVTRRTVIGRQIYAVGGNAKAASLSGIKTERLTFLTFVNMGVLAALAGLVFAARLNTATPKAGLGFELDVIAACFIGGASAYGGVGRVGGAVVGAMIMGVMNNGMSILGIGIDYQQVIKGLVLLGAVCIDVYNQRR

SEQ ID NO: 4940 - DNA, 987 bp, Clostridium tetani E88
  CDS (1)..(987): transl_table=11
gtgataggaggaaaaaatatgactgaattaagcagagaaaataataaagttagtaaaaaggatattatacaaaagtttagtacagttttgattttagtaatgctgatgattgctctaacagttatgaaacctgtttttatgactagaaataatattatgacaatcttacttcaaacagctgttattgcggttatagctataggtgaaactttagtaataataacatctggtatagatctttctgtaggatctttagttgcaatctcaggtgttgctagtgctatttttatgagagatggtatgaatatgatcctagcttgcatgcttggtatacttataagtacagcttgtggattaattaatggatttatagtagctaaaggaaatattccagagtttatagtaacacttggtatgatgagtatagttagaggtgcttcattagttgttacacaaggcttacctgtttcaggattaccagatggctttcaagtattaggtactggaaaattatttggggttattccagttccagcagtgataatgattattttagccatgatttttaccctgatattaagaaaaacacttataggaagatatacttatgctataggaagtaatgaagaagctacaaagctttcaggaataaatacagatagagttaaaattacggtttatggattaagtggattattagcaggaatagctggtatattacttacagcaagacttatatctgcacaaccaacagctgggacaggctatgaattagatgctatagctgcggctgttattggaggagctagtcttgcaggtggagaaggaactataacaggaactataataggggctttaataatgggtgtattaagaaatggacttaaccttttaaatgtttcagcattttggcaacaaatagttataggagctataattatagctgctgtatatggagataagttgaaaaataaaaaattaaattag

SEQ ID NO: 4941 - protein, 328 aa, Clostridium tetani E88
MIGGKNMTELSRENNKVSKKDIIQKFSTVLILVMLMIALTVMKPVFMTRNNIMTILLQTAVIAVIAIGETLVIITSGIDLSVGSLVAISGVASAIFMRDGMNMILACMLGILISTACGLINGFIVAKGNIPEFIVTLGMMSIVRGASLVVTQGLPVSGLPDGFQVLGTGKLFGVIPVPAVIMIILAMIFTLILRKTLIGRYTYAIGSNEEATKLSGINTDRVKITVYGLSGLLAGIAGILLTARLISAQPTAGTGYELDAIAAAVIGGASLAGGEGTITGTIIGALIMGVLRNGLNLLNVSAFWQQIVIGAIIIAAVYGDKLKNKKLN

SEQ ID NO: 4942 - DNA, 951 bp, Clostridium tetani E88
  CDS (1)..(951): transl_table=11
atgaaaggaaataaaatgaacaacaatataaaagaattccttttgaagtttaaatcgttatttggattgatattactatgtataataatttctatattaacaccaagatttttaaatgtatctaacataatgaatgtatttactcaagtatctgttaatgcaatattagctataggaatgtcttttgtaattttaactggaggaattgatttatctgtgggatcaacacttgctataacaggtgccctttctgctagtataataagacttactaatagtatctttttatccttggttgtagctttaataattggagcagcaattggactgatgaatggagtaacagtagctaaaggaaagatacaagcttttatagtaactttagcaactatgactgtatttagaggggttactatggtatatacaaatggtacgccaatatcaggactatctgagaagtttatggtaataggtaataaaaagatattaggatatataccagttccagctataataactataataatacttattatggcatggtatgttttaagtcaaactagatatggaagatatgtttacgctcttggaggtaatgaagattcagctaggctttcaggaataaatacagataaagttaaaatgcttgtgtatgtaatatgtggcatgacagctgctttaagtggtgtaattacaactagcagggtgggaacagcttctccaaatgctggacttggttttgaactggatgctatagcagcagtagtacttggtggaactagtttagctggtggggaaggaacagttgttggaactataataggagctatgataataggtgttttgaataatggattaaacttagcaggagtatcggcatattatcaatctattgtaaaggggttagtaatacttctagctgttttaatagataaaaagagtaaaaaataa

SEQ ID NO: 4943 - protein, 316 aa, Clostridium tetani E88
MKGNKMNNNIKEFLLKFKSLFGLILLCIIISILTPRFLNVSNIMNVFTQVSVNAILAIGMSFVILTGGIDLSVGSTLAITGALSASIIRLTNSIFLSLVVALIIGAAIGLMNGVTVAKGKIQAFIVTLATMTVFRGVTMVYTNGTPISGLSEKFMVIGNKKILGYIPVPAIITIIILIMAWYVLSQTRYGRYVYALGGNEDSARLSGINTDKVKMLVYVICGMTAALSGVITTSRVGTASPNAGLGFELDAIAAVVLGGTSLAGGEGTVVGTIIGAMIIGVLNNGLNLAGVSAYYQSIVKGLVILLAVLIDKKSKK

SEQ ID NO: 4944 - DNA, 1233 bp, Tropheryma whipplei str. Twist
  CDS (1)..(1233): transl_table=11
atggaaataatgaaaattaaacttttttctagtagaaattttgggattcttgttgcagccgttgcggtcgctctgttttttcaggtagcttcaggcggtaggatgctgacaagcgacaatgtgctcaatattgtcaatggaaacagccatatctttattgtgtcgattggcatggtgcttgtaattgtttcgggcaatattgatctttcagttggttctgttgctgcctttgttggaatagttgttgccgttgctaccgatagctttcatttaagcgcatggcaagccattatcctggggctgctaattgggcttgtagtcgggtgttggcaggctttttgggttgcctttgtgggtatcccggcttttattgccactttggctggcatgcttactttcagaggtctcaatcagcttgtgggcaattctcggtcagtacccgtgccagatgattttacttactttggtgccggttatctccccgatatattcactaacactgcgttcaatgtcccgacagttattttgggctttgttgtcttcctgctgttagtgataatgcagatacttcgcaggcgcaacaggaaactacttggcattcagcaagagaatattcccgtatttttactgagaatcgcaatatatgggcttgccgtggcgtatctcacatatctctttgccacaggtcatcccgggacaagcttcccaattcctggtctaatatttgttgttattgcttttatctatgtattcatctccgagagaaccatccttggaaggcatatatatgctgttggcggtaatagaaatgcagccattctctctggtgtcagtgtgaaaagagttaatttctttgtcatggcaaacatgtcaattcttgccagtattgcgggcatgatgtttgttggtcgctctggagggtctggtccatctgatggtgttggatgggaacttgacgcaatagctgctgtatttgtcggcggcgcggccgtcagcggtggtgttgggacagttattggcgcatgccttggtggtgtggttgttgcccttctaagtaacggcttgcttatcatgggtattagtgctgatatagctgcgattatcaagggtttagttttgttggcagctgtttcttttgatgtcgttagtaaaaaccgggaaaaaccgtctataatcagattgtttgtacgacgaagtggactttcgcgggataaggccggtggtcgaggatga

SEQ ID NO: 4945 - protein, 410 aa, Tropheryma whipplei str. Twist
MEIMKIKLFSSRNFGILVAAVAVALFFQVASGGRMLTSDNVLNIVNGNSHIFIVSIGMVLVIVSGNIDLSVGSVAAFVGIVVAVATDSFHLSAWQAIILGLLIGLVVGCWQAFWVAFVGIPAFIATLAGMLTFRGLNQLVGNSRSVPVPDDFTYFGAGYLPDIFTNTAFNVPTVILGFVVFLLLVIMQILRRRNRKLLGIQQENIPVFLLRIAIYGLAVAYLTYLFATGHPGTSFPIPGLIFVVIAFIYVFISERTILGRHIYAVGGNRNAAILSGVSVKRVNFFVMANMSILASIAGMMFVGRSGGSGPSDGVGWELDAIAAVFVGGAAVSGGVGTVIGACLGGVVVALLSNGLLIMGISADIAAIIKGLVLLAAVSFDVVSKNREKPSIIRLFVRRSGLSRDKAGGRG

SEQ ID NO: 4946 - DNA, 1224 bp, Tropheryma whipplei TW08/27
  CDS (1)..(1224): transl_table=11
atgaaaattaaacttttttctagtagaaattttgggattcttgttgcagccgttgcggtcgctctgttttttcaggtagcttcaggcggtaggatgctgacaagcgacaatgtgctcaatattgtcaatggaaacagccatatctttattttgtcgattggcatggtgcttgtaattgtttcgggcaatattgatctttcagttggttctgttgctgcctttgttggaatagttgttgccgttgctaccgatagctttcatttaagcgcatggcaagccattatcctggggctgctaattgggcttgtagtcgggtgttggcaggctttttgggttgcctttgtgggtatcccggcttttattgccactttggctggcatgcttactttcagaggtctcaatcagcttgtgggcaattctcggtcagtacccgtgccagatgattttacttactttggtgccggttatctccccgatatattcactaacactgcgttcaatgtcccgacagttattttgggctttgttgtcttcctgctgttagtgataatgcagatacttcgcaggcgcaacaggaagctacttggcattcagcaagagaatattcccgtatttttactgagaatcgcaatatatgggcttgccgtggcgtatctcacatatctctttgccacaggtcatcccgggacaagcttcccaattcctggtctaatatttgttgttattgcttttatctatgtattcatctccgagagaaccatccttggaaggcatatatatgctgttggcggtaatagaaatgcagccattctctctggtgtcagtgtgaaaagagttaatttctttgtcatggcaaacatgtcaattcttgccagtattgcgggcatgatgtttgttggtcgctctggagggtctggtccatctgatggtgttggatgggaacttgacgcaatagctgctgtatttgtcggcggcgcggccgtcagcggtggtgttgggacagttattggcgcatgccttggtggtgtggttgttgcccttctaagtaacggcttgcttatcatgggtattagtgctgatatagctgcgattatcaagggtttagttttgttggcagctgtttcttttgatgtcgttagtaaaaaccgggaaaaaccgtctataatcagattgtttgtacgacgaagtggactttcgcgggataaggccggtggtcgaggatga

SEQ ID NO: 4947 - protein, 407 aa, Tropheryma whipplei TW08/27
MKIKLFSSRNFGILVAAVAVALFFQVASGGRMLTSDNVLNIVNGNSHIFILSIGMVLVIVSGNIDLSVGSVAAFVGIVVAVATDSFHLSAWQAIILGLLIGLVVGCWQAFWVAFVGIPAFIATLAGMLTFRGLNQLVGNSRSVPVPDDFTYFGAGYLPDIFTNTAFNVPTVILGFVVFLLLVIMQILRRRNRKLLGIQQENIPVFLLRIAIYGLAVAYLTYLFATGHPGTSFPIPGLIFVVIAFIYVFISERTILGRHIYAVGGNRNAAILSGVSVKRVNFFVMANMSILASIAGMMFVGRSGGSGPSDGVGWELDAIAAVFVGGAAVSGGVGTVIGACLGGVVVALLSNGLLIMGISADIAAIIKGLVLLAAVSFDVVSKNREKPSIIRLFVRRSGLSRDKAGGRG

SEQ ID NO: 4948 - DNA, 1005 bp, Pseudomonas syringae pv. tomato str. DC3000
  CDS (1)..(1005): transl_table=11
atggacgccaaagcccctgttcatcaggccgccgcaaaaccgtcaggccgtgtgtggttgctcaagctgctgcccaacaatatcggcgggccattgattggtctggccctgctgttagtcgtcttttctttcagctccgaattcttcttcaccctgcgcaacggcctgaacattcttgatcaggtaacagtgctgggcattctcgccatcggcatgacagcggtgatcgtcatcggcggcattgacctatctgtcggttcggtactggcgttttcgatgatgatgctcggctggctgtatcaggatcaaggcctggcgcttggcctggcgatcccggtagcaatagcaactggcatgctcgcaggcctggtgtccggcttgttgattacctacgcccgactgcccgctttcatcgccacgctgaccatgatgtcggtcgcccgcggcctggcaaacattctcaccgagggccggcagatcgtcggttatccggagtggttcaccagcctggccacggttcgtcatttcggcttcttatcggctacggtcgggctgtttctggtcatgctggtggtggcctgggtattcctgcgctttcgggccggtggtcgcaacctgtatgccattggcggcagccccgaagtggcgcggctttcggggattaaggtgcgcgccatcaccttgtgggtgtacgccatcagcggtgcgctggccggtatagccgccgtgaccatggctgcccgcctcgactcctcgcaacccagcgccgggctgacgctggaactggacgccatcgccgcggtggtgatcggcggtgccagcctcagcggcggtgtcggcagcgtcggcggcacgctggtcggtgtgctgatcatcggcgtgctgcgtaacggcctcaacctgctcggtgtgtcgcccttcattcaacaggtggtcatcggcgtagtgattgcccttgctgtgaccatcgataccttgcgtcgccgttccaacagtgctcattaa

SEQ ID NO: 4949 - protein, 334 aa, Pseudomonas syringae pv. tomato str. DC3000
MDAKAPVHQAAAKPSGRVWLLKLLPNNIGGPLIGLALLLVVFSFSSEFFFTLRNGLNILDQVTVLGILAIGMTAVIVIGGIDLSVGSVLAFSMMMLGWLYQDQGLALGLAIPVAIATGMLAGLVSGLLITYARLPAFIATLTMMSVARGLANILTEGRQIVGYPEWFTSLATVRHFGFLSATVGLFLVMLVVAWVFLRFRAGGRNLYAIGGSPEVARLSGIKVRAITLWVYAISGALAGIAAVTMAARLDSSQPSAGLTLELDAIAAVVIGGASLSGGVGSVGGTLVGVLIIGVLRNGLNLLGVSPFIQQVVIGVVIALAVTIDTLRRRSNSAH

SEQ ID NO: 4950 - DNA, 1137 bp, Pseudomonas syringae pv. tomato str. DC3000
  CDS (1)..(1137): transl_table=11
atgaatcaggtcaaacagttcttcacccgctacaaaatgctcgcgctggtgattgccattgccgttatctggctgtttttcagctggcagacggagggcggatttctgaccccgcgcaacctctccaacctgctgcgacagatgtccatcaccggcattctggcgtgtggcatggtgctggtcatcatcagtggcgagatcgacctgtcggtgggctcgatgctcggcctgctcggcggcctggcggcaattctcgatgtcgtttaccacgtaccgctgctggcaaacctgagcctggttgcgctgtgcgggctgatgatcggcctggccaatggttacatgactgcctacctgcgcattccgtccttcattgtcgggctgggcggcatgctggcctttcgcggcattctgctggggattaccggtggcacgaccatcgctccggtgtcgccttcgctggtctacgtcggccaagggtatttgccgcattctgtcggtacagggcttggcgtactgctgctggcgctgacgctgtttctgacctggaaacaacggcgcaacagagccctccacgggctaacggcccattcgatggttcgcgatgtgttacgcgtggtattgatcggcgcggtgctgggcgggtttgtctacatcctcaacagctacgacgggattccggttccggtgttgctgctgctggttttgctcggtgtgttcagttacgtcaccagccagacagtattcggacggcgcgtctatgccgtgggcagcaacatggaagccacgcggttatccggcatcaacgtacaggcggtgaagctttggatcttcggcatcatgggcgtgatgtgcgccttcgccgggctggtcaacaccgcgcgcctggccgcaggctcgccctcggccggcaacatgggcgaactggacgccattgccgcctgtttcatcggcggcacgtccatgcgcggcggctccggcaccgtgtatggcgccctgcttggcgcactggtgattaccagcctggacaacggcatgtcgatgctcgacgtcgacagttactggcagatgatcgtcaagggcggcatcctcgtgctggcggtgtgggtggacgtcagtacacgggccgggcgccggtga

SEQ ID NO: 4951 - protein, 378 aa, Pseudomonas syringae pv. tomato str. DC3000
MNQVKQFFTRYKMLALVIAIAVIWLFFSWQTEGGFLTPRNLSNLLRQMSITGILACGMVLVIISGEIDLSVGSMLGLLGGLAAILDVVYHVPLLANLSLVALCGLMIGLANGYMTAYLRIPSFIVGLGGMLAFRGILLGITGGTTIAPVSPSLVYVGQGYLPHSVGTGLGVLLLALTLFLTWKQRRNRALHGLTAHSMVRDVLRVVLIGAVLGGFVYILNSYDGIPVPVLLLLVLLGVFSYVTSQTVFGRRVYAVGSNMEATRLSGINVQAVKLWIFGIMGVMCAFAGLVNTARLAAGSPSAGNMGELDAIAACFIGGTSMRGGSGTVYGALLGALVITSLDNGMSMLDVDSYWQMIVKGGILVLAVWVDVSTRAGRR

SEQ ID NO: 4952 - DNA, 1026 bp, Pseudomonas syringae pv. tomato str. DC3000
  CDS (1)..(1026): transl_table=11
atgagcaacgcgattctgcaaaacaagccggccctggcgccgaccggaaaaaaaagaaggctgccgaccgagctgagtatttttctggtgctgatcggtataggcctgatctttgaactgttcggctggatcgttcgcgatcaaagctttctgctcaactcccagcgtttggtactgatgattcttcaggtgtcgatcatcggcctgctcgctatcggcgtcacgcaggtgatcatcaccacgggcatcgacctgtcgtccggctcggtattggcgttgtcggcgatgattgccgcgagtctggcgcagacctcggatttttcccgcgcggtgtttccttcgctgactgacctgcccgtatggattccgatcgtggtcgggctcggggtggggttgctggccggcgccatcaacggcagcatcatcgcgatcaccggcatcccgcccttcatcgccacattgggcatgatggtctctgcacgcggcctggcacgcttctacaccgaaggccagccggtgagcatgctctctgattcctacacggccattggccagggcgcgatgccggtcatcatctttctggtggtggcggtcattttccacattgcgctgcgctacaccaagtacggcaaatatacctacgccattggtggcaacatgcaggcggcgcgcacctcggggatcaacgtcaagcgtcacctgatcattgtctacagcatcgccgggctgctggccggattggcaggcgtggttgcctcggcgcgagccgcaaccggccaggcgggcatgggcatgtcctatgagctggatgcgatcgcggcggcagtcatcggcggcaccagcctggcgggcggcgtcgggcgaattaccggcacggtcatcggtgcgctgattctcggggtaatggccagcggcttcacgtttgttggcgtggacgcctacgttcaggacatcatcaagggtctgatcattgtggcggcggtggtaatcgatcaatatcgcaacaagcgcaagaccaagcgctga

SEQ ID NO: 4953 - protein, 341 aa, Pseudomonas syringae pv. tomato str. DC3000
MSNAILQNKPALAPTGKKRRLPTELSIFLVLIGIGLIFELFGWIVRDQSFLLNSQRLVLMILQVSIIGLLAIGVTQVIITTGIDLSSGSVLALSAMIAASLAQTSDFSRAVFPSLTDLPVWIPIVVGLGVGLLAGAINGSIIAITGIPPFIATLGMMVSARGLARFYTEGQPVSMLSDSYTAIGQGAMPVIIFLVVAVIFHIALRYTKYGKYTYAIGGNMQAARTSGINVKRHLIIVYSIAGLLAGLAGVVASARAATGQAGMGMSYELDAIAAAVIGGTSLAGGVGRITGTVIGALILGVMASGFTFVGVDAYVQDIIKGLIIVAAVVIDQYRNKRKTKR

SEQ ID NO: 4954 - DNA, 984 bp, Vibrio parahaemolyticus RIMD 2210633
  CDS (1)..(984): transl_table=11
atgagtaccaataccatgagcaaaccgaccgaaacaagcagcaaaaagctgtttactaaagagtggttgattgaacaaaaatcactgattgcactgctatttttgattgttgtagtgtcttttttaaacccgaatttttttacggtagacaacattcttaacatccttcgtcaaacctcagttaacgcgatcatcgccgtaggtatgactctggttatcttaactgctggtatcgacttgagtgtcggctctgtccttgcgctttgtggtgcatttgccgcgagcctaatcgcgatggaagtgccagttttaattgcggttccaacggctctattagctggtgcagcactgggcgcaatcagtggcatcatcatcgctaaaggcaaagtgcaagccttcatcgcgacgctggtcaccatgacattactgcgcggagtgaccatggtttacaccgacggtcgaccaatttctactggcttcacagacacggcagacgcattcgcatggtttggtacaggctacgcgttaggtattccagtgccagtttggttgatggttgttgtattcgcagcggcttggtacctacttaatcacactcgctttggtcgctatgtttacgcactaggcggcaatgagtctgcgactcgcctgtctggcattaacgtagaccgagtaaagattggtgtgtacgccatctgcggtatgttagctgcacttgcgggcatcatcgtgacttctcgtctgtcttctgctcagccaacggcgggtatgggatacgaactggatgcgattgcagctgtggtacttggcggtacgagcttgatgggcggtaaaggccgtatcatggggacattgattggtgcgctgatcatcggcttcttgaacaatgcgcttaacctactggacgtttcttcttactaccaaatgattgcaaaagcagtggttatcttgctggcggtattggtagacaacaaaaacaaataa

SEQ ID NO: 4955 - protein, 327 aa, Vibrio parahaemolyticus RIMD 2210633
MSTNTMSKPTETSSKKLFTKEWLIEQKSLIALLFLIVVVSFLNPNFFTVDNILNILRQTSVNAIIAVGMTLVILTAGIDLSVGSVLALCGAFAASLIAMEVPVLIAVPTALLAGAALGAISGIIIAKGKVQAFIATLVTMTLLRGVTMVYTDGRPISTGFTDTADAFAWFGTGYALGIPVPVWLMVVVFAAAWYLLNHTRFGRYVYALGGNESATRLSGINVDRVKIGVYAICGMLAALAGIIVTSRLSSAQPTAGMGYELDAIAAVVLGGTSLMGGKGRIMGTLIGALIIGFLNNALNLLDVSSYYQMIAKAVVILLAVLVDNKNK

SEQ ID NO: 4956 - DNA, 1293 bp, Streptomyces avermitilis MA-4680
  CDS (1)..(1293): transl_table=11
gtgagcatcgaaaagacctccgcgaccgcggaccaggccgccgtcgagaacccggaggcggccgcgggatcggacgtcgccgtcgacccccggctgctcgtgcgcgaacgaggcttcgccggctacatctccgagttcaagcggaagatccgcgccggtgacctgggctccctcccggtcgtcgtcggcttgatcatcatctgggcgatcttcgcgagcctgaactcgaacttcctcaccgcgggcaacctctccgacatctccgtggcgatggtcggtaccggcatgatcgccgtcggcatcgtcttcgtgctgctgctcggcgagatcgacctctccgtcggttccgtcagcggtgtcgcgggcgccgccttcgcggtcctcaacgtcacccacggcatgcccgagtggctggcgctgattctcgccatcctcacgggtacggtcgcgggcgccatccacggcttcgtcttcgcgcgcatcggtgtgccggccttcgccgtcaccctggcgggtctgctgttctggaacggcttcatgctccagatcctcggcagcaacggcacgatcaacctggacagctccggcctggtggccaagctgagcggttactacttcagcgacgtggcggcggcctacggtctcgccgtgttcgccgtggcggtcttcttcctcaccacgttcttcgacaaccgccgccgtgaggccgcgggggtgccgtcccgtccgctgagcgagatcatcgtccgtacggtgctcctcgccgtggtggccttcgccgccgccgccgtcttcaaccagtacaagggcctgccgctggccgtcgtcctgttcctggcggtcctggtgatcacggacttcgtgctgcgccgcaccgcgtacggccgcaagatcttcgcgctcggcggcagcatcgaggcgtcccgccgtgccggtatcaacgtcgccgcggtccgtatctcggtctacgcgatctccggcaccttcgccgccatcggcggtctgttcatcgcctccaagatcgcctcggcgaaccagggtgccggtgccggtgacctcctgatgaacgccatcgcggcggccgtcatcggcggtaccagcctgttcggcggccgcggccgcacctggaacgcgctgctcggtgtgctggtcatcgtctcgatccagtacggcctggcccttcagggcatcgcctcgccggtccagtacatgatcaccggtggtgtactcctcgcgaccgtcgtcatcgacgcggtcacccgcaagacccagaagtcggcgggccgcgcgtaa

SEQ ID NO: 4957 - protein, 430 aa, Streptomyces avermitilis MA-4680
MSIEKTSATADQAAVENPEAAAGSDVAVDPRLLVRERGFAGYISEFKRKIRAGDLGSLPVVVGLIIIWAIFASLNSNFLTAGNLSDISVAMVGTGMIAVGIVFVLLLGEIDLSVGSVSGVAGAAFAVLNVTHGMPEWLALILAILTGTVAGAIHGFVFARIGVPAFAVTLAGLLFWNGFMLQILGSNGTINLDSSGLVAKLSGYYFSDVAAAYGLAVFAVAVFFLTTFFDNRRREAAGVPSRPLSEIIVRTVLLAVVAFAAAAVFNQYKGLPLAVVLFLAVLVITDFVLRRTAYGRKIFALGGSIEASRRAGINVAAVRISVYAISGTFAAIGGLFIASKIASANQGAGAGDLLMNAIAAAVIGGTSLFGGRGRTWNALLGVLVIVSIQYGLALQGIASPVQYMITGGVLLATVVIDAVTRKTQKSAGRA

SEQ ID NO: 4958 - DNA, 1947 bp, Streptomyces avermitilis MA-4680
  CDS (1)..(1947): transl_table=11
gtggccactgacacgctcaagagcacaacgggcgcgagtggcgcctcggcggtccgccggctcctgctcgacaacggggcgctcaccgcgctcatcgtcctcgtcgtcgcgatgtcggcgctgtccggcgacttcctgacgacggacaacctgctcaacatcggcgtccaggcggccgtgaccgccatcctcgccttcggtgtgaccttcgtgatcgtctcggcgggcatcgacctgtcggtcggttcggtcgcggcgctctcggccaccgtccttgcctggacggcgacttcgcacggcctgccggtcgtggtcgccgtggccctcgcggtcgccaccggcgtagcgtgcggtctcgtcaacggcttcctgatctcgtacgggaaactaccgccgttcatcgcgacgctcgccatgctgtcggtgggccgcggtctgtcgctggtgatctcgcagggcagcccgatccccttccccgactcggtctcgcacctcggtgacacgctcggcggctggctgccggtgcccgtcctggtgatgatcgtgatgggtctgatcaccgccctgatcctcggccgtacgtacatcgggcgctccatgtacgcgatcggcggcaacgaggaggccgcgcgcctgtcgggcctgcgggtgaagaagcagaagctcgcgatctacgcgctgtcgggtctgttcgcggccgccgcgggcatcgtgctcgcctcccggctctcctccgcgcagccgcaggccgcacaggggtacgagctggacgcgatcgccgcggtcgtcatcggcggcgcctcgctcgcgggcggtacgggcaaggcgtccgggacgctgatcggcgcgctgatcctggcggtgctgcgcaacgggctgaatctgctgtccgtgtccgcgttctggcagcaggtcgtcatcggtgtcgtgatcgcgctggcggtgctcctcgacacgctgcgccgcaaggccggggcgactccggtggccggtgcctcgagtggcggcaagggcaagcaggcgatgacgtatgtgatcgcggccgtggtcgcggcggccgtcgtgggggcgatgtccttcctgcacaacggctcgtcggcttcgccgacgcagaagatgggcctgtccctctcgaccctcaacaaccccttcttcgtacagatcaagacgggtgcgcaggaggaggcgaagaagcagggcgccgacctgacggtcacggacgcgcagaacgacgcctcgcagcaggccaaccaggtgcagaacttcaccagctcgggcgtcggttcgatcatcgtcaacccggtggactcggacgcggcgggcccggcggtgcgctccgccaacaaggccgacattcccgtcgtgggcgtcgaccggggcgtcaacaaggcggacacggccgcgctggtcgcctccgacaacgtcgcgggcggcaggctgggcgccaaggcgctggccgagaagctgggcggcaagggcaggatcgtgatcctccagggtctggccggcacctccgccagccgtgagcgcggggcgggcttcgccgagggcctgaaggcctaccccggcatcaaggtcgtcgcccggcagcccgcggacttcgaccgcaccaaggggctcgacgtcatgacgaacctgctccaggcgcacccggacgtccagggcgtcttcgccgagaacgacgagatggcgctcggcgcgatcaaggcgctgggtgccaaggccggaaagtcggtctcggtcgtgggcttcgacggcacgccggatgggctgacggcggtcaagtcgggcacgctgtacgcgtccgtggcgcagcagccgaaggagctgggccggatcgcggtgcagaacgcgctgcgggcggccgagggcaagaaggtcgacaagacggtgaaggtgccggtgaaggtggtcacggcgaagaacgtggcggccttcggcggctga

SEQ ID NO: 4959 - protein, 648 aa, Streptomyces avermitilis MA-4680
MATDTLKSTTGASGASAVRRLLLDNGALTALIVLVVAMSALSGDFLTTDNLLNIGVQAAVTAILAFGVTFVIVSAGIDLSVGSVAALSATVLAWTATSHGLPVVVAVALAVATGVACGLVNGFLISYGKLPPFIATLAMLSVGRGLSLVISQGSPIPFPDSVSHLGDTLGGWLPVPVLVMIVMGLITALILGRTYIGRSMYAIGGNEEAARLSGLRVKKQKLAIYALSGLFAAAAGIVLASRLSSAQPQAAQGYELDAIAAVVIGGASLAGGTGKASGTLIGALILAVLRNGLNLLSVSAFWQQVVIGVVIALAVLLDTLRRKAGATPVAGASSGGKGKQAMTYVIAAVVAAAVVGAMSFLHNGSSASPTQKMGLSLSTLNNPFFVQIKTGAQEEAKKQGADLTVTDAQNDASQQANQVQNFTSSGVGSIIVNPVDSDAAGPAVRSANKADIPVVGVDRGVNKADTAALVASDNVAGGRLGAKALAEKLGGKGRIVILQGLAGTSASRERGAGFAEGLKAYPGIKVVARQPADFDRTKGLDVMTNLLQAHPDVQGVFAENDEMALGAIKALGAKAGKSVSVVGFDGTPDGLTAVKSGTLYASVAQQPKELGRIAVQNALRAAEGKKVDKTVKVPVKVVTAKNVAAFGG

SEQ ID NO: 4960 - DNA, 1245 bp, Streptomyces avermitilis MA-4680
  CDS (1)..(1245): transl_table=11
atgagtgccaatgtcacggccaagacaccggccgaagcgtcacccgggggaagtccctccggatccggtcccggcctgctccggctgctggtcgacggcatgcgcagcaacatgcgccagtacggcatgctgatcgccctcggggtgatcgtggccctgttcgcggtgtggacgggtggcgacctgctcctgccgcgcaacgtgtccaacctcgtgctgcagaacagctacatcctgatcctcgcgatcggcatgatgatcgtcatcatcgcgggccacatcgacctgtcggtcggctcgatcaccgccttcgtgggcggtgtggccgcggtgctgatggtcaaccacgacgtgccctggccgctcgcggtgctgctgtgcctggccgtgggagcggccgcgggggccgcgcaggggttcatgatcgcctatctgggcatgccgtcgttcatcgtgacgctcgccggcatgctgatcttccgcggtctgaccgaggtcttcctcaagggccagacgctcggcccgttcccggagggccttcagaaggtcgccaacggcttcctgcccgaggtcggcccgaagaccaactaccacaacctcacgctgctgctcggtctcgcactggtcggcttcgtgatctggcgtgagatgaaggaccgcaagcggcaggcggagtactccctcgaggtgctgcccgccaacctgttcgcggtgaagctcgccctgctgaccgcggcgatcatcgccctcaccatggagctcggcagctacaagggcgcgccggtcgtcctgctggtcctggcggtgctcctggtcggcttcggctacgtcatgcgcaacgtggtggtcggtcgccacgtgtacgcgatcggcggcaacctgccggcggccaggctgtcgggcgtcagggacaagaaggtcaccttcctcgtcttcctcaacatggggatgatggccgcgctcgcgggcctggtcttcgcggcgcggttcaacggagcctcgccgaaggccggcgtcaacttcgaactcgaggccatcgccgcgtcgttcatcggcggtgcctcgatgagcggcggcgtgggcaccatcctcggcgccatcatcggcggcctggtcctcggtgtgctcaacaacggcatgaacctcgtcggcgtcggcaccgactggcagggggtcatcaagggcctcgtgctgctcgcggcggtcggcttcgacgtgtggaacaagcgcaaggtcggttcgtaa

SEQ ID NO: 4961 - protein, 414 aa, Streptomyces avermitilis MA-4680
MSANVTAKTPAEASPGGSPSGSGPGLLRLLVDGMRSNMRQYGMLIALGVIVALFAVWTGGDLLLPRNVSNLVLQNSYILILAIGMMIVIIAGHIDLSVGSITAFVGGVAAVLMVNHDVPWPLAVLLCLAVGAAAGAAQGFMIAYLGMPSFIVTLAGMLIFRGLTEVFLKGQTLGPFPEGLQKVANGFLPEVGPKTNYHNLTLLLGLALVGFVIWREMKDRKRQAEYSLEVLPANLFAVKLALLTAAIIALTMELGSYKGAPVVLLVLAVLLVGFGYVMRNVVVGRHVYAIGGNLPAARLSGVRDKKVTFLVFLNMGMMAALAGLVFAARFNGASPKAGVNFELEAIAASFIGGASMSGGVGTILGAIIGGLVLGVLNNGMNLVGVGTDWQGVIKGLVLLAAVGFDVWNKRKVGS

SEQ ID NO: 4962 - DNA, 972 bp, Rhodopirellula baltica SH 1
  CDS (1)..(972): transl_table=11
atgttagaaaacaaacgcgaacacctcgcgaaatttcaatcgctgatcgcgttggcagtgatgctgatcgcgatgagctttctgtcagacagtttcttcacgcccgagaatgggttgaacattctgagacaaatttcagtcaatctcagcctttcgattgggatgacattgatcatcttgaccggcggaatcgacttgtcggtcggtgccattctcgctttgtccggcgccgtggcggcagggttgctgaagaacggcatcatgctcgaaccgcttggtgtgaagctggagttcaccgttttcggagcgattgtttctggattgttggtcggttccgccgcagggttgttcaatggagtcgcggtgactcgtttcaagcttccgccgtttgtcgccacgctgggaatgttcagcatcgctcgtggtttgacgatgttgtggacgggcgggttcccggtcacgggtctcggttcatcgttcggttccatcggcacgggcgtgttcctgcaaattccggttccggtttggatcaccggtgcattggttggcgtgtttgtgctgttgacccggacaactcgttttggccggcatgtgtacgcggttggcggcaacgaacgcgcttcgttgttgacaggattgccagtcgatcggatcaaaatcgcggtttacacgctcggtggtttgctcgctggagtggcgggactcatcgtgaccgctcgactggattcggctcaacccaacgcagggttgggctacgaactcgattcgattgccgccgtcgtgattggtggcacatccctgtcgggcggacgaggcagcgtcatggggacggtgctgggttgcctgatcattggtgtgttgaacaacagtttgtttctgttaaacgtttcccctttttggcaacaagtggtcaagggattcgtgatcctggccgccgtcgccgtggaccgcatgagtcaaagggaccgataa

SEQ ID NO: 4963 - protein, 323 aa, Rhodopirellula baltica SH 1
MLENKREHLAKFQSLIALAVMLIAMSFLSDSFFTPENGLNILRQISVNLSLSIGMTLIILTGGIDLSVGAILALSGAVAAGLLKNGIMLEPLGVKLEFTVFGAIVSGLLVGSAAGLFNGVAVTRFKLPPFVATLGMFSIARGLTMLWTGGFPVTGLGSSFGSIGTGVFLQIPVPVWITGALVGVFVLLTRTTRFGRHVYAVGGNERASLLTGLPVDRIKIAVYTLGGLLAGVAGLIVTARLDSAQPNAGLGYELDSIAAVVIGGTSLSGGRGSVMGTVLGCLIIGVLNNSLFLLNVSPFWQQVVKGFVILAAVAVDRMSQRDR

SEQ ID NO: 4964 - DNA, 939 bp, Chromobacterium violaceum ATCC 12472
  CDS (1)..(939): transl_table=11
atgaccccgcaacagaaagccaatttgcaacgcctcggccccttcatcgccctggtgctggtggccgtcggcctgtccgtgatgagtccggacttcctcaccgtcaacaacctgctgaacgtgatgcgccaggtgtcgatcaacgcgctgatcgccttcggcatgacgctggtgatcctgctgggcggcattgacctgtcggtcggctccatcctggcgctgtcctcggtgctgaccgccaccctgttgcgcgcaggcgtggatccgatgctggcgacgctgctgggcatcctggccggcgcggcgatgggcctgttcaacggcctggtggtcagcaagggcaaggtggcgccgttcatcgccacgctggcgtcgatgaccatcctgcgcggcctggcgctggtgttttccaacggcagcccgatcaccggcttcgacagcgagctgttctccatgctgggcggcggctatgtcgccggcctggtcccggtgccggtggtgtggatgctgatcctgttcgccggcttctggttcctgctgaagaagacggtgttcggccgccacctgtacgccaccggcggcaacgaggaggcggcgcggctgtccggcgtcaaggtggacagcgtcaagctgtgggtgtacaccacctccggcgcgatggcggcgatggccggcgtggtgctgacctcgcgcctcaattcggcgcagccgactgccggcaccggctacgagctggacgcgatcgccgcggtggtgctgggcggcaccagcctcagcggcggccgcggctggattttcggcactctgatcggcgcgctgctgatcggcgtgctcaacaacggcttgaacctgctgggcgtgtcctcgttctaccagcaggtgatcaagggcgcggtgatcctgctggcggtactgctggatcgcagcaacaagaagtga

SEQ ID NO: 4965 - protein, 312 aa, Chromobacterium violaceum ATCC 12472
MTPQQKANLQRLGPFIALVLVAVGLSVMSPDFLTVNNLLNVMRQVSINALIAFGMTLVILLGGIDLSVGSILALSSVLTATLLRAGVDPMLATLLGILAGAAMGLFNGLVVSKGKVAPFIATLASMTILRGLALVFSNGSPITGFDSELFSMLGGGYVAGLVPVPVVWMLILFAGFWFLLKKTVFGRHLYATGGNEEAARLSGVKVDSVKLWVYTTSGAMAAMAGVVLTSRLNSAQPTAGTGYELDAIAAVVLGGTSLSGGRGWIFGTLIGALLIGVLNNGLNLLGVSSFYQQVIKGAVILLAVLLDRSNKK

SEQ ID NO: 4966 - DNA, 981 bp, Gloeobacter violaceus PCC 7421
  CDS (1)..(981): transl_table=11
atgggcgagagcacgtcaaaaaacccaaaactcctcaccctaccggattggttgcgtgaatggctcgcccgccagactgcctacggcccggccatcgccgtactgatcgagatcgtcgtcttcagcgccatcgccccgggcttttttaccctcgagaacttcatcaacatctcgctgcagacggcgattttcggcatcctggcggtcggaatgacactggtgatcctgacgggcggcatcgatctgtcggtgggatcggtggtggcccttgccggggtgagcggggccatggtcgcccaagcgggcgggctcggcatgcccgtggccatcgtggtaggcggtggggtcgggcttttgagcggtctgttggtggcgtactttcgggtggctccgtttgtggtcaccctggccgggctcaccattgcccgcggcctcgcctttttgctcaccggcggccggtcgatcggcggtttgccgcccgacttcaccttctggggccaaaaacagctcggcttactgccgctgccagtgctcgtcttgatggtagtggtgaccggaggatactttttgctcacccgcacagtcttcggccgccagatctacgccatcggcggcaacgccgaggcgagttggctcgcgggagtgccggtgcaaggggtgctggtggcggtctatctcatcaacggcttgctcgcggggctcgcgggcgggatgctcgccgcccggctcggagccggaattcccaatagcggccaactctacgaattggaggtgatcgcagcggtagtggtggggggcaccagtttgagcggcggccgaggaggagtactcggcagtctgctcggggcgctgtttatcggcaccctcggcaacggtctcaatctgctgggcgtcgatccgtacctgcaaaaaatcgtactgggagtggtgatcctggcggctgtgctcgtcgatagcgccggacggcggggacaaagatga

SEQ ID NO: 4967 - protein, 326 aa, Gloeobacter violaceus PCC 7421
MGESTSKNPKLLTLPDWLREWLARQTAYGPAIAVLIEIVVFSAIAPGFFTLENFINISLQTAIFGILAVGMTLVILTGGIDLSVGSVVALAGVSGAMVAQAGGLGMPVAIVVGGGVGLLSGLLVAYFRVAPFVVTLAGLTIARGLAFLLTGGRSIGGLPPDFTFWGQKQLGLLPLPVLVLMVVVTGGYFLLTRTVFGRQIYAIGGNAEASWLAGVPVQGVLVAVYLINGLLAGLAGGMLAARLGAGIPNSGQLYELEVIAAVVVGGTSLSGGRGGVLGSLLGALFIGTLGNGLNLLGVDPYLQKIVLGVVILAAVLVDSAGRRGQR

SEQ ID NO: 4968 - DNA, 987 bp, Vibrio vulnificus YJ016
  CDS (1)..(987): transl_table=11
atgagtagtgaaatcatgagcaaaagaaaatcaaatgagacaaacaaaacttggatcagtaaagagtggctcattgagcagaaatcgctcatcgcgttacttttcctcatcgtggtggtctcttttctcaatccaaactttttcaccgtagacaacattctcaacattcttcgtcaaacttcggtgaacgcgatcatcgctgtggggatgaccttggttattctgaccgcgggcatcgatttgagtgttgggtcggtgttggccttatgtggtgcgtttgctgccagccttgtcgcgatggaagtcccggtattaatcgcagtgccaaccgcgctgttagcgggagcttcgttgggcgctattagcggcgttattattgccaaaggcaaagttcaagcctttatcgccacgctggtgacgatgactctgctgcgtggcgttaccatggtttacaccgatggccgtcctatctctaccggattcactgatacggcagatgcattcgcttggttcggtacaggttatgcgctaggcattccggtaccggtttggttgatggtggtggtgtttgcagccgcttggtatctgcttaatcacacccgctttggtcgctatgtgtatgcactgggtgggaacgagtctgccactcgtctatccggtattaacgtcgacaaagtcaaaatcggtgtttacgcgatttgcggcctacttgctgctttggcaggcatcatcgtcacatcccgtctatcttcggctcaaccaacggcagggatgggctatgagctggatgcgattgccgccgtggtgcttggtggtaccagcttaatgggtggtaaagggcggattatgggcacgttgatcggtgcgttaatcatcggtttcctaaacaacgcgctgaacttactcgatgtttcttcttactaccagatgattgccaaagctgcggtgattttgctggcggtgatggtcgacaacaagaacaagtaa

SEQ ID NO: 4969 - protein, 328 aa, Vibrio vulnificus YJ016
MSSEIMSKRKSNETNKTWISKEWLIEQKSLIALLFLIVVVSFLNPNFFTVDNILNILRQTSVNAIIAVGMTLVILTAGIDLSVGSVLALCGAFAASLVAMEVPVLIAVPTALLAGASLGAISGVIIAKGKVQAFIATLVTMTLLRGVTMVYTDGRPISTGFTDTADAFAWFGTGYALGIPVPVWLMVVVFAAAWYLLNHTRFGRYVYALGGNESATRLSGINVDKVKIGVYAICGLLAALAGIIVTSRLSSAQPTAGMGYELDAIAAVVLGGTSLMGGKGRIMGTLIGALIIGFLNNALNLLDVSSYYQMIAKAAVILLAVMVDNKNK

SEQ ID NO: 4970 - DNA, 1323 bp, Mycoplasma mobile 163K
  CDS (1)..(1323): transl_table=4
ttggaaaggaaaaaaatgaaacaaaatatgtttaataaatttaaacaaaatatttctgattctctaaatatttttacaaacaacattaaaaaaataaaaaaccatattttgaaaatatccttttttatttttattaacaaatatttaaaaataggattaaaacattttaacaagtattcaatgttttatatattagggctgatggtcttagtattttcgacagtttcaataggaaatggcttgactttttttagtccgaatcagtttgttaatttattaagaaataattcgtatatttttataattggtttaccaatgttgctagttattgtaagtggaaatatagatttaagtgttgggaggcttttaggattttctagtgcaattgctttaacactttttaataatgtaactggcggaaacatatttctaacaattattcttactttgttattaggagcaggggttggtattatccaaggtgttatgattggatactatagaattccagcattcattattactctgggggggatgctaatttttcaaggtcttgaattagttttaacaaatggtcaacctttaattgtcgattttgatacaagctttgtacaattttctcaagctccttttcctgattttaatttaggaactactcaaaatcctttttgaattatttcatttttaattttattagtaatcggatctttactagtagcttattcatttcaaagaagatttaaagcaaaaaaatataatttagaagttgaaaatctttttgtatttttgattaaacaattatttgttattggtttattctttgttctggctattttaacagcaatgtcaagaattggattacaattatttatgctttatattttaattttaattattttgtttgtaattttaactaaatatacaaaatttggtagatctatttatgctattggtgggaatagaaaagctgctgaattaagtggtattaatgctaaatttacaacatttgctatttttgtgatcatgggaattataacttcttttgctggtattatttttgcaggtaattttcaagcagctcaaccaaatggaactgcaggatttgaactaaatgtaatttcttcaatattcattggtggagctagtgttgctgggggaattggaacagttattggatccattatgggggcattaataatcgctacaattaatcttggtttagttgtaaatcaagttgaagctgcatttattaatattattacaggtattgttttagctgctgctgtaacttatgatattttctccaaacggaaaattggttaa

SEQ ID NO: 4971 - protein, 440 aa, Mycoplasma mobile 163K
MERKKMKQNMFNKFKQNISDSLNIFTNNIKKIKNHILKISFFIFINKYLKIGLKHFNKYSMFYILGLMVLVFSTVSIGNGLTFFSPNQFVNLLRNNSYIFIIGLPMLLVIVSGNIDLSVGRLLGFSSAIALTLFNNVTGGNIFLTIILTLLLGAGVGIIQGVMIGYYRIPAFIITLGGMLIFQGLELVLTNGQPLIVDFDTSFVQFSQAPFPDFNLGTTQNPFWIISFLILLVIGSLLVAYSFQRRFKAKKYNLEVENLFVFLIKQLFVIGLFFVLAILTAMSRIGLQLFMLYILILIILFVILTKYTKFGRSIYAIGGNRKAAELSGINAKFTTFAIFVIMGIITSFAGIIFAGNFQAAQPNGTAGFELNVISSIFIGGASVAGGIGTVIGSIMGALIIATINLGLVVNQVEAAFINIITGIVLAAAVTYDIFSKRKIG

SEQ ID NO: 4972 - DNA, 969 bp, Erwinia carotovora subsp. atroseptica SCRI1043
  CDS (1)..(969): transl_table=11
atgagttctcaatctatcgcggcaaaacgctggtttagcaaagagtggttactggagcagaaatcgctgatcgcgctcctgatcctgattgcagttgtttccgccctgagccctaactttttcaccctgaataacctgttcaatattcttcagcagacgtcggtgaatgccattatggccgtcggcatgacgctggtgatactgacctcgggaattgatttgtcggtgggttcactgctggcgctgacgggggctgtagcggcatccatcgttgggcttgaagtgaatgcgctggtggctgtgtttggcgcactggcggtgggtgcgctgattggcgcgggcaccggtgtcatcgtttctaaaggtaaagtacaggcgtttatcgccacgctggtcatgatgctgctactgcgcggcgtgacgatggtctataccaacggtagcccggtgaatactggcttctccgacgttgcagatgcttttggttggttcggcattggtcgtccgctgggtattccgacgccaatctggattatggctatcgtattcgctgcggcctggtacatgctgcaccatacgcgcctgggtcgctatatctatgcgttgggcggtaacgaatccgcaacccgtttatccggcatcagcgttgataaaatcaagattattgtttattccctgtgtgggctgctgtctgccctggcgggaattattgaagtcgcacgtttgtcctctgcacagcctacggcgggtacagggtatgagctggatgctatcgcggctgtggtattgggcggcaccagtctggctgggggtaaagggcgtatcgttggcacgttgatcggcgcacttatccttggtttcctcaacaacggactgaatttattaggtgtttcttcttactaccaaatgatcgtcaaagcagtcgtcattttgctggcggttctggtagataacaaaagcagtaaataa

SEQ ID NO: 4973 - protein, 322 aa, Erwinia carotovora subsp. atroseptica SCRI1043
MSSQSIAAKRWFSKEWLLEQKSLIALLILIAVVSALSPNFFTLNNLFNILQQTSVNAIMAVGMTLVILTSGIDLSVGSLLALTGAVAASIVGLEVNALVAVFGALAVGALIGAGTGVIVSKGKVQAFIATLVMMLLLRGVTMVYTNGSPVNTGFSDVADAFGWFGIGRPLGIPTPIWIMAIVFAAAWYMLHHTRLGRYIYALGGNESATRLSGISVDKIKIIVYSLCGLLSALAGIIEVARLSSAQPTAGTGYELDAIAAVVLGGTSLAGGKGRIVGTLIGALILGFLNNGLNLLGVSSYYQMIVKAVVILLAVLVDNKSSK

SEQ ID NO: 4974 - DNA, 1182 bp, Erwinia carotovora subsp. atroseptica SCRI1043
  CDS (1)..(1182): transl_table=11
gtgctgaaaacatcgcagtctgaacaacaacatgtcgccggatctgtctcgatgctgcaacgactgaaaagcatcaatcttcaggtctatgtgatgattgccgccatcatcgcgatcatgctcttcttcacctatatgaccgacggggcgtacctcagcgcgcgtaatctttccaacctgctgaggcaaacggcaattactggcattctggccgtcggtatggtgtttgtcattatctccgccgagatcgatctgtcggtcggatcgatgatggggttattgggcggtgcggcggctatttttgatgtctggtttggctggcctttgccgctgaccattgttgtgacgctcgcgctgggattattgcttggcgcgtggaacggctggtgggttgcctaccggaaagtcccttcttttatcgtgacgctggcggggatgctggcttttcgcggcattttgatcggtattaccaatgggacaacggtttccccgaccagtgaggcgatgtcgcagattgggcaaagctatctgccttctggcatcggttttatgttcggtgctatcgggctgatggtgtttattggctggcagtggcgtcggcgtagtagccgtgctcggttagggttaccgataaatccacccgcaggggatgtcggccgccagacagtgacagcactagtcgtattgggcgcgatctatctgctgaatgactatcgtggcgtgccaacgccggttctggtgctgacgctgttgatgctgggcggtatttttctggcgacgcgaaccgcgtttggtcgtcgtatctatgccgtgggcgggaatatcgatgccgctcgcttatcgggagtgaatgtcgaacgcaccaaaatggcggtgttcgcgattaatggcctgatggtcgcggtcgctgggctgattctcagttcacgattgggggcagggtcgccatctgccgggaatattgccgagctggatgcgattgcggcctgcgtgattggcggaaccagtctggcgggcggtattggcagcgtggcgggcgcggttatgggggcatttatcatggcgtcgctggataacggaatgagcatgttggatgtgccgacgttctggcaatacgtcgtgaaaggcggaatcctgctcttggcggtgtggatggacaccgctaccaagcggcgcgtatga

SEQ ID NO: 4975 - protein, 393 aa, Erwinia carotovora subsp. atroseptica SCRI1043
MLKTSQSEQQHVAGSVSMLQRLKSINLQVYVMIAAIIAIMLFFTYMTDGAYLSARNLSNLLRQTAITGILAVGMVFVIISAEIDLSVGSMMGLLGGAAAIFDVWFGWPLPLTIVVTLALGLLLGAWNGWWVAYRKVPSFIVTLAGMLAFRGILIGITNGTTVSPTSEAMSQIGQSYLPSGIGFMFGAIGLMVFIGWQWRRRSSRARLGLPINPPAGDVGRQTVTALVVLGAIYLLNDYRGVPTPVLVLTLLMLGGIFLATRTAFGRRIYAVGGNIDAARLSGVNVERTKMAVFAINGLMVAVAGLILSSRLGAGSPSAGNIAELDAIAACVIGGTSLAGGIGSVAGAVMGAFIMASLDNGMSMLDVPTFWQYVVKGGILLLAVWMDTATKRRV

SEQ ID NO: 4976 - DNA, 1032 bp, Erwinia carotovora subsp. atroseptica SCRI1043
  CDS (1)..(1032): transl_table=11
atgtcccagcagccgctttctaagacgattacgccgcccaacacgcgtggacgttttgaccccattggcttttttgaacgctttggcgtgtttattttcatgattttgctgctgattttctttcagtcgcagaacagcaactttctgtccgaacgcaacatcaccaacatccttaccgaagtgtccatctacggcatcatggccgtagggatgacgttcgtcattttgaccgctgggatcgacctgtccgtcggctcgattctggcggtatgtgcaatcactgccgcgtcggtgattaaaggcgacaacttcaccaccgtcgatcccgatgcctggtacggcttgagctggctggtcgcgttgggcgtctgtctggcaatgggcacctttattggtttcttgcatggtttaggggtgaccaaactgcgtctgccaccgttcatcgtcacgctgggcgggatgaccatctggcgcggattaacgctggtgatgaacgatggtgcgccgattgcgggctttgaccccggctatcgctggtggggacggggagagatcctcggtatttcggtgccgatctggatcttcgcgctggtcgccttactgggctatctggcgctgcataaaacccgctggggacgctttgtgtacgccatcggtggcaacaccgaagcggcgcgattggctggtgtgaatgtgcagcgtgtactcgtcagcgtctacgtggtgattggctgcctggctggactggcgggctttattctcagcgctcgtctcggcagcgcagaagcggtcgcggggatcaccttcgaactgcgcgtcatcgcctcggtggtgatcggtggcacctcgctgatgggcggctatggccggatcagcggcacgattatcggctcgatcatcatgggaattctgattaacggactggtattgatgaacgtatcggcctattaccagcagattatcaccgggttaattatcgtgctggccgtggcgttcgacacctatgccaagagccgtcgcggcgctatctga

SEQ ID NO: 4977 - protein, 343 aa, Erwinia carotovora subsp. atroseptica SCRI1043
MSQQPLSKTITPPNTRGRFDPIGFFERFGVFIFMILLLIFFQSQNSNFLSERNITNILTEVSIYGIMAVGMTFVILTAGIDLSVGSILAVCAITAASVIKGDNFTTVDPDAWYGLSWLVALGVCLAMGTFIGFLHGLGVTKLRLPPFIVTLGGMTIWRGLTLVMNDGAPIAGFDPGYRWWGRGEILGISVPIWIFALVALLGYLALHKTRWGRFVYAIGGNTEAARLAGVNVQRVLVSVYVVIGCLAGLAGFILSARLGSAEAVAGITFELRVIASVVIGGTSLMGGYGRISGTIIGSIIMGILINGLVLMNVSAYYQQIITGLIIVLAVAFDTYAKSRRGAI

SEQ ID NO: 4978 - DNA, 1098 bp, Erwinia carotovora subsp. atroseptica SCRI1043
  CDS (1)..(1098): transl_table=11
atgaaaacgactcaccttccggcagcgtcgggcgcgctatcaccgggtaagtttgtacgctcacgagagagcatcctgctgttgatcctcaggctgcgcacgttcatcgcgctgttcctgattctggggttctttgctttcacggtgcccgggtttttggcgacaggtagcctgatcatcatggtgaagcacattgctatcaacgcgtttctggcattagggatcacgtttgtcatcattaccgccgggattgacctgtcaatcggagccacgctggggctgtgtggcatggtggcgggttacatgattacgcagggcattgtgctgcccatgttcggcatcgcgattttccccagcgtgtgggtcattgtgcctgtcgtattggtgattggtgcgctcattggtgccatcaacggctggattatcacgcggtataacgttgcgccctttatctgcacgctgggcacgatgtatatcgtgcgtggggcatcaatgctgatttccggtggggaaacgttcccaggcttaggtggtaacccgcagttgggtaataccggctttgagctgattggttccggcacgattttaggattgccgctcgctatctggctgatgttggtactggctctggtgattgcctatgtggcacgtcgcctgccgtttggccgccatgtctatgcgattggcgacaacgagcgtgccgctgagctttccggcgtcaaggttcgtcaggtcaaagtctgggtctacacaatttccggcttctgcgcggctatcgcgggcatcgtggtgtcctctcagttggtcgccagccatccggcgacgggcaccgcttttgaaatgaacgcgattgctgctgtggttctcggcggaacgtcattagcgggcggacgcgggactattctgggtacgctgattggcgcgtttgtcatcgggattcttgccgacgggctggtcatgatgggcgtgagtgaattctggcagatggtgattaaaggcatcgtcattattgtggctgtgattatcgaccagatgcaaaaccgtatgcagcacagggccgcaattgtgtcacagaaggccgcggcggaaggcgcttag

SEQ ID NO: 4979 - protein, 365 aa, Erwinia carotovora subsp. atroseptica SCRI1043
MKTTHLPAASGALSPGKFVRSRESILLLILRLRTFIALFLILGFFAFTVPGFLATGSLIIMVKHIAINAFLALGITFVIITAGIDLSIGATLGLCGMVAGYMITQGIVLPMFGIAIFPSVWVIVPVVLVIGALIGAINGWIITRYNVAPFICTLGTMYIVRGASMLISGGETFPGLGGNPQLGNTGFELIGSGTILGLPLAIWLMLVLALVIAYVARRLPFGRHVYAIGDNERAAELSGVKVRQVKVWVYTISGFCAAIAGIVVSSQLVASHPATGTAFEMNAIAAVVLGGTSLAGGRGTILGTLIGAFVIGILADGLVMMGVSEFWQMVIKGIVIIVAVIIDQMQNRMQHRAAIVSQKAAAEGA

SEQ ID NO: 4980 - DNA, 978 bp, Propionibacterium acnes KPA171202
  CDS (1)..(978): transl_table=11
gtgactactacatcaaccgctactacgcaaagaccgtcagttggcaggaaagttggttcctggtcccttaatcacggtgctctcgtaggccttattattctctgtattgctctgtttattgcgactccagtattcctcactgtgccgaatatcattaatatcggaatccaagccgcggtggtggcgattatggccttcggtatgaccttcgtcatcgttacctccggcattgatttgtctgtgggttcggtcgcagctctttcagccatggtctcagcatggatgttctctaacgctggtctgccaagctggctcacccttatcatcggcctgctaatcggactgcttgctggagctgtttccggtctggccatcgcctatggcaagttgcctgcctttatcgccacgctggccatgatgagcgtcgcacgcggactaactcttgttatctctggcggcacccccgtcgccacctctgacgcagtgaaccagctgggtgctgatgttgggccaattccggtgcctgtcatcatgctcgccctagccggtgtggtgtgctggttcatgctgtcgcgtacggtgctggggcgttctctctatgccattggtggtaacgaagaggctgctcgtctctccggtattccggtgcgtcgcatcctcgtcactgtctacgctctggccggtgtttttgctggcctagctggtctggtgttggctggtcggctctcctcagcccagcctcaggcggggttcgggtatgagcttgatgccattgcagctgtcgttattggtggagcctcattgtcaggaggttctggaaaggcaagcggcacttttattggtgctgttttactagccgttattcgtaacggtcttaatattcttaacgtttcctcgttctggcagcaggttgttatcggctgcgttatcgcgctggctgtcggattcgatgtcttcaggtctaagaaagaatcctga

SEQ ID NO: 4981 - protein, 325 aa, Propionibacterium acnes KPA171202
MTTTSTATTQRPSVGRKVGSWSLNHGALVGLIILCIALFIATPVFLTVPNIINIGIQAAVVAIMAFGMTFVIVTSGIDLSVGSVAALSAMVSAWMFSNAGLPSWLTLIIGLLIGLLAGAVSGLAIAYGKLPAFIATLAMMSVARGLTLVISGGTPVATSDAVNQLGADVGPIPVPVIMLALAGVVCWFMLSRTVLGRSLYAIGGNEEAARLSGIPVRRILVTVYALAGVFAGLAGLVLAGRLSSAQPQAGFGYELDAIAAVVIGGASLSGGSGKASGTFIGAVLLAVIRNGLNILNVSSFWQQVVIGCVIALAVGFDVFRSKKES

SEQ ID NO: 4982 - DNA, 1350 bp, Leifsonia xyli subsp. xyli str. CTCB07
  CDS (1)..(1350): transl_table=11
atgagcacacagatccccgcgaagaagaagtcgggcggtatccgcgacctgggcaagatgttcggcggcgggcagtcgactggacggcagttcggcatcctgggcgcgctcgtcgtcatcgtcgtcctgttccagatcctgacggacgggaagacgctcgacccggtcaacctcatcaacctggtcaaccagaacgcgtacgtgctgatcctggcgatcggcatggtcatggtgatcatcgccgggcacatcgacctgtcggtgggctcggtcgcggcggcggtcggcatcgtcgtggccaaggcgatgaccgagtggcacgtaccgtggcctctcgccgtcctgctcggtctcgtcatcggcgtggccatcggcgcgtggcagggctggtgggtggcttacatcggcgtgcccgcgttcatcgtgacgctggccggcatgctgatcttccgcggcctgaaccagctgatcggcagcgcgaacaccatcccggtgccggacggcttcaccttcatcggcggcggtttcctccccgagtggggaccggacaccggctacaacaactccacactgctgctcggcctgatcatcgccatcgtcatcgtgctgcttgagatgcgcacccgccgtacgcagaccaaaatgggctccgacaaggctccgctctgggtgagcacgttcaaggtcatagtgctggacgccctggtcgtctacttcaccttcctcttcgcgggaggtcgcgtcggcacctcgttcccggtctccggcatcatcctgggcgtcctgatcatcgtctactcgttcgtcacgcgcagcacgatcttcggccggcacatctacgcggtcggtggcaactcgcacgctgcggaactgtcgggtgtgaagatcaagcgcgtcaacttcttcgtgatgatgaacatgtcggtgctcgccgcgctcgccggaatgatcgccgtcgcccgctcggtctcctccggcccgcaggacggcctcggctgggagctcgacgcgatcgccgctgtgttcatcggtggtgccgcggtctccggcggcatcggcaccgtcgccggttctatcgtcggtggtctcgtgatcgccgtcctgaacaacggccttcagctgcttggcgtcacgagcgactgggtgcaggtcatcaagggcctcgtgctgctgatcgcggtcggtgtcgacgtctactcgaaccgccgtggcggtccatcgctcatcggccggctcttcggcggcggtcgccgccctgagtctgcgacggacgctgtcggcatcgaccagcccgccgtcctcccgacctccagcgccgccgaagagtcgtcgcgctcgctcacgaactga

SEQ ID NO: 4983 - protein, 449 aa, Leifsonia xyli subsp. xyli str. CTCB07
MSTQIPAKKKSGGIRDLGKMFGGGQSTGRQFGILGALVVIVVLFQILTDGKTLDPVNLINLVNQNAYVLILAIGMVMVIIAGHIDLSVGSVAAAVGIVVAKAMTEWHVPWPLAVLLGLVIGVAIGAWQGWWVAYIGVPAFIVTLAGMLIFRGLNQLIGSANTIPVPDGFTFIGGGFLPEWGPDTGYNNSTLLLGLIIAIVIVLLEMRTRRTQTKMGSDKAPLWVSTFKVIVLDALVVYFTFLFAGGRVGTSFPVSGIILGVLIIVYSFVTRSTIFGRHIYAVGGNSHAAELSGVKIKRVNFFVMMNMSVLAALAGMIAVARSVSSGPQDGLGWELDAIAAVFIGGAAVSGGIGTVAGSIVGGLVIAVLNNGLQLLGVTSDWVQVIKGLVLLIAVGVDVYSNRRGGPSLIGRLFGGGRRPESATDAVGIDQPAVLPTSSAAEESSRSLTN

SEQ ID NO: 4984 - DNA, 1128 bp, Yersinia pseudotuberculosis IP 32953
  CDS (1)..(1128): transl_table=11
atgatgaaagcaacaactggcacggcgttggcgagtcacctgcccggtggagcgtcatggtcacgggaaaatatgctgctgcttctgttaaagatgcgcacctttattgccctgtttctgatcctgggtttcttttcaatcatggtccctgggttcttagccacggggagtttgatcatcatggtgaagcatattgcgattaatgccttcctcgcattaggcatcacctttgtcattatcaccgcaggtatcgatctctccatcggcgcgacgctggggctgtgcggcatgattgccggttggatgatcacccaaggcattgtcttgccgatgtttggcatcgctatcttccccagtgtttgggttgtggttccggtggtgttagttatcggggcactcattggtgcggttaatggctggatcattactcgctacaacgtcgccccgtttatttgcacccttggcaccatgtatgtggtgcgaggggcctcgatgttgatctctggtggcgaaaccttccccggcttacaaggcaatccgcaactggggaataccggttttgacctgctgggatcgggaacgctactggggttgccgatcgccatctggattatgttcattctggcgctggtgattgcttacgttgcccgccgccttccgtttggccgccatgtttatgccatcggggataacgaacgcgctgctgaactttctggtgtcaaagtgcgtcaggtgaaagtctgggtttacaccctatccggcttctgtgccgcgatagcggggattatcgtgtctgcccaattggttgccagccacccggccaatggcagtggcttcgaaatgaatgctatcgccgctgttgttctgggcgggacatcgctggcaggcgggcgggggaccattcttggtacgctgattggcgcttttgttatcggcatcttggctgatgggctggtgatgatgggcatcagtgaattctggcaaatggtgatcaaaggcatcgtgattatcgtggccgtgattatcgatcagatgcaaaaccggatgcagcacaaggcggcgattgtgtcgcaaaaagtgaccgccatcccctctgacatcacctctcaggcggtaaaaagtgagtag

SEQ ID NO: 4985 - protein, 375 aa, Yersinia pseudotuberculosis IP 32953
MMKATTGTALASHLPGGASWSRENMLLLLLKMRTFIALFLILGFFSIMVPGFLATGSLIIMVKHIAINAFLALGITFVIITAGIDLSIGATLGLCGMIAGWMITQGIVLPMFGIAIFPSVWVVVPVVLVIGALIGAVNGWIITRYNVAPFICTLGTMYVVRGASMLISGGETFPGLQGNPQLGNTGFDLLGSGTLLGLPIAIWIMFILALVIAYVARRLPFGRHVYAIGDNERAAELSGVKVRQVKVWVYTLSGFCAAIAGIIVSAQLVASHPANGSGFEMNAIAAVVLGGTSLAGGRGTILGTLIGAFVIGILADGLVMMGISEFWQMVIKGIVIIVAVIIDQMQNRMQHKAAIVSQKVTAIPSDITSQAVKSE

SEQ ID NO: 4986 - DNA, 1029 bp, Yersinia pseudotuberculosis IP 32953
  CDS (1)..(1029): transl_table=11
atgctacagccgctttccaagccccaggcatcggtaaaaagcgcgatgcgttttgacccgatcactttttttgaacgcttcggcgtcctgatttttatgttcctgctgctgattttcttccaattgcagaacagtaattttctctcagaacgcaatattttcaacatcctaactgaggtatccatctacggcatcatggccgtgggcatgaccttcgttatcctgaccgcgggtattgatctttccgtcggctcaattcttgcggtgtccgccatgacagccgcttatgtgattaaaggcgataactttaccaccattgaccccaacgcttggggcggcatgagttggctaattggcctcagtatttgtctggcaatgggcacccttattggttttttgcagggcttgggggtcacgcgtctgcgtctgccgccctttattgtcaccctgggtgggatgaccatctggcgtggcctgacgttggtgattaacgacggtgcccctatcgccgggtttgatgcaggctaccgctggtgggggcgcggggacttactcggtatttcaatacccatttggatttttgccattgtcgcgatagccggttatctggcgctgcacaaaacccgctgggggcgtttcgtctatgcgattggcggtaatcctgaagcggcacgtttggcgggagttaatgtgaaacgcgtgctggtcagcgtctacgtggtgatcggctgccttgccgggttggcgggtttcatcctaagcgcccggctgggcagtgctgaagcggtagccgggatctcgtttgaattgcgggtgattgcctcggtggtgattggcggcacttcactgatgggcggctacgggcgtatcggcggcaccattattggctccatcatcatggggatcttgattaacggtttggtgctgatgaatgtttcggcttactaccagcaaattatcaccggcctgatcatcgtattggcggtggcctttgatacctacgccaagaaccgtcgcggcgcgctgtaa

SEQ ID NO: 4987 - protein, 342 aa, Yersinia pseudotuberculosis IP 32953
MLQPLSKPQASVKSAMRFDPITFFERFGVLIFMFLLLIFFQLQNSNFLSERNIFNILTEVSIYGIMAVGMTFVILTAGIDLSVGSILAVSAMTAAYVIKGDNFTTIDPNAWGGMSWLIGLSICLAMGTLIGFLQGLGVTRLRLPPFIVTLGGMTIWRGLTLVINDGAPIAGFDAGYRWWGRGDLLGISIPIWIFAIVAIAGYLALHKTRWGRFVYAIGGNPEAARLAGVNVKRVLVSVYVVIGCLAGLAGFILSARLGSAEAVAGISFELRVIASVVIGGTSLMGGYGRIGGTIIGSIIMGILINGLVLMNVSAYYQQIITGLIIVLAVAFDTYAKNRRGAL

SEQ ID NO: 4988 - DNA, 1062 bp, Yersinia pseudotuberculosis IP 32953
  CDS (1)..(1062): transl_table=11
atgaacgagagaacccaaatgctgcatacggcacgctctacaccggccaaaagcgctgataagccgcgttatctgaagctttcgcgcttattactggaagggcgcgccttctttgcattattggtcattattgccgtgttttcactcctctcacccaactacttttctggcgcaaatttcctgacgatggcctcacatgtggcgatatttggcctcccggcgattggaatgctactggttattcttaatggtggaatcgatctttctgttggttcgacattgggtctgtctggcgtattcgcgggttttttaatgcaaggcatcagcattgagtcacttggcgtagtgctttatttgccggtctgggcggtggtaattatgaccctggcgctgggcgcattggttgggcttatcaatggcatcttgatcgccatttttcgggtacctgcttttgtggcaacactcggttcactctatgtagcacgtggcgcggcactgctgatgaccaatggcttaacctacaacaaactcgcgggtagccccgagctaggtaataccggttttgactggttgggatttaatcgcctctttaatattccgattggcgtgctggctctgggcgtcgtggcactggcctgtggatttttactgatgcgtaccgcatttggtcgctggttgtatgcctcgggaggcaatgagcgtgccgcggatctctcgggtgttccggttaaattcgtcaaaatcagcgtttatgttctctccggggtttgtgcggcactggccgggttggtgctctcttcgcagttaacctccgcaggcccgacagcgggcaccacgtatgagttgaccgccattgcggcggtggtgattggcggtgcggcgctgaccggagggcgtggcaacgttcgaggcacactacttggggcttttgttattggctttctttccgatggcttggtgattattggcgtatccgcctattggcagaccgtatttactggtgcggtgattgttatggcggtattgctcaatacgttgcagtacggccgacgaagtaaataa

SEQ ID NO: 4989 - protein, 353 aa, Yersinia pseudotuberculosis IP 32953
MNERTQMLHTARSTPAKSADKPRYLKLSRLLLEGRAFFALLVIIAVFSLLSPNYFSGANFLTMASHVAIFGLPAIGMLLVILNGGIDLSVGSTLGLSGVFAGFLMQGISIESLGVVLYLPVWAVVIMTLALGALVGLINGILIAIFRVPAFVATLGSLYVARGAALLMTNGLTYNKLAGSPELGNTGFDWLGFNRLFNIPIGVLALGVVALACGFLLMRTAFGRWLYASGGNERAADLSGVPVKFVKISVYVLSGVCAALAGLVLSSQLTSAGPTAGTTYELTAIAAVVIGGAALTGGRGNVRGTLLGAFVIGFLSDGLVIIGVSAYWQTVFTGAVIVMAVLLNTLQYGRRSK

SEQ ID NO: 4990 - DNA, 993 bp, Yersinia pseudotuberculosis IP 32953
  CDS (1)..(993): transl_table=11
atgatcagaactgaacactcttcttctacgcaagagagcggtagcactctccatcgccataaacgttgggaaaaattattacatcacccggccatgttgccatttattggttttgttgtgctctttgtcttaatgagtgggttaaatgacagttttttgaccgtaaataacctcactaacgtggcgcggcaggtgtcgattaatgccattatcgcggtaggcatgacttgcgcgatcttgaccggggggatcgatctttcggttgggccagtcatggcgttgtcagggtctattgctgccgggctgatgctggccggtattcctattccgttagccatgatggccgctctgttagtcggtgccttatttgggctggcgaatgggagttgtattgcttatctgcggatgccgcctatcatcgtgacgctggcctctatggggatcgcccgtggtttggcgttgttgtacaccggggggtaccccatctccggtttacctgacatgttttcattctttggccgaggtacggtactgggtattcaagtccccattctgatcatggccggtgtttatctgttcgcttggatcatgctcaaccatttatcgtttggtcgctatatttatgctatcggtggcaacgaagaagcggcgcgtttgagtggtatccgtgtgtcgcgctataaaatgctggtatatgtggtcagtggcctgacagccgcgttggccgggctggtactgacttcgcggctaatgagtgggcaacctaatgcgggcgaagggtttgaactggacgctatcgccgccgttgttttgggcggtgcggcaatctccggaggcaagggggcgattattggtacgttggtaggggcgatgatgttgggggtgttgaataatggcctcaacctgatgagcgtatcgccttatatccagaatgtcgtgaaaggcggcattattcttgcggcgatctatctcagttccgttcggcgcaaataa

SEQ ID NO: 4991 - protein, 330 aa, Yersinia pseudotuberculosis IP 32953
MIRTEHSSSTQESGSTLHRHKRWEKLLHHPAMLPFIGFVVLFVLMSGLNDSFLTVNNLTNVARQVSINAIIAVGMTCAILTGGIDLSVGPVMALSGSIAAGLMLAGIPIPLAMMAALLVGALFGLANGSCIAYLRMPPIIVTLASMGIARGLALLYTGGYPISGLPDMFSFFGRGTVLGIQVPILIMAGVYLFAWIMLNHLSFGRYIYAIGGNEEAARLSGIRVSRYKMLVYVVSGLTAALAGLVLTSRLMSGQPNAGEGFELDAIAAVVLGGAAISGGKGAIIGTLVGAMMLGVLNNGLNLMSVSPYIQNVVKGGIILAAIYLSSVRRK

SEQ ID NO: 4992 - DNA, 1029 bp, Yersinia pseudotuberculosis IP 32953
  CDS (1)..(1029): transl_table=11
atgagcgattccccccccttggtaatgtctctgacacggaccagtaaattcaggaaggccattcatcaatacgggatcatacttgcctttgttggcttgtgtgcggtcattgctctggctggtgaatttgcagtaaacagcgggacatggagcgagaattattttttatcacgggataatacactcattattctacgccaggtctcgatcaacggcatcctggccattgggatgacgttcgttattatcaccgcgggtgttgatctctccgttggcgcggttttaggcttggccggtattgtcgccgcgcgttttgcgacgaataacagtgccatcgccttgggggggaccgattggccactgttagtacccatcgtgattgccattggcatcggtttagtctgcggcgctatcaatggctttatcttaggcaaatatcgtctgcaaccctttattgtcacaatggggatgttatctgtcgcccgtggcctgacattactgactactggcggaaacccggtatcacaattaaccgatgaattccgttggttaggtaacggttatattttgggtattcccgtaccggtgttgatctttattattctgttcgccattgcctggtttgtcttgaataagatgacgtttggccgttacgtctacgcggtgggcgggaatgaaaaaagtgcccgcacatccgggatcaacgtattacgtattaaagtggcggtatataccctttgcggtattttggcggcgatcgcgggtttaattttaaccgcacgtactggctcggcacaaactggcgctggcgtatcctatgaattggatgctatcgcggcggtcgttattggcggcaccagtatggctggcggtattggaactctgcgcggaaccttatttggtgtgctgataataggtgtgatgaacaatgggcttgatttactcggcgtacaatcctattaccagcaaattatcaaaggtgttctgattgtctttgctgtcatgcttgacccatcccgtaagcaataa

SEQ ID NO: 4993 - protein, 342 aa, Yersinia pseudotuberculosis IP 32953
MSDSPPLVMSLTRTSKFRKAIHQYGIILAFVGLCAVIALAGEFAVNSGTWSENYFLSRDNTLIILRQVSINGILAIGMTFVIITAGVDLSVGAVLGLAGIVAARFATNNSAIALGGTDWPLLVPIVIAIGIGLVCGAINGFILGKYRLQPFIVTMGMLSVARGLTLLTTGGNPVSQLTDEFRWLGNGYILGIPVPVLIFIILFAIAWFVLNKMTFGRYVYAVGGNEKSARTSGINVLRIKVAVYTLCGILAAIAGLILTARTGSAQTGAGVSYELDAIAAVVIGGTSMAGGIGTLRGTLFGVLIIGVMNNGLDLLGVQSYYQQIIKGVLIVFAVMLDPSRKQ

SEQ ID NO: 4994 - DNA, 993 bp, Yersinia pseudotuberculosis IP 32953
  CDS (1)..(993): transl_table=11
atgactaactcaggcacgccgcagcaggtggcaaaatctgcctcgctgaaaaaagcgttttttagcgatttactgcaaaccgtgggtattttaccgattctggtgttgattgtggcggtattcgggtttctcgccccaaatttctttaccgaatctaacctacttaatatcgcccggcagtcatccataaatatcgtcctcgcggcgggaatgaccttcattattctgaccggaggtatcgacctttccgtggggtcaattctcgggactacggcagttaccgccatggcagtttcgctgatgcccggctgggaaggtctttctattccggcggcgctattaatgggtaccggtcttgggctgtttaacggcatgttggtggcatgggctggactgccgccatttattgttaccctcggcacatacacggcgctgcgtggtgtggcctacttactggctgatggcaccactattatcaactcgaacattaattttgagtggataggcaatgcttatctcggcccggtcccgtggctggtggttatcgccctactggtggttgccgtgtgctggtttattttacgccgcactacccttggcgttcacatatatgcggtgggcggcaatatgcaggcggcgcgcttgaccggcattaaagtgtggatggtgctgctgtttgtctatggcatgagcgggttgctgtccggactcggcggcgtcatgagtgcatcgcgactttacagcgctaacggcaatcttggtatgggctatgaattggacgccatcgcggcggttatcctcggggggaccagttttgttggtggagtaggcaccatcacaggcacgctggttggtgctctgattatcgccaccctcaataacggcatgacgctaatgggggtctcttatttctggcaattggtgatcaaaggggcggtgatcatcatagcggtgctgatagacaaataccgtacccgtcaccataactcataa

SEQ ID NO: 4995 - protein, 330 aa, Yersinia pseudotuberculosis IP 32953
MTNSGTPQQVAKSASLKKAFFSDLLQTVGILPILVLIVAVFGFLAPNFFTESNLLNIARQSSINIVLAAGMTFIILTGGIDLSVGSILGTTAVTAMAVSLMPGWEGLSIPAALLMGTGLGLFNGMLVAWAGLPPFIVTLGTYTALRGVAYLLADGTTIINSNINFEWIGNAYLGPVPWLVVIALLVVAVCWFILRRTTLGVHIYAVGGNMQAARLTGIKVWMVLLFVYGMSGLLSGLGGVMSASRLYSANGNLGMGYELDAIAAVILGGTSFVGGVGTITGTLVGALIIATLNNGMTLMGVSYFWQLVIKGAVIIIAVLIDKYRTRHHNS

SEQ ID NO: 4996 - DNA, 1212 bp, Bacillus licheniformis ATCC 14580
  CDS (1)..(1212): transl_table=11
atgcagacaccggtgcaaacggataaagaccgcgctcagcccggctactttcagctgtttcgcgatatgtataagcagaatatccggaaatacagcatggtcattgcgctcgtgtttattatgctgctgtttcaaatattgacagacggaattttgctgagaccgctgaacattacgaacctgattttgcaaaacagctacattctcattttagcgattgggatgatgctcgtcatcatcacgggacacattgatctatcagtcggttcagtcgccgcttttgtcggcgccgtctccgcgatgatgatcattgaaaacgatatgccgctgtttgcggcggtcgtcctgtcgttgcttctgggagcggcaatcggcgcctggcagggtttttggatcgcttatgtcaagattccggccttcatcgtgacgctggcgggaatgcttttgttcagagggctcacgatgatcgtgctggaggggaaatcgatcgctccgtttcctgtgtccttccaaaaaatggcgtccggttttattccggactggctgaacggaggcacgttccatttgacgacgattgtcgccggagcgggtgtgtcgattctttatctcgtatatcagcttcagcagagaaacatgcagaagaaattccaatttgacttgcagggaaaaggtctgtttacagttaaggtgttttttatcatcgccattatcaacctttttacctacattctcgcgacttatgaaggtatacctctcattttgatcacattgttcgtcttaatcgccgggtatacattcgttatgaaaaaaaccgtcatcgggcggagaatctacgcgatcggcggcaatgaaaaagcagccgagctttcaggaatcaaaacaaaacggctcacctttatggtcttcgtcaatatgggcgtcttagcagccctttcaggcttgatttttgccgcccgtctaaacgcggccactccgaaagcaggaaacctgtttgaacttgacgccattgcggcctgcttcatcggcggggcttcggcttacggcggtatcggcacgatcggcggggccatcatcggcggtcttgtcatgggagtcatgaacaacggtatgtcgctgctcggcctgggcatcgactggcagcaggcgataaaaggcctcgtccttctgattgccgttgcatttgatatttacaataagaataaaacttcttaa

SEQ ID NO: 4997 - protein, 403 aa, Bacillus licheniformis ATCC 14580
MQTPVQTDKDRAQPGYFQLFRDMYKQNIRKYSMVIALVFIMLLFQILTDGILLRPLNITNLILQNSYILILAIGMMLVIITGHIDLSVGSVAAFVGAVSAMMIIENDMPLFAAVVLSLLLGAAIGAWQGFWIAYVKIPAFIVTLAGMLLFRGLTMIVLEGKSIAPFPVSFQKMASGFIPDWLNGGTFHLTTIVAGAGVSILYLVYQLQQRNMQKKFQFDLQGKGLFTVKVFFIIAIINLFTYILATYEGIPLILITLFVLIAGYTFVMKKTVIGRRIYAIGGNEKAAELSGIKTKRLTFMVFVNMGVLAALSGLIFAARLNAATPKAGNLFELDAIAACFIGGASAYGGIGTIGGAIIGGLVMGVMNNGMSLLGLGIDWQQAIKGLVLLIAVAFDIYNKNKTS

SEQ ID NO: 4998 - DNA, 963 bp, Bacillus licheniformis ATCC 14580
  CDS (1)..(963): transl_table=11
atgaaaactcaaccggctgtgaaaaaaagccttaatgttgattctgtaatgcaaaagctcggtccgtttctcggcctgatcattctcgtcgtcatcgtatcattgttaaatccgagctttttagaaccgttaaatattttaaacttgttaagacaagtcgccattaatgcgctgatcgcgtttggcatgacctttgtcattttaaccggcggcatcgatctttccgtcggagcgattttggcgctgtcaagcgcattgatcgccggaatgatcgccggcggcatcgatcctgttttcgccgtcatcatcggctgcctgatcggagccctgctcggcttggtcaacgggctgttaatcacgaaaggtaaaatggccccgttcatcgcaacacttgccacaatgacgattttccgcggattgacgatggtttatacagacggcaatccgattacagggctcggcaaccactacggcttccagcttttcggacgcggttactttttaggcatccccgtccctgcgattacaatggcagccgcctttatcatcctctgggtgatccttcacaaaacgcctttcggccgccgcacatatgcaatcggcggaaatgaaaaagcggccttgatctcgggcattaaagttccgcgcgtcaaaatgatgatttattctcttgcaggcctattatccgcgttggctggagccatcttgacgtcacggctaaactcagcccagccgacggcaggcacttcctatgaactcgacgccatagccgcagtcgtattaggcggcacaagccttgccggaggaagaggacgaattgccggcacactcatcggcgtcctgatcatcggaacgttgaataacggcttgaacctgcttggcgtctcttcctttttccaaatggtcgtcaaaggtgtcgtcattttgatcgcagtcctgctggaccgcaagaaatccgcttaa

SEQ ID NO: 4999 - protein, 320 aa, Bacillus licheniformis ATCC 14580
MKTQPAVKKSLNVDSVMQKLGPFLGLIILVVIVSLLNPSFLEPLNILNLLRQVAINALIAFGMTFVILTGGIDLSVGAILALSSALIAGMIAGGIDPVFAVIIGCLIGALLGLVNGLLITKGKMAPFIATLATMTIFRGLTMVYTDGNPITGLGNHYGFQLFGRGYFLGIPVPAITMAAAFIILWVILHKTPFGRRTYAIGGNEKAALISGIKVPRVKMMIYSLAGLLSALAGAILTSRLNSAQPTAGTSYELDAIAAVVLGGTSLAGGRGRIAGTLIGVLIIGTLNNGLNLLGVSSFFQMVVKGVVILIAVLLDRKKSA

SEQ ID NO: 5000 - DNA, 1029 bp, Mannheimia succiniciproducens MBEL55E
  CDS (1)..(1029): transl_table=11
atgttttcatttaaaaaattaatatccaaactgggaatcggattagtcttgttatttatgattataggcatgtctctgacctctcaggcgtttttatccaccaataatatcttcaatattttattgcaggtttccgtcatttgcgtgatttccgtggggatgacctacgttattctcaccggcggaatcgatttgtccgtaggttccatcgtggcgttaagtgcggtttgtctggggctgtttacccattggggagtggcatggcttggcgaaaatccgtcacaaggcgcattgctggctgtggtgttactgtccattgttggagccgttctggtcggtgccttatgcggctatgtgaacggcgtggtgattgtatacggcaaagttacctcgtttatcaccaccctcggtatgatggggatcgcacgcggcctggcgttaaccttatccgacggtaaaaccatttataatttccccgaacaactgcgttttttcggtaacggacgtcttgcggtgacggaaaatttcagtattccgattccggtgattatcgcccttatcgtcgtcttaatcagtttctatgtgttaactcaaaccgtgttcggtcgccagatttacgccctcggcggtaatcgcgaagcggtacggttgtccggtattaacgtgaataagttggaaatcaaaacctatgtgattaacggcgccttggcggccgtcggcgcggttattctggtggggcgtttaaacgccgcacaacctattgccggtacgggttatgagctggatgccattgccgcaacggtaatcggcggtaccagtctgatgggcggtgtgggttcggtggtcagcacctctatcggggcgcttattatgggggttctgcaaaacggtttgaccctattgaacgtaacctcttatctgcaacgcttgattatcggtatggtaattattcttgcggtattcctcgaccaattacgacgcggcgaagtatctaccggcggtttgagacgtattttcttcagagaataa

SEQ ID NO: 5001 - protein, 342 aa, Mannheimia succiniciproducens MBEL55E
MFSFKKLISKLGIGLVLLFMIIGMSLTSQAFLSTNNIFNILLQVSVICVISVGMTYVILTGGIDLSVGSIVALSAVCLGLFTHWGVAWLGENPSQGALLAVVLLSIVGAVLVGALCGYVNGVVIVYGKVTSFITTLGMMGIARGLALTLSDGKTIYNFPEQLRFFGNGRLAVTENFSIPIPVIIALIVVLISFYVLTQTVFGRQIYALGGNREAVRLSGINVNKLEIKTYVINGALAAVGAVILVGRLNAAQPIAGTGYELDAIAATVIGGTSLMGGVGSVVSTSIGALIMGVLQNGLTLLNVTSYLQRLIIGMVIILAVFLDQLRRGEVSTGGLRRIFFRE

SEQ ID NO: 5002 - DNA, 1005 bp, Burkholderia mallei ATCC 23344
  CDS (1)..(1005): transl_table=11
atgcatgaccggacggccgcgccgtctgcctcttgcgcgcccgccgccgcgagccccgctcgggccacgggccccgcgctcgccgcgctgcggcgctcgacgacgttctacccgctcgtcgggctcgtcgccgtgtgcgtcgcgatggtgttcgcgagcgacagcttcctgagcgcggcgaacctcgagaacgtgctgcggcaggtgtcgatcaacgcgatcatcggcgtcgggatgacctgcgtgatcctgacgggcggcatcgacctgtcggtcggctcggtgatggcgctgtccggcacgctcgcggcgggccttctcgtcgcgggcgcgaacggcgcggcggcgcttgccgcgggcatcggcgtcggggtcgcgctcggcgcggcgaacggcctgttcgtcgcgttcgccggcatgccgcccatcatcgtcacgctcgcgacgatgggcatcgcgcgcggcctcgcgctcatctacacgggcggctacccgatcgacgggctgcccgactgggtccgcttcttcggcagcggcaaggtgctcggcgtgcaaatgcccgtgctgacgatgctcgcggtctacgcgctcgcgtggctgatgctcgagcgcatgccgttcggccgctacgtctacgcgatcggcggcaacgagcacgcgacgcggctctcgggcgtgcgcgtgtcgcgcgtgaagctggccgtctatacgttcgcggggctcacgtccgcgctcgccgcgctcgtgctgacgggccgcctgatgagcgggcagccgaacgcggggggcggcttcgagctcgacgcgatcgccgccgtcgtgatgggcggcacgtcgatcgcgggcggccgcggctcgatcgtcggcacgcttgtcggcgcgctgctgctcggcgtgctgaacaacggcctgaacatgatcggcgtgaatccctacgtgcagaacgtgatcaagggcgccatcatcctgctcgcgatctacatcggccgcgagcgccgcacgtga

SEQ ID NO: 5003 - protein, 334 aa, Burkholderia mallei ATCC 23344
MHDRTAAPSASCAPAAASPARATGPALAALRRSTTFYPLVGLVAVCVAMVFASDSFLSAANLENVLRQVSINAIIGVGMTCVILTGGIDLSVGSVMALSGTLAAGLLVAGANGAAALAAGIGVGVALGAANGLFVAFAGMPPIIVTLATMGIARGLALIYTGGYPIDGLPDWVRFFGSGKVLGVQMPVLTMLAVYALAWLMLERMPFGRYVYAIGGNEHATRLSGVRVSRVKLAVYTFAGLTSALAALVLTGRLMSGQPNAGGGFELDAIAAVVMGGTSIAGGRGSIVGTLVGALLLGVLNNGLNMIGVNPYVQNVIKGAIILLAIYIGRERRT

SEQ ID NO: 5004 - DNA, 978 bp, Burkholderia pseudomallei K96243
  CDS (1)..(978): transl_table=11
atgaacactcagaccctgtcccgtctcgacgcggcgcccaggcgcgtgaacgtcgcggagctcgcgagccgcttcggcatcccgatcgtcttcgtcgcgctgtgcgtcgtgctcgcgttcgcgagcccgtacttcctcacctggcgcaactggagcgacatcctgcgccagacgtcgatcaacggcattctcgcgatcggcatgacgtacgtgatcctgaccaagggcatcgacctgtcggtgggctcggtgctcgcgctcgcgggcatcgtgagcggcctcgccggcgcggcggggcacgggctcgcggtgtcgctcgcggccggcgtcgcgtgcggcgcggcgctcggcgcgatcaacggcgtggcgatcgcgcgcttgaacgtgccgccgttcgtcgcgacgctcggcatgctgagcgtcgcgcgcggcgtcacgtacatcgccaacgacggcagcccggtcgcgaacctgcccgacgattacctgtcgctcggcatcggcaggctcggcccgctcggcatgccggtgctgatcttcgcgggcgtcgcgctcgcgtgctggtgggtgctgcgctacacgacatacggccgctatctgtatgcggtcggcggcaacgagaagagtgcgcgcacgtcgggcatcggcgtgcgcaaggtcgtgttctcggtgtacgtcgtctcgggcgcgctcgccggcctcgcggggatgatcctcgccgcgcgcacgacgtccgcgctgccgcaggcgggcgtgtcgtacgagctcgacgcgatcgcggccgtcgtgatcggcggcacgagcctgtcgggcgggcagggcggcgtcgtcggcacgctgttcggcgcgttgttgatcggcgtgatcaacaacgggctgaacctgctcggcgtgtcgtcgtattaccagcagatcgcgaagggactcatcatcgtgctggccgtgctcatcgacgtggcccgcaaacagcagcgctga

SEQ ID NO: 5005 - protein, 325 aa, Burkholderia pseudomallei K96243
MNTQTLSRLDAAPRRVNVAELASRFGIPIVFVALCVVLAFASPYFLTWRNWSDILRQTSINGILAIGMTYVILTKGIDLSVGSVLALAGIVSGLAGAAGHGLAVSLAAGVACGAALGAINGVAIARLNVPPFVATLGMLSVARGVTYIANDGSPVANLPDDYLSLGIGRLGPLGMPVLIFAGVALACWWVLRYTTYGRYLYAVGGNEKSARTSGIGVRKVVFSVYVVSGALAGLAGMILAARTTSALPQAGVSYELDAIAAVVIGGTSLSGGQGGVVGTLFGALLIGVINNGLNLLGVSSYYQQIAKGLIIVLAVLIDVARKQQR

SEQ ID NO: 5006 - DNA, 1176 bp, Photobacterium profundum SS9
  CDS (1)..(1176): transl_table=11
atggaacaggtaaaaagtgtggcgactcaaaggccaaaaagtaacctgcgtgaacagctacaaggtgtaaagttgcaattcatcgtaatggcggcagttatcgtcattattatgctgttcttcagcgtgatgacggaatggagttacctgtccccacggaacatttccaatctattcagacaaacagccattaccggtattctttccatcggaatggtgtttgtcatcattagcggtgaaattgatttatctgttggatcgatgatgggtttactagggggcgtggctgctattttagatgtgtggtttggcttacctttgcctttgaccattgtactcacattgatcgctggttttttgcttggtttatggaatggttggtgggtggcttatcgtaaagtgccgtcatttattgtgacgttagctggcatgttggcgtttcgtggcattcttattggcattactgatggcacaactgtggctcctacgtctcaggcaatggggttcattggtcaaagttacctccctagttggtttggcatgctccttggtgtgggtagcttgtccttatatatttattggcagcaacgtcgtagaagtatgaggcagcagtataatttacccgttccgatggcaagtacgtcgttggtgaagcaagcggctgtgggcgtggcggtattaagcattattcttgtgcttaatgattaccgtggcgttccgacgccagtattactgctcgtgaccttcttgatagtcggctcttttattgcgagtaaaactcggcttggtcgacgtgtttacgccattgggggcaatattgaagcaagccgattatcgggtattaatgtagagaaaaccaagttgtctgttttcgctatgagtggttttttggtggcggtagctgcattaattttaagcagtcgcttaggggcgggttcgccatcggctggtaatattgccgaactggatgccattgctgcctgtgttattggtggcacgagtatggcggggggggttggtaccgttattggtgcggtgatcggtgcatttatcatggcatcgttggataatggcatgagtatgatggatgtgcctaccttctggcaatatattgttaaaggtggaattttactgttagcagtgtggatggatagtgcgacaaaagcccgacgctaa

SEQ ID NO: 5007 - protein, 391 aa, Photobacterium profundum SS9
MEQVKSVATQRPKSNLREQLQGVKLQFIVMAAVIVIIMLFFSVMTEWSYLSPRNISNLFRQTAITGILSIGMVFVIISGEIDLSVGSMMGLLGGVAAILDVWFGLPLPLTIVLTLIAGFLLGLWNGWWVAYRKVPSFIVTLAGMLAFRGILIGITDGTTVAPTSQAMGFIGQSYLPSWFGMLLGVGSLSLYIYWQQRRRSMRQQYNLPVPMASTSLVKQAAVGVAVLSIILVLNDYRGVPTPVLLLVTFLIVGSFIASKTRLGRRVYAIGGNIEASRLSGINVEKTKLSVFAMSGFLVAVAALILSSRLGAGSPSAGNIAELDAIAACVIGGTSMAGGVGTVIGAVIGAFIMASLDNGMSMMDVPTFWQYIVKGGILLLAVWMDSATKARR

SEQ ID NO: 5008 - DNA, 1017 bp, Photobacterium profundum SS9
  CDS (1)..(1017): transl_table=11
atgctagctaaacttcttcaagccacttcagatcaaccgaagggcgcaaatacaaaacgctttatatccaaatacgctatctattttgtctttatcgcaatgtgtattgtgatgagtattttgtctcctgttttcttaacagtggccaacctacttaacgtaatgacacaaatggcaagtattggtctgctggcgcttggcgttaccattatcattattacacgaggtatcgatctttcatctggttctgttctcgctgttgcggccgttgtatctgcaagtaccgcccaatcacttgattggggcatgagaatgtaccctaacctgccagaactacctattattgtgccaattttagtggcacttgccgtcggtgcattatgtggtttgataaacggtgcacttattgcctatacgggtattcctccttttattgccacactaggtatgatgattatcgctcgtggtgctgcactactgtattcagatggtcgcccagtcagtagcctaatcgagtcataccagtggattggtcaaggaacgatagcggggatccccgtgcctgtggtgatatttttggtgatggcgttcattacgtacattttacttaattacactcgatttggtaaatacgcctacgccattggtggtaatgaaacagccgcatatgtatctggcattaacgtgactaaatacaagattcttgtctatgtatatgcaggtttacttgcaggtattgccgcactgattctgactgcacgtattaactcaggtcagccaggtcttggggtgatgtatgagcttgatgccatcgcatctgcaaccgttggtggtgtgagccatgccggtggtatcggcacaattcagggcaccattgtcggcgtcatgatcatgggtgtgctacaaaatgggcttgatttattgaatgtctcggcctattggcagcaagtcgtaaaaggcttagtcattgttgttgctgttattttcgatatgaaacgacagaaaaagagtaagtaa

SEQ ID NO: 5009 - protein, 338 aa, Photobacterium profundum SS9
MLAKLLQATSDQPKGANTKRFISKYAIYFVFIAMCIVMSILSPVFLTVANLLNVMTQMASIGLLALGVTIIIITRGIDLSSGSVLAVAAVVSASTAQSLDWGMRMYPNLPELPIIVPILVALAVGALCGLINGALIAYTGIPPFIATLGMMIIARGAALLYSDGRPVSSLIESYQWIGQGTIAGIPVPVVIFLVMAFITYILLNYTRFGKYAYAIGGNETAAYVSGINVTKYKILVYVYAGLLAGIAALILTARINSGQPGLGVMYELDAIASATVGGVSHAGGIGTIQGTIVGVMIMGVLQNGLDLLNVSAYWQQVVKGLVIVVAVIFDMKRQKKSK

SEQ ID NO: 5010 - DNA, 990 bp, Photobacterium profundum SS9
  CDS (1)..(990): transl_table=11
atgagcagcaacgcgatgaccaaaacagacgattcaaaaaacaaaacaggtaagctgttcactaaagaatggttaattgaacaaaaatcactgatcgcattgatcttactgattgttgtcgtgtctttccttaaccccaacttctttactgtcgacaacattttaaacattcttcgccaaacctcgataaacgcaattattgcagtcggtatgacactggttattttaactgcgggtatcgacctaagtgtgggatctgttttggcgctgtgtggtgcatttgccgccaccatgattggtcttgaaattccagccattattgccgtaccaacagcccttctagcgggtgctgctttaggtgcaatcagcggtattattattgccaaaggtaaagtgcaagcatttattgccaccttggtaaccatgacattgctgcgtggtgtcaccatggtttacaccgatggtcgccctatttctactggctttacagaggtagcagatggctttgcatggttcggtacaggttacgcaatgggtattcctgttcctatctggctaatggttattgtattcgcttctatctggtatttattgaatcacactcgcttcggtcgttacatctacgcactgggcggtaatgaatcagcaactcgcttatcaggcattaacgtagatcgcgtcaagattggcgtctacgctatctgtggcctgttagccgcccttgctggcatcattgtaacctctcgtctttcatctgctcagccaaccgctggtatgggatacgaactggatgcgattgctgctgtcgtattgggtggtaccagccttgctggtggtaaaggtcgcattatgggcacactggttggtgcgcttattatcggcttcttaaacaatgcactaaacctgttagacgtgtcttcatactaccaaatgattgcaaaagcagtggtaatcttgcttgcggtactggtagataataaaaataagtaa

SEQ ID NO: 5011 - protein, 329 aa, Photobacterium profundum SS9
MSSNAMTKTDDSKNKTGKLFTKEWLIEQKSLIALILLIVVVSFLNPNFFTVDNILNILRQTSINAIIAVGMTLVILTAGIDLSVGSVLALCGAFAATMIGLEIPAIIAVPTALLAGAALGAISGIIIAKGKVQAFIATLVTMTLLRGVTMVYTDGRPISTGFTEVADGFAWFGTGYAMGIPVPIWLMVIVFASIWYLLNHTRFGRYIYALGGNESATRLSGINVDRVKIGVYAICGLLAALAGIIVTSRLSSAQPTAGMGYELDAIAAVVLGGTSLAGGKGRIMGTLVGALIIGFLNNALNLLDVSSYYQMIAKAVVILLAVLVDNKNK

SEQ ID NO: 5012 - DNA, 1011 bp, Photobacterium profundum SS9
  CDS (1)..(1011): transl_table=11
atggaaactttaaaaaaactcagcatgatgcgctacctcaaagaagggggcatttatgcagtactatttattttattaacaattattattattcaagaaccaagctttttaagcttaagaaacctgagtaatattcttacccaatcatctgtacgtattattattgcattgggtgttgcagggcttattgttacccaaggtactgatttatccgcaggtcgtcaggtaggtttggctgcggtattatcggctaccttgcttcaagcggcagataacgttaataaggtttttcccaatgttggtgaaatcccaattgttggcgtcattatcgttgtgtgtgccgtgggtgcgctaatcggtttgattaacggcattatcgttgcgtatttacatgtgaccccgtttatagccacactgggttcaatgatcatggtatacggtgttaactcactatactttgattccgtaggggcatcaccggttgctggttttgatgagcgtttttctgaatttgctcaaggctttattcgctttggtgattttagattatcgtaccttacgttttacgccattattgccatcatatttgtctggattatatggaataaaactgtttttggtaagaacatttttgcgattgggggtaatccagaagcggcaaaagtatcgggtgttaacgtgccgatcacactgcttaaaatctatgccttatcgggtgtgttctacgcatttggcggcatgttagaagcggggcgaattggtagtgcgactaacaaccttggtttcatgtacgaacttgatgccattgctgcctgtgtagtgggtggtgtgtcatttgcgggtggtgtaggtagtgttgcaggtgttgtaacaggggtattaatctttaccgtgattaactacggcatgacgtatattggtgttagcccttactggcagtacattattaaaggcggcattattattttcgcagtagcgcttgattcaatgaagtatgcaaacaaaaaataa

SEQ ID NO: 5013 - protein, 336 aa, Photobacterium profundum SS9
METLKKLSMMRYLKEGGIYAVLFILLTIIIIQEPSFLSLRNLSNILTQSSVRIIIALGVAGLIVTQGTDLSAGRQVGLAAVLSATLLQAADNVNKVFPNVGEIPIVGVIIVVCAVGALIGLINGIIVAYLHVTPFIATLGSMIMVYGVNSLYFDSVGASPVAGFDERFSEFAQGFIRFGDFRLSYLTFYAIIAIIFVWIIWNKTVFGKNIFAIGGNPEAAKVSGVNVPITLLKIYALSGVFYAFGGMLEAGRIGSATNNLGFMYELDAIAACVVGGVSFAGGVGSVAGVVTGVLIFTVINYGMTYIGVSPYWQYIIKGGIIIFAVALDSMKYANKK

SEQ ID NO: 5014 - DNA, 1200 bp, Geobacillus kaustophilus HTA426
  CDS (1)..(1200): transl_table=11
ttgtgcaacgggaggaaaatgaggatgaaaagcccgatttctatagcgaccttagagagtcaaacaaaagggaagatacgatggaaatttgattttcgttcttatacgctaattatagccttagtctttatcgctgttattttcagtgttttaactgacggagagtttgtatcgtcacgaaatttatcgaacttatttatgcagatgtctgtcatttcgattttggcgatcggcatgacactagtcattatagcaggccatattgacttatcagttggatctgttgtcggattgaccgggggaatcgctgcgattttgcaagtatggtatggctggggaacagtctctgttattgttgtggctattgttgctggcgtattaattggactttggcaaggatggtgggttgcttatcgaggtgttcctgctttcattgtaactttaggtgggatgttagtttttcgaggaattttgattggaattagcaatggcgagactgtagcgccgttagacaatagtttcgaagcgataggaaacagttatctcccttacgtaatcggctacattttagctgctgtcagcatcattttattgtttctttctttaggacgaaatagaaagaaacgaaaacagttaggcttaacgctcaattccaaaataaatgattatggcaaaacagcagtctactcgctatgcattttcgtattggtgtatatgttaaatcgttattacggtgttcctattccgatgctgatcgttgttttattggcgcttgtctttgtgtttattgccgttaaaaccccgtttggacgatatatttatgcgattggtggaaatattgaggcggccgctctatctgggatcaacatcaagcgtgttgtattggctgtcttcatcttaatgggagcgctttcggcggtggcgggtatcattttgacaagccgactcaatgcagcgacagtcagcgctggggagatgtatgaattggatgctattgctgcttgtgttattggtggcacgagtttaatggggggaaggggaaatattgttggggcgattatcggcgcccttattatggctagtatcgataacggtatgagcatgatgaacattgagaccttttggcaatacattgtgaaaggattaattttaattgttgccgtttggacggatatctcaagcaaaagtaaggcgagttga

SEQ ID NO: 5015 - protein, 399 aa, Geobacillus kaustophilus HTA426
MCNGRKMRMKSPISIATLESQTKGKIRWKFDFRSYTLIIALVFIAVIFSVLTDGEFVSSRNLSNLFMQMSVISILAIGMTLVIIAGHIDLSVGSVVGLTGGIAAILQVWYGWGTVSVIVVAIVAGVLIGLWQGWWVAYRGVPAFIVTLGGMLVFRGILIGISNGETVAPLDNSFEAIGNSYLPYVIGYILAAVSIILLFLSLGRNRKKRKQLGLTLNSKINDYGKTAVYSLCIFVLVYMLNRYYGVPIPMLIVVLLALVFVFIAVKTPFGRYIYAIGGNIEAAALSGINIKRVVLAVFILMGALSAVAGIILTSRLNAATVSAGEMYELDAIAACVIGGTSLMGGRGNIVGAIIGALIMASIDNGMSMMNIETFWQYIVKGLILIVAVWTDISSKSKAS

SEQ ID NO: 5016 - DNA, 1224 bp, Geobacillus kaustophilus HTA426
  CDS (1)..(1224): transl_table=11
atgggagcactaatgcaaaaaacagcacaacattctccaaagcggtctacagaaagtcagcagttatcgttgaagcagatgatcaaaaacaatatgagaagttacagtatggtcatcgctctcattttgattatgttattgttccaagtgttaactggaggcattttgttgcggccattaaatattacaaacttgattttgcaaaacagttatattttggtgctggctgttggcatgatgcttgttattatcactgggcatattgatttgtccgtcggatcggtggcagcttttgtcggggcattggctggcattctgatggttcagcaccatgtatcagtatggttgacggtgctcatttgtttattgctcggtgccttgattggcgcatggcaaggattttgggtagcgtacgtaaaaattccatcattcattgttacattagcagggatgttgctgttccgaggattaacgatggtcattttggaaggacagtcgatcgccccgttcccaaaaacattccaaaatatgagttccgggtttctccctgacgtatttcatggaggagagatccatctgttcaccattgtgatcggcttcgccgcttctctcttatttgttgtactggaatggagaaaacgaaacagccagaaaaaatatgggtttgcggtcacccctgcgtcgatgtttaccttgaagctggctgtgattgccgctgtaatcatgattttcacttatattttagcgacgtacgaaggaattccaacgattctagtgattttggctgcgttgatcatcgcttattcctttgtggcgaatcggacggtcgtcggccgccatatttatgcgattggtggtaatgagaaggctgcgcaactgtccgggattaaaacgaaacgtgtcacgttttgggtgtttgtcaacatgggcgtgttggccgctttgtccggattgatttttgccgctcgcctcaacgctgcgacgccgaaagcggggaacttgtttgagctcgatgccattgcggcgtgctttattggaggcgcatccgcttatggaggaatcggcacgattagcggagcgatcatcggcggtctagtcatgggcgtaatgaataacgggatgtccttgctggggctcggtattgactggcaacaggccatcaaagggcttgtattgcttattgctgtggcttttgatatttacaacaaaaataaagctgcttaa

SEQ ID NO: 5017 - protein, 407 aa, Geobacillus kaustophilus HTA426
MGALMQKTAQHSPKRSTESQQLSLKQMIKNNMRSYSMVIALILIMLLFQVLTGGILLRPLNITNLILQNSYILVLAVGMMLVIITGHIDLSVGSVAAFVGALAGILMVQHHVSVWLTVLICLLLGALIGAWQGFWVAYVKIPSFIVTLAGMLLFRGLTMVILEGQSIAPFPKTFQNMSSGFLPDVFHGGEIHLFTIVIGFAASLLFVVLEWRKRNSQKKYGFAVTPASMFTLKLAVIAAVIMIFTYILATYEGIPTILVILAALIIAYSFVANRTVVGRHIYAIGGNEKAAQLSGIKTKRVTFWVFVNMGVLAALSGLIFAARLNAATPKAGNLFELDAIAACFIGGASAYGGIGTISGAIIGGLVMGVMNNGMSLLGLGIDWQQAIKGLVLLIAVAFDIYNKNKAA

SEQ ID NO: 5018 - DNA, 1299 bp, Silicibacter pomeroyi DSS-3
  CDS (1)..(1299): transl_table=11
atgactcattccgaggcggagctgtccccggcacatcccaagaaatcctttgtacagacgctggaactggatctgcgccttctgggcatgatcggggcctttgcgatcctgtgcgtcgggttcgacatcgtgaccggcggccgtttcctgacaccgcgcaacatcttcaacctgaccatccagaccgtttcggttgcgatcatggccaccggcatggtgttcgtcatcgtcacccgtcatatcgatctgagcgtcggcgccctgctggccacctgctcggcagtgatggcgatgacccagaccgagatcctgcccaacatgctgggcctggggctgggccatccgctgatcccctgggtgaccatccttgtcggcctgctggtggggtcgctgatcggtgcctttcacggctggctggtgggctatctcgccatccccgcctttatcgtcacgctgggcggactgctggtctggcgcaatgtcggctggtacctgaccagcggcaagaccatcggcccgctggacccgaccttcatgcaattcggcggcatcaatggaacgctgggcgccacctggtcctggatcgtcggtctgctggcgctggccgccgcgctctatggtctgtgggcgagccgcaagaacaagctccgccatgggttcccggtcaagccgctctgggccgagggggttctggcggcgctgatctcgggcgcgatcctgggctttgtcgccatcctgaacgcctatgaggtgccactggcccggctcaagcgcgatttcgcggcgcagggcctgaccttgcccgaaggctataccgaggcttatggcatcccgatctcggtgcttctgctgatctttatcgcggtgggcatgaccatgctggcacgccgaacccggctgggccgctatatctttgccaccgggggcaacccggatgcggcggaactgagcggcatcaacacccggctgctgacggtcaagatctttgcgctgatgggcgcgctctgcgccatctcggcggtggtggcctcggcccggctgaccaaccattccaacgacatcggcacgctggacgaactgcgcgtgatcgcggccgccgtgatcggcggcaccgcgctggcggggggcttcggcaccatccacggcgccatcctgggcgcgctgatcatgcagtcgctgcaatcgggcatggccatggtcggtgtcgacgcgcccttgcagaatatcgtcgtgggcgcggttctggtgctggcggttctgatcgacattctctatcgcagaaagacgggggcacggtga

SEQ ID NO: 5019 - protein, 432 aa, Silicibacter pomeroyi DSS-3
MTHSEAELSPAHPKKSFVQTLELDLRLLGMIGAFAILCVGFDIVTGGRFLTPRNIFNLTIQTVSVAIMATGMVFVIVTRHIDLSVGALLATCSAVMAMTQTEILPNMLGLGLGHPLIPWVTILVGLLVGSLIGAFHGWLVGYLAIPAFIVTLGGLLVWRNVGWYLTSGKTIGPLDPTFMQFGGINGTLGATWSWIVGLLALAAALYGLWASRKNKLRHGFPVKPLWAEGVLAALISGAILGFVAILNAYEVPLARLKRDFAAQGLTLPEGYTEAYGIPISVLLLIFIAVGMTMLARRTRLGRYIFATGGNPDAAELSGINTRLLTVKIFALMGALCAISAVVASARLTNHSNDIGTLDELRVIAAAVIGGTALAGGFGTIHGAILGALIMQSLQSGMAMVGVDAPLQNIVVGAVLVLAVLIDILYRRKTGAR

SEQ ID NO: 5020 - DNA, 1161 bp, Bacillus clausii KSM-K16
  CDS (1)..(1161): transl_table=11
atgaaagcatttcttaatattgtccaaaacaacatgcgccaatatagcatgacttgtgcgttgctgtttattatgcttttattccagctgttaacagatggcattttgctgcagccgttaaatattacaaatatcattttacaaaacagctatattttaattttggcgattggaatggtcatgattatcattacaggccatattgatttatccgttggctctgtcgctgcttttatcggtgcgctgtcagcgattttaatgattgagttaaatgtccacccagtgttagctgttctcatctgcctcatcgccggcgctctcgttggcgcttggcaagggttttgggtcgcatatgtacaaattcctgccttcattgtgacattagcaggcatgctcatttttagaggaattacgttaatcatgcttgaagggcagtccattgcttcctatccgccaacttttcaacaactaagctcagggtttttgcctgatttgtttaatggcgagtcgattcatcttttttcgatgttccttggagtcgtgctaacagctgttttgatcgcgatccaaattaaggggagaaagaaacaacttcatcatgatttgccagttgttactccggcctggtttaccgttaaattagtagcaatcgcagcagttattctagtgtttacctttgtattagccagttaccgcggcattccaaacattcttatcttgcttgtcgccttaattgccttttacgccttcgtcacgaaaaaaacggtgtttggccgtcacatttatgcggttggcgggaatgaaaaagccgccgcattgtctgggattaaaacaaaacgggtgacgtttgctgtgtttgtcaacatggggatacttgcagcgctgtcaggcctcatttttgccgctaggctaaatgctgccaccccacgggcagggaatttattcgaactcgatgcgatagcggctgcctttattggcggtgcttctgcttatggcggcgtcgggacgatcattggcgctgtcgtcggcggcctcgtcatgggtgtgatgaacaacggcatgtcgattctcggacttggcatcgattggcaacaggctattaaagggcttgtgctattggctgctgtcgcattcgacgtcgtcaataagcgccgtggataa

SEQ ID NO: 5021 - protein, 386 aa, Bacillus clausii KSM-K16
MKAFLNIVQNNMRQYSMTCALLFIMLLFQLLTDGILLQPLNITNIILQNSYILILAIGMVMIIITGHIDLSVGSVAAFIGALSAILMIELNVHPVLAVLICLIAGALVGAWQGFWVAYVQIPAFIVTLAGMLIFRGITLIMLEGQSIASYPPTFQQLSSGFLPDLFNGESIHLFSMFLGVVLTAVLIAIQIKGRKKQLHHDLPVVTPAWFTVKLVAIAAVILVFTFVLASYRGIPNILILLVALIAFYAFVTKKTVFGRHIYAVGGNEKAAALSGIKTKRVTFAVFVNMGILAALSGLIFAARLNAATPRAGNLFELDAIAAAFIGGASAYGGVGTIIGAVVGGLVMGVMNNGMSILGLGIDWQQAIKGLVLLAAVAFDVVNKRRG

SEQ ID NO: 5022 - DNA, 945 bp, Bacillus clausii KSM-K16
  CDS (1)..(945): transl_table=11
atgttcaccaataaacgagtcaaggcattaacagcgacgcttggtccatttatcggccttttccttatcatattaattattagcattctaaacccaggattcttatcagcgccgaatctcctcaatgtccttcggcaagtatccattaatgcgctcattgcatttggaatgacgtttgtcattttgacaggtgggattgatttatcagttggtgcaattcttgctttttctggagcggtcactgcaaccttactttcgtcagggatggacccgatcttagcgatcttaattggattgcttgttggagcagcacttggtgcaataaatggcataatcattgcaaaaggaaaagtagcaccatttattgcgacactggcgacgatgacgatttaccgaggcgcgaccttaatgtttacagatggcaggcctgtatcaaacttaggtgattctacattgttccaaatgcttggaggcggctacttttttggaattccaatgccggcgattacgatgatgattagctttgttatcttgtacttgattttaaagaaaaccacatttggccgtcgcgtatatgcagttggtggcaatgaggaagcatcgattctatcaggcatcaaagtcgaccgaattaagatttacgtatactctctgactggatttttggcagccgttgctggtgtgattttaacgtcgaggctaaattcagctcaaccaacggctggcacgatgtacgaacttgacgcgattgctgcggttgtgctcgggggaacgagtttaacaggtggaaaagggtggattgtcggaacgcttattggtgccttaatcataggagtgttgaataatgggttgaatttgcttggtgtcagctcttttttccagcaaatggttaaaggaagtgtcattttacttgcagtcttgcttgatcgcagaaaaacagcttaa

SEQ ID NO: 5023 - protein, 314 aa, Bacillus clausii KSM-K16
MFTNKRVKALTATLGPFIGLFLIILIISILNPGFLSAPNLLNVLRQVSINALIAFGMTFVILTGGIDLSVGAILAFSGAVTATLLSSGMDPILAILIGLLVGAALGAINGIIIAKGKVAPFIATLATMTIYRGATLMFTDGRPVSNLGDSTLFQMLGGGYFFGIPMPAITMMISFVILYLILKKTTFGRRVYAVGGNEEASILSGIKVDRIKIYVYSLTGFLAAVAGVILTSRLNSAQPTAGTMYELDAIAAVVLGGTSLTGGKGWIVGTLIGALIIGVLNNGLNLLGVSSFFQQMVKGSVILLAVLLDRRKTA

SEQ ID NO: 5024 - DNA, 987 bp, Vibrio fischeri ES114
  CDS (1)..(987): transl_table=11
atgagcaccaaatcaatgacttcaactgaaacacaacaaaagaaaggcggcattttttctaaagagtggctgattgaacaaaaatcattaatcgcgctattgcttttgattgtcgtggtatcctttttgaacgacaacttttttactgtcgacaacatcctaaacatcctacgtcaaacctcagttaacgcgattattgcggtaggtatgacgttagttatcttaacggcaggtatcgacttaagcgttggctctgtattagccctttgtggtgcttttgcggcaaccatgattggccttgaaattccggtgatgattgcggttccaacagcactacttgctggtgcagctctaggtgcaatcagcggtattattatcgcaaaaggtaaagttcaagcattcattgcgacgctagtaaccatgacgttattacgtggtgtgacaatggtttacacagaaggtcgccctatctctactggttttactgatgttgctgacagctttgcatggttcggtacaggttacgcgcttggtatcccagttcctatctggctaatggttatcgtgtttgcatctgtatggtacttactaaaccacacacgttttggtcgctacgtttatgctctaggtggcaatgaatcagcaactcgcctatctggtatcaatgtggatcgcgttaagatcggtgtttacgctatctgtggtctacttgctgcactggctggtttaatcgtaacgtctcgtctttcttcagctcaaccaacagcaggtatgggctacgagctagacgctatcgcagcggttgtacttggtggtacaagccttgcgggtggtaaaggtcgcatcatgggtacattaattggtgcgcttatcatcggcttcttaaacaacgctctgaacttattagatgtttcttcttactaccaaatgattgccaaagcagtggttatcctactggcagtattagtggacaacaaaaacaagtaa

SEQ ID NO: 5025 - protein, 328 aa, Vibrio fischeri ES114
MSTKSMTSTETQQKKGGIFSKEWLIEQKSLIALLLLIVVVSFLNDNFFTVDNILNILRQTSVNAIIAVGMTLVILTAGIDLSVGSVLALCGAFAATMIGLEIPVMIAVPTALLAGAALGAISGIIIAKGKVQAFIATLVTMTLLRGVTMVYTEGRPISTGFTDVADSFAWFGTGYALGIPVPIWLMVIVFASVWYLLNHTRFGRYVYALGGNESATRLSGINVDRVKIGVYAICGLLAALAGLIVTSRLSSAQPTAGMGYELDAIAAVVLGGTSLAGGKGRIMGTLIGALIIGFLNNALNLLDVSSYYQMIAKAVVILLAVLVDNKNK

SEQ ID NO: 5026 - DNA, 993 bp, Salmonella enterica subsp. enterica serovar Choleraesuis str
  CDS (1)..(993): transl_table=11
atgacaacccaggctgtttctggtcgccgttatttcactaaagcgtggcttcttgagcagaagtcgctcattgccctgctggtgttgatcgcgattgtttcgacgttgagccccaacttttttaccgttaataatctgttcaatattcttcaacagacctccgtcaacgccattatggcggtggggatgacgttggtgattctgacatcggggatcgatctgtccgtcggttccctgctggcgctcaccggcgcggttgccgcttcaatcgtcggcgttgaagtgaatgcgctggtcgcggttgccgccgcgctggcgctgggcgctgcgattggcgccgtcactggcgttatcgtcgcgaaaggccgcgtacaggcgtttatcgctacgctggtgatgatgctgctactgcgcggtgtaacgatggtttacaccgacggtagcccggtcaacaccggctttaccgataacgccgatctgtttggctggttcggtatcggccgtccgctgggcgttcctacgccggtctggatcatggctatcgtctttatcgccgcctggtatatgctgcatcacacccgtctgggacgctatatctacgcgctgggcggtaacgaagcggcgacgcgcctgtctggcattagcgtgagcaaagtgaaaattatcgtctattcactttgcggcctgacagcgtcgctggcgggcatcattgaagtggcgcgcctctcttccgcgcagccgacggcgggtaccggctatgagctggatgctattgccgccgtggtgctgggcggcaccagccttgcaggcggtaaaggacgcattgttgggacattgatcggcgcattgattctcggcttccttaataatggtttgaatttgttaggtgtttcctcctattaccagatgatcgtcaaagcggtggtgattttactggcggtactggtagacaacaaaagcagtaacaacgactacaggacatctgaaatatga

SEQ ID NO: 5027 - protein, 330 aa, Salmonella enterica subsp. enterica serovar Choleraesuis str
MTTQAVSGRRYFTKAWLLEQKSLIALLVLIAIVSTLSPNFFTVNNLFNILQQTSVNAIMAVGMTLVILTSGIDLSVGSLLALTGAVAASIVGVEVNALVAVAAALALGAAIGAVTGVIVAKGRVQAFIATLVMMLLLRGVTMVYTDGSPVNTGFTDNADLFGWFGIGRPLGVPTPVWIMAIVFIAAWYMLHHTRLGRYIYALGGNEAATRLSGISVSKVKIIVYSLCGLTASLAGIIEVARLSSAQPTAGTGYELDAIAAVVLGGTSLAGGKGRIVGTLIGALILGFLNNGLNLLGVSSYYQMIVKAVVILLAVLVDNKSSNNDYRTSEI

SEQ ID NO: 5028 - DNA, 1005 bp, Brucella abortus biovar 1 str. 9-941
  CDS (1)..(1005): transl_table=11
gtgtccaccacagaaaacaattcatcgacgagctggtttggctccgaacgccgcaggctggtgatccaggaatacggcatattcatcgccttcctgcttttggccacgattctctcgttctccaacgaatatttcctcaccgcgggcaatatttccaacgtcctgttgcagacctcgatcaacggcattctcgccatcggcatgacgttcgttattctgacgcgcggtatcgacctttccgttggctccgtggttgccttggctggcattgtgagcgccagctttgcaaccacatctgcaatggcgggtattgcgggcgcaccatattcaccgtttatagccatttgcgtcggcctgctggtggggataggttgcggcgcactggtcggtacgattgtctcgcgctttgcggttccagccttcgtggcaacattgggcatgctttccgcagcgcgcggcctgacgctcatctatggcggcggcaagcctgtgcctgcgcttgttccggatttccggtggattggaaccggcaatatactgggtgttccggtaccggtcattctgcttgcaatcgtgttcctggtatcgtggtggatcctcaaccgatcgaggtttggccgctatatctatgcggttggcggcaatcctcatgctgcgaacacctccggcatcaatatctccagggtgcgtttttcggtttatgtcatttcaggcgggttggcgggccttgccgggatgattctgtctgcccgcaccgggtctgccttgccgcaagcgggtatcagttatgaactggacgccatcgcagcggtcgtcattggcggcaccagcctgtctggtggcatcggtcgcatcaccggaacccttatcggcgcgctcatcattggcgtcatgaacaacggtctcgatctgatgggcatccagtcctactaccagcaggttctcaagggtgcgctgatcgtgggagcggtcatgctcgaccagaaacgcagtcagggaggctag

SEQ ID NO: 5029 - protein, 334 aa, Brucella abortus biovar 1 str. 9-941
MSTTENNSSTSWFGSERRRLVIQEYGIFIAFLLLATILSFSNEYFLTAGNISNVLLQTSINGILAIGMTFVILTRGIDLSVGSVVALAGIVSASFATTSAMAGIAGAPYSPFIAICVGLLVGIGCGALVGTIVSRFAVPAFVATLGMLSAARGLTLIYGGGKPVPALVPDFRWIGTGNILGVPVPVILLAIVFLVSWWILNRSRFGRYIYAVGGNPHAANTSGINISRVRFSVYVISGGLAGLAGMILSARTGSALPQAGISYELDAIAAVVIGGTSLSGGIGRITGTLIGALIIGVMNNGLDLMGIQSYYQQVLKGALIVGAVMLDQKRSQGG

SEQ ID NO: 5030 - DNA, 1191 bp, Brucella abortus biovar 1 str. 9-941
  CDS (1)..(1191): transl_table=11
atgagcgagaatgtaatccagagcggccagcagagcagcgtggggcgctatctcaagaacaatctgcgtgaatccgggatgctgctttcgctcgttgcaatcatgatcttcttccagatcgtgaccggcggcgttctcatgaagccgctgaacctcaccaatctcgttttgcagaacagctatatcgtcatcatggcgcttggaatgctgctcatcatcgtcacgggccatatcgatctttcggtcggttcggtctgcggctttatcggggcgctcgctgccgtcatgatggtaaagctcggcattccctttcccattgcggccattctctgcctcattgtcggcgggttgatcggcgcgatccagggtttttgggtcgcctatttcaatatcccctccttcattgtgacattggccggtatgctcgtgttcaaggggatgatgcttgccgttctgggcggacagtcggtcggaccttttccggtcgtgttccagaagctctcgtcgggcttcattccagaggtgatcggcacgtttgacggcgtttatctcacctcgctcatcatcggcgttctgcttgcggttttcctcatctggcagagcatgcggtcgcgcgcgcgccatattgcccatgaggtggagaccgagcccttcggccttttcgtggtcaagtgcatcctctatttcgccgcaattgcctatctttcgctgctcatttcctcacatcgcggtatgccgaacgtactcatcatcatggcggtgctgattgccgcctatgcgtttctcaccaatcgcaccgtgatcggccgccagatctatgcggtgggcggcaatcgtcacgccgccaagctttccggcgtgaaaaccgagcggctgacgtttctcaccttcgtcaatatgggtgtgctggcagcacttgcgggtctcgtcttcgccgcccgtctcaatacggcgacgccgaaagctggcatcggctttgaactggacgtcatcgcggcctgcttcatcggtggcgcttcggcctatggcggtgtggggcgggttacgggtgccgtgatcggcgcgctcatcatgggcgtgatgaacaacggcatgtcgatcctcggcatcggtatcgactatcagcaggtcatcaagggtatcgtgctgctgggggcggtttgtatcgacgtctataaccagaaacgctga

SEQ ID NO: 5031 - protein, 396 aa, Brucella abortus biovar 1 str. 9-941
MSENVIQSGQQSSVGRYLKNNLRESGMLLSLVAIMIFFQIVTGGVLMKPLNLTNLVLQNSYIVIMALGMLLIIVTGHIDLSVGSVCGFIGALAAVMMVKLGIPFPIAAILCLIVGGLIGAIQGFWVAYFNIPSFIVTLAGMLVFKGMMLAVLGGQSVGPFPVVFQKLSSGFIPEVIGTFDGVYLTSLIIGVLLAVFLIWQSMRSRARHIAHEVETEPFGLFVVKCILYFAAIAYLSLLISSHRGMPNVLIIMAVLIAAYAFLTNRTVIGRQIYAVGGNRHAAKLSGVKTERLTFLTFVNMGVLAALAGLVFAARLNTATPKAGIGFELDVIAACFIGGASAYGGVGRVTGAVIGALIMGVMNNGMSILGIGIDYQQVIKGIVLLGAVCIDVYNQKR

SEQ ID NO: 5032 - DNA, 1041 bp, Brucella abortus biovar 1 str. 9-941
  CDS (1)..(1041): transl_table=11
atgtcagtcacgagcaccaacaaggaaacagcggctccgaccggcgcgaagcggaagaccagcctcgtgcatctgctgctcgagggtcgcgcattctttgcgctgatcgcgatcatcgccgtcttctcgttcctttcgccctattactttacggtcgataatttcctcatcatgtcgtcgcatgtggccattttcggccttctggcgattggtatgctgctcgtcatcctcaatggcggcatcgacctttcggtcggctccacgctggggctggccggtgtggtcgcgggcttcctgatgcagggcgtgaccttgcaggaattcggcatcatcctttatttcccggtctgggccgtggtgctcatcacctgcgcgctcggcgccttcgtcggcgcggtcaatggtgtgttgatcgcttatctgcgcgttccggccttcgtggcgacgcttggcgttctttattgcgcgcgtggcgtagcgcttttgatgaccaacggtctcacctacaacaatctcggcggtcgccccgaacttggcaatacgggctttgactggctcggcttcaacaagcttttcggcgtgccgatcggtgtgctggtgctggcaattctcgccatcatctgcgccattgttttgaaccgcactgcattcggccgctggctctatgcctcgggcggcaatgaacgggcggcggaactttccggtgttccggtcaagcgggtcaaggtgtcggtctatgtcatttccggcatctgcgctgccattgcggggctggttctttcctcgcagctcacctctgctgggccgacggctggcaccacctacgaactgacggcaatcgctgccgtggtgatcggtggcgctgcgctcactggggggcgcggtacgatacagggcacacttctcggtgctttcgtgatcggtttcctttccgacggcctcgtgattatcggcgtgtcctcttactggcagaccgtctttaccggcgcggtgatcgtgctcgcggttctgctcaacagcattcaatattcccggcgatga

SEQ ID NO: 5033 - protein, 346 aa, Brucella abortus biovar 1 str. 9-941
MSVTSTNKETAAPTGAKRKTSLVHLLLEGRAFFALIAIIAVFSFLSPYYFTVDNFLIMSSHVAIFGLLAIGMLLVILNGGIDLSVGSTLGLAGVVAGFLMQGVTLQEFGIILYFPVWAVVLITCALGAFVGAVNGVLIAYLRVPAFVATLGVLYCARGVALLMTNGLTYNNLGGRPELGNTGFDWLGFNKLFGVPIGVLVLAILAIICAIVLNRTAFGRWLYASGGNERAAELSGVPVKRVKVSVYVISGICAAIAGLVLSSQLTSAGPTAGTTYELTAIAAVVIGGAALTGGRGTIQGTLLGAFVIGFLSDGLVIIGVSSYWQTVFTGAVIVLAVLLNSIQYSRR

SEQ ID NO: 5034 - DNA, 1239 bp, Brucella abortus biovar 1 str. 9-941
  CDS (1)..(1239): transl_table=11
atgaacgatatcaatacgctgcttgatcgtcaggatgtacgggtgcgccacgataaaggcgtttctggcgccatccgcacctttatcgaccgggtcaagtcgggcgatctcggttcattgccggtcattgttggccttctcatcatctggacagttttccagacgttgaacccggttttcctttccagcaacaacctcgtgaacctgctattcgattgctcgaccatcggcgtcatttcgctcggcatcgtctgcgtattgatgctgggtgagatcgacctttcggtcggttccattagtgggctttcttcggctatcatcggtgtattatgggtcaataatggctggccggtgggcgtcgccatcattgcagcactttgcgcaggcgcactggctggcttcctctacgcgctcctctataaccgcttcagcatgccaagcttcgtttccacactggctgggctgctcgcagcccttgggcttcagctttacctcctcggcaatacaggctccatcaatctgccttacggttcgtggctggtcagcttcggccagcttctggtaatgccgcgtccgctttcttatgcgctggcgctggtcgcgggacttgcgatctttttcacgggttttcgcgccgcgcagcgccgccgcacggcagggctttccgctccctcggctgcgggcattgcgctcaaagctttggtcatcacgctcattatcggctgtggggtattttatctcaaccagtcgcgcggcgtgccatggatgtttgccctgttcgtggcgctggtgatcgcgatgaactatgcgcttacgcgcaccagatggggccgctgcgtgcaggcggttggcggcaatcgcgaggctgcgcgtcgtgccggcatcaatgtgaatttcatctatgtctcggccttcatggcctgctccacactcgcggctgccggtggtatcatggcggcggcgcgtctggcctcatccagccagcaggcaggcaccggtgacgtcaacctcaatgctatcgcggcagcggttatcggcggtaccagcctattcggcgggcgcggcagcgcgtggtcggccctgctcggtattatcgtcatccagtcgattgcgagcggtttgacgcttctcgatctgtcgtcttcgcttcgctacatgattacgggtgcagtgcttgccatcgccgtgattgtcgattcccttgcccgccgttcgcgccagtcgcacggccgcgcctag

SEQ ID NO: 5035 - protein, 412 aa, Brucella abortus biovar 1 str. 9-941
MNDINTLLDRQDVRVRHDKGVSGAIRTFIDRVKSGDLGSLPVIVGLLIIWTVFQTLNPVFLSSNNLVNLLFDCSTIGVISLGIVCVLMLGEIDLSVGSISGLSSAIIGVLWVNNGWPVGVAIIAALCAGALAGFLYALLYNRFSMPSFVSTLAGLLAALGLQLYLLGNTGSINLPYGSWLVSFGQLLVMPRPLSYALALVAGLAIFFTGFRAAQRRRTAGLSAPSAAGIALKALVITLIIGCGVFYLNQSRGVPWMFALFVALVIAMNYALTRTRWGRCVQAVGGNREAARRAGINVNFIYVSAFMACSTLAAAGGIMAAARLASSSQQAGTGDVNLNAIAAAVIGGTSLFGGRGSAWSALLGIIVIQSIASGLTLLDLSSSLRYMITGAVLAIAVIVDSLARRSRQSHGRA

SEQ ID NO: 5036 - DNA, 1170 bp, Brucella abortus biovar 1 str. 9-941
  CDS (1)..(1170): transl_table=11
atgacgttgacaggcaaaagcctcagaaaatttctctcagaatacaaaatcgtggcactgctgattgttgtcgccctgatctgggcattcttcgccatcatgacctacgatcccgagatgggccggtcgcagtttctcaccgcgcgcaatttctccaatcttttgcgccagatggcaatcaccggcatgctggcttcagccatggtgtttgtcatcgtggcgggtgaaatcgatctgtcggtgggggctttgctcggcctgttaggcggtgtcgcggcggtgctcgatgtggtttacggctggccgttatgggccactatcgctacggttctggtgctgggtggagtgcttggcggtttcaacggctggctcaccgcctatctcggcattccgtccttcatcgttacgctgggcgggcaattggtgtttcgcggtattgtgctgggtatcatgggcggtgtcaccattgcgccgatttcgcccgagttcaaatatatcgggcaaggctatttgcccggctggcttggcaatgtctgtgccatagcgctgtttacagtgcttgtcctgattacgctcagaacccgttccagcaagcgcaaacacaatttgcaaacgctttcaccggcgatggaaaccgctcgccttctgggcacgggtatcctgatccttggttttatcctggtcctcaacagctatcagggcgtaccggttccggttctcgtgctgctggttattcttggcgtcttcaccgttatttcccgccagactgttttcggccggcatatttatgcggtcggttccaatcctgaagccacgcgcttttccggtgtcaacgtgaatttcgtcaaaatggccgtgtttgcgctgatgggacttatggcggcagtggcgggcctcaccacgactgcgcgccttgcggccggtacgccatcggcaggtttgggcggcgaacttgatgccatcgcatcatgctttatcggcggcacatccatgcgcggcggcgtgggatccgtgattgctgcgctggtcggtgcgcttatcatgtcaagcctcgataatggtatgtcgatgctgggcgtcgatacattctggcagcaaatcatcaagggcagtattcttgtgctggccgtttatctcgatatcgtatcatcaggcacacgtcgcgcctga

SEQ ID NO: 5037 - protein, 389 aa, Brucella abortus biovar 1 str. 9-941
MTLTGKSLRKFLSEYKIVALLIVVALIWAFFAIMTYDPEMGRSQFLTARNFSNLLRQMAITGMLASAMVFVIVAGEIDLSVGALLGLLGGVAAVLDVVYGWPLWATIATVLVLGGVLGGFNGWLTAYLGIPSFIVTLGGQLVFRGIVLGIMGGVTIAPISPEFKYIGQGYLPGWLGNVCAIALFTVLVLITLRTRSSKRKHNLQTLSPAMETARLLGTGILILGFILVLNSYQGVPVPVLVLLVILGVFTVISRQTVFGRHIYAVGSNPEATRFSGVNVNFVKMAVFALMGLMAAVAGLTTTARLAAGTPSAGLGGELDAIASCFIGGTSMRGGVGSVIAALVGALIMSSLDNGMSMLGVDTFWQQIIKGSILVLAVYLDIVSSGTRRA

SEQ ID NO: 5038 - DNA, 975 bp, Corynebacterium glutamicum ATCC 13032
  CDS (1)..(975): transl_table=11
ttgagcaccgccgtagtttcacagaagaagtccacaacggcatccaaaattggacattggatgctcaataacggtgcgttggtggggctgattgcactgtgtgttggactttttattgcaacaccccactttctcaccattcctaacctgatcaacatcggtatccaatcggcgacggtggcgatcctggcgttcggcatgaccttcgtcatcgttaccgcaggcattgatttgtctgtgggatcagtggctgcgttgggtgcgatgacctcggcgtatttcttcgcggaagttggtttgccgggctggatcacgctgctgattggcctgttcatcggattgttggcgggtgcgatctctggcatttctattgcttatggcaagttgcctgcgtttattgccaccttggccatgatgtcgatcgccaggggaatcaccttggtcatttcccaaggctcaccaattcccagtgcaccagctgtgaacgctttggggcgcacctactttggcatcccgatgccgattctgatgatggcactggctggcattgtgtgttggtttattttgagccgcaccgtgctgggacggtccatgtacgccattggcggaaacatggaagcagcccgactatctggtctgccagtgaagaaaatcctggtcatggtctatgcactggctggtgtgtatgcagcacttgcgggtctggtcatgacgggacgcttgtcgtccgcgcagccgcaggcaggcgtgggatacgaactcgatgcgattgccgccgtggtcattggtggtgcgtcacttgctggcggaaccggaaaagcaacgggcactttgattggtgccatcttgttggccgtgatccgcaatggcttgaacattttgaacgtgtcctcgttctggcagcagattgtcatcggttgtgtcatcgcgcttgcggtgggcttcgatgtcatccgaaacaaaacctctaagtaa

SEQ ID NO: 5039 - protein, 324 aa, Corynebacterium glutamicum ATCC 13032
MSTAVVSQKKSTTASKIGHWMLNNGALVGLIALCVGLFIATPHFLTIPNLINIGIQSATVAILAFGMTFVIVTAGIDLSVGSVAALGAMTSAYFFAEVGLPGWITLLIGLFIGLLAGAISGISIAYGKLPAFIATLAMMSIARGITLVISQGSPIPSAPAVNALGRTYFGIPMPILMMALAGIVCWFILSRTVLGRSMYAIGGNMEAARLSGLPVKKILVMVYALAGVYAALAGLVMTGRLSSAQPQAGVGYELDAIAAVVIGGASLAGGTGKATGTLIGAILLAVIRNGLNILNVSSFWQQIVIGCVIALAVGFDVIRNKTSK

SEQ ID NO: 5040 - DNA, 1137 bp, Pseudomonas syringae pv. syringae B728a
  CDS (1)..(1137): transl_table=11
atgaaccaggtcaaacaattctttacccgctacaaaatgctcgcgctggtgattgccatcgccgttatctggctgttcttcagctggcagaccgagggcggcttcctcaccccgcgcaacttgtccaacctgctgcgccagatgtccattaccgggattctggcctgcggcatggtgctggtgatcatcagcggcgagattgacctgtcggtaggctcattgcttggcctgctcggtggcctggcggcgattctggatgtcgtttaccacgtcccgctactggcaaacctgagtgtggtggccctgtgcggcctgatgatcggcctggccaacggctatatgaccgcctacctgcggatcccctcgttcatcgtcgggctgggtggcatgctggcgtttcgcggcgttctgctggggatcactggcggcacgaccatcgccccggtgtcgccgtcgctggtctatatcggccagggctatctgccacatgcggtcggcaccgggctcgggattctgctgctggcgctgacgctgttcctgacctggaaacaacggcgcaacagagcgctgcacggcctggcagcgcattcgctgattcgtgatgtgttgcgtgtggtgttgatcggcgccgtgctgggcggctttgtctatgtgctcaacagctacgacggaatccctgttccagtgttgctgttgctggtcctgctcggcgtattcagctacgtcaccagccagacggtattcggacgccgcgtctacgccgtcggcagcaacatggaggccacgcgcctgtccggcatcaacgtacaggccgtgaagctatggatcttcggcatcatgggcgtgatgtgcgcgttcgccgggctggtcaatacagcacgcctggccgccggctcaccctcggcaggcaacatgggcgaactcgacgccatcgccgcatgcttcatcggcggcacatcgatgcgcggtggttcaggcactgtctacggcgccctgctcggcgcactggtgattaccagtctcgacaacggcatgtcgatgctcgacgtcgacagttactggcagatgatcgtcaagggcggcattctggtgctggcggtatgggtggacgtgagtacccgcgccgggcggcgctga

SEQ ID NO: 5041 - protein, 378 aa, Pseudomonas syringae pv. syringae B728a
MNQVKQFFTRYKMLALVIAIAVIWLFFSWQTEGGFLTPRNLSNLLRQMSITGILACGMVLVIISGEIDLSVGSLLGLLGGLAAILDVVYHVPLLANLSVVALCGLMIGLANGYMTAYLRIPSFIVGLGGMLAFRGVLLGITGGTTIAPVSPSLVYIGQGYLPHAVGTGLGILLLALTLFLTWKQRRNRALHGLAAHSLIRDVLRVVLIGAVLGGFVYVLNSYDGIPVPVLLLLVLLGVFSYVTSQTVFGRRVYAVGSNMEATRLSGINVQAVKLWIFGIMGVMCAFAGLVNTARLAAGSPSAGNMGELDAIAACFIGGTSMRGGSGTVYGALLGALVITSLDNGMSMLDVDSYWQMIVKGGILVLAVWVDVSTRAGRR

SEQ ID NO: 5042 - DNA, 972 bp, Haemophilus influenzae 86-028NP
  CDS (1)..(972): transl_table=11
atgatgaaaaatgaaacatctaattttcaaataggaagatttttgattgaacagcgttcttttattgcgttgattattcttatcgcgattgtatcaatgattaatcctgatttttttagcgtagataatattttgaatattttacgccaaacttcggttaatgcgattattgcagtgggtatgactttcgttattttaattgcaggtatagatctttctgttggatctgtattggcattgacaggtgcaatcgccgcttcaatggtgagtatcgaattgcctatttttttagtcattcctgtggttttattgattggaacacttcttggtggcataagtggtgtaattgtggcaaaagggaaagttcaggcttttattgctaccttggttaccatgaccttactgcgtggtataacaatggtttatacagatggtcgtcctattacgacaggtttttcggataatgctgatctatttgctagcattggtacaggctatgttttaggtatcccagtaccaatttggattatgagtatcgtgtttgcggttgcttggtatattttaaaacacacaccaatcggtcgctatatttatgctttaggtggaaatgaggcagcgacccaactttctggtattaacgtcaataaaatcaaagtatttgtttttgcggtgagtggatttctttctgcgctggcgggtttaattgtaacttcacgtttatcttccgctcaacccactgctggcgtatcttatgaattagatgcaattgccgccgtggtagtcggtggaaccagtttgatgggggggaaaggtcgtgtaatgggaactctcatcggtgcattaatcatcggatttttaaacaatgcattaaatttattagatatttcatcttactatcaaatgatagcaaaagcgttggttattttggttgctgttttagccgataactatcttggtacaaaaaaactgtaa

SEQ ID NO: 5043 - protein, 323 aa, Haemophilus influenzae 86-028NP
MMKNETSNFQIGRFLIEQRSFIALIILIAIVSMINPDFFSVDNILNILRQTSVNAIIAVGMTFVILIAGIDLSVGSVLALTGAIAASMVSIELPIFLVIPVVLLIGTLLGGISGVIVAKGKVQAFIATLVTMTLLRGITMVYTDGRPITTGFSDNADLFASIGTGYVLGIPVPIWIMSIVFAVAWYILKHTPIGRYIYALGGNEAATQLSGINVNKIKVFVFAVSGFLSALAGLIVTSRLSSAQPTAGVSYELDAIAAVVVGGTSLMGGKGRVMGTLIGALIIGFLNNALNLLDISSYYQMIAKALVILVAVLADNYLGTKKL

SEQ ID NO: 5044 - DNA, 1137 bp, Pseudomonas syringae pv. phaseolicola 1448A
  CDS (1)..(1137): transl_table=11
atgaaccaggtcaaacagttcttcacccgctacaaaatgcttgcgctggtgattgccatcgcagtgatctggctgttcttcagttggcagaccgatggagggtttctgaccccgcgcaacctttccaacctgctgcggcagatgtccatcaccggcattctggcttgcggcatggtattggtgatcatcagtggcgagatcgacctgtcggtgggttcattgctgggcctgctcggggggctggcggcgattctggatgtggtttaccaggtgccgctgctggcaaacctgagcgtggttgcgctatgtgggctgatgattggcctggccaacggctacatgacggcctacctgcgcattccctccttcattgtcgggctgggcggtatgctggcctttcgcggcattcttctggggattaccggcggcacgaccatcgccccggtatcgccttcgctggtctacgtcggccagggatatttgccgcactctgtcggtacagcgcttggcgtactgttgctggccctgacgctgttcctgacctggaaacaacggcgcaatagagccctgcacgggctggcggcacattcgatgatccgtgatgtgttacgcgtggtattgatcggcgctgtgttgggcgggtttgtctatgtgctcaacagctacgacggaatccccgttccggtattgctgttgctggtcctgctcggtgtgttcagttatgtcaccagccagacggttttcggacggcgcgtctatgcggtgggcagcaacatggaagccacgcggttatccggcatcaacgtacaggccgtaaaactgtggatcttcggcatcatgggcgtcatgtgtgccttcgccgggctggtcaataccgcacgcctggctgcaggctcaccctcggccggcaacatgggcgaactggacgccattgccgcctgttttatcggcggcacgtccatgcgcggtggctcgggcactgtctacggtgcactgcttggcgcgctggtcatcaccagtctcgataacggcatgtccatgctcgacgtcgacagttactggcagatgatcgtcaagggcggcatcctcgtgctggcggtgtgggtggacgtgagcacacgggccggacggcggtga

SEQ ID NO: 5045 - protein, 378 aa, Pseudomonas syringae pv. phaseolicola 1448A
MNQVKQFFTRYKMLALVIAIAVIWLFFSWQTDGGFLTPRNLSNLLRQMSITGILACGMVLVIISGEIDLSVGSLLGLLGGLAAILDVVYQVPLLANLSVVALCGLMIGLANGYMTAYLRIPSFIVGLGGMLAFRGILLGITGGTTIAPVSPSLVYVGQGYLPHSVGTALGVLLLALTLFLTWKQRRNRALHGLAAHSMIRDVLRVVLIGAVLGGFVYVLNSYDGIPVPVLLLLVLLGVFSYVTSQTVFGRRVYAVGSNMEATRLSGINVQAVKLWIFGIMGVMCAFAGLVNTARLAAGSPSAGNMGELDAIAACFIGGTSMRGGSGTVYGALLGALVITSLDNGMSMLDVDSYWQMIVKGGILVLAVWVDVSTRAGRR

SEQ ID NO: 5046 - DNA, 1026 bp, Pseudomonas syringae pv. phaseolicola 1448A
  CDS (1)..(1026): transl_table=11
atgagcaacgcgatttcgcaaaacaaaccagccttggcaccgaccaggaacaaacggcggctgccaaccgagctgagtatttttctggtgctgatcggtataggtctgatctttgagctgtttggctggatcgtccgtgatcagagctttctgctcaactcccagcgtctggtactgatgatccttcaggtgtcgatcatcggcttgctggccatcggcgtgactcaggtgatcattaccacaggcatcgacctgtcgtccggttcggtgctggcactgtcagcgatgattgccgcgagcctggcgcaaacctcggacttttcccgggcggtatttccttccttgaccgacctgcccgtgtggattccgatcgtggtcgggctcggagtcgggctgctggcgggtgccatcaacggcagcatcattgccataaccggtattccgccattcattgccacgctgggcatgatggtctccgcgcgtggcctggcgcgcttctacaccgaaggtcagccggtgagcatgctctctgactcctacacggctatcggacagggcgcgatgccggtgatcatctttctggtggtggcggtgatcttccacattgccctgcgttacaccaagtacggcaaatacacctacgccatcggcggcaacatgcaggctgcgcgtacttccgggatcaacgtcaagcgccacctggttatcgtctatagcatcgccgggctgctggccgggctggcaggggtggttgcctcggcacgtgccgcaaccgggcaggccagaatgggcatgtcctatgaactggacgctatcgctgccgcagtcatcggcggcaccagcctgtccggtggagtagggcgaatcaccggcactgtgatcggtgcgctgattctcggcgtaatggccagtggtttcacctttgtcggcgtagacgcttatgttcaggacattatcaaaggcctgatcattgtagtggcggtggtaatcgatcaatatcgcaacaagcgcaagaccaagcgctga

SEQ ID NO: 5047 - protein, 341 aa, Pseudomonas syringae pv. phaseolicola 1448A
MSNAISQNKPALAPTRNKRRLPTELSIFLVLIGIGLIFELFGWIVRDQSFLLNSQRLVLMILQVSIIGLLAIGVTQVIITTGIDLSSGSVLALSAMIAASLAQTSDFSRAVFPSLTDLPVWIPIVVGLGVGLLAGAINGSIIAITGIPPFIATLGMMVSARGLARFYTEGQPVSMLSDSYTAIGQGAMPVIIFLVVAVIFHIALRYTKYGKYTYAIGGNMQAARTSGINVKRHLVIVYSIAGLLAGLAGVVASARAATGQARMGMSYELDAIAAAVIGGTSLSGGVGRITGTVIGALILGVMASGFTFVGVDAYVQDIIKGLIIVVAVVIDQYRNKRKTKR

SEQ ID NO: 5048 - DNA, 1251 bp, Mycoplasma hyopneumoniae J
  CDS (1)..(1251): transl_table=4
atggaattttttaataattttaaaaataatttaaaagattttgcaaaaccagttaaaaattatctaaatgagacaaaaagtggacattatcttcaagccagcctccaccatctaaaaaaattttcaatgttatatatttttcttctggtttttgttatttttttagggattaccaaaggaactttattacaagcaaatacattcacccttttatttcaaaataattcttatattattattttggcaatggggatgctacttgtaattttaagtggaaatattgatctttctgttggaactcttgtcggtcttttaggactattttcggtttatatttataataataccggccaaagtatttgactaacttttatacttacaacgctaatcggggctgcaattggttttatccaaggctgacttattggttatggaaatatcccggcatttattgtaactttaggtggatttcttgcttttaaaggggctcaacttgtctattcaaatggggcaacactgactccaattggatccgttgattcaacttatattaagggaacaattgaaggaatccctgatctaaaagtagggaatatttgaattttttctttacttttacctctaattttaggcgcaattattgttagtctgcgaacttgaggatattatacaaaaagaaaatttggcattaaagttcaaaatattattatttttacaataattcaagtaattattttttctttattccttgcttgtggtataatattttcacttggagataaatcaatgcgttactatgttttatatgtaggtattgcactggctttatttacttttcttagccaaaataccgcttttgggcgctctgtttatgcaattggtggcaaccggaaagctgctctattatccggagtcaatgttaaaagaacaacaatgataatttttattatcattggcgcactagccggattttcttcgattattttcacagctacttattcttctgcgacttcttcgcgaggtgatgatcttgctcttgatgtcatttcagttgtctttactggtggagcttcagtctatggtggaattggatcggttagtggaacgatattaggaacatcaattatcggggtaatcaaccaaggtttgcttgttctaaatgttgccgaatcacaaaaatacataattaaaggactaattttagttgctgttgttggatgagatgttctctcaaataagaaaaataactaa

SEQ ID NO: 5049 - protein, 416 aa, Mycoplasma hyopneumoniae J
MEFFNNFKNNLKDFAKPVKNYLNETKSGHYLQASLHHLKKFSMLYIFLLVFVIFLGITKGTLLQANTFTLLFQNNSYIIILAMGMLLVILSGNIDLSVGTLVGLLGLFSVYIYNNTGQSIWLTFILTTLIGAAIGFIQGWLIGYGNIPAFIVTLGGFLAFKGAQLVYSNGATLTPIGSVDSTYIKGTIEGIPDLKVGNIWIFSLLLPLILGAIIVSLRTWGYYTKRKFGIKVQNIIIFTIIQVIIFSLFLACGIIFSLGDKSMRYYVLYVGIALALFTFLSQNTAFGRSVYAIGGNRKAALLSGVNVKRTTMIIFIIIGALAGFSSIIFTATYSSATSSRGDDLALDVISVVFTGGASVYGGIGSVSGTILGTSIIGVINQGLLVLNVAESQKYIIKGLILVAVVGWDVLSNKKNN

SEQ ID NO: 5050 - DNA, 1251 bp, Mycoplasma hyopneumoniae 7448
  CDS (1)..(1251): transl_table=4
atggaattttttaataatttaaaaaataatttaaaagattttgcaaaaccagttaaaaattatctaaatgagacaaaaagtggacattatcttcaagccagcctccaccatctaaaaaaattttcaatgttatatatttttcttctggtttttgttatttttttagggattaccaaaggaactttattacaagcaaatacattcacccttttatttcaaaataattcttatattattattttggcaatggggatgctacttgtaattttaagtggaaatattgatctttctgttggaactcttgtcggtcttttaggactattttcggtttatatttataataataccggccaaagtatttgactaacttttatacttacaacgctaatcggggccgcaattggttttatccaaggctgacttattggttatggaaatatcccggcatttattgtaactttaggtggatttcttgcttttaaaggggctcaacttgtctattcaaatggggcaactctgactccgattggatctgttggatcaacttatattaaaggaacaattgaaggaatccctgatctaaaagtagggaatatttgaattttttctttacttttacctctaattttaggcgcaattattgttagtctgcgaacttgaggatattatacaaaaagaaaatttggcattaaagttcaaaatattattatttttacaataattcaagtaattattttttctttattccttgcttgtggtataatattttcacttggagataaatcaatgcgttactatgttttatatgtaggtatcgcactggctttatttacttttcttagccaaaataccgcttttgggcgctctgtttatgcaattggtggaaaccggaaagctgctctattatccggagtcaatgttaaaagaacaacaatgataatttttattatcattggcgcacttgctggattttcttcgattattttcacagctacttattcttctgcgacttcttcgcgaggtgatgatcttgctcttgatgtcatttcagttgtctttactggtggagcttcagtctatggtggaattggatcggttagtggaacaattctaggaacatcaattatcggggtaatcaaccaaggtttacttgttctaaatgttgccgaatcacagaaatacataattaaaggactaattttagttgctgttgttggatgagatgttctctcaaataagaaaaataactaa

SEQ ID NO: 5051 - protein, 416 aa, Mycoplasma hyopneumoniae 7448
MEFFNNLKNNLKDFAKPVKNYLNETKSGHYLQASLHHLKKFSMLYIFLLVFVIFLGITKGTLLQANTFTLLFQNNSYIIILAMGMLLVILSGNIDLSVGTLVGLLGLFSVYIYNNTGQSIWLTFILTTLIGAAIGFIQGWLIGYGNIPAFIVTLGGFLAFKGAQLVYSNGATLTPIGSVGSTYIKGTIEGIPDLKVGNIWIFSLLLPLILGAIIVSLRTWGYYTKRKFGIKVQNIIIFTIIQVIIFSLFLACGIIFSLGDKSMRYYVLYVGIALALFTFLSQNTAFGRSVYAIGGNRKAALLSGVNVKRTTMIIFIIIGALAGFSSIIFTATYSSATSSRGDDLALDVISVVFTGGASVYGGIGSVSGTILGTSIIGVINQGLLVLNVAESQKYIIKGLILVAVVGWDVLSNKKNN

SEQ ID NO: 5052 - DNA, 1254 bp, Thermobifida fusca YX
  CDS (1)..(1254): transl_table=11
atggctcagcaaaccaccccggctccccagggcgccacggtcgcccgggacccccggctcatcatggacggctccggtctaggcgggctggtgcgcggcgcgctgcgccggctccgcagcggagaactcggcccgctgccggtcctcgtcggactcatcgtgatcgccggcgtcttctggagcctcaaccccaagttcctcaccgcccagaatctgtccaacctcaccctgcagatcgtcgccgtcggcttcatggcctgcggcgtgatcatggtgctgctgctcggggagatcgacctctccgtcggatcggtcgcaggcgtgtgcggcgtgatcgtgacgctcctggcagtcaactaccagtggaacgagatcgccgcgatcgtggtcgccatcctcgccggcaccctcatcggcaccctgcacggcacgatcttcgccaagatcggggtacccgccttcgtggtcaccttggccggattgatcggctggcagggcgcccagctctacctgctcggccctgaaggcacgatcaacgtcccctacaacggcctgatcggtgccatcacccacacctatctcgtcccggcggtcggctgggggatcggaatcaccgcggtcgccctctacgggctgatcagcgtccgcggggcgcgccgccgcgccgcggccgggctgcccgccaagtcggtcacggagatcggggtgcgcaccgcgctcctcgccctccccgtcctcggcggggtgtgggtgctcaactccttccgcggagtgcccgtcgctttcctgctcttcgtcggggtcgtggtgctcttcgacctgatcctgcggaagacccgctacgggcggatggtgttcgccgtgggcggcagcgcagaagcggcacgccgcgccggcatcaacgtcgacctgatccgcatctccgtgttcgctctcgcctccaccctggccggggtgggcggcatcctcctcgtgtcgcgcagctacgccgtcaaccagctcaccgggggcggcgacgacctgatgatggcgatcgcggccgcggtcatcggcggcaccagcctcttcggcggacgcggcagcgcctactcggccctgctcggcggcctcgtgctcggcgcgatctcctcggggctgtacctgctgcagatggactcctcggtgcggttcatgatcaccgcggtggtcctcctggtagcggtcatcctcgacgcggtgtcccgccggacccgcaaagcccacgcccgggagtag

SEQ ID NO: 5053 - protein, 417 aa, Thermobifida fusca YX
MAQQTTPAPQGATVARDPRLIMDGSGLGGLVRGALRRLRSGELGPLPVLVGLIVIAGVFWSLNPKFLTAQNLSNLTLQIVAVGFMACGVIMVLLLGEIDLSVGSVAGVCGVIVTLLAVNYQWNEIAAIVVAILAGTLIGTLHGTIFAKIGVPAFVVTLAGLIGWQGAQLYLLGPEGTINVPYNGLIGAITHTYLVPAVGWGIGITAVALYGLISVRGARRRAAAGLPAKSVTEIGVRTALLALPVLGGVWVLNSFRGVPVAFLLFVGVVVLFDLILRKTRYGRMVFAVGGSAEAARRAGINVDLIRISVFALASTLAGVGGILLVSRSYAVNQLTGGGDDLMMAIAAAVIGGTSLFGGRGSAYSALLGGLVLGAISSGLYLLQMDSSVRFMITAVVLLVAVILDAVSRRTRKAHARE

SEQ ID NO: 5054 - DNA, 942 bp, Staphylococcus saprophyticus subsp. saprophyticus ATCC 15305
  CDS (1)..(942): transl_table=11
atgaaacaatctagcttatcattttcatatttagaaaaaattattccatttattggtttaatattattagtcattatcattagtgtattaaatagtgcatttttagaaccatctaatctgtttaacttattgagacaagtttctataaatggattaattgcatttggtatgacatttgtaattttaacgggcggcatagacttatctgttggttctacactagcgttatccagtgcgcttatagctattttaatggtctcaggtgtagattctatgattgcgctattagtaggctgtattttaggtgcgattttaggtgctattaacgggcttttaattacgcttggtaagatggcgccatttatagcgactttggctacaatgactgtctttagaggtttgacactggttattacagatggcaatccaattactaatttaaatggcagctatgcctttcaattatttggacgaggttattttttaggtattccagttccagcagtgacaatgtttattactttcattattttgtatatcattttacataaaacaatatttggtagacaaacttatgctatgggtggtaatgaaaaggcagcttttatctctggtattaaagtgaataaattaaaaatcatgatttatagtttagctggtttaatgtctgcaatggctggtgcgattctcacatctcgtttaaactcagcgcagccaactgcaggtatgtcatatgaattggatgcaatcgctgctgttgtattgggtggtacatctttaacaggtggtaagggacgtatacttggcacattaataggtgtattaattataggtgtgttgaataatggactaaatttattaggggtttcttcattttaccaacaagtagttaaaggagttgtcattattattgcagtactcattgatagaaagaataaataa

SEQ ID NO: 5055 - protein, 313 aa, Staphylococcus saprophyticus subsp. saprophyticus ATCC 15305
MKQSSLSFSYLEKIIPFIGLILLVIIISVLNSAFLEPSNLFNLLRQVSINGLIAFGMTFVILTGGIDLSVGSTLALSSALIAILMVSGVDSMIALLVGCILGAILGAINGLLITLGKMAPFIATLATMTVFRGLTLVITDGNPITNLNGSYAFQLFGRGYFLGIPVPAVTMFITFIILYIILHKTIFGRQTYAMGGNEKAAFISGIKVNKLKIMIYSLAGLMSAMAGAILTSRLNSAQPTAGMSYELDAIAAVVLGGTSLTGGKGRILGTLIGVLIIGVLNNGLNLLGVSSFYQQVVKGVVIIIAVLIDRKNK

SEQ ID NO: 5056 - DNA, 999 bp, Shigella sonnei Ss046
  CDS (1)..(999): transl_table=11
atgtctgcttcgtcattaccattgccgcagggcaagagcgtctcgctcaaacaatttgtcagtcgccatattaatgagatcggtttgctggtggtgattgccattctttatctggtcttctccctgaacgcgcctggctttatctcattgaataaccagatgaacgtgctgcgcgatgccgccaccattgggattgccgcctgggcgatgacgctgattattatctccggtgaaattgatgtcagcgttgggccgatggtggcttttgtctcggtgtgcctggcatttttgctgcaatttgaagttccgttggcgattgcttgtctgctggtgttgctgttaggcgcgctgatgggaacgctcgccggggtgctgcgcggcgtgtttaacgtaccaagtttcgttgccacactggggctgtggagcgccctgcgcggaatggggctgtttatgaccaacgcactgccagtgccgattgacgaaaacgaggtgctggactggctgggcggacaatttctcggtgtgccagtatccgcgctgatcatgatggtgttgtttgcgctgtttgtgttcattagccgaaaaaccgccttcgggcgctcggtttttgccgttggcggtaatgccacggcggcgcagttgtgcggtattaacgttcgtcgggtgcgcattcttatctttaccctttcgggattattagcggcggtgaccggcattttgctggcggcacgcctcggttccggtaacgcaggtgccgcaaacggtctggagtttgacgtcatcgccgcggtcgtggtcggcggtacggcactttccggcggtcgcggttccctgttcggtacattgcttggtgtgctggtgattacgctaatcggtaacggtctggtgctgctcggtattaactcctttttccagcaggtggtacgcggcgtcatcatcgtggtggcggtgctggcgaatatcttgctgacccagcgaagcagtaaagcgaaacgctaa

SEQ ID NO: 5057 - protein, 332 aa, Shigella sonnei Ss046
MSASSLPLPQGKSVSLKQFVSRHINEIGLLVVIAILYLVFSLNAPGFISLNNQMNVLRDAATIGIAAWAMTLIIISGEIDVSVGPMVAFVSVCLAFLLQFEVPLAIACLLVLLLGALMGTLAGVLRGVFNVPSFVATLGLWSALRGMGLFMTNALPVPIDENEVLDWLGGQFLGVPVSALIMMVLFALFVFISRKTAFGRSVFAVGGNATAAQLCGINVRRVRILIFTLSGLLAAVTGILLAARLGSGNAGAANGLEFDVIAAVVVGGTALSGGRGSLFGTLLGVLVITLIGNGLVLLGINSFFQQVVRGVIIVVAVLANILLTQRSSKAKR

SEQ ID NO: 5058 - DNA, 1137 bp, Pseudomonas fluorescens PfO-1
  CDS (1)..(1137): transl_table=11
atgaatcaggtcaaacaactcttcacccgctacaagatgctcgcactggtgtttgccgtggcgttgatctggctgttcttcagctggcagaccgagggcggattcctgacaccacgcaacctctccaacctgctgcgccagatgtccatcaccgggatcctcgcctgcggcatggtgctggtcatcatcagcggcgagatcgatctgtccgtcggctcattgctgggcctgctcggtggcgtggcagccattctcgacgttgtctatcacataccactgctggcgaacctgagccttgtggtggtgtgcggactgctgatcggcctcgccaacggctacatggcggcctacctgcgcattccgtcgttcatcgtggggctgggaggcatgctggcttttcgggggattttgctggggatcaccggcggcacgaccattgcgccggtgtcgccggaactcgtctacattggccagggttatctgccccatacggtcggcgcgggtctgggtgtcctgctgttcgcactgacgttgttcctgacctggaaacaacggcgcaatcgcgcccttcacggcctcgcggcacattcactggcgcgtgacgtggcacgcgtgttgctgatcggcgcggtgctggccgggtttgtccagaccctcaacagctatgacggcattcccgtgccggtcctgctcctgctgatcctgctgggcggattcagctatgtgaccagccagaccgtgttcggccgacgcgtctattccgtgggcagcaacatggaagcgacgcgcctgtccggtatcaatgtgcaggccgtgaagctctggatcttcgggatcatgggcgtgatgtgcgccctcgccggcgtggtcaacaccgcgcgcctggccgccggctccccctcggccggcagcatgggcgaactcgacgccatcgccgcctgcttcatcggtggcacctcgatgcgtggcggttccggcacagtctatggcgccctcctcggcgccctggtcatcaccagcctggacaacggcatgtccatgctcgacgtcgacagctactggcagatgatcgtcaagggcagcattctggtgttggcggtttgggttgatgtgagtacgcggactgggcggcgttga

SEQ ID NO: 5059 - protein, 378 aa, Pseudomonas fluorescens PfO-1
MNQVKQLFTRYKMLALVFAVALIWLFFSWQTEGGFLTPRNLSNLLRQMSITGILACGMVLVIISGEIDLSVGSLLGLLGGVAAILDVVYHIPLLANLSLVVVCGLLIGLANGYMAAYLRIPSFIVGLGGMLAFRGILLGITGGTTIAPVSPELVYIGQGYLPHTVGAGLGVLLFALTLFLTWKQRRNRALHGLAAHSLARDVARVLLIGAVLAGFVQTLNSYDGIPVPVLLLLILLGGFSYVTSQTVFGRRVYSVGSNMEATRLSGINVQAVKLWIFGIMGVMCALAGVVNTARLAAGSPSAGSMGELDAIAACFIGGTSMRGGSGTVYGALLGALVITSLDNGMSMLDVDSYWQMIVKGSILVLAVWVDVSTRTGRR

SEQ ID NO: 5060 - DNA, 1299 bp, Rhodobacter sphaeroides 2.4.1
  CDS (1)..(1299): transl_table=11
atgagcgataccgccaatgcgccgggcgccgcccgcaagcgcagtttcatcgagaccctcgagatcgacacccgccttctgggcatgatcggtgccttcgtcgtgctctgtctcgtgttccatttccagaccgacgggcggttcctgaccccccgcaacatcttcaccctcgcgatccagaccgtctcggtcgcgatcatggcgacggggatggtcttcgtgatcgtcacgcgccacatcgacctgtcggtgggctcgctgcttgcgctctgctcggccgtcatgggcatgatgcaggtggtggtgctgccgcagatgatgggcatcgacttcggcagcccgctcatcgccccggtggcgatcgcctccggcctcgtcgtgggcgtggcgatcggcgccttcaacggctggctgatcggctatctcggcatcccctccttcatcgtgacgctgggggggctgctcatctggcgcaacgtggcctggtatctgacctcgggccagaccatcggcccgctcgaccagaccttccagctcttcggcgggatcaacggcaccatcggccccttctggtcctggatcctcggcggcgtgggcacggccgcggcgctctgggggctctggagcgcgcggcgggccaagcagtcgcacggcttcgccgtcaagccggtctgggccgagctcgtgatgggcggcgtcctttcggccgcaatcctgggcttcatcgccatcgtcaatgcctacgaagtgccggccgcgcgcctgcgccgcctgttcgaggcccgcggcgagactctgcccgagggctatacgacgggctacggcctgccgatctcggttcttctgctggtggcggtcgccatcgccatgaccgtcatcgccaagcgcacccgcttcgggcgctacatcttcgccaccggcggcaacccggatgcggccgagctgtcgggcatcaacacgcggctcctgacggtcaagatcttcgcgctgctgggcgggctctgcgcgctctcggcggtggtggcctcggcgcgcctgaccaaccacgccaacgacatcggcacgctcgacgagctgcgcgtgatcgccgcggccgtgatcggcggcaccgcgctctcgggcgggatgggcacgatctacggcgcgatcctcggcgcgatcatcatgcagtcgctccagtccgggatggcgatggtgggggtggatgcgccgttccagaacatcgtcgtgggctcggtcctcgtcctcgccgtgctgatcgacatcatctaccgcaagcggaccggaggcttcaaatga

SEQ ID NO: 5061 - protein, 432 aa, Rhodobacter sphaeroides 2.4.1
MSDTANAPGAARKRSFIETLEIDTRLLGMIGAFVVLCLVFHFQTDGRFLTPRNIFTLAIQTVSVAIMATGMVFVIVTRHIDLSVGSLLALCSAVMGMMQVVVLPQMMGIDFGSPLIAPVAIASGLVVGVAIGAFNGWLIGYLGIPSFIVTLGGLLIWRNVAWYLTSGQTIGPLDQTFQLFGGINGTIGPFWSWILGGVGTAAALWGLWSARRAKQSHGFAVKPVWAELVMGGVLSAAILGFIAIVNAYEVPAARLRRLFEARGETLPEGYTTGYGLPISVLLLVAVAIAMTVIAKRTRFGRYIFATGGNPDAAELSGINTRLLTVKIFALLGGLCALSAVVASARLTNHANDIGTLDELRVIAAAVIGGTALSGGMGTIYGAILGAIIMQSLQSGMAMVGVDAPFQNIVVGSVLVLAVLIDIIYRKRTGGFK

SEQ ID NO: 5062 - DNA, 1194 bp, Moorella thermoacetica ATCC 39073
  CDS (1)..(1194): transl_table=11
gtgtttaatcttattaaaactatttcccctgcagaaacggtacaatctaaacctaaagcgaatgggtatttaagtagaatagatatacgcgcttatacaatgatattagccttattgggtatatgggctattttcacttatactacccagggtgcttttttgacttcccgtaatctatcaaacctcttcaggcagatgtcaattacctctattttagcgataggtatggtctttgtaatagtagccggtcatattgacctttccgtaggttctctcatgggacttactggaggggtagcggcaattttacaggtctggtatggttggcagaccattcctgctatttttataagctttttaattggtctgctggccggcttatggcagggctggtgggttgcctataaaaaggtgcctgctttcattgtcaccctgggcggtatgatggtatttcggggaattctaataggaattagtcatggcgaaacagtttcgcctctcatggatagttttaaacaaataggccaatcctatgtacctgaaagtacaggcttcttattagcattcctgggtattatttatgtgatctatgttactgtaaagcaacggtatactagaattaagtatggttttactgtgccttctttagctctggaaataatgcgtaccattttttacgcctttctcattggcctttttgtctatctaatgaatgattaccagggtatacctgtacctgtcctaatcgtagtggcgatggcatttatttttacgggtttagcaacgaaaactcgcttcgggcgttatgtctacgcaattggtggtaacagtgaagcagcacgtttatccggtattaatattcgatataacatcctggccgtttttgttatcagtgggttaatggctgccttaagcggtatcctgttaactgcaagattaaacggtgcttcagtagctgcagggcaaaatgctgagcttgatgccattgcagcgtgcgttataggtggtacaagtcttatgggtggtacaggtagtattggtggggcgatgataggagcacttgttatggccagtttagataatggcctgagcatgatgaataccccgaccttctggcagtttatagttaaaggtttgattcttgtgctggcggtatggatcgatatcgcaactaaaacaagggctcaaaattga

SEQ ID NO: 5063 - protein, 397 aa, Moorella thermoacetica ATCC 39073
MFNLIKTISPAETVQSKPKANGYLSRIDIRAYTMILALLGIWAIFTYTTQGAFLTSRNLSNLFRQMSITSILAIGMVFVIVAGHIDLSVGSLMGLTGGVAAILQVWYGWQTIPAIFISFLIGLLAGLWQGWWVAYKKVPAFIVTLGGMMVFRGILIGISHGETVSPLMDSFKQIGQSYVPESTGFLLAFLGIIYVIYVTVKQRYTRIKYGFTVPSLALEIMRTIFYAFLIGLFVYLMNDYQGIPVPVLIVVAMAFIFTGLATKTRFGRYVYAIGGNSEAARLSGINIRYNILAVFVISGLMAALSGILLTARLNGASVAAGQNAELDAIAACVIGGTSLMGGTGSIGGAMIGALVMASLDNGLSMMNTPTFWQFIVKGLILVLAVWIDIATKTRAQN

SEQ ID NO: 5064 - DNA, 1200 bp, Burkholderia thailandensis E264
  CDS (1)..(1200): transl_table=11
atgaataccgaactgtcttccgccccggcgcgtgcgcgcgcagcccgcggccgccgcgctcgcggcctgccgtcgcgccggctgttcgcgcgctacaaggtcctcgcgctgctgctcgcggtcgcggcgatctgggcgttcttctcggtgctgaccgacggcgcgttcgtcacgccgcgcaacgtgtcgaacctgctgcggcaaatgtcgatcaccggcatgctcgcgtgcgggatggtgttcgtgatcatcgcgggcgagatcgatctgtcggtcggctcgctgctcgggctgctcggcggcgtcgcggcgatcctcgacgcgaaccgccgctggccggtcgccgcgacggtgccggcggtgctcgcgctcggcgtggcgatcgggctcttcaacggctggtggtcgacctaccggcgcgtgccgtcgttcatcgtcggcctcggcgggatgctcgcgttccgcgggatactgctcggcgtgacgggcggctcgacgatcgcgccggtatcggacggcttcgtgttcatcgggcagggctatctgccgcgcgcggccggcgacgcgctcgcgctcgcgctgttcgcgttcgtcgtgctgctcgtcgtgcggcagcgcggcaaccggcggcgctaccggctcgcggtcgcgccgccgtggcaggacgtcgcgaaaatcgccggcgcgggcgcggtactgttcgcgttcgtcgcgacgctcgaccgctacggcggcattccggtgcccgtgctgctgctgctcgcgctgctcggcgcgttttcatgggtcgcgacgcagaccgtgttcggccggcgcatctatgcggtcggctcgaacctcgaggcgacgcgcctctcgggcatcgacacggaccgcgtgaagctcgcgatcttcgcgctgatggggctgatgtgcgcgttcgcgggcctcgtcaacaccgcgcggcttgccgccggctcgccgtcggcgggcgcgatgggcgagctcgacgcgatcgccgcgtgcttcatcggcggcacgtcgatgcgcggcgggtccggcaccgtttatggcgcgctgatcggagcgctcgtgatggcgagcctcgacaacggcatgtcgatgctggacgtcgacgcgtactggcagatgatcgtcaagggcggggtgctggtgctcgcggtgtggatcgacgtggcgtcgcggtcgaaccggcggtga

SEQ ID NO: 5065 - protein, 399 aa, Burkholderia thailandensis E264
MNTELSSAPARARAARGRRARGLPSRRLFARYKVLALLLAVAAIWAFFSVLTDGAFVTPRNVSNLLRQMSITGMLACGMVFVIIAGEIDLSVGSLLGLLGGVAAILDANRRWPVAATVPAVLALGVAIGLFNGWWSTYRRVPSFIVGLGGMLAFRGILLGVTGGSTIAPVSDGFVFIGQGYLPRAAGDALALALFAFVVLLVVRQRGNRRRYRLAVAPPWQDVAKIAGAGAVLFAFVATLDRYGGIPVPVLLLLALLGAFSWVATQTVFGRRIYAVGSNLEATRLSGIDTDRVKLAIFALMGLMCAFAGLVNTARLAAGSPSAGAMGELDAIAACFIGGTSMRGGSGTVYGALIGALVMASLDNGMSMLDVDAYWQMIVKGGVLVLAVWIDVASRSNRR

SEQ ID NO: 5066 - DNA, 1200 bp, Burkholderia xenovorans LB400
  CDS (1)..(1200): transl_table=11
atgacgcccgacgttacttcccaacgcgccgatgaagccctgccgcgaggcgcattcggcggtccgcagcgccttcagcaactgtttgcgcgctacaagattctcgcgctgctgatcgccgtggccgcgatctggattttcttttcggtgctgacgcacggcgctttcgttacgccgcgcaatctgtcgaacctgctgcggcagatgtcgattaccggcatgctcgcgtgcggcatggtgttcgtgatcattgccggcgagatcgatctgtcggtcgggtcgctactcggtttgctcggcggcgtggcggcgatactcgacgtcaaccggcactggccgctcgccgtcacgttacccgtggtgatgttgctcggcgtgctgatcggcatgttcaacggatggtggtcgacttaccggcgcgtgccgtcgttcattgtcgggctcggcggcatgctggcgtatcgcggcattctgctcggcgtgacaggcggctcgacgattgcgccggtgtcggacggcttcgtgttcgtcgggcaaggatatctgccgaggctcgcgggcgatacgcttgccgtggtgctgtttgtgctgctggcatttctgacgatacggcagcggcgaaaccgcgagcgttatcagttgcgtgtggtgccggtttggcaggacgtcgtgaaagtggtgggcgcgggcgtgattctcgccggctttgtcgctacgctcgaccgttacggcggtattccggtgccggtcctgttgctgctcgcgctgctgggtatctttacgtggatcgccacgcagacggtgttcgggcggcgcatctatgcggttggttcgaacctcgaagcgacgcgactctcgggcgtcaacaccaaccgcgtgaaactggcgattttcgcgctgatggggctgatgtgcgcgttcggcggcatcgtcaatacggcgcggcttgctgccgggtcgccttcggccggatcgatgggcgagctcgatgctattgcggcttgctttatcggtgggacgtcgatgcgcggtggttccggcacggtctacggtgcgttgatcggcgcactggtcatggcgagcctcgataacggcatgtcgatgctcgatgtcgatgcttactggcagatgatcgtgaagggcagcattctcgtgctggccgtgtggatcgatgtggtgtcggggtcgaaccggcggtga

SEQ ID NO: 5067 - protein, 399 aa, Burkholderia xenovorans LB400
MTPDVTSQRADEALPRGAFGGPQRLQQLFARYKILALLIAVAAIWIFFSVLTHGAFVTPRNLSNLLRQMSITGMLACGMVFVIIAGEIDLSVGSLLGLLGGVAAILDVNRHWPLAVTLPVVMLLGVLIGMFNGWWSTYRRVPSFIVGLGGMLAYRGILLGVTGGSTIAPVSDGFVFVGQGYLPRLAGDTLAVVLFVLLAFLTIRQRRNRERYQLRVVPVWQDVVKVVGAGVILAGFVATLDRYGGIPVPVLLLLALLGIFTWIATQTVFGRRIYAVGSNLEATRLSGVNTNRVKLAIFALMGLMCAFGGIVNTARLAAGSPSAGSMGELDAIAACFIGGTSMRGGSGTVYGALIGALVMASLDNGMSMLDVDAYWQMIVKGSILVLAVWIDVVSGSNRR

SEQ ID NO: 5068 - DNA, 1203 bp, Acidobacteria bacterium Ellin345
  CDS (1)..(1203): transl_table=11
atgagcggcaacaatcgtgcagtagccacgagtgtgcaaattgttgaggctggaaggacgagcaatcttccgccgcaagtgaagttcggtgcaaccgcgcgagcttacacgatggcggctgcgctggtggcgatttggatcgtgttcgaatacaccactcacggcgtattcctgaatgcgcgcaacttttcaaacctcacgcgacagatggctgtcaccggtgtgctctctgtgggcatgctgatggtgatcgtgattggcgaaatcgatttgtccgttggatcgctagttggtctaacagggatggctgcagcgctcgtccaggcaaacaacgcctggggtgtgaccgcgaccttgaccatcgctcttgtctttggcctgatcattggctgcgcacagggaatcctcacttcgtacgctcgcgttccgtccttcatcgtgactctcggaggactgcttgcttggcgcggcgtaacaaaagcgatcagtgcgggccagacgattccaatccaactgtacaatttcaactcaatcggccaatcctatctggacaaaccgatcggctgggcgttcgctgctctggcggtggtagcgattatcgtcacgcagcttcgctggcagtcctcgcgcaagcgccttggactatcaactctttcgagtacgcagcttgcacttcgcatcggtattccctcggttttgtccgtggccctggttgctatgctcaacgcgtatgaaggaatccctgtacccgtcctattgttcctgattgtcgcccttgctggcgcctttgttatgtcaaacacaacctggggacgttacatgtacgccgtcggcgggaaccgtgaagctgcgcgcctctccggcatcaacactcgcgcgctgaccattgcgacattcggcgtactgggattgctcgctgggttggcaggcgtaatctataccgcgcgcgtcggaagcgcatcgcctgacgctggacttctgcttgaactggatgccattgcggcgtgcgttatcggcggggccagcttgatgggcgggcgcggtaccatagcgggcgcatgcatgggcgcgctgttcatggcgagcctggacaatgggatgtcgctgaaaaacgttcccgattttacgcaagatatcgtgaagggcaccattctcgttgccgctgttgcgctcgacatgctcagccgcaagcgcaacggatag

SEQ ID NO: 5069 - protein, 400 aa, Acidobacteria bacterium Ellin345
MSGNNRAVATSVQIVEAGRTSNLPPQVKFGATARAYTMAAALVAIWIVFEYTTHGVFLNARNFSNLTRQMAVTGVLSVGMLMVIVIGEIDLSVGSLVGLTGMAAALVQANNAWGVTATLTIALVFGLIIGCAQGILTSYARVPSFIVTLGGLLAWRGVTKAISAGQTIPIQLYNFNSIGQSYLDKPIGWAFAALAVVAIIVTQLRWQSSRKRLGLSTLSSTQLALRIGIPSVLSVALVAMLNAYEGIPVPVLLFLIVALAGAFVMSNTTWGRYMYAVGGNREAARLSGINTRALTIATFGVLGLLAGLAGVIYTARVGSASPDAGLLLELDAIAACVIGGASLMGGRGTIAGACMGALFMASLDNGMSLKNVPDFTQDIVKGTILVAAVALDMLSRKRNG

SEQ ID NO: 5070 - DNA, 1299 bp, Silicibacter sp. TM1040
  CDS (1)..(1299): transl_table=11
atgaccgacaccacgtctcagccaatcaccccacaaaacaagcgcaatctcttccagcagcttgagctggacgtgcggctattgggtatgattggcgcctttatcatcctctgcatcgggttcaatctggtgaccgacgggcggttcttgaccccgcgcaacatcttcaacctgacgattcagacggtttccgtggcgatcatggcctctggcatggtgtttgtgatcgttacccgccacatcgacctgagcgtcggcgcattgctcgcgacctgctcggcagtgatggcgatgacgcaaaccgaatttgtgccccatgttctcgggcttggtctcaaccacccgatcacatggatcgtggcagtcgtggtgggtctggtcacgggcacgctgatcggtgccttccacggctggatggtcggctatctgacaatcccggcctttatcgtgacgcttggtggctttctcgtctggcgcaacgtggcgtggtatctgaccgacgggcagaccatcggcccgctcgattccaccttcatgatgtttggcggcacaaatggcacccttggcacctcgctgagctggattctggggctggtggccacggcgttggcgctcctgacactctggaacagccgccgcgcaaagctcgcgcatgaattcccggtaaaaccgctctgggccgaaggcgccttggcgctgatcatctccggctcgatcctcgggtttgtcgcgatcctcaacgcctatgagatcccctcgcgtcgtctggcgcgcatgttcgaggcccgtggcgaagtgatgcccgaaggcttcacccaaggctacggcctaccgatctcggtgctgatcctgatcgcggtggccgtggtcatgaccctgatcgcacgccgcactcggttgggtcgctatatcttcgccaccggcggcaatccggatgcggcagagctctcggggatcaacacccgcatgctcaccgtgaagatctttgccatcatgggctttctctgtgcactctcggcagtcgtggcctcggcccgtctggcgaaccactccaacgatatcggcaccctggacgaactgcgcgtcatcgcggcagccgtcattggcggcaccgcgctctcgggtgggtttggcaccatctatggcgctatcctcggcgcactcatcatgcaaagccttcagtccggcatggccatggtgggtgtcgacgccccgttccagaacatcgttgtgggcaccgtgctggtcgcggccgtcttcatcgacatcatctatcgcaagcgtgtgggggccaagtaa

SEQ ID NO: 5071 - protein, 432 aa, Silicibacter sp. TM1040
MTDTTSQPITPQNKRNLFQQLELDVRLLGMIGAFIILCIGFNLVTDGRFLTPRNIFNLTIQTVSVAIMASGMVFVIVTRHIDLSVGALLATCSAVMAMTQTEFVPHVLGLGLNHPITWIVAVVVGLVTGTLIGAFHGWMVGYLTIPAFIVTLGGFLVWRNVAWYLTDGQTIGPLDSTFMMFGGTNGTLGTSLSWILGLVATALALLTLWNSRRAKLAHEFPVKPLWAEGALALIISGSILGFVAILNAYEIPSRRLARMFEARGEVMPEGFTQGYGLPISVLILIAVAVVMTLIARRTRLGRYIFATGGNPDAAELSGINTRMLTVKIFAIMGFLCALSAVVASARLANHSNDIGTLDELRVIAAAVIGGTALSGGFGTIYGAILGALIMQSLQSGMAMVGVDAPFQNIVVGTVLVAAVFIDIIYRKRVGAK

SEQ ID NO: 5072 - DNA, 1314 bp, Mesorhizobium sp. BNC1
  CDS (1)..(1314): transl_table=11
atgacggatgtaacctcccatgcgctttcaaaaaaagctgccgcagtgaacagcagcctgcctcagcgccttctcagggcgacggagctcgacacgcgcatgcttggcatggtcggcgcgctcgccgtcatctggatcggctttcatatcgtctccggcgggttgttccttacgccccgcaatctctggaacctgtcggtccaatccgcatcggtcgccatcatgtccaccggcatggtgctggtgatcgtcacgcgcaacatcgacctgtcggtgggctcgctgctcggattcgtcggcatggtcatgggtgtgacccagaccgaaatcctgccgcaatggcttggcttcggtcacttagcaatctggatcgcagcaattctggtgggtgttgcgcttggagcgcttatcggcgcaatgcaagggtacatcatcgcctatctggccgtgccgtcattcatcgtgacgctgggcgggctgctcgtctggcgcggtgcggcttggtgggtcaccagcggccgcaccgtggcgccgctcgatgccacataccgcttgatgggcggcggcccagatggcgccatcggtgcgttctggagctgggtggtcggcctgatcgcctgtgttgcgctcctgctcatgctggccaatggccgaaagcagcggcgcaaatttcacttcccgctgcggcctgtctgggccgaaagccttctggcggttatgggctgcgctttcatcctgggggccgtggccgttgccaattcctatccctggccttcggccatcgtccggcggtatgcgacagaaaacaacattaccgtgcccgaaggaggactcttcatcgcccatggcatcgcgatcccggtgctcatcgccgtgggagtcggtgtcgtgatgacctttcttgcaaaccgaacgcggttcggccgctacgtcttcgccatcgggggcaatcccgaagcggcggtgctcgccggcatcaacacgcgttgggtgacgatgaaggttttcatcctcatgggtgcgcttgtggggatttccagcgccatttcgacggctcgccttaacgccgccaccaacgcgatgggcacgctcgatgaattgctcgtgatcgcggcggccgttatcggcggcacatcgcttggcggcggcatcgggacgatcgccggcgccatgatcggcgccgtcctgatgcagtcgcttgccagcggcatgattctgctcggcgtcgacacgccgttgcaaaacatcgtcgttggcatcgtgctggtggtcgccgtgtggctcgacacgctctaccgcaagcgcgtgaaataa

SEQ ID NO: 5073 - protein, 437 aa, Mesorhizobium sp. BNC1
MTDVTSHALSKKAAAVNSSLPQRLLRATELDTRMLGMVGALAVIWIGFHIVSGGLFLTPRNLWNLSVQSASVAIMSTGMVLVIVTRNIDLSVGSLLGFVGMVMGVTQTEILPQWLGFGHLAIWIAAILVGVALGALIGAMQGYIIAYLAVPSFIVTLGGLLVWRGAAWWVTSGRTVAPLDATYRLMGGGPDGAIGAFWSWVVGLIACVALLLMLANGRKQRRKFHFPLRPVWAESLLAVMGCAFILGAVAVANSYPWPSAIVRRYATENNITVPEGGLFIAHGIAIPVLIAVGVGVVMTFLANRTRFGRYVFAIGGNPEAAVLAGINTRWVTMKVFILMGALVGISSAISTARLNAATNAMGTLDELLVIAAAVIGGTSLGGGIGTIAGAMIGAVLMQSLASGMILLGVDTPLQNIVVGIVLVVAVWLDTLYRKRVK

SEQ ID NO: 5074 - DNA, 1218 bp, Bifidobacterium longum DJO10A
  CDS (1)..(1218)
atgagcgccgcaactgcaacacctgcaaagaaagaagaaaagaccggcctgctggccacggttgccaacaatgcccgtcaatacggtattgtcggcgcactgctggtcatcgtcgtggccttcgaggtcctgaccggaggcgtgctgctgaagccgaactccttcgtgtccctgattcagcagaacgcttacgtgatcatcctggccattggtatggtgatggtcatcatcgccacccacatcgacctttcggttggttccttggtagccttcatcggtggtgtgtgtgcactgctgatggaacgcgccggagtcaactggatgctcgccatcgtcatcgctctggtcgtcggcctgatcgtcggcgtctggcagggcttctgggtcgccgtcatcggcatcccgggcttcattaccactctggccggcatgttgatcttccgtggtctcgccaccgtgatcgtcggcgaatccgtgccgattacctccctcgaattccgtggcattgcccgtaactacctgcccaacatccttggctggtggggtccgttcgatggtctgaccattgtgctcggcatcctgtgcatcgtcggctttgcctggagccagctgcgcaagcgcgcccgtgtggccaaggtcggcctggtgcccgagccgatgagcctgaccgtcctcaaaattgtgcttgccgcggtcgtcatcgccttcgtcacctacctgctggcttcctccggtaacgctgatcagggtggtaccccgatcatgctggtgatcgtcggtgtgctggtcttcatctacaacttcatcctgaccaagaccgtgttcggtcgccacgtgtacgccgttggtggcaaccgcaaggccgccatcctctccggtatcaacacccgccgcgtggacttcctgctgttcgtccacatgggcttcctgtccgcagtggccgctgtctgcatgctctcccgtctggcttccgcaactgctcaggccggtatggagttcgagatggacgccatcgccgcctgcttcatcggtggcacggccgttaccggtggtattggtaccatcccgggcgctgtgatcggtgcattcgtgatgggtgttatcaaccagggtctgtcgatcatgggtgttgacaccgccgtggtgaagaccatcaagggcctcgtgctcctgctggccgtcgccgtggacatcatgtccaagcgcaagaagagctga

SEQ ID NO: 5075 - protein, 405 aa, Bifidobacterium longum DJO10A
MSAATATPAKKEEKTGLLATVANNARQYGIVGALLVIVVAFEVLTGGVLLKPNSFVSLIQQNAYVIILAIGMVMVIIATHIDLSVGSLVAFIGGVCALLMERAGVNWMLAIVIALVVGLIVGVWQGFWVAVIGIPGFITTLAGMLIFRGLATVIVGESVPITSLEFRGIARNYLPNILGWWGPFDGLTIVLGILCIVGFAWSQLRKRARVAKVGLVPEPMSLTVLKIVLAAVVIAFVTYLLASSGNADQGGTPIMLVIVGVLVFIYNFILTKTVFGRHVYAVGGNRKAAILSGINTRRVDFLLFVHMGFLSAVAAVCMLSRLASATAQAGMEFEMDAIAACFIGGTAVTGGIGTIPGAVIGAFVMGVINQGLSIMGVDTAVVKTIKGLVLLLAVAVDIMSKRKKS

SEQ ID NO: 5076 - DNA, 1128 bp, Haemophilus somnus 129PT
  CDS (1)..(1128)
atgaataagttcaaatcaatcaatttacaagtctatattatgctgattgccattatggtgattatgttttttttctcaattgcaacagaaggggcttatttaagtgcaagaaatatctctaacttattacgtcaaactgctatcaccggtattcttgctattggtatggtgtttgtgattatctctgcagaaattgacttatcagttggttcactaatggggctactcggtggctttgcggcaattagtaatgtttggtggggttggccgttacccttaactatccttgttaccttgctcttaggtttactaatcggggcgtggagcggttggtgggttgcttatcaaaaagtaccatctttcatcgttaccttagcaggcatgcttgcatttcggggaattttgatcggattaacgaatggtactaccgtttcccccatcagtaatgatatgacaattatcggtcaaggttatctttccgacactatagggataattttagggagcatcataatattttgctttattgcttggggaagttatcagcgtaaagccagacaaaacctaaatttaccagttgccaaaatgcccaaagaaacagtgaaatatggcatgatagcaatccttattcttggtgcaatttatctgcttaacgattatcgaggcatgccaattccagtattaattctctgtggattagccattataggaacattcatttcgaaaaaaacagcatttggtcgacatatttacgcaattggtggcaatattgatgcagctcgcctatcaggtattgccgtggaaaaagttaaattaaccatttttgctcttaacggcttattagtggcaatagccggcttgattttaagttcccgtttaggagccggagcaccctctgccggtcaaaatgcagaactcgatgctattgccgcttgtgttatcggtggagccagtttagccggcggtatcggcagtatttttggcgtagtaatcggggcatttatcatcgccttattggataacggaatgagtatgctggatgtaccgactttttggcaatatattgtaaaaggtggcattttattactagcagtatggatagataccattagtaagaaaaaggtctaa

SEQ ID NO: 5077 - protein, 375 aa, Haemophilus somnus 129PT
MNKFKSINLQVYIMLIAIMVIMFFFSIATEGAYLSARNISNLLRQTAITGILAIGMVFVIISAEIDLSVGSLMGLLGGFAAISNVWWGWPLPLTILVTLLLGLLIGAWSGWWVAYQKVPSFIVTLAGMLAFRGILIGLTNGTTVSPISNDMTIIGQGYLSDTIGIILGSIIIFCFIAWGSYQRKARQNLNLPVAKMPKETVKYGMIAILILGAIYLLNDYRGMPIPVLILCGLAIIGTFISKKTAFGRHIYAIGGNIDAARLSGIAVEKVKLTIFALNGLLVAIAGLILSSRLGAGAPSAGQNAELDAIAACVIGGASLAGGIGSIFGVVIGAFIIALLDNGMSMLDVPTFWQYIVKGGILLLAVWIDTISKKKV

SEQ ID NO: 5078 - DNA, 1128 bp, Actinobacillus pleuropneumoniae serovar 1 str. 4074
  CDS (1)..(1128)
atgttgaagctaaaatctgtcaatttacaagtttatattatgctcattgctattgttgtgattatgagctttttctcggtagcaaccgacggtgcctatttaagcgcacgtaatatttcaaacttattacgccaaacctccattaccgggattttagcgatcgggatggtatttgtgattatctcggcggaaattgacctatccgtcggttcattaatggggttattaggcggattcgccgctatcgccgacgtttggtggggctggtctttaccgcttactattgcggtaacacttgtgctaggtacattattaggtgcttggaacggttggtgggtctcttatcgtaaagtaccgtcctttatcgtcaccttagcggggatgttagccttccgcggtattttaatcggcttaaccaacggtacgaccgtttcaccgattagtaatgatatgaccgctatcggtcaaggctatattccggatgttaccggtatgattctcggtttagtggcggtattctgtttcgttacttgggggacttatcaacgtaaagcgcgtaaaaacttaaacttgaatgtgcctgatgcgacgaaagacattatgaaatacggcttatttgctatctgtgtcttaggtgcgatttacttattgaacgattatcgcggtatcccgttccctgtactggtattagcgattttaaccgtggtcggtatgtttatcgcacgtaaaaccgcatttggtcgccatatttatgccatcggcggtaatattgaggcggcaagactttcagggattaacgttgaaaaagtaaaattaaccattttcgcaatcaacggttttatggtagcgattgccggtttaatccttagtgcgcgtttaggtgcgggggcgccgtctgcaggtcaaaatgcggagctggatgcgattgcggcttgtgtcatcggcggggtaagtttagccggcggtatcggtagcgtatatggcgttattatcggtgcctttattatcgctttacttgataacggtatgagtatgttagacgtgccgactttctggcaatatatcgtaaaaggtgcgattctattattagcggtttgggtcgatactatgagtaagaaaaaaatgtaa

SEQ ID NO: 5079 - protein, 375 aa, Actinobacillus pleuropneumoniae serovar 1 str. 4074
MLKLKSVNLQVYIMLIAIVVIMSFFSVATDGAYLSARNISNLLRQTSITGILAIGMVFVIISAEIDLSVGSLMGLLGGFAAIADVWWGWSLPLTIAVTLVLGTLLGAWNGWWVSYRKVPSFIVTLAGMLAFRGILIGLTNGTTVSPISNDMTAIGQGYIPDVTGMILGLVAVFCFVTWGTYQRKARKNLNLNVPDATKDIMKYGLFAICVLGAIYLLNDYRGIPFPVLVLAILTVVGMFIARKTAFGRHIYAIGGNIEAARLSGINVEKVKLTIFAINGFMVAIAGLILSARLGAGAPSAGQNAELDAIAACVIGGVSLAGGIGSVYGVIIGAFIIALLDNGMSMLDVPTFWQYIVKGAILLLAVWVDTMSKKKM

SEQ ID NO: 5080 - DNA, 1128 bp, Haemophilus influenzae R2866
  CDS (1)..(1128)
atgtttaagttaaaatccgtaaatttacaagtttacattatgttaatagctattgccgtcattatagcattctttagtgttgctactgatggtgcttatttaagtgcaagaaatatttctaacttgttacgccaaacttcaattactggcattcttgcaattggaatggtttttgtcattatttctgctgaaattgacttatctgttggttcacttatgggcctactgggcggatttgcagctattgccgatgtttggtggggcttcccattacctgtaactattattgcaacaattgctcttggtttaatttttggtatttggaatggttggtgggtggcttatcgcaaagtgccatcctttattgttacacttgcaggttatctcgcattccgtggaattttgattggtttgactaatggcacaactgtatctcctattagtggatctatgacagttattggacaaggttatttatcagatattgcaggatttatcttaggtggtattgcagttattggatttgttctttggggaaattatcaacgtagaagtcgccagcagcttcagctggaagtgtctgcattatcaaaagattttacgaaatatgctttgtttgcagtaattgtattaggagcaatttatttacttaatgattatcgtggcattccatttcctgttttagtactagcagttcttgcaatcttagggttattcctctctcgtaaaacttcattcggccgccacgtttatgcgattggtggcaatattgatgcggcaaaattatctggtatcaatgtagagaaaacaaaactgattatctttgcaatgaatggtgtgttagttgcaatagcagggttgattttaagtgctcgtttaggtgcaggctcaccatcggcagggcaaaatgcagaactagatgcgattgcagcttgtgtcattggaggggcaagcttagcgggtggtgtaggaagtgtgtttggggttgttattggtgcacttatcatcgcatcgcttgataatggtatgagtatgcttgatgtgccaactttttggcaatatattgtcaaaggtgccattttgttacttgctgtatggatagatactagtaataagaaaaagatgtaa

SEQ ID NO: 5081 - protein, 375 aa, Haemophilus influenzae R2866
MFKLKSVNLQVYIMLIAIAVIIAFFSVATDGAYLSARNISNLLRQTSITGILAIGMVFVIISAEIDLSVGSLMGLLGGFAAIADVWWGFPLPVTIIATIALGLIFGIWNGWWVAYRKVPSFIVTLAGYLAFRGILIGLTNGTTVSPISGSMTVIGQGYLSDIAGFILGGIAVIGFVLWGNYQRRSRQQLQLEVSALSKDFTKYALFAVIVLGAIYLLNDYRGIPFPVLVLAVLAILGLFLSRKTSFGRHVYAIGGNIDAAKLSGINVEKTKLIIFAMNGVLVAIAGLILSARLGAGSPSAGQNAELDAIAACVIGGASLAGGVGSVFGVVIGALIIASLDNGMSMLDVPTFWQYIVKGAILLLAVWIDTSNKKKM

SEQ ID NO: 5082 - DNA, 1200 bp, Burkholderia vietnamiensis G4
  CDS (1)..(1200): transl_table=11
atgaataccgaactttcctcctcttccgccgtgccgccggacgccgacgcgcgccgcctgcgcggccatccgctgcggcagatcttcgtgcgctacaaggtgctcgcgctgctgttcgcggtcgtcgcgatctgggcgttcttctcggtgctgaccgacggcgcgttcgtcacgccgcgcaacgtgtcgaacctgctgcggcagatgtcgatcaccggcatgctcgcgtgcgggatggtgttcgtcatcatcgccggcgagatcgacctgtcggtcggctcgctgctcgggctgctcggcggcgtcgcggcgatcctcgacgtcaaccgccactggccggtggccgcgacggtgccggcggtgctcgcgctcggcgtgctggtcgggctgttcaatggctggtggtcgacctatcggcgcgtgccgtcgttcatcgtcgggctcggcgggatgctcgcattccgcgggatcctgctcggcgtgaccggcggctcgacgatcgcgccggtgtccgacggcttcgtgttcctcggccagggctatctgccgcgcgcggtgggcgacggcctcgcggtgctgttgttcgcgctcgtcgcgctgctggtcgtgcggcagcgcggcacgcggcgccgctaccggctcgcggtcgtgccgccgtggcaggacgtcgcgaaggtcgtcggcgccggcgccgtgctgttcgcgttcgtcgcgacgctcgatcgctacggcggcattccggtgccggtgctgctgctgctcgcgctgctcggcgtgttctcgtggatcgcgacgcagacggtgttcggccggcgcatctatgcggtcggctcgaacctggaggccacgcgcctgtccggcgtcgataccgatcgcgtgaagctcgcgatcttcgcgctgatggggctgatgtgcgcgtttgccggcatcgtcaacaccgcgcggctcgcggccggctcgccgtcggccggcacgatgggcgagctcgacgcgatcgccgcgtgcttcatcggcggcacgtcgatgcgcggcgggtcgggcaccgtgtacggcgcgctgatcggcgcgctcgtgatggcgagcctcgacaacgggatgtcgatgctcgacgtcgacgcgtactggcagatgatcgtgaagggcgcggtgctggtgctggccgtgtggatcgacgtggtgtcgcgctcgaaccggcgctga

SEQ ID NO: 5083 - protein, 399 aa, Burkholderia vietnamiensis G4
MNTELSSSSAVPPDADARRLRGHPLRQIFVRYKVLALLFAVVAIWAFFSVLTDGAFVTPRNVSNLLRQMSITGMLACGMVFVIIAGEIDLSVGSLLGLLGGVAAILDVNRHWPVAATVPAVLALGVLVGLFNGWWSTYRRVPSFIVGLGGMLAFRGILLGVTGGSTIAPVSDGFVFLGQGYLPRAVGDGLAVLLFALVALLVVRQRGTRRRYRLAVVPPWQDVAKVVGAGAVLFAFVATLDRYGGIPVPVLLLLALLGVFSWIATQTVFGRRIYAVGSNLEATRLSGVDTDRVKLAIFALMGLMCAFAGIVNTARLAAGSPSAGTMGELDAIAACFIGGTSMRGGSGTVYGALIGALVMASLDNGMSMLDVDAYWQMIVKGAVLVLAVWIDVVSRSNRR

SEQ ID NO: 5084 - DNA, 1200 bp, Burkholderia cenocepacia AU 1054
  CDS (1)..(1200): transl_table=11
atgaattccgaactttcttcctcgaccccggcgacgccggatgcaggcgccggccgcgcgccgcggctgccattgcgccatgtcttcacgcgctacaaggtgctcgcgctgctgttcgcggtcgtcgcgatctgggcattcttctcggtgctgacggacggcgcgttcgtcacgccccgcaacgtatcgaacctgctgcggcagatgtcgatcaccggcatgctcgcgtgcggcatggtgttcgtcatcatcgcgggcgagatcgacctgtcggtcggctcgctgctcgggctgctcggcggcgtcgccgcgatcctcgacgtcaaccgccactggccggtcgcggcgacggtcccggccgtgctcgcgctcggcgtgctgatcgggctcttcaacggctggtggtcgacctatcggcgcgtgccgtcgttcatcgtcgggctcggcgggatgctcgcgtttcgcggcatcctgctcggcgtgacgggcggctcgacgatcgcgcccgtgtcggacggcttcgtgttcatcgggcagggctatctgccgcgcgtggccggcgacggcctcgcggtcctgctgttcgtggtcgcgacgctgctggtggtgcggcagcgcggcacgcggcggcgctaccggctcgcggtcgccccgctgtggcaggacgtcgcgaagatcgtcggcgcgggggcggtgctgttcgcgttcgtcgcgacgctcgaccgttacggcggtattccggtgcccgtgctgctgctgctcgcgctgctcggcgtgttctcgtggatcgcgacgcagacggtattcggccggcgcatctatgcagtggggtcgaacctggaggcgacgcggctgtcgggcgtggacaccgatcgcgtgaaactcgcgatcttcgcgctgatgggcctgatgtgcgcgttcgccggcctcgtcaacacggcgcggctcgcggccgggtcgccgtccgccggcacgatgggcgagctcgacgcgatcgccgcgtgcttcatcggcggcacctcgatgcgcggcgggtcgggcacggtctacggcgcgctgatcggcgcgctcgtgatggcgagcctcgacaacgggatgtcgatgctggacgtcgacgcgtactggcagatgatcgtcaagggcgcggtgctggtgctggcggtgtggatcgacgtggtgtcgcgctcgaaccggcggtga

SEQ ID NO: 5085 - protein, 399 aa, Burkholderia cenocepacia AU 1054
MNSELSSSTPATPDAGAGRAPRLPLRHVFTRYKVLALLFAVVAIWAFFSVLTDGAFVTPRNVSNLLRQMSITGMLACGMVFVIIAGEIDLSVGSLLGLLGGVAAILDVNRHWPVAATVPAVLALGVLIGLFNGWWSTYRRVPSFIVGLGGMLAFRGILLGVTGGSTIAPVSDGFVFIGQGYLPRVAGDGLAVLLFVVATLLVVRQRGTRRRYRLAVAPLWQDVAKIVGAGAVLFAFVATLDRYGGIPVPVLLLLALLGVFSWIATQTVFGRRIYAVGSNLEATRLSGVDTDRVKLAIFALMGLMCAFAGLVNTARLAAGSPSAGTMGELDAIAACFIGGTSMRGGSGTVYGALIGALVMASLDNGMSMLDVDAYWQMIVKGAVLVLAVWIDVVSRSNRR

SEQ ID NO: 5086 - DNA, 1152 bp, Chromohalobacter salexigens DSM 3043
  CDS (1)..(1152): transl_table=11
atgtccaatatgaaccaaaccgcttccagctcgcgttcgcaaggcggcggacgtcgtttcgacgtggcgcgcatgctgctggaggggcgcgctttcttcgccttgatcgcgatcatcgtcatcttctcgttgctgtcgcctgtctacttttcgaccagcaactttctgaccatgtcgtcgcacgtcgccatcttcgggttgctgtcgctggggatgttgctggtgatcttgacggggggcatcgatctgtccgtggggtccacgcttggcctggcgggcgtgttcgcgggatttctgatgcagggcgtctcgttcgaagcctttggcgtggtggtgtatccgcccgtttgggtggtggtcgtgctgacgtgtggcctgggggccctggtcggagcgatcaacggcgttctcatcgcctatttcaaggtgccggcgttcgtggcgaccttggggctcttgtacgtggcccgtggcgttgcgctgctgatgaccgatggcttgacctacaacaacctcggtggaagcgaggcgctgggcaataccgggttcgattggctggggttcaatcggctgttcggcatcccggtcggcgtgctgatcctggcggccgtggcgatcgcctgcctgttgctgctgtcgcgcacgccgttcgggcgctgggtgtattccaccggcggcaacgcgcgggccgccgagctttccggggtgccggtcaagcgcgtgcaggtctcggtgtatgtgctgtccggtatctgcgcggcgatcgccggcctggtgctgtcctcgcagttgacctcggcggggccgacggccggcacgacctatgagctcaccgcgatcgcgggggtggtcatcggtggcgcggcactcaccggtggtcgcggcaacgtgcgcggcaccctgctgggcgccttcgtgatcgggtttctctccgacgggctggtgatcatcggggtctcgtcgtactggcagaccgtgttcaccggggccgtcatcattctcgcggttctgctcaacagcattcagtacagcggtcggaagaacagcaagcccgcttccgatggcaagccgacttcaccgcaaccggaaggcgccagcgagcgctcgccggccacgggaagcactaccggcaaagccggtgcacaatcataa

SEQ ID NO: 5087 - protein, 383 aa, Chromohalobacter salexigens DSM 3043
MSNMNQTASSSRSQGGGRRFDVARMLLEGRAFFALIAIIVIFSLLSPVYFSTSNFLTMSSHVAIFGLLSLGMLLVILTGGIDLSVGSTLGLAGVFAGFLMQGVSFEAFGVVVYPPVWVVVVLTCGLGALVGAINGVLIAYFKVPAFVATLGLLYVARGVALLMTDGLTYNNLGGSEALGNTGFDWLGFNRLFGIPVGVLILAAVAIACLLLLSRTPFGRWVYSTGGNARAAELSGVPVKRVQVSVYVLSGICAAIAGLVLSSQLTSAGPTAGTTYELTAIAGVVIGGAALTGGRGNVRGTLLGAFVIGFLSDGLVIIGVSSYWQTVFTGAVIILAVLLNSIQYSGRKNSKPASDGKPTSPQPEGASERSPATGSTTGKAGAQS

SEQ ID NO: 5088 - DNA, 1458 bp, Mesorhizobium sp. BNC1
  CDS (1)..(1458): transl_table=11
atgttgtctgccagggtgtgcagcccggcaccgtcgacgtctgcggctgaaaagcgctatagcggcgcagaacgccgcggtttgagcgaccgcggcgttctgcgtatcggtcccggccgtcttggccggacggaggagaccaatatgacggatgtaacctcccatgcgctttcaaaaaaagctgccgcagtgaacagcagcctgcctcagcgccttctcagggcgacggagctcgacacgcgcatgcttggcatggtcggcgcgctcgccgtcatctggatcggctttcatatcgtctccggcgggttgttccttacgccccgcaatctctggaacctgtcggtccaatccgcatcggtcgccatcatgtccaccggcatggtgctggtgatcgtcacgcgcaacatcgacctgtcggtgggctcgctgctcggattcgtcggcatggtcatgggtgtgacccagaccgaaatcctgccgcaatggcttggcttcggtcacttagcaatctggatcgcagcaattctggtgggtgttgcgcttggagcgcttatcggcgcaatgcaagggtacatcatcgcctatctggccgtgccgtcattcatcgtgacgctgggcgggctgctcgtctggcgcggtgcggcttggtgggtcaccagcggccgcaccgtggcgccgctcgatgccacataccgcttgatgggcggcggcccagatggcgccatcggtgcgttctggagctgggtggtcggcctgatcgcctgtgttgcgctcctgctcatgctggccaatggccgaaagcagcggcgcaaatttcacttcccgctgcggcctgtctgggccgaaagccttctggcggttatgggctgcgctttcatcctgggggccgtggccgttgccaattcctatccctggccttcggccatcgtccggcggtatgcgacagaaaacaacattaccgtgcccgaaggaggactcttcatcgcccatggcatcgcgatcccggtgctcatcgccgtgggagtcggtgtcgtgatgacctttcttgcaaaccgaacgcggttcggccgctacgtcttcgccatcgggggcaatcccgaagcggcggtgctcgccggcatcaacacgcgttgggtgacgatgaaggttttcatcctcatgggtgcgcttgtggggatttccagcgccatttcgacggctcgccttaacgccgccaccaacgcgatgggcacgctcgatgaattgctcgtgatcgcggcggccgttatcggcggcacatcgcttggcggcggcatcgggacgatcgccggcgccatgatcggcgccgtcctgatgcagtcgcttgccagcggcatgattctgctcggcgtcgacacgccgttgcaaaacatcgtcgttggcatcgtgctggtggtcgccgtgtggctcgacacgctctaccgcaagcgcgtgaaataa

SEQ ID NO: 5089 - protein, 485 aa, Mesorhizobium sp. BNC1
MLSARVCSPAPSTSAAEKRYSGAERRGLSDRGVLRIGPGRLGRTEETNMTDVTSHALSKKAAAVNSSLPQRLLRATELDTRMLGMVGALAVIWIGFHIVSGGLFLTPRNLWNLSVQSASVAIMSTGMVLVIVTRNIDLSVGSLLGFVGMVMGVTQTEILPQWLGFGHLAIWIAAILVGVALGALIGAMQGYIIAYLAVPSFIVTLGGLLVWRGAAWWVTSGRTVAPLDATYRLMGGGPDGAIGAFWSWVVGLIACVALLLMLANGRKQRRKFHFPLRPVWAESLLAVMGCAFILGAVAVANSYPWPSAIVRRYATENNITVPEGGLFIAHGIAIPVLIAVGVGVVMTFLANRTRFGRYVFAIGGNPEAAVLAGINTRWVTMKVFILMGALVGISSAISTARLNAATNAMGTLDELLVIAAAVIGGTSLGGGIGTIAGAMIGAVLMQSLASGMILLGVDTPLQNIVVGIVLVVAVWLDTLYRKRVK

SEQ ID NO: 5090 - DNA, 1233 bp, Mesorhizobium sp. BNC1
  CDS (1)..(1233): transl_table=11
atgtctgagctgtccgcccatcaaagaaaaacggcagagggtctcggcgaggccaaggccgaagcggcgatgtcctcgatcggcagccacctgcagacccatgtgcgcgaatacggcatgctgatcgcgctcgtggtcatcatgggcttcttccaggtgatgacggacggcacgctgatgcggccggtcaacctcaccaatctggtccttcagaacagctacatcgtcatcatggcgctcggcatgctgctcgtcatcgtggctggccatatcgatctttcggtggggtcggtggcgggcttcgtgggagccgtcgcggcagtgatgctggtgcagtacgatatctcgccgctcggggtcattccggcctgcctgctgctcggctttgttatcggagcggcccagggctactggatcgcctattggcgcataccctccttcatcgtgacgctggcgggaatgctggttttccgcggcctcactttgtgggtgcttgctggccaatcggtcgggccgttcccgcgctccttccagttgctctcgaccggattcatcccggatctcttcggcgtcggccggcccaatgtgacggcgatcctgctcggcgcgataacggcggcggcgcttgtcttcatggccatgcgcaaccgccagcgccataccaaatacggcatggaagatgagcctttcgccttcttcctcgccaagaacgggctgatcgcggccgccatcgtattcctttcctatctgctctccacctatcgcggctttccgaacgttctcatcacaatggcggtgctgacggtgatctacaccttcctcaccaactcgaccacggttggccgccgcatctatgcgctgggaggaaacgagaaggcggcgaagctttccggcatccggacggagcggctgaccttcctcaccttcgccaatatgggcatgctggcggcccttgcgggcctcatcttcgccgcgcgcctcaatacggcgacgccgaaggcgggcgtgggcttcgagctcgatgtgatcgccgccgtcttcatcggcggggcgtcgatgtcgggcggcgtcggcaagatcaccggagccgtggtcggcgccttcatcatgggggtgatgaacaacggcatgtcgatcctcggcatcggcatcgattaccagcaggtcatcaagggcctcgtgctgctcgctgcggtgattttcgacgtctacaacaagaacaaggcggcttga

SEQ ID NO: 5091 - protein, 410 aa, Mesorhizobium sp. BNC1
MSELSAHQRKTAEGLGEAKAEAAMSSIGSHLQTHVREYGMLIALVVIMGFFQVMTDGTLMRPVNLTNLVLQNSYIVIMALGMLLVIVAGHIDLSVGSVAGFVGAVAAVMLVQYDISPLGVIPACLLLGFVIGAAQGYWIAYWRIPSFIVTLAGMLVFRGLTLWVLAGQSVGPFPRSFQLLSTGFIPDLFGVGRPNVTAILLGAITAAALVFMAMRNRQRHTKYGMEDEPFAFFLAKNGLIAAAIVFLSYLLSTYRGFPNVLITMAVLTVIYTFLTNSTTVGRRIYALGGNEKAAKLSGIRTERLTFLTFANMGMLAALAGLIFAARLNTATPKAGVGFELDVIAAVFIGGASMSGGVGKITGAVVGAFIMGVMNNGMSILGIGIDYQQVIKGLVLLAAVIFDVYNKNKAA

SEQ ID NO: 5092 - DNA, 1290 bp, Nocardioides sp. JS614
  CDS (1)..(1290): transl_table=11
atgagcaccttgaccaccaccctgcgcgggaacatccgccagtacgggatgatcatcgccctcgcggcgatcgtgatcctgttccagttcacgaccgacggcgtgctgctcaagccgctgaacgtgtccaacctggtcgtccagaacgcccacatcctgatcctggccatcggcatggtgatcgtgatcgtggcccgccacatcgacctgtcggtggggtcggtcgccgcgttcgtcggtgccgtcggggcgatcttgatgaccaagtacgacgtgccctggctgctggcggtgatcctctgcctcgcgctgggtgccctgatcggagcctggcacggcttctgggtggcgtacgtcggcatccccgcgttcatcgtgaccctcgcgagcatgctgctcttccgcgggctcacgctcgtcgtgctcgagggcgcgaccgtcggcggcctgcccgagggcttcaagaagatcggcaacgggttcctccccgagatcggtcccgacaccgacctgcacaacctgaccctgctcctcggtctgctcgtcgtcgccctgctggtcttcttcgacttccgcaagcgcaccgccgcgaagcgctacaacttcgaggtcctgcccatcccgctgttcgcgctcaagcagatcgtgctcggcgcggtcatcatggagttcagctacctgctcgccgacgcccgcgggctgccgatcgtcggcctgatcctgttcacgctgatcggcgtctacacgttcatcatgtcccgcacgatcttcggccggcacgtctacgcgatcggcggcaacgtcgacgcggcgacgatgtcgggcgtcaacaccaagcgggtcgacttcctcgtgatgacgaacatgggcctgctcgccgggctcgcgggcctggtcaccaccgctcgactcaccgcggcgaacccgaaggccggcgtgaacttcgagctcgacgcgatcgccgcgtcgttcatcggtggcgcagcagtcaccggcggtgtgggcaccgtgatcggcgccatcatcggtggtctggtcatgggtgtcctcaacaacggcatgtcgctgaacggcgtctccatcgactggcagcaggcgatcaagggcctggtgctcctcggcgccgtcgcgttcgacgtctggaacaagaagcgcaccgcaggaagtggcggggccggtgccgaggccgaggccactccgccgccaccggacgagctggtcgaggagatccggaacctcgaggcggacgccgggccacccggccacggctcaggggccggcgtccgctga

SEQ ID NO: 5093 - protein, 429 aa, Nocardioides sp. JS614
MSTLTTTLRGNIRQYGMIIALAAIVILFQFTTDGVLLKPLNVSNLVVQNAHILILAIGMVIVIVARHIDLSVGSVAAFVGAVGAILMTKYDVPWLLAVILCLALGALIGAWHGFWVAYVGIPAFIVTLASMLLFRGLTLVVLEGATVGGLPEGFKKIGNGFLPEIGPDTDLHNLTLLLGLLVVALLVFFDFRKRTAAKRYNFEVLPIPLFALKQIVLGAVIMEFSYLLADARGLPIVGLILFTLIGVYTFIMSRTIFGRHVYAIGGNVDAATMSGVNTKRVDFLVMTNMGLLAGLAGLVTTARLTAANPKAGVNFELDAIAASFIGGAAVTGGVGTVIGAIIGGLVMGVLNNGMSLNGVSIDWQQAIKGLVLLGAVAFDVWNKKRTAGSGGAGAEAEATPPPPDELVEEIRNLEADAGPPGHGSGAGVR

SEQ ID NO: 5094 - DNA, 1200 bp, Burkholderia ambifaria AMMD
  CDS (1)..(1200): transl_table=11
atgaataccgaactgtcttcctcttccgccgtgccgccggacgccgacgcgcgccgcgggcaccgccatccgttgcgtcaggtcttcgtgcgctacaaggtgctcgcgctgctgttcgcggtcgcggcgatctgggtgttcttttcggtgctgaccgacggggcattcgtcacgccgcgcaacgtgtcgaacctgctgcggcagatgtcgatcaccggaatgctcgcgtgcgggatggtgttcgtgatcatcgcgggcgagatcgacctgtcggtcggctcgttgctcgggctgctcggcggcgtcgcggcgatcctcgacgtcaatcggcactggcccgtcgccgcgacggtgccggcggtgctcgcgctcggcgtgctggtcgggttgttcaacggctggtggtcgacctaccgtcgcgtgccgtcgttcatcgtcgggctgggcggaatgctcgcgttccgcggcatcctgctcggcgtgacgggcggctcgacgatcgcgccggtgtccgacggcttcgtgttcatcggtcagggctacctgccgcgcatggcgggcgacggcctcgcgctgctgctgttcgcgctcgtcgcgctgctggtcgtccggcagcgcggcacgcggcgccgttaccggctcgcggtcgcgccgctgtggcaggacgtcgcgaaggtcgtcggcgccggggccgtgctgttcgcgttcgtcgcgatgctcgaccgctacggcggcattcccgtgcccgtgctgctgctgctcgcgctgctcggcgcgttctcgtggatcgcgacgcagaccgtgttcggccgacgcatctatgcggtgggttcgaacctggaggcgacgcggctgtcgggcgtcgatacggatcgcgtgaagctggcgatcttcgcgctgatggggctgatgtgcgcgttcgcggggatcatcaataccgcgcggctcgcggccggctcgccgtcggccggcacgatgggcgaactcgacgcgatcgccgcgtgcttcatcggcggcacgtcgatgcgcggcgggtcgggcaccgtctatggcgcgctgatcggtgcgctcgtgatggcgagcctcgacaacgggatgtcgatgctcgacgtcgacgcgtactggcagatgatcgtcaagggcgcggtgctggtactggcggtgtggatcgacgtggtgtcgcgttcgaaccggcggtga

SEQ ID NO: 5095 - protein, 399 aa, Burkholderia ambifaria AMMD
MNTELSSSSAVPPDADARRGHRHPLRQVFVRYKVLALLFAVAAIWVFFSVLTDGAFVTPRNVSNLLRQMSITGMLACGMVFVIIAGEIDLSVGSLLGLLGGVAAILDVNRHWPVAATVPAVLALGVLVGLFNGWWSTYRRVPSFIVGLGGMLAFRGILLGVTGGSTIAPVSDGFVFIGQGYLPRMAGDGLALLLFALVALLVVRQRGTRRRYRLAVAPLWQDVAKVVGAGAVLFAFVAMLDRYGGIPVPVLLLLALLGAFSWIATQTVFGRRIYAVGSNLEATRLSGVDTDRVKLAIFALMGLMCAFAGIINTARLAAGSPSAGTMGELDAIAACFIGGTSMRGGSGTVYGALIGALVMASLDNGMSMLDVDAYWQMIVKGAVLVLAVWIDVVSRSNRR

SEQ ID NO: 5096 - DNA, 1320 bp, Sulfitobacter sp. EE-36
  CDS (1)..(1320): transl_table=11
atgacagatacgaccaccgaaaccggggcagatgtacatccgtcgccgacagcgcccaagcgctcttttcttagccagctcgaaatcgatacccgtctgttagggatgatcggtgcgttcattctggtctgcctcgtgttcaacgtgctgaccgacgggcgctttctgacgccgcgcaatattttcaacctcacgatccagacggtcagcgttgccattatggcgaccggtatggtcttcgtgatcgtgacccgtcacatcgacctgtcggtcggcgcgatgctggccacctgctctgccgcgatggcgatgacccagaccgatatcctgccgcgtatgctgggcatggggctggggcacccgatgatcccctggatcgccatcgtcgtcggcctgctgtttggcaccatcatcggcgcgtttcagggctggctgatcgggttcctcacgatccctgccttcatcgtgacccttggcgggctgctgatctggcgcaacgtggcgtggtatatgactgacggtcagaccatcgggccactggatgaaaccttccgcaagttcggcggaatcaacgggaccctgggcgagacatggtcctgggtcgtcgggctgatcgccgtggttctggcgctttgggcactgtggtcgtcacggcgcaacaaggtcaaccacgggtttcacgtgaaaccggtttgggccgaggtgctggtcggtctgatcatcgcagtgggcattctgggctttgtcgccatcctgaacgcctacgaggttccgaccgcgcgtctgatgcgcgagttcaaggcccgtggcgatgtgatgcccgaaggctataccgcgtcttacggcatcccctattcggtgttgctgctgatcgcgctggcgattggcatgaccgtgatggccaaacgcacgcggctggggcgctatatctttgccacgggcggcaaccccgacgcggcagagctgtcgggcatcaacacccgtctgctgacggtcaaggtctttgccctgatgggggccttggtggcgctatccgcggttgtcgcctctgcccgtttgaccaaccactcgaacgacatcggcactttggacgaactgcgtgtcatcgcggcggctgtcattggcggcacggctctggcgggtggtatagggacgatccacggggccattctgggtgccttgatcatgcaatcgctgcaatcgggcatggctatggtgggcgttgacgcaccgctgcaaaacatcgtcgtcggtgcggttcttgtcttcgccgtctggatcgacatcgtctatcgccgccgtatgggagggaaatcatga

SEQ ID NO: 5097 - protein, 439 aa, Sulfitobacter sp. EE-36
MTDTTTETGADVHPSPTAPKRSFLSQLEIDTRLLGMIGAFILVCLVFNVLTDGRFLTPRNIFNLTIQTVSVAIMATGMVFVIVTRHIDLSVGAMLATCSAAMAMTQTDILPRMLGMGLGHPMIPWIAIVVGLLFGTIIGAFQGWLIGFLTIPAFIVTLGGLLIWRNVAWYMTDGQTIGPLDETFRKFGGINGTLGETWSWVVGLIAVVLALWALWSSRRNKVNHGFHVKPVWAEVLVGLIIAVGILGFVAILNAYEVPTARLMREFKARGDVMPEGYTASYGIPYSVLLLIALAIGMTVMAKRTRLGRYIFATGGNPDAAELSGINTRLLTVKVFALMGALVALSAVVASARLTNHSNDIGTLDELRVIAAAVIGGTALAGGIGTIHGAILGALIMQSLQSGMAMVGVDAPLQNIVVGAVLVFAVWIDIVYRRRMGGKS

SEQ ID NO: 5098 - DNA, 1296 bp, Oceanicola batsensis HTCC2597
  CDS (1)..(1296): transl_table=11
ttgaccgacacgacgacccaacaggtcacgcgccagccaagccggaacctgttccagaaacttgaaatcgacatgcgccttctgggcatgatcggcgccttcgtcctgctgtgcatcggcttcgacattgtgaccgagggccggttcctgaccccgcgcaacatcttcaatctgacgatccagaccgtttcggtggccatcatggcctgcggcatggtcttcgtgatcgtcacccgccatatcgacctttccgtcggcgcgctgctggcgacctgctcggccgtgatggcgatgacgcagacgcagatcctgccctacgtgctggatttcggcctgaaccacccggcgacgtggatcatcacgattgtcgtcggccttgtcgccgggaccatcatcggcgcctttcagggcgcgctgatcggatacctgacgatccccgccttcatcgtgacgctcggcgggttcctcgtctggcgcaatgtggcgtggtacctgaccggcggccagacgatcggcccgctggacgagaatttccgcaagctcggcggcatcaacggcacgctcggcgaaacctggagctgggcgctcggcctgatcctgacggttgccgccctctgggtgctctggacctcgcgccaggcccgcgcgcggcacggtttcgcggtcaagcctctctgggcgcagggggtactgtctgcgatcttcgcggcggcgatcctcggcttcgtggcgatcctcaacgcctacgagatcccctcgcgccgcctggagcgcatgttcgaggaccggggcgagatcctgccggaggggctgaccatcggctacggcgtgcccttttcggtgcttatcctgatcgtcgtcgccatcgtgctgaccatcgtcgcccgccgcacgcgctttggccgctacatctttgccaccgggggcaatccggacgcggccgaactttccggcatcaatacccgctggctgaccgtcaaggtctttgccctcatggggttcctctgcgccctgtcggcggttgttgcctcggcccgcctcgccaaccattccaacgacatcggcacgctcgacgaactgcgcgtcatcgcggccgcggtcatcggcggaacggctctgtcgggcgggatagggacgatctacggcgccgtcctcggcgcgctcatcatgcaggccctgcagtccggcatggcgatggtcggggtcgatgccccgttccagaacatcgtcgtcggcgcggttctggtgctggccgtgctgatcgacatcctttaccgcaaacgactgggagcgtga

SEQ ID NO: 5099 - protein, 431 aa, Oceanicola batsensis HTCC2597
MTDTTTQQVTRQPSRNLFQKLEIDMRLLGMIGAFVLLCIGFDIVTEGRFLTPRNIFNLTIQTVSVAIMACGMVFVIVTRHIDLSVGALLATCSAVMAMTQTQILPYVLDFGLNHPATWIITIVVGLVAGTIIGAFQGALIGYLTIPAFIVTLGGFLVWRNVAWYLTGGQTIGPLDENFRKLGGINGTLGETWSWALGLILTVAALWVLWTSRQARARHGFAVKPLWAQGVLSAIFAAAILGFVAILNAYEIPSRRLERMFEDRGEILPEGLTIGYGVPFSVLILIVVAIVLTIVARRTRFGRYIFATGGNPDAAELSGINTRWLTVKVFALMGFLCALSAVVASARLANHSNDIGTLDELRVIAAAVIGGTALSGGIGTIYGAVLGALIMQALQSGMAMVGVDAPFQNIVVGAVLVLAVLIDILYRKRLGA

SEQ ID NO: 5100 - DNA, 1179 bp, Bacillus sp
  CDS (1)..(1179): transl_table=11
atgaaaagtttggtttcttttcgagcctccatggattcagaaaaacggagaaggctgcttccaaaattggatttccgctcatatacgcttgtcattgcccttgtgcttatagcgcttatttttggagtgttaacagacggggagttcctatcgtcacgcaatttgtccaacttatttatgcaaatgtctgtaatctcgattttagcaatcgggatgacactagttattatagcaggtcatattgatttatctgtaggctcggtcgttggattaacaggaggaattgcagccattttacaagtttggtatggttggggaactgtttctgttattgttgtggcaattattgtcggtgcattgataggactttggcaaggctggtgggtttcttatcgcaatgtgcctgcgtttattgttacactaggcggcatgctgatttttaggggaattttaatcgggatcagtaatggagagacgattgccccgttgaataaaagttttgaagcaattgggaatagttatctgccatatgcagttggatatgtactagcaatcatcggtattatcatgctatttgtttttgtgaatagaaaccgcaaaaagaggaagctattagggttaactgtccataccaaagccaatgattatggaaaagcggcgatttactcactgtgcattttggtattagtttacatgttaaaccgctactacggtattccgatcccaatgcttattgtcgttctacttgctatccttttcgtttttatcgctgtcaaaactccatttggaagatacatttacgccattggcgggaatattgaagcagcagctctctcagggataaatatcaaacgtgttgtacttactatatttgttttaatgggagcgctttctggagtagcaggcattattttaacgagtagattgaatgcggcaacagtaagtagcggggaaatgtatgagttagatgcaattgctgcctgcgtcattggaggcacaagcctaatgggcggaagaggaaatataatcggagctatgatcggcgcccttattatggctagcatcgataatgggatgagcatgatgaacatcgaaaccttttggcaatttattgtaaaaggattgattcttattatcgctgtctggattgatatatcgagtaaaagccgaactaactaa

SEQ ID NO: 5101 - protein, 392 aa, Bacillus sp
MKSLVSFRASMDSEKRRRLLPKLDFRSYTLVIALVLIALIFGVLTDGEFLSSRNLSNLFMQMSVISILAIGMTLVIIAGHIDLSVGSVVGLTGGIAAILQVWYGWGTVSVIVVAIIVGALIGLWQGWWVSYRNVPAFIVTLGGMLIFRGILIGISNGETIAPLNKSFEAIGNSYLPYAVGYVLAIIGIIMLFVFVNRNRKKRKLLGLTVHTKANDYGKAAIYSLCILVLVYMLNRYYGIPIPMLIVVLLAILFVFIAVKTPFGRYIYAIGGNIEAAALSGINIKRVVLTIFVLMGALSGVAGIILTSRLNAATVSSGEMYELDAIAACVIGGTSLMGGRGNIIGAMIGALIMASIDNGMSMMNIETFWQFIVKGLILIIAVWIDISSKSRTN

SEQ ID NO: 5102 - DNA, 1734 bp, Mycobacterium leprae
  CDS (1)..(1734): transl_table=11
gtggtagacatcgacggacggattgagtccattaatcccgccgctactcggatattgggcttacgagcccacgatgtcgttgacatgaagcatggccatccattctgcttctacgatacagacaatcagcgggttgatcttgagcgtgaggtcatgcgcgtcgtacgacgcgaagtaacaacggtaagcaaagtcgtcggcattgaccaacacagtggccagcggttatggctatcggtaaacgtgagcctgcttgcgtacaaggctcccccacactctgcactggtagtctcgttttctgacatttctgcccaccacctttcgatcgaacggctcacctacgaggcaacccacgactgtctcaccggtcttgccaatcgcaggtttgcggaagaccagatcaccaaatcactgcagcatgacgaacgctctcgattagctgctgtactgcttcttgacctcgacgatttcaaagtgatcaacgactcactaggccacgacgtaggtgacgcggtgttgcagactgtagcgcagcgactacgctcggctgtgcggcccgacgatgtcgtcgcgcggctgggcggagacgagttcatcgtactactccggggtcccctttcggacatgaatgctaacgacgtcgcaaaaagactgcacacaacactgtccgagtcactcgtggtcgaccagctcacggtgcctatcggagcgagtgttggcatccttgaggtgagacctgacgatcgacggcgggccgccgacattttgcgtgatgccgactccgcgatgtatgcagccaagaacaagaaacaatgtgccgtcacgccgcagcagctggtaccgttcgtcgcgctgatcgcactgtttgtgttttttacagctgcggccggagctaagttctatgcaccatcaaatctgctggtcattctccaacaaaccgtggtgctggcgatcgtcggatacggcatgactttcgttatcatggcaggctccgttgaactatcggtgggctcgatcgtcgcattgactggagtcaccgcggcactcgtggctgcacagaatcaattcgctgcgatcgtcaccgccctgctggtggggttggctgctgggatggtaaacggcatcgtttttgcctacgggaagattccgtcattcgttagcaccctcggcatgcttcaagtctgccgtggtatcaccctgatgatcagcgacagttctgccaaaccgatgccgtttcacggaatactgggtgcaatgggagccatgccgtggatcctcatcgtctgtcttttcgtcacaatcctggcagggatcttattccaattcaccatgtttggtcggtgggtcaaagccatcggtggcaacgaacgtgtcgcaacgttagccggggtacctacccgcgggatcaaagtcgcgatcttcgcgatctgcggactgacagcaggcctcggcggtatcgtgcttgcttcccgcctcggagccgggacacccaccgcagcaacaggtttcgagatcgatgtcatcgccgcagtcgtcatcggcggcacgcccttaaccggcggattgggacgactcagcggaacgctgatcggtgcaataatcatctcgatgctctccaacggcatggtgtttatgggtgttgggaatgccgcctcgcagatcatcaagggaattatgctcgccgctgcggtttttgtcttcctacaacgccgcaagatcggcattatcaaatga

SEQ ID NO: 5103 - protein, 577 aa, Mycobacterium leprae
MVDIDGRIESINPAATRILGLRAHDVVDMKHGHPFCFYDTDNQRVDLEREVMRVVRREVTTVSKVVGIDQHSGQRLWLSVNVSLLAYKAPPHSALVVSFSDISAHHLSIERLTYEATHDCLTGLANRRFAEDQITKSLQHDERSRLAAVLLLDLDDFKVINDSLGHDVGDAVLQTVAQRLRSAVRPDDVVARLGGDEFIVLLRGPLSDMNANDVAKRLHTTLSESLVVDQLTVPIGASVGILEVRPDDRRRAADILRDADSAMYAAKNKKQCAVTPQQLVPFVALIALFVFFTAAAGAKFYAPSNLLVILQQTVVLAIVGYGMTFVIMAGSVELSVGSIVALTGVTAALVAAQNQFAAIVTALLVGLAAGMVNGIVFAYGKIPSFVSTLGMLQVCRGITLMISDSSAKPMPFHGILGAMGAMPWILIVCLFVTILAGILFQFTMFGRWVKAIGGNERVATLAGVPTRGIKVAIFAICGLTAGLGGIVLASRLGAGTPTAATGFEIDVIAAVVIGGTPLTGGLGRLSGTLIGAIIISMLSNGMVFMGVGNAASQIIKGIMLAAAVFVFLQRRKIGIIK

SEQ ID NO: 5104 - DNA, 1242 bp, Streptomyces kanamyceticus
  CDS (1)..(1242): transl_table=11
atgacgaccacgaccactcccccgggctcctcccgggacgcgtccgacgccccgccacccgcgcggtggccggcgggcgcgctgctgctgcgaagcgtgcgctccaacacgcgccagtacggcatgctcatcgccctggcgttcctcgtcgtgctgttccagatctggaccgacgggacgctgctgctcccgaacaacgtctccaacctgatccagcagaacggctacatcctcatcctggccatcggcatgatgatcgtcatcatcgcgggccacatcgacctctccgtgggctcgttggtcgccttcgtcggcgccatgtcggcggtcatgatggtcaagcacgacatgccctgggtgctcgccctggtcctctcgctcctgatcggcgcggtcgcgggggcctggcagggcttcttcatcgcgtacgtcggcatcccctcgttcatcgtgacgctggccgggatgctgctcttccgcggactcacccagatcgtccttgagggccagtcgctcgcgccgttccccgacgggttccagaacatcgccaagggcttcatcccggagatgggcccctacacccagtaccacaacccgacgctcgtcctcggcctgctcgccgtcgcgttgctgctcctgcgtgaacggcgcgctcgcaagcgccagttggcgtacgagctcgatgtcctgccgaccggtctgtgggcggccaagtgcgtggcgatgaccgcggccgtggtggcgttcaccctcaccctcgccagcttccacggcgtgcccgtcgtcatgctcatcatgtgcggcctgctcatcgcgctgggctatgtcatgcgcaacgccgtcatcggccgccatgtgtacgccctcggcggcaacaaggccgcggcgaagctgtcgggcgtcaaggacaagcgggtcaccctcctggtcttcgtgaacatgggcgtcctcgcggcgctcgcgggctgcgtgtacgcggcgcgcctgaacgcgggcaccccgcaggccgggctcaacttcgaactggaggcgatcgccgcctcgttcatcggcggcgcgtcgatgagcggcggcgtcggcacggtccttggcgcggtcatcggcggcctcgtcctcggcgtcctgaacaacggcatgtccctggtcggcatcggcacggactaccagcaggtcatcaaggggctcgtactgctcgccgcggtcggcttcgacgtctggaacaagcgcaaggcgggccgctag

SEQ ID NO: 5105 - protein, 413 aa, Streptomyces kanamyceticus
MTTTTTPPGSSRDASDAPPPARWPAGALLLRSVRSNTRQYGMLIALAFLVVLFQIWTDGTLLLPNNVSNLIQQNGYILILAIGMMIVIIAGHIDLSVGSLVAFVGAMSAVMMVKHDMPWVLALVLSLLIGAVAGAWQGFFIAYVGIPSFIVTLAGMLLFRGLTQIVLEGQSLAPFPDGFQNIAKGFIPEMGPYTQYHNPTLVLGLLAVALLLLRERRARKRQLAYELDVLPTGLWAAKCVAMTAAVVAFTLTLASFHGVPVVMLIMCGLLIALGYVMRNAVIGRHVYALGGNKAAAKLSGVKDKRVTLLVFVNMGVLAALAGCVYAARLNAGTPQAGLNFELEAIAASFIGGASMSGGVGTVLGAVIGGLVLGVLNNGMSLVGIGTDYQQVIKGLVLLAAVGFDVWNKRKAGR

SEQ ID NO: 5106 - DNA, 1167 bp, Thermoanaerobacter ethanolicus
  CDS (1)..(1167): transl_table=11
atgatggaaagcaaagtgagcaaaacaactgaaaagcgcattttaaatcatttcaagatagatataaggtcatatactatgatattagctttattggggatatggattattttttcaatattgacccatggcgattttctatctccgagaaacttgtccatgcttgccaggcaaatgtctataacagcaattttagcttcaggtatggttttagttatagttgctgggcatatagacttatctgttggttctgtggcagggtttacaggagctatagctgcaattcttcaggtgatatatcattgggatacagtgccgacaataatagtgactcttatggctgggcttgctattggagtttggcaaggattttggatagcctatagaaaagtgcctgcttttatagtgaccttaagctcaatgcttgtttttagaggtggaattttattaattacaaaaggtgttactatatctcctttaaaacaggacttcacagtcgtaggacagggatatattcctccattgtttagcgttattcttgctgtggtggcaggtgttttgtatgtaatcatggaccttaagaatagaaattctcgaattaaatacggcttaagtgtgtccagctggggaatagaactggcaaaaattgcaggagtattgattttcatcgctttgtttacaagtgttatgatatcttatgaaggaattcctgtgccagtattacttgttttggtaattgtgattttgcttacttttgtggctcaaaatacgacttttggacgttatgtttatgcgataggcggaaataaagaagcagcagcttactcaggaataaacatagctaagacgaacatgacgattttcttgattatgggggttttatcggcaattgcaggtatagttttgacttcaaggttaaatgctgctacaactagtgcaggaaatttgtttgagctggatgctatagcttcggcaattatcggtggaacaagcacgttaggaggagaaggaacagtaccaggagcgattttaggtgctcttattatggctagcatagataatggcatgagtcttatgaatatagattattctatattgacaattgtaaagggccttgtattagtacttgcagtgtgggtggatatttcaacaaagaagaggggataa

SEQ ID NO: 5107 - protein, 388 aa, Thermoanaerobacter ethanolicus
MMESKVSKTTEKRILNHFKIDIRSYTMILALLGIWIIFSILTHGDFLSPRNLSMLARQMSITAILASGMVLVIVAGHIDLSVGSVAGFTGAIAAILQVIYHWDTVPTIIVTLMAGLAIGVWQGFWIAYRKVPAFIVTLSSMLVFRGGILLITKGVTISPLKQDFTVVGQGYIPPLFSVILAVVAGVLYVIMDLKNRNSRIKYGLSVSSWGIELAKIAGVLIFIALFTSVMISYEGIPVPVLLVLVIVILLTFVAQNTTFGRYVYAIGGNKEAAAYSGINIAKTNMTIFLIMGVLSAIAGIVLTSRLNAATTSAGNLFELDAIASAIIGGTSTLGGEGTVPGAILGALIMASIDNGMSLMNIDYSILTIVKGLVLVLAVWVDISTKKRG

SEQ ID NO: 5108 - DNA, 1146 bp, Streptomyces olivaceoviridis
  CDS (1)..(1146): transl_table=11
atgaaggcgggcgaactggggtccatccccgtcgtcgtcggcctgatcctcatctgcgtcatcttccagagcctgaactcggcgttcctgtccgcgcagaacatcagcgacatcaccgtcacgatggtcggcaccggcatgatctcggtcggcatcgtcttcgtgctgctgctcggcgagatcgacctgtccgtcggctcggtcagcggcgcctccagcgccatcgcggccgtcctcgccgtgaaccagggcctgcccgagtggctggcggtgctgctcgccgtcgccgccggcgcggccatcggcgcggcccacggcttcttcttcgcggtgctcggcgcccccgccttcgccgtgaccctggccggcctgctgttctggctcggcttcatgctcaagatcctgggcgagaacggcaccatcaacctcgacagcgacggtctgatcgggcagctgacgacgtacttcttcgcggacgtcgccgccgcctacggcctggccgccctcgtcgtcgcggtgttcttcatcacctccttcctgggcaaccggcgccgcgaagccgcgggcatcccgtcccggccgctcagcgacatcgtgctgcgcaccgtgctgctggccgtcgtctccttcgccgcggcgatcatgtacaaccagtacaagggcctgccgctggccacggtgatcttcctcgccttcctcatcggcacggacttcctgctccgccgcaccgcctacggccgcaaggtcttcgccctcggcggcagcgtcgaggcgtcccgccgcgccggcatcaacgtcacggcgatccgcatctccgtgttcggcatcgcgggcggcttcgccgcgatcggcggcctgttcctggcctccaagatcgcgtccgccaaccagagcgccggtaccggtgacctgctgatgaacgcgatcgccgcggccgtgatcggcggcacgtcgctgttcggcggtcgcggccggacctggaacgcgctgctcggtgtgctggtgatcgtctccatccagtacgggctccagctggagtccatcgcggagccggtgaagtacatgatcaccgcggcggtcctgctgaccaccgtcgtgatcgactccgtgacgcgccggacgcagaagaccgcgggccgggcgtag

SEQ ID NO: 5109 - protein, 381 aa, Streptomyces olivaceoviridis
MKAGELGSIPVVVGLILICVIFQSLNSAFLSAQNISDITVTMVGTGMISVGIVFVLLLGEIDLSVGSVSGASSAIAAVLAVNQGLPEWLAVLLAVAAGAAIGAAHGFFFAVLGAPAFAVTLAGLLFWLGFMLKILGENGTINLDSDGLIGQLTTYFFADVAAAYGLAALVVAVFFITSFLGNRRREAAGIPSRPLSDIVLRTVLLAVVSFAAAIMYNQYKGLPLATVIFLAFLIGTDFLLRRTAYGRKVFALGGSVEASRRAGINVTAIRISVFGIAGGFAAIGGLFLASKIASANQSAGTGDLLMNAIAAAVIGGTSLFGGRGRTWNALLGVLVIVSIQYGLQLESIAEPVKYMITAAVLLTTVVIDSVTRRTQKTAGRA

SEQ ID NO: 5110 - DNA, 1224 bp, Bacillus stearothermophilus
  CDS (1)..(1224): transl_table=11
atgggagcactaatgcaaaaaacagcacaacattctccaaagcggtctacagaaagtcagcagttatcgttgaagcagatgatcaaaaacaatatgagaagttacagtatggtcatcgctctcattttgattatgttattgttccaagtgttaactggaggcattttgttgcggccattaaatattacaaacttgattttgcaaaacagttatattttggtgctggctgttggcatgatgcttgtcattatcaccggacatattgatttgtccgtcggatcggtggcagcttttgtcggggcattggccggcattctgatggttcagcaccatgcatcagtatggttgacggtgctcatttgtttattgctcggagccttgattggcgcatggcaaggattttgggtggcgtacgtaaaaattccatcattcattgttacattagcagggatgttgctgttccgaggattgacgatggttattttggaaggacagtcgatcgccccgtttccgaaaacattccaaaatatgagttctgggtttctccctgacgtatttcatggaggagagatccatctgttcaccattgtgatcggtttcgccgcttctctcttatttgttgtactggaatggagaaaacgaaacagtcagaaaaaatatgggtttgcggtcacccctgcggcgatgtttgccttgaagctggctgtgattgccgctgtgatcatgatttttacttatattttagcgacgtatgaacgaattccgacgattctagtgattttggttgcgttgatcattgcttattcctttgtggcgaaccggacggtcgtcggccgccatatttatgcgattggtggtaatgagaaggctgcgcaattgtccgggattaaaacgaaacgtgtcacgttttgggtgtttgtcaacatgggcgtgttggccgctttgtccggattgatttttgccgctcgcctcaacgctgcgacgccgaaagcggggaacttgtttgagctcgatgccattgcggcgtgctttattggaggcgcatccgcttatggaggaatcggcacgattagcggagcgatcatcggcggtctagtcatgggcgtaatgaataacgggatgtccttgctggggctcggtattgactggcaacaggccatcaaagggcttgtattgcttattgctgtggcttttgatatttacaacaaaaataaagctgcttaa

SEQ ID NO: 5111 - protein, 407 aa, Bacillus stearothermophilus
MGALMQKTAQHSPKRSTESQQLSLKQMIKNNMRSYSMVIALILIMLLFQVLTGGILLRPLNITNLILQNSYILVLAVGMMLVIITGHIDLSVGSVAAFVGALAGILMVQHHASVWLTVLICLLLGALIGAWQGFWVAYVKIPSFIVTLAGMLLFRGLTMVILEGQSIAPFPKTFQNMSSGFLPDVFHGGEIHLFTIVIGFAASLLFVVLEWRKRNSQKKYGFAVTPAAMFALKLAVIAAVIMIFTYILATYERIPTILVILVALIIAYSFVANRTVVGRHIYAIGGNEKAAQLSGIKTKRVTFWVFVNMGVLAALSGLIFAARLNAATPKAGNLFELDAIAACFIGGASAYGGIGTISGAIIGGLVMGVMNNGMSLLGLGIDWQQAIKGLVLLIAVAFDIYNKNKAA

SEQ ID NO: 5112 - DNA, 969 bp, Bacillus subtilis
  CDS (1)..(969): transl_table=11
atgaaaacggaacaactgcaaacagaacaaaaacggattcacttcgacggagtcatgcaaaaactcggcccgtttcttggtttatttattctcgttatcattgtatctattttaaatcccagctttcttgaaccgctgaatattttaaacctgcttcgccaggtcgccattaacggattaatcgcgttcgggatgacctttgttattttgacaggcggcattgatctttctgttggcgctattcttgccctgtccagtgctttagttgcggggatgattgtgtccggtgtcgatccggttctcgcgatcatccttggctgtatcattggtgccgtactaggcatgatcaacggattattgattactaaaggaaaaatggcgccctttatcgccacgcttgcgaccatgactgtgtttcgcggactgacgctagtgtatacagatggaaatccgattaccggacttggcacaaactacggttttcagatgttcggacgcggttactttttaggcattcctgtaccggcaattacgatggttcttgcctttgtcatcctttgggtgcttcttcataaaacaccattcggacgccgaacgtacgctatcggcggcaacgaaaaagccgcgctcatttcaggcatcaaagtgacgcgcgtgaaagtgatgatctattctttagccgggcttttatccgctcttgcaggtgccatattgacttcccgcctgcattcggcccagccgactgcgggagaatcgtacgaacttgatgctatcgcggcagtcgtcttaggagggacaagtctttccggcggccgaggacgcattgtcggcacgttaatcggggtgctgatcatcggcacacttaataacggacttaatctgcttggcgtctcatcattttatcagctggttgtcaaagggattgttatcttaattgcggtattgttagaccgcaagaagtcagcttag

SEQ ID NO: 5113 - protein, 322 aa, Bacillus subtilis
MKTEQLQTEQKRIHFDGVMQKLGPFLGLFILVIIVSILNPSFLEPLNILNLLRQVAINGLIAFGMTFVILTGGIDLSVGAILALSSALVAGMIVSGVDPVLAIILGCIIGAVLGMINGLLITKGKMAPFIATLATMTVFRGLTLVYTDGNPITGLGTNYGFQMFGRGYFLGIPVPAITMVLAFVILWVLLHKTPFGRRTYAIGGNEKAALISGIKVTRVKVMIYSLAGLLSALAGAILTSRLHSAQPTAGESYELDAIAAVVLGGTSLSGGRGRIVGTLIGVLIIGTLNNGLNLLGVSSFYQLVVKGIVILIAVLLDRKKSA

SEQ ID NO: 5114 - DNA, 972 bp, Haemophilus influenzae
  CDS (1)..(972): transl_table=11
atgatgaaaaatgaaacatctaattttcaaataggaagatttttgattgaacagcgttcttttattgcattgattattcttatcgcgattgtatcaatgattaatcctgatttttttagcgtagataatattttgaatattttacgccaaacttcggttaatgcgattattgcagtgggtatgactttcgttattttaattgcaggtatagatctttctgttggatctgtattggcattgacaggtgcaatcgccgcttcaatggtgagtattgaattgcctatttttttagtcattcctgtggttttattgattggaacacttcttggtggcataagtggtgtaattgtggcaaagggaaaagttcaggcttttattgctaccttggttaccatgaccttactgcgtggtataacaatggtttatacagatggtcgtcctattacgacaggtttttcggataatgctgatctatttgctagcattggtacaggctatgttttaggtatcccagtaccaatttggattatgagtatcgtgtttgcggttgcttggtatattttaaaagacacaccaatcggtcgctatatttatgctttaggtggaaatgaggcagcgacccaactttctggtattaacgtcaataaaatcaaagtatttgtttttgcggtgagtggatttctttctgcgctggcgggtttaattgtaacttcacgtttatcttccgctcaacccactgctggcgtatcttatgaattagatgcaattgccgccgtggtagtcggtggaaccagtttgatgggggggaaaggtcgtgtaatgggaactctcatcggtgcattaatcatcggatttttaaacaatgcattaaatttattagatatttcatcttactatcaaatgatagcaaaagcgttggttattttggttgctgttttagccgataactatcttggtacaaaaaaactgtaa

SEQ ID NO: 5115 - protein, 323 aa, Haemophilus influenzae
MMKNETSNFQIGRFLIEQRSFIALIILIAIVSMINPDFFSVDNILNILRQTSVNAIIAVGMTFVILIAGIDLSVGSVLALTGAIAASMVSIELPIFLVIPVVLLIGTLLGGISGVIVAKGKVQAFIATLVTMTLLRGITMVYTDGRPITTGFSDNADLFASIGTGYVLGIPVPIWIMSIVFAVAWYILKDTPIGRYIYALGGNEAATQLSGINVNKIKVFVFAVSGFLSALAGLIVTSRLSSAQPTAGVSYELDAIAAVVVGGTSLMGGKGRVMGTLIGALIIGFLNNALNLLDISSYYQMIAKALVILVAVLADNYLGTKKL

SEQ ID NO: 5116 - DNA, 1128 bp, Haemophilus influenzae
  CDS (1)..(1128): transl_table=11
  misc_feature (138)..(138): y is t or c
  misc_feature (152)..(152): w is a or t
atgtttaagttaaaatccgtaaatttacaagtttacattatgttaatagctattgcagtcattatggcattctttagtgttgctactgatggcgcttatttaagtgcaagaaatatttctaacttgttacgccaaacytcaattactggcawtcttgcaattggaatggtttttgtcattatttctgctgaaattgacttatctgttggttcacttatgggcctactgggcggatttgcagctattgccgatgtttggtggggcttcccattacctgtaactattattgcaacaattgctcttggtttaatttttggtatttggaatggttggtgggtggcttatcgcaaagtgccatccttcattgttacacttgcaggttatctcgcatttcgtggaattttgattggtttgactaatggtacaactgtatctcctattagtggaactatgacagttattgggcaaggttatttatcagatattgcaggggttatcttaggtggtattgcagttattggatttgttctttggggaaattatcaacgtagaagtcgccagcagcttcagctggaagtgtctgcattatcaaaagattttacgaaatatgctttgtttgcagtaattgtattaggagcaatttatttacttaatgattatcgtggcattccatttcctgttttagtactggcagttcttgcaatcttagggttattcctctctcgtaaaacttcattcggccgccacgtttatgcaattggtggcaatattgatgcggcaaaattatctggtatcaatgtagagaaaacaaaactgattatctttgcaatgaatggtgtgttagttgcaatagcagggttgattttaagtgctcgtttaggtgcaggatcaccatctgctgggcaaaatgcagaactagatgcgattgcagcttgtgtcattggaggggcaagcttagctggtggtgtaggaagtgtgtttggggtcgttattggcgcacttatcatcgcatcgcttgataatggtatgagtatgcttgatgtgccaactttttggcaatatattgtcaaaggtggcattttgttacttgctgtatggatagatactagtaataagaaaaagatgtaa

SEQ ID NO: 5117 - protein, 375 aa, Haemophilus influenzae
  misc_feature (51)..(51): The Xaa at location 51 stands for Asn, or Ile.
MFKLKSVNLQVYIMLIAIAVIMAFFSVATDGAYLSARNISNLLRQTSITGXLAIGMVFVIISAEIDLSVGSLMGLLGGFAAIADVWWGFPLPVTIIATIALGLIFGIWNGWWVAYRKVPSFIVTLAGYLAFRGILIGLTNGTTVSPISGTMTVIGQGYLSDIAGVILGGIAVIGFVLWGNYQRRSRQQLQLEVSALSKDFTKYALFAVIVLGAIYLLNDYRGIPFPVLVLAVLAILGLFLSRKTSFGRHVYAIGGNIDAAKLSGINVEKTKLIIFAMNGVLVAIAGLILSARLGAGSPSAGQNAELDAIAACVIGGASLAGGVGSVFGVVIGALIIASLDNGMSMLDVPTFWQYIVKGGILLLAVWIDTSNKKKM

SEQ ID NO: 5118 - DNA, 22 bp, Artificial sequence
  primer
atgtcgaaaagcaatccgtctg

SEQ ID NO: 5119 - DNA, 24 bp, Artificial sequence
  primer
ttaagaacggcgtttggttgcgga

SEQ ID NO: 5120 - protein, 449 aa, Artificial sequence
  consensus sequence
  Variant (2)..(3): Xaa in position 2 to 3 is any amino acid
  Variant (5)..(7): Xaa in position 5 to 7 is any amino acid
  Variant (8)..(13): Xaa in position 8 to 13 is any or no amino acid
  Variant (15)..(21): Xaa in position 15 to 21 is any amino acid
  Variant (22)..(22): Xaa in position 22 is any or no amino acid
  Variant (24)..(24): Xaa in position 24 is any amino acid
  Variant (27)..(28): Xaa in position 27 to 28 is any amino acid
  Variant (31)..(34): Xaa in position 31 to 34 is any amino acid
  Variant (35)..(36): Xaa in position 35 to 36 is any or no amino acid
  Variant (43)..(69): Xaa in position 43 to 69 is any amino acid
  Variant (70)..(150): Xaa in position 70 to 150 is any or no amino acid
  Variant (152)..(154): Xaa in position 152 to 154 is any amino acid
  Variant (156)..(156): Xaa in position 156 is any amino acid
  Variant (157)..(158): Xaa in position 157 to 158 is any or no amino acid
  Variant (160)..(168): Xaa in position 160 to 168 is any amino acid
  Variant (169)..(169): Xaa in position 169 is any or no amino acid
  Variant (172)..(172): Xaa in position 172 is any amino acid
  Variant (175)..(180): Xaa in position 175 to 180 is any amino acid
  Variant (183)..(206): Xaa in position 183 to 206 is any amino acid
  Variant (207)..(301): Xaa in position 207 to 301 is any or no amino acid
  Variant (303)..(320): Xaa in position 303 to 320 is any amino acid
  Variant (321)..(321): Xaa in position 321 is any or no amino acid
  Variant (323)..(324): Xaa in position 323 to 324 is any amino acid
  Variant (325)..(326): Xaa in position 325 to 326 is any or no amino acid
  Variant (329)..(331): Xaa in position 329 to 331 is any amino acid
  Variant (333)..(333): Xaa in position 333 is any amino acid
  Variant (337)..(338): Xaa in position 337 to 338 is any amino acid
  Variant (340)..(342): Xaa in position 340 to 342 is any amino acid
  Variant (345)..(358): Xaa in position 345 to 358 is any amino acid
  Variant (360)..(365): Xaa in position 360 to 365 is any amino acid
  Variant (367)..(371): Xaa in position 367 to 371 is any amino acid
  Variant (374)..(379): Xaa in position 374 to 379 is any amino acid
  Variant (380)..(380): Xaa in position 380 is any or no amino acid
  Variant (382)..(384): Xaa in position 382 to 384 is any amino acid
  Variant (385)..(385): Xaa in position 385 is any or no amino acid
  Variant (388)..(389): Xaa in position 388 to 389 is any amino acid
  Variant (393)..(395): Xaa in position 393 to 395 is any amino acid
  Variant (398)..(398): Xaa in position 398 is any amino acid
  Variant (400)..(401): Xaa in position 400 to 401 is any amino acid
  Variant (404)..(404): Xaa in position 404 is any amino acid
  Variant (406)..(408): Xaa in position 406 to 408 is any amino acid
  Variant (410)..(412): Xaa in position 410 to 412 is any amino acid
  Variant (414)..(422): Xaa in position 414 to 422 is any amino acid
  Variant (424)..(433): Xaa in position 424 to 433 is any amino acid
  Variant (435)..(438): Xaa in position 435 to 438 is any amino acid
  Variant (440)..(444): Xaa in position 440 to 444 is any amino acid
  Variant (447)..(448): Xaa in position 447 to 448 is any amino acid
NXXNXXXXXXXXXQXXXXXXXXAXGMXXVIXXXXXXIDLSVGXXXXXXXXXXXXXXXXXXXXXXXXXXXXXXXXXXXXXXXXXXXXXXXXXXXXXXXXXXXXXXXXXXXXXXXXXXXXXXXXXXXXXXXXXXXXXXXXXXXXXXXXXXXXGXXXGXXXGXXXXXXXXXXFIXTLXXXXXXRGXXXXXXXXXXXXXXXXXXXXXXXXXXXXXXXXXXXXXXXXXXXXXXXXXXXXXXXXXXXXXXXXXXXXXXXXXXXXXXXXXXXXXXXXXXXXXXXXXXXXXXXXXXXXXXXXXXXXXXXPXXXXXXXXXXXXXXXXXXXTXXXXGRXXXAXGGNXXAXXXSGXXXXXXXXXXXXXXGXXXXXXGXXXXXRLXXXXXXXGXXXXELXXIAAXXXGGXSXXGGXGXXXGXXXGXXXXXXXXXGXXXXXXXXXXQXXXXGXXXXXAVXXD

SEQ ID NO: 5121 - protein, 59 aa, Artificial sequence
  protein pattern
  Variant (2)..(3): Xaa in position 2 to 3 is any or no amino acid
  Variant (6)..(6): Xaa in position 6 is Ala or Ser
  Variant (7)..(7): Xaa in position 7 is Ala, Cys, Ser, Thr or Val
  Variant (8)..(8): Xaa in position 8 is Phe, Ile or Val
  Variant (9)..(9): Xaa in position 9 is Ile, Leu or Val
  Variant (12)..(12): Xaa in position 12 is Ala, Thr or Val
  Variant (13)..(13): Xaa in position 13 is Ala, Gly, Asn or Ser
  Variant (14)..(15): Xaa in position 14 to 15 is any amino acid
  Variant (18)..(18): Xaa in position 18 is any amino acid
  Variant (20)..(22): Xaa in position 20 to 22 is any amino acid
  Variant (23)..(23): Xaa in position 23 is Ala, Gly, Asn or Ser
  Variant (24)..(24): Xaa in position 24 is Ala, Ser, Thr or Val
  Variant (25)..(26): Xaa in position 25 to 26 is any amino acid
  Variant (28)..(30): Xaa in position 28 to 30 is any amino acid
  Variant (31)..(31): Xaa in position 31 is Phe, Ile, Leu, Met or Val
  Variant (32)..(32): Xaa in position 32 is Ala, Gly, Gln, Ser or Thr
  Variant (33)..(33): Xaa in position 33 is any amino acid
  Variant (34)..(34): Xaa in position 34 is Ile, Leu or Met
  Variant (35)..(41): Xaa in position 35 to 41 is any amino acid
  Variant (42)..(42): Xaa in position 42 is Asp, Gly, Asn or Ser
  Variant (43)..(52): Xaa in position 43 to 52 is any amino acid
  Variant (53)..(53): Xaa in position 53 is Ala or Gly
  Variant (54)..(54): Xaa in position 54 is any amino acid
  Variant (55)..(55): Xaa in position 55 is Ile, Leu, Met or Val
  Variant (56)..(56): Xaa in position 56 is Ile or Leu
  Variant (57)..(57): Xaa in position 57 is Ala, Ile, Leu or Val
  Variant (58)..(58): Xaa in position 58 is any amino acid
  Variant (59)..(59): Xaa in position 59 is Ala, Thr or Val
LXXIAXXXXGGXXXXGGXGXXXXXXXGXXXXXXXXXXXXXXXXXXXXXXXXXXXXXXXX

SEQ ID NO: 5122 - protein, 55 aa, Artificial sequence
  protein pattern
  Variant (3)..(5): Xaa in position 3 to 5 is any amino acid
  Variant (7)..(7): Xaa in position 7 is any amino acid
  Variant (9)..(9): Xaa in position 9 is Asp, Gly or Ser
  Variant (11)..(12): Xaa in position 11 to 12 is any amino acid
  Variant (14)..(14): Xaa in position 14 is Ala, Ser, Thr or Val
  Variant (15)..(16): Xaa in position 15 to 16 is any amino acid
  Variant (17)..(17): Xaa in position 17 is Ala, Cys or Ser
  Variant (19)..(19): Xaa in position 19 is Ile, Leu or Val
  Variant (20)..(32): Xaa in position 20 to 32 is any amino acid
  Variant (33)..(33): Xaa in position 33 is Gly, Ser or Thr
  Variant (34)..(35): Xaa in position 34 to 35 is any amino acid
  Variant (36)..(36): Xaa in position 36 is Ala, Cys, Ser, Thr or Val
  Variant (37)..(37): Xaa in position 37 is Ala, Gly, Ser, Thr or Val
  Variant (38)..(38): Xaa in position 38 is any amino acid
  Variant (39)..(39): Xaa in position 39 is Ala, Gly, Ser, Thr or Val
  Variant (40)..(40): Xaa in position 40 is Ala, Gly or Ser
  Variant (41)..(44): Xaa in position 41 to 44 is any amino acid
  Variant (45)..(45): Xaa in position 45 is Ala, Gly, Ser or Thr
  Variant (46)..(54): Xaa in position 46 to 54 is any amino acid
  Variant (55)..(55): Xaa in position 55 is Ala, Gly or Thr
GRXXXAXGXNXXAXXXXGXXXXXXXXXXXXXXXXXXXXXXXXXXXXXXXXXXXXX

SEQ ID NO: 5123 - protein, 17 aa, Artificial sequence
  protein pattern
  Variant (2)..(2): Xaa in position 2 is Ile, Met or Val
  Variant (3)..(4): Xaa in position 3 to 4 is any amino acid
  Variant (5)..(5): Xaa in position 5 is Ile or Val
  Variant (6)..(6): Xaa in position 6 is Ile or Leu
  Variant (7)..(7): Xaa in position 7 is Ile, Leu, Met or Val
  Variant (8)..(10): Xaa in position 8 to 10 is any amino acid
  Variant (17)..(17): Xaa in position 17 is Ala, Gln, Ser or Thr
GXXXXXXXXXIDLSVGX

SEQ ID NO: 5124 - DNA, 1026 bp, Escherichia coli K12
  CDS (1)..(1026): transl_table=11
atgaaagcgttatccaaactgaaagcggaagagggcatctggatgaccgacgttcctgtaccggaactcgggcataacgatctgctgattaaaatccgtaaaacagccatctgcgggactgacgttcacatctataactgggatgagtggtcgcaaaaaaccatcccggtgccgatggtcgtgggccatgaatatgtcggtgaagtggtaggtattggtcaggaagtgaaaggcttcaagatcggcgatcgcgtttctggcgaaggccatatcacctgtggtcattgccgcaactgtcgtggtggtcgtacccatttgtgccgcaacacgataggcgttggtgttaatcgcccgggctgctttgccgaatatctggtgatcccggcattcaacgccttcaaaatccccgacaatatttccgatgacttagccgcaatttttgatcccttcggtaacgccgtgcataccgcgctgtcgtttgatctggtgggcgaagatgtgctggtttctggtgcaggcccgattggtattatggcagcggcggtggcgaaacacgttggtgcacgcaatgtggtgatcactgatgttaacgaataccgccttgagctggcgcgtaaaatgggtatcacccgtgcggttaacgtcgccaaagaaaatctcaatgacgtgatggcggagttaggcatgaccgaaggttttgatgtcggtctggaaatgtccggtgcgccgccagcgtttcgtaccatgcttgacaccatgaatcacggcggccgtattgcgatgctgggtattccgccgtctgatatgtctatcgactggaccaaagtgatctttaaaggcttgttcattaaaggtatttacggtcgtgagatgtttgaaacctggtacaagatggcggcgctgattcagtctggcctcgatctttcgccgatcattacccatcgtttctctatcgatgatttccagaagggctttgacgctatgcgttcgggccagtccgggaaagttattctgagctgggattaa

SEQ ID NO: 5125 - protein, 341 aa, Escherichia coli K12
MKALSKLKAEEGIWMTDVPVPELGHNDLLIKIRKTAICGTDVHIYNWDEWSQKTIPVPMVVGHEYVGEVVGIGQEVKGFKIGDRVSGEGHITCGHCRNCRGGRTHLCRNTIGVGVNRPGCFAEYLVIPAFNAFKIPDNISDDLAAIFDPFGNAVHTALSFDLVGEDVLVSGAGPIGIMAAAVAKHVGARNVVITDVNEYRLELARKMGITRAVNVAKENLNDVMAELGMTEGFDVGLEMSGAPPAFRTMLDTMNHGGRIAMLGIPPSDMSIDWTKVIFKGLFIKGIYGREMFETWYKMAALIQSGLDLSPIITHRFSIDDFQKGFDAMRSGQSGKVILSWD

SEQ ID NO: 5126 - DNA, 1032 bp, Vibrio fischeri ES114
  CDS (1)..(1032)
atgaaaattaaagcgctttcaaaattaaaacctgaagaaggtatctggctaactgaggttgaaaaacctgagatgggtcataacgatcttcttatccgcattaagaaaactgccatctgtggtaccgatgtacatatctacaactgggacgaatggtcacaaaaaacaattccagtacctatggttgttggtcacgagtatgtaggtgaagttgttggtattggtcaagaagtgcgtggttttgaaattggagaccgcgtttcaggtgaaggtcacataacttgtggtcattgtcgtaactgtcgtggcggccgtactcacctttgtcgtaatacaacaggcgtaggtgtaaaccgtactggtgctttttctgaatacctagtgattcctgctttcaatgcatttaagatccctgctggcatttcagatgacttagcatcaatctttgacccatttggaaacgcagttcacactgctctatcatttgatttagttggtgaagacgttctaatcacgggtgctggtcctattggcatcatggcggcggctgttgcaaaacatgttggtgcacgtcacgtcgtgattactgatgtgaatgaataccgcttagatcttgctaagaaaatgggcgtaactcgtgccgtaaacgtaatgaacgagaagcttgaagatgtgatgtctgagcttggcatgacagaaggctttgatgtcggtttggaaatgtctggtaatccatcagcatttaatagcatgctaactaacatgaaccatggcggtaaaatatctcttctaggtattccaccatcagacatgactgttgattggaaccaagttatctttaaaggcttagtcatcaaaggcatttacggacgcgagatgtttgaaacttggtataagatggcaagcttaattcaatcaggcttagatctaacaccaattatcacgcaccactataagattgatgacttccaagcaggcttcgatatgatgcgctctggtatgtctggtaaagttattctagattgggaataa

SEQ ID NO: 5127 - protein, 343 aa, Vibrio fischeri ES114
MKIKALSKLKPEEGIWLTEVEKPEMGHNDLLIRIKKTAICGTDVHIYNWDEWSQKTIPVPMVVGHEYVGEVVGIGQEVRGFEIGDRVSGEGHITCGHCRNCRGGRTHLCRNTTGVGVNRTGAFSEYLVIPAFNAFKIPAGISDDLASIFDPFGNAVHTALSFDLVGEDVLITGAGPIGIMAAAVAKHVGARHVVITDVNEYRLDLAKKMGVTRAVNVMNEKLEDVMSELGMTEGFDVGLEMSGNPSAFNSMLTNMNHGGKISLLGIPPSDMTVDWNQVIFKGLVIKGIYGREMFETWYKMASLIQSGLDLTPIITHHYKIDDFQAGFDMMRSGMSGKVILDWE

SEQ ID NO: 5128 - DNA, 984 bp, Photobacterium profundum SS9
  CDS (1)..(984)
atgaatgaagtagacaagcctgaaatgggccataatgatctacttattcgtattaagaaaaccgctatttgtggtacagatgtacatatctacaactgggatgaatggtcacaaaagacgattccagttccaatggttgtaggtcatgaatatgttggcgaagttgttggtattggccaagaagttcgtggttttacaatcggtgatcgtgtgtctggtgaaggtcatattacatgtggtcattgccgtaattgtcgtggtggtcgtacacacctttgtcgtaatacgacaggcgttggtgttaaccgtgatggcgcatttgctgagtttttggttattcctgcattcaatgcgttcaagatccctgcaggtatctctgacgatctagcatcaatcttcgacccgtttggcaatgctgttcatactgcattatcattcgatcttgttggtgaagatgtgctaattacaggtgctggtcctattggtattatggctgctgctgtcgctaaacacgttggtgcacgccatgttgtgattaccgatgtgaacgaataccgtctagatcttgctcgtaaaatgggcgtgactcgcgctgttaacgtagcaaacgaaaaacttgaagatgtaatgtctgaacttggcatgacagaaggttttgacgttggtttagaaatgtctggcgtaccatcagcatttaacggcatgctagctagcatgaaccacggtggtaaagtggcgttgttgggtattccaccatcagacatggcagtagattggacccaagttatctttaaaggtttggttattaaaggtatctacggccgtgaaatgtttgaaacttggtacaagatggcaagcttgattcaatcaggcttagatctaacaccaattatcacgcaccattacaaaattgatgatttccaaaaaggctttgacatgatgcgttcaggcatgtcaggtaaagttattctcgattgggaataa

SEQ ID NO: 5129 - protein, 327 aa, Photobacterium profundum SS9
MNEVDKPEMGHNDLLIRIKKTAICGTDVHIYNWDEWSQKTIPVPMVVGHEYVGEVVGIGQEVRGFTIGDRVSGEGHITCGHCRNCRGGRTHLCRNTTGVGVNRDGAFAEFLVIPAFNAFKIPAGISDDLASIFDPFGNAVHTALSFDLVGEDVLITGAGPIGIMAAAVAKHVGARHVVITDVNEYRLDLARKMGVTRAVNVANEKLEDVMSELGMTEGFDVGLEMSGVPSAFNGMLASMNHGGKVALLGIPPSDMAVDWTQVIFKGLVIKGIYGREMFETWYKMASLIQSGLDLTPIITHHYKIDDFQKGFDMMRSGMSGKVILDWE

SEQ ID NO: 5130 - DNA, 1062 bp, Thermococcus kodakaraensis
  CDS (1)..(1062)
atgatcactatggccgagaaaatgcaggctattatgaagactaagccggcgtacggcgccgaacttgtagaagttgacgttccaaagcctgggccaggagaagtcctcattaaggttctcgcaacgagcatctgcggtacagacctccatatctacgagtggaacgaatgggcgcagagcaggataaagccgccccagataatgggccacgaagtggctggagaggtcgtcgaggtcggtcccggcgttgaggatctccaggttggagattacatcagcgttgaaactcatatcgtctgtggcaagtgctacgcgtgcaagcacaaccgctatcacgtctgccagaacaccaagatattcggagttgatatggacggtgtcttcgcccactacgcgatagttccggccaagaacgcctggaagaacccgaaggacatgccgccagagtacgcagcccttcaggagccgctcggaaacgccgtcgataccgttcttgcaggcccgattgctgggaggagcaccctcataaccggtgctggaccgctcggtcttctcggcatagcagttgccaaggcaagcggggcttatccagtcatcgttagcgagccgagtgagttcagaaggaagctcgccaagaaggtcggtgctgactacgtcgttaaccccttcgaggaagacccagtcaagttcgttatggacataaccgacggagcgggcgttgaagttttccttgagttcagtggtgcacctaaagcccttgagcagggcctcaaggcagtaacacccggaggacgcgtctcacttctcggcctcttcccgagagaggtcacgatagacttcaacaacctcataatcttcaaggcccttgaagtccacggcataaccggaaggcacctctgggaaacctggtacaccgtctcaagcctcatccagagcggcaagctgaacctcgatccgataatcacccacaagtacaagggcttcgacaagttcgaggaagcctttgagcttatgcgcgctggaaagaccggaaaggtcgtcttcttccctcacaagggatga

SEQ ID NO: 5131 - protein, 353 aa, Thermococcus kodakaraensis
MITMAEKMQAIMKTKPAYGAELVEVDVPKPGPGEVLIKVLATSICGTDLHIYEWNEWAQSRIKPPQIMGHEVAGEVVEVGPGVEDLQVGDYISVETHIVCGKCYACKHNRYHVCQNTKIFGVDMDGVFAHYAIVPAKNAWKNPKDMPPEYAALQEPLGNAVDTVLAGPIAGRSTLITGAGPLGLLGIAVAKASGAYPVIVSEPSEFRRKLAKKVGADYVVNPFEEDPVKFVMDITDGAGVEVFLEFSGAPKALEQGLKAVTPGGRVSLLGLFPREVTIDFNNLIIFKALEVHGITGRHLWETWYTVSSLIQSGKLNLDPIITHKYKGFDKFEEAFELMRAGKTGKVVFFPHKG

SEQ ID NO: 5132 - DNA, 1023 bp, Legionella pneumophila
  CDS (1)..(1023)
atgaaatcattggttaaagcaaaaaaagagcctggaatttggatgcaggatattcctgttcctgaatacggagtaaatgatgttttaataaaaattaaaaggactgcaatttgtggtacagatatccatatttattcctgggatgaatgggcgcaagcgacaattcctgttcctatgacggtagggcatgaattttatggtgaaatagtagaggttggaaaagaagtccaaggtttgaaagttggacagagagtttctggtgaaggtcatattacctgtggtttttgcagaaattgtcgtgccggcaagcgtcatttatgtcgtaatactctgggagtgggggtgaatcgaccaggatgctttgctgagtatctggcacttcctgctaccaatgtcattgctctacctgacaacattacagaagagcaagcggctattctcgatccttttggaaatgctgctcattgtgcattggcatttgatgtagtaggcgaagacgttttgattactggtgcaggtcccataggaataatggccgcagccatcgtaagacatattggcgcacggcatgttgttatcaccgatgttaacgatcatcgattggaactggccaggcaaatgggtgtcagccgagcggttaatgtcaaataccaaaaattaattgatgtggctaatgagctgggaatgcttgagggttttgatgtgggtctggaaatgtccgggaaccctatggcattaaacgatatgatgaaggcgatgaatcatggtggtcatgtggctttattgggtatcccaccacaagaaacccctatagattggaaccaggttatctttaaaggattggttattaagggtatttatggtcgagaaatgtttgaaacctggtataagatgattgctatgttacagagcggtttaaatatttctcctgtcattactcataatttcccagtagatgaatatcagcacgcatttcaaattatggcatcgggccagtcagggaaagttatactgaactggtag

SEQ ID NO: 5133 - protein, 340 aa, Legionella pneumophila
MKSLVKAKKEPGIWMQDIPVPEYGVNDVLIKIKRTAICGTDIHIYSWDEWAQATIPVPMTVGHEFYGEIVEVGKEVQGLKVGQRVSGEGHITCGFCRNCRAGKRHLCRNTLGVGVNRPGCFAEYLALPATNVIALPDNITEEQAAILDPFGNAAHCALAFDVVGEDVLITGAGPIGIMAAAIVRHIGARHVVITDVNDHRLELARQMGVSRAVNVKYQKLIDVANELGMLEGFDVGLEMSGNPMALNDMMKAMNHGGHVALLGIPPQETPIDWNQVIFKGLVIKGIYGREMFETWYKMIAMLQSGLNISPVITHNFPVDEYQHAFQIMASGQSGKVILNW

SEQ ID NO: 5134 - DNA, 1056 bp, Staphylococcus aureus subsp. aureus COL
  CDS (1)..(1056)
atgaaagctttagtaaaaacaagagaaggacatggcaacttagaacttcttgataaagaagttgcaacaccgctagatgataaagtaaagattaaagtacattatgcaggaatttgtggcacagatattcatacttatgaaggtcattataaagttaattttccagtgacattaggtcatgaattttctggtgaaatcgttgaagttggagcagacgttaaagattttaaagttggtgaccgtgtcacatctgaaacgacattctatgtttgtaatgagtgtgaatactgtaaatcaaaagactataatttatgcaaccatcgaaaaggtattggaacacaagttgatggcgcatttactaattatgtcattgcacgtgaagaaagtttgcatcatattccagacgaagtatcgtatcagtctgcagctatgacagaaccattagcatgtgcacatcatggcgtttctaagattcaagtcaattcaggcgatgtagcagttgtaatgggacctgggccaatcggattacttgtagcacaagtgttaaaaagtaaaggcgcaactgttgtggtaactggattggacaatgacaaagtcagattagataaagcagaagcattgcacatggattatgtagtcaatttacaacaaacagacttaaaaacgtatatcaatggaattacagacggttacggtgcagatgttgttgttgaatgttcaggtgcagttccagcagcacgacaaggtttggatattttacgcaaaaaaggtttctacagtcaaataggtatttttaaggatgctgaaattccatttgatatggaaaaagtgattcaaaaagaaataacagttgttggtagtagaagtcaaaagccagcagattgggaaccttcattgcaacttatggcggatggtttagtaaatgctgaagctttggtgacaaaaatatatgatatttcgaaatgggacgaggcgtatcaacatttaaaatccggcgaaggtattaaagtattacttaagccgctcgatttagatgaaaatgaaggagagaattaa

SEQ ID NO: 5135 - protein, 351 aa, Staphylococcus aureus subsp. aureus COL
MKALVKTREGHGNLELLDKEVATPLDDKVKIKVHYAGICGTDIHTYEGHYKVNFPVTLGHEFSGEIVEVGADVKDFKVGDRVTSETTFYVCNECEYCKSKDYNLCNHRKGIGTQVDGAFTNYVIAREESLHHIPDEVSYQSAAMTEPLACAHHGVSKIQVNSGDVAVVMGPGPIGLLVAQVLKSKGATVVVTGLDNDKVRLDKAEALHMDYVVNLQQTDLKTYINGITDGYGADVVVECSGAVPAARQGLDILRKKGFYSQIGIFKDAEIPFDMEKVIQKEITVVGSRSQKPADWEPSLQLMADGLVNAEALVTKIYDISKWDEAYQHLKSGEGIKVLLKPLDLDENEGEN

SEQ ID NO: 5136 - DNA, 1065 bp, Bacillus halodurans C-125
  CDS (1)..(1065): transl_table=11
atgaaagcccttaatttatacggcattcaagaccttcgatttgaagaaacaccggccccttccatcgagcacgatgacgacatcatcataaaggtgaaggcggttggaatatgcggctctgacctctctcgatacaaaaagctcggtccttatgttccagggatgacgtttggtcatgaatttgcaggggaagtcgtcaaaatcggccgttcggtgactggattttccataggcgatcgggtggccgcttgtcctacctatacatgtggtcaatgtcgatactgtcaattaggtgagcccacacgttgcgagcggctatctgttatcggtgcccgtcatcccggcgcttatgctgaatatgtaaagctccccgcaaagcatgtgattcccttgccaaacgttgtgaactatgatgaagcagcactgattgagccggcttccgttgtggcacatggcttttatcggacgaatataaagcctggggcatccgttgcgatcatgggagtcggaagcattggcttgttggcggttcaatgggcaaagatttttggagcgactacggtttttgccatcgacatcgacgaacaaaaactgaatgtcgctaaccagctaggtgccgatgtattaattagtagcttacagcgcccagcccataaacaaattttggagtatacgaacggcatcggggtcgatgtggcggtagaatctgcagggactccaagcacgtctgcccaagtattcgcccttcctaaaaaaggcggggaagttgtatttctcggaattccttatgctgacgtccaaatcgaacgtttttattttgagaaaattgtccgcaacgaacttcatgtctacggttcgtggaatgcgctctcctccccattccctggaaaggaatgggcgaccacaatacattatatgtcaagtgggcaactgaacgtagcaccgatgatctcgtatcgccttcctctagccaaaggtcccgagacatttcagcaaatagctaaaggggaactgaaaccgacaaaagtattgttttacccagaaaaactgtctgagaggaagtag

SEQ ID NO: 5137 - protein, 354 aa, Bacillus halodurans C-125
MKALNLYGIQDLRFEETPAPSIEHDDDIIIKVKAVGICGSDLSRYKKLGPYVPGMTFGHEFAGEVVKIGRSVTGFSIGDRVAACPTYTCGQCRYCQLGEPTRCERLSVIGARHPGAYAEYVKLPAKHVIPLPNVVNYDEAALIEPASVVAHGFYRTNIKPGASVAIMGVGSIGLLAVQWAKIFGATTVFAIDIDEQKLNVANQLGADVLISSLQRPAHKQILEYTNGIGVDVAVESAGTPSTSAQVFALPKKGGEVVFLGIPYADVQIERFYFEKIVRNELHVYGSWNALSSPFPGKEWATTIHYMSSGQLNVAPMISYRLPLAKGPETFQQIAKGELKPTKVLFYPEKLSERK

SEQ ID NO: 5138 - DNA, 1029 bp, Pseudomonas aeruginosa PAO1
  CDS (1)..(1029): transl_table=11
atgaccctgccacagaccatgaaagccgcggtcgtgcacgcctacggcgcgccgctgcggatcgaggaagtcaaggttccgctgcccggccccgggcaggtactggtgaagatcgaagcctccggcgtctgccacaccgacctgcatgccgccgagggcgactggccggtgaagccgccgttgccgttcattcccggtcacgaaggcgtcggctacgtcgccgcggtgggcagcggagtgacccgagtgaaggaaggcgaccgggtcggcatcccctggctgtacaccgcctgcggctgctgcgagcactgcctgaccggctgggagaccctctgcgagagccagcagaacaccggctactcggtgaacggcggctatgccgaatacgtattggccgacccgaactacgtcggaattctgccgaaaaacgtcgaattcgctgaaatcgcgccgatcctctgcgccggcgtcaccgtctacaaggggctcaagcagactaacgcgcgccccggccagtgggtggcgatctccggcatcggcggcctcggccacgtcgccgtgcagtacgccagggccatgggcctgcacgtcgccgccatcgacatcgacgacgccaagctggaactggcgcgcaagctcggtgccagcctgacggtcaacgcccggcaggaagacccggtggaggtgctccagcgcgacatcggcggcgcccacggggtgctggtcaccgcggtatccaatagcgccttcggccaggccatcggcatggcgcgccgcggcggcaccatcgccctggtcggcctgccgccgggtgacttcccgacgccgatcttcgacgtggtgctcaagggcctgcacatcgccggctcaatcgtcggcacccgcgcggaccttcaggaagccctcgactttgccggcgaaggcctggtcaaggcgaccatccatccgggcaagctggacgacatcaaccagatcctcgaccagatgcgcgccgggcagatcgaggggcgcatcgtccttgagatgtga

SEQ ID NO: 5139 - protein, 342 aa, Pseudomonas aeruginosa PAO1
MTLPQTMKAAVVHAYGAPLRIEEVKVPLPGPGQVLVKIEASGVCHTDLHAAEGDWPVKPPLPFIPGHEGVGYVAAVGSGVTRVKEGDRVGIPWLYTACGCCEHCLTGWETLCESQQNTGYSVNGGYAEYVLADPNYVGILPKNVEFAEIAPILCAGVTVYKGLKQTNARPGQWVAISGIGGLGHVAVQYARAMGLHVAAIDIDDAKLELARKLGASLTVNARQEDPVEVLQRDIGGAHGVLVTAVSNSAFGQAIGMARRGGTIALVGLPPGDFPTPIFDVVLKGLHIAGSIVGTRADLQEALDFAGEGLVKATIHPGKLDDINQILDQMRAGQIEGRIVLEM

SEQ ID NO: 5140 - DNA, 1113 bp, Deinococcus radiodurans R1
  CDS (1)..(1113): transl_table=11
gtgacttctcccagctcgaccgcaacttccagcccgaccacgaccaccgcccccacccctgcccggatgcgggccctgagcaagcagcagcccggcgagggcatctggatgatcgaaaccgaggtgccgacgcccggtcccaacgacctgctgattcgaattcgcaaggggagcatctgtggaaccgacgtgcacatctacaagtgggacgactgggcgagccagacggtgccggtgccgatggtcgtcgggcacgaatacgtgggtgtggtcgcgggcatgggctcggaagtgcgcggcttcgaaatcggcgaccgggtgagcggcgagggccacgtcacctgcgggcactgccgcaactgccgcgccgggcgccgccacctgtgccgcaacacgcagggggtgggcgtcaaccgccccggctccttcgccgagtatctggtgctgcccgccttcaatgccttcaagctgcccgacgacattcccgacgatgtcgccgctattttcgaccccttcggcaacgcggtgcacacggcgctgagcttcgacctggtgggcgaggacgtgctgattaccggcgccgggcccatcggctgcatggccgccgccgtcgcccggcacgtgggcgcccgcaacgtggtgattaccgacgtgaatgactaccgtctcgacctcgcgcggcagatgggcgtgacccgcgccgtgaatgtggcccgcgaggacctctggacggtggcgacgcaggaactcgacatgcacgagggcttcgacgtgggcatggaaatgagcggctcggggcctgccttcgcgcagatggtcagcgtgatgaacaacggcggcaaagtcgcgctgctcggcattccctcgggcgaggtgcagatcgattggaacgccgtcatcttcaagatgctcaccatcaagggcatctatggccgcgagatgttcgaaacctggtacaagatggccgccctgattcagtcgggcctggacctcacgccggtcatcacccaccactacggcatcggcgactttcagcagggcttcgacgccatgctcagcgggcagagcggcaaagtgattctggactgggagacggaagagcaaagcgcctga

SEQ ID NO: 5141 - protein, 370 aa, Deinococcus radiodurans R1
MTSPSSTATSSPTTTTAPTPARMRALSKQQPGEGIWMIETEVPTPGPNDLLIRIRKGSICGTDVHIYKWDDWASQTVPVPMVVGHEYVGVVAGMGSEVRGFEIGDRVSGEGHVTCGHCRNCRAGRRHLCRNTQGVGVNRPGSFAEYLVLPAFNAFKLPDDIPDDVAAIFDPFGNAVHTALSFDLVGEDVLITGAGPIGCMAAAVARHVGARNVVITDVNDYRLDLARQMGVTRAVNVAREDLWTVATQELDMHEGFDVGMEMSGSGPAFAQMVSVMNNGGKVALLGIPSGEVQIDWNAVIFKMLTIKGIYGREMFETWYKMAALIQSGLDLTPVITHHYGIGDFQQGFDAMLSGQSGKVILDWETEEQSA

SEQ ID NO: 5142 - DNA, 1194 bp, Agrobacterium tumefaciens str. C58
  CDS (1)..(1194): transl_table=11
gtggcaggtcgcaaaacaggccttccccaaaacccagcgatttcaggccttcggtggagaaagccgttctggcatgggcattgcaccttctctggcatcaagtgccatcgaggagaaaacatgcgcgcgctcagatttcatgcagccaaggatttgcggatcgaagacattgccgagccgaaacggcctggcccgggacaggtcctcgtccgcaaccgtttcgtcggcatctgcggcaccgatctgcatgaatatagctacggcccgatcttcattcccaccgaaccgcatccttttaccggcgcccatggcccacagattctgggccacgaattcggcggcgtggttgaggcgatcggcgacggtgtgacctccgtcaacgtcggcgaccgcgtctccatccagccgctcatcatgccgcgatccggcgattatttcgctgatcgtggccttttccatctcagcacgcaactggcactggtcggcctcagctgggacggcggcggcatggcggaagccgcacttgtcaacgaatacaacgtccagaaaattccggacgagatgaccgacgaagaggccgcactggtggaaccctcggccgttgccgtttatgcctgtgatcgcggtggcgttaccgccggtaatagcgttctggtcacgggtgccggcccgatcggcatgttgacgcttctggcggcccgcgccgccggcgctacccagctttttgtctccgatctgaatgacgcccgcctcgagcttgcccgcaatgtcatccgtgatgtcatcaccatcaaccccaagcgcgataatgtcggtgatgtcgtccgctcggcaaccgaaggcaaggtcggctgcgacgtggcgatcgaatgcgtgggtaatgaacatgcgctcaaggcctgcgttgacgccgtgcgcaagcagggcgtcgtcgtgcaaaccgggctgcacccgcatgaaaacccgatcgactggttccaggtgacgttccgtgatctggagatcaagggctcctgggcctatccgacccattactggccgcgcgtcatccggctcattgcctccggcctgctgccggcgacgaagatcgtcaccaagcgcatcacgctggatacggccgtgaccgagggcttcgatgccctgctcgaccccgccggcacgcatctgaaaatcctgatcgatctttcgaaatag

SEQ ID NO: 5143 - protein, 397 aa, Agrobacterium tumefaciens str. C58
MAGRKTGLPQNPAISGLRWRKPFWHGHCTFSGIKCHRGENMRALRFHAAKDLRIEDIAEPKRPGPGQVLVRNRFVGICGTDLHEYSYGPIFIPTEPHPFTGAHGPQILGHEFGGVVEAIGDGVTSVNVGDRVSIQPLIMPRSGDYFADRGLFHLSTQLALVGLSWDGGGMAEAALVNEYNVQKIPDEMTDEEAALVEPSAVAVYACDRGGVTAGNSVLVTGAGPIGMLTLLAARAAGATQLFVSDLNDARLELARNVIRDVITINPKRDNVGDVVRSATEGKVGCDVAIECVGNEHALKACVDAVRKQGVVVQTGLHPHENPIDWFQVTFRDLEIKGSWAYPTHYWPRVIRLIASGLLPATKIVTKRITLDTAVTEGFDALLDPAGTHLKILIDLSK

SEQ ID NO: 5144 - DNA, 1056 bp, Staphylococcus aureus subsp. aureus Mu50
  CDS (1)..(1056): transl_table=11
gtgaaagctttagtaaaaacaagagaaggacatggcaacttagaacttcttgataaagaagttgcaacaccgctagatgataaagtaaagattaaagtacattatgcaggaatttgtggcacagacattcatacttatgaagggcattataaagttaattttccagtgacattaggtcatgaattttctggtgaaatcgttgaagttggagcagacgttaaagattttaaagttggtgaccgtgtcacttctgaaactacattctatgtttgtaatgagtgtgaatactgtaaatcaaaagactataatttatgcaaccatcgaaaaggtattggaacacaagttgatggcgtatttactaattatgtcattgcacgtgaagaaagtttgcatcatattccagacgaagtatcgtatcagtctgcagctatgacagaaccattagcatgtgcacatcatggcgtttctaagattcaagtgaactctggcgatgtagcagttgtaatgggacctgggccaatcggattacttgtagcacaagtgttgaaaagtaaaggcgcaactgttgtggtaactggattggacaatgacaaagtcagattagataaagcagaagcattgcacatggattatgtagtcaatttacaacaaacagacttaaaaacgtatatcaatggaattacagacggttacggtgcagatgttgttgttgaatgttcaggtgcagttccagcagcacgacaaggtttagatattatacgcaaaaaaggtttctacagtcaaataggtatttttaaggatgctgaaattccatttgatatggaaaaagtgattcaaaaagaaataacagttgttggtagtagaagtcaaaagccagcagattgggaaccttcattgcaacttatggcggatggtttagtaaatgctgaagctttggtgacaaaaatatatgatatttcgaaatgggacgaggcgtatcaacatttaaaatctggcgaaggtattaaagcattacttaagccgctcgatttagatgaaaatgaaggagagaattaa

SEQ ID NO: 5145 - protein, 351 aa, Staphylococcus aureus subsp. aureus Mu50
MKALVKTREGHGNLELLDKEVATPLDDKVKIKVHYAGICGTDIHTYEGHYKVNFPVTLGHEFSGEIVEVGADVKDFKVGDRVTSETTFYVCNECEYCKSKDYNLCNHRKGIGTQVDGVFTNYVIAREESLHHIPDEVSYQSAAMTEPLACAHHGVSKIQVNSGDVAVVMGPGPIGLLVAQVLKSKGATVVVTGLDNDKVRLDKAEALHMDYVVNLQQTDLKTYINGITDGYGADVVVECSGAVPAARQGLDIIRKKGFYSQIGIFKDAEIPFDMEKVIQKEITVVGSRSQKPADWEPSLQLMADGLVNAEALVTKIYDISKWDEAYQHLKSGEGIKALLKPLDLDENEGEN

SEQ ID NO: 5146 - DNA, 1044 bp, Staphylococcus aureus subsp. aureus Mu50
  CDS (1)..(1044): transl_table=11
gtgaaagcattgaaattatatggcgtagaagatttacggtatgaggataatgaaaagccagtcattgaaagtgcgaatgacgttattgttaaagtacgagcgactggcatatgtggttcagacacgtcacgatacaaaaaaatggggccatacattaaaggtatgccatttggtcatgaattttcaggtgtagtagatgccattggaagtgatgttacgcatgttaatgtgggcgacaaagtgacaggttgcccagcaataccttgttatcaatgcgagtattgtttgaaaggtgaatatgcacgatgtgaaaagttattcgtcattggctcatatgaacctggatcgttcgcggaatatgtcaaattgccagcgcaaaatgttttaaaggttccagacaatgttgattacattgaagcagcaatggttgagccatcagccgttgttgcgcatgggttttataaatcgaatatacaacctggtatgactgttgcagtaatggggtgtggcagtataggtttgttagctattcaatgggcacgaatatttggtgctgcacatatcatcgctatagatatagatgcgcataaactagatattgcaacatcattgggcgcacatcaaacaatcaattcaaaagaagaaaatcttgagaaattcatcgaaaatcattacgccaatcaaatcgatttagctatagaatcatcaggtgctaaagttacgattggtcaaatattgacgctacctaaaaaaggtggcgaggtggtattactcggaataccatatgatgatattgagattgatcgcgttcattttgaaaaaattctgcgtaacgagttgacagtatgtggctcttggaactgtttgtccagtaattttccgggcaaagagtggacggcaaccttacattatatgaagacgaaagatattaatgtaaagcctattatttctcattttttaccgttagaaaaaggcccggagacatttgataaattagttaacaagaaagaacgatttgataaagtcatgtttacgatttattag

SEQ ID NO: 5147 - protein, 347 aa, Staphylococcus aureus subsp. aureus Mu50
MKALKLYGVEDLRYEDNEKPVIESANDVIVKVRATGICGSDTSRYKKMGPYIKGMPFGHEFSGVVDAIGSDVTHVNVGDKVTGCPAIPCYQCEYCLKGEYARCEKLFVIGSYEPGSFAEYVKLPAQNVLKVPDNVDYIEAAMVEPSAVVAHGFYKSNIQPGMTVAVMGCGSIGLLAIQWARIFGAAHIIAIDIDAHKLDIATSLGAHQTINSKEENLEKFIENHYANQIDLAIESSGAKVTIGQILTLPKKGGEVVLLGIPYDDIEIDRVHFEKILRNELTVCGSWNCLSSNFPGKEWTATLHYMKTKDINVKPIISHFLPLEKGPETFDKLVNKKERFDKVMFTIY

SEQ ID NO: 5148 - DNA, 1020 bp, Bacillus subtilis subsp. subtilis str. 168
  CDS (1)..(1020): transl_table=11
atgaaagcggttcaagtgcgaaaagcgtatgatctggtgacagcggaggtgaagaagccagttctttcaaaggatgatgaagtgctcgtgaaagtcaagcgagtcggcatttgcggttcagacatgcacatttatcatggaacgaatccgctcgctaccctcccgagagtcatcggacacgaggtaacgggacaagtggaggcagttggtgcgaatgtacagagcctaaaacccggtgatcatgtggtgattgagccgatttcttattgcggatcgtgctatgcctgccgcaaagggcggccgaatgtttgcgccaagctttctgtatttggcgtacatgaggacggaggcatgcgggaatatattgtgcttccggaaagacagcttcacgcggtctcaaaggacttgccttgggaggaagcagtcatggccgagccttatacgataggcgcccaggcagtgtggagaggccaggtggaaaaaggtgataccgtcctgatccagggagcggggcccatcgggatctgtgtgttaaaaatggcaaaactggcgggcgctgctgtcatgatgactgacttgaacaacgagcggctggcatttgcgaaagaaaacggcgccgatgctgttgtaaatgtccaagcagaacatgttgccgagcgggtccttgaatggactgggaatgaaggagcaaacgtggtcattgatgctgtttgcctgccggagacttttgcactttcaattgaggctgtgtcaccggcgggacatgtggttgtgcttggatttgatgaaagagcggctcagatttctcagctgccaattacaaaaaaagaagtcacgataaccggatcccgattgcagaccaatcagtttccaaaagtggtagagcttttgaatggaggccggttaatgcataacgggctggtgacccatacattttcagttgatgacgttcatcatgcatttcagtttattaaggagcatccagatcaggtgcggaaagccgtcatcacgtttgattaa

SEQ ID NO: 5149 - protein, 339 aa, Bacillus subtilis subsp. subtilis str. 168
MKAVQVRKAYDLVTAEVKKPVLSKDDEVLVKVKRVGICGSDMHIYHGTNPLATLPRVIGHEVTGQVEAVGANVQSLKPGDHVVIEPISYCGSCYACRKGRPNVCAKLSVFGVHEDGGMREYIVLPERQLHAVSKDLPWEEAVMAEPYTIGAQAVWRGQVEKGDTVLIQGAGPIGICVLKMAKLAGAAVMMTDLNNERLAFAKENGADAVVNVQAEHVAERVLEWTGNEGANVVIDAVCLPETFALSIEAVSPAGHVVVLGFDERAAQISQLPITKKEVTITGSRLQTNQFPKVVELLNGGRLMHNGLVTHTFSVDDVHHAFQFIKEHPDQVRKAVITFD

SEQ ID NO: 5150 - DNA, 1047 bp, Listeria monocytogenes EGD-e
  CDS (1)..(1047): transl_table=11
atgaaagctttaaaattatatggaaaaagagatttgcgttatgaagaagcggatatgccaacaattgaagagccagatgatgttattttgaaagtgaaaacagttgggatttgtggttcagatatttcgagatacagtaaacttggtccgtatgtaccaggaatggtatggggtcatgaattttcaggggaagttattgaagttggtagtgaggttacagatattgagattggcgatagggctgccggatgcccagcactctattgtggagagtgtgaatactgtaaaaaaggcgaattcgcccgctgtcggaagctaacagtaatcggagcaagacatcccggagcctatgctgagtatatcaaacttccagcagaaaatgtagtgaaaataccaaacgaattagattatgaggctgctgcacttgtcgagccttccgcagtggtcgttcatggattttatcatacgaaattacaagcaggcgatgatgtcgttgttgtcggaagcggaaatatcggtttgctagcaattcaatgggcgaaagtctttggggcaagaagagtgatagcgattgatgtagacgataaaaagctagcacttgcgaaagaagtcggagcagacgtagttattaactctttaaaagaagatcctttagaagtagtcgcagcacatacagatggtctaaacgctgatttagttgtagaagctgcgggatcacctattacatctgcacaagtttttgcctatgcgaaaaaaggtggaggcgtagtgttcctcggaattccatacgccgatgtaacaatcgaacgtttttactttgaaaaaattgttcggagcgagcttactgtatggggttcatggaatgcgatttctgcaccgtttccaggaaaagagtggcaaacaaccattcacttcttagccaataaacaaatcaacattgagccaatgattacacatcgtctttcacttgctgaaggaccagaagtttttgagcgaatctatgaaagaaatgaatttttcgggaaagtattatttttcccagaatga

SEQ ID NO: 5151 - protein, 348 aa, Listeria monocytogenes EGD-e
MKALKLYGKRDLRYEEADMPTIEEPDDVILKVKTVGICGSDISRYSKLGPYVPGMVWGHEFSGEVIEVGSEVTDIEIGDRAAGCPALYCGECEYCKKGEFARCRKLTVIGARHPGAYAEYIKLPAENVVKIPNELDYEAAALVEPSAVVVHGFYHTKLQAGDDVVVVGSGNIGLLAIQWAKVFGARRVIAIDVDDKKLALAKEVGADVVINSLKEDPLEVVAAHTDGLNADLVVEAAGSPITSAQVFAYAKKGGGVVFLGIPYADVTIERFYFEKIVRSELTVWGSWNAISAPFPGKEWQTTIHFLANKQINIEPMITHRLSLAEGPEVFERIYERNEFFGKVLFFPE

SEQ ID NO: 5152 - DNA, 1047 bp, Listeria innocua Clip11262
  CDS (1)..(1047): transl_table=11
atgaaagctttaaaattatatggaaaaagagatttgcgttatgaagacgcagatatgccaacaatcgaacaacctgatgatgttattttgaaagtaaaaacggttggaatttgcggatcagatatttcgagatacagtaaacttggtccgtatgtaccgggaatggtgtggggacacgaattttcaggagaagtgattgaggttggtagtgcggtaactgatattgaaattggtgatagggctgccggatgcccagcactctattgcggagagtgtgaatactgtaaaaaaggcgaattcgcccgctgtcggaagctaacagtaatcggagcaagacatcccggagcctatgctgagtatatcaaacttccagcagaaaatgtagtaaaaataccagacgaattagattatgaagcggctgcacttgtcgagccttctgcagtggtcgttcatggattttatcatacgaaattacaagctggcgatgatgtcgtcgttgtcggaagcggcaatatcggtttgctagcaattcaatgggcaaaagtttttggcgcaagaagagttattgcgattgatgtagacgataaaaagttagctcttgcgaaagaagtgggagcagacgtagttattaattctttaaaagaagatccattagaagtagtcgcagcacatacagatggtctaaatgctgatttagttgtagaagccgcgggatcacctattacatccgctcaagtttttgcctatgcgaaaaaaggtggaggcgtcgtgttcctaggaattccatatgctgatgtaacaatcgaacgtttctattttgaaaaaattgtgcggagtgagcttacagtttggggttcatggaacgcaatttccgcaccatttccaggaaaagagtggcaaacaaccattcacttcctagctaacaaacaaatcaacattgagccaatgattacacaccgtctttcacttgctgaaggaccagaagtttttgagcgaatctatgaaagaaatgaatttttcgggaaagtactatttttcccagaatga

SEQ ID NO: 5153 - protein, 348 aa, Listeria innocua Clip11262
MKALKLYGKRDLRYEDADMPTIEQPDDVILKVKTVGICGSDISRYSKLGPYVPGMVWGHEFSGEVIEVGSAVTDIEIGDRAAGCPALYCGECEYCKKGEFARCRKLTVIGARHPGAYAEYIKLPAENVVKIPDELDYEAAALVEPSAVVVHGFYHTKLQAGDDVVVVGSGNIGLLAIQWAKVFGARRVIAIDVDDKKLALAKEVGADVVINSLKEDPLEVVAAHTDGLNADLVVEAAGSPITSAQVFAYAKKGGGVVFLGIPYADVTIERFYFEKIVRSELTVWGSWNAISAPFPGKEWQTTIHFLANKQINIEPMITHRLSLAEGPEVFERIYERNEFFGKVLFFPE

SEQ ID NO: 5154 - DNA, 1044 bp, Caenorhabditis elegans
  CDS (1)..(1044)
atgtctcaagataatttgtctgctgtcctctacggaataaacgatttacgtcttgaacaagctccaatttccaaaccgggaccaagacaagttcttgttaaaattaatactgttggtatttgtggaagtgatgtacactttttgacacacggagcaattggatcatttgttgttaaagaaccgatggttttaggccatgagagttctggagttgtttctgaaattggaagtgaagtgaaagggtttaaagttggtgacagaattgcaatggaaccaggtctcccatgcaaactgtgtgagcactgcaaaattggaagatataatttgtgtcctgatatgcgttttttcgctactccaccagtgaacggagcattatctagatttgttgttcatgatgcagatttttgtttcaagcttccagacaatctctcatttgaagatggagcacttcttgagccattgtctgttgcaattcaagcatgccgccgtggaactgttcaaatgggacaaaaaatacttgttctcggagcaggaccaattggagtcttgaatcttcttactgctaaagcgataggtgcatcaaaagtagtaatcactgatttgaacgacgagagacttgctcttgcacgcctattaggagctgatgctacaatcaatgttatgggaaaacgttcggatgaagtaagatcagagatcatcaaggcatttggcgatcaacaacctcatgtttcaattgagtgcacaggggtccagccgtgtgtcgagacagctatcatgacaacaagatccggaggagttgttgttctagttggattgggtgcagagagagttgagattccattgattcaatcaccgacacgagaagttgatttgagaggaacatttagatcggcgaattgctattcaactgcaattgagctaatttcatctggaaaacttgatctatcgggattaacaagagctcattacaagttggaagaaagccttgaagcatttaagagaacccaaaatggagatgttattaaagtatttattcattgttaa

SEQ ID NO: 5155 - protein, 347 aa, Caenorhabditis elegans
MSQDNLSAVLYGINDLRLEQAPISKPGPRQVLVKINTVGICGSDVHFLTHGAIGSFVVKEPMVLGHESSGVVSEIGSEVKGFKVGDRIAMEPGLPCKLCEHCKIGRYNLCPDMRFFATPPVNGALSRFVVHDADFCFKLPDNLSFEDGALLEPLSVAIQACRRGTVQMGQKILVLGAGPIGVLNLLTAKAIGASKVVITDLNDERLALARLLGADATINVMGKRSDEVRSEIIKAFGDQQPHVSIECTGVQPCVETAIMTTRSGGVVVLVGLGAERVEIPLIQSPTREVDLRGTFRSANCYSTAIELISSGKLDLSGLTRAHYKLEESLEAFKRTQNGDVIKVFIHC

SEQ ID NO: 5156 - DNA, 1044 bp, Caenorhabditis elegans
  CDS (1)..(1044)
atgtctcaagacaatttatcagcggtactttatggcgtagatgatcttcgtctggagcaagttccaattccaaagcctgggccaaatcaggtgcttgttaaagttcacactgttggaatttgtggaagtgatgttcactattggacgcacggagcaatcgggccatttgtcgtaaaagaaccaatgatcgttggtcatgaaacgtctgggattgtttctgaagttggaaatgaggtgaaacatcttaaagttggtgacagaattgcaatggaaccaggccttccatgcaaactttgtgagcactgcaaaactggaagatacaatttgtgcccggaaatgagattctttgctactccaccagttcatggaaccctatccagatttgtggtgcacgacgctgatttttgcttcaaactcccagataacctttcatttgaagacggggctcttattgaaccactttccgttgcgattcatgcgtgtcgacgtggaaatgttcaaatgggacaccgagttcttgttctcggagccggtcctattggagttttaaacctcattaccgctaaagctgtaggagctggaaaagtagttattactgatttagatgatggcagacttgcgctcgcaaagaaacttggggcagatgcaacaattaacgttaaaggaaagtcattggacgcagttaaatcggagatcattaccgcactgggtgatcagcagccggatgtctgtattgagtgtactggcgcacagccgagtatcgagacagctataacgaccaccaaatcaggtggagtcatagttcttgtcggattgggagcagaccgagttgaaataccaataattgaatcagcaactagagaagttgacatgcgtgggattttcagatatgtaaactgctacccaacagcaatcgaactcatttcatctggaaaactaaatttgtcggggctaacacgtgctcactataaacttgaagaaacacaagaagcattcaaaagaacacagaaggctgatgtcatcaaagtatttattcaatgctga

SEQ ID NO: 5157 - protein, 347 aa, Caenorhabditis elegans
MSQDNLSAVLYGVDDLRLEQVPIPKPGPNQVLVKVHTVGICGSDVHYWTHGAIGPFVVKEPMIVGHETSGIVSEVGNEVKHLKVGDRIAMEPGLPCKLCEHCKTGRYNLCPEMRFFATPPVHGTLSRFVVHDADFCFKLPDNLSFEDGALIEPLSVAIHACRRGNVQMGHRVLVLGAGPIGVLNLITAKAVGAGKVVITDLDDGRLALAKKLGADATINVKGKSLDAVKSEIITALGDQQPDVCIECTGAQPSIETAITTTKSGGVIVLVGLGADRVEIPIIESATREVDMRGIFRYVNCYPTAIELISSGKLNLSGLTRAHYKLEETQEAFKRTQKADVIKVFIQC

SEQ ID NO: 5158 - DNA, 1122 bp, Brucella melitensis 16M
  CDS (1)..(1122): transl_table=11
gtgtggcagccagcagtttcaagccctgcgtctctcatgcttgtttcttcgcattcccctggaacgatgcaagttcgacaacgaaggagtaactctatggcaaagacgatgaaagctgcggtcgtgcgtgccttcggcaaaccgctgacgattgatgaagtgccgatacctcaacccggtcccggccagattcaggttgccattcaggcttccggcgtatgccataccgaccttcatgccgccgagggcgattggccggtaaaacccaatccgcccttcattccgggtcatgagggtgtcggtttcgtttccgccgtgggcagcggcgtcaagcatgtcaaggaaggcgaccgtgtcggcattccatggctttacactgcctgcggccattgccttggtggctgggaaacgctttgcgaggaacagctcaataccggctattccgtcaatggcggctttgccgaatatgtggtggccgatccgaatttcgtcggccacttgccgaagaatatcgatttcaacgagattgcgccggtgctctgcgcgggcgtgacggtctataagggcctcaaggtcacggatacgaagcccggtgactgggtggtcatttcaggcataggcgggctcggccacatggctgtgcaatatgccagggccatggggctgaatgttgccgccgtcgatattgacgaccgcaagctcgatctcgcccgcagacttggcgcaaccgttacggtcaacgctaagacggttgccgacccggcagcctatattcgcaaggaaaccgatggcggtgcgcaaggcgtgctggtgacggcggtttcgcccaaggcttttgaacaggcgctgggcatggttgcgcgcggcggtactgtttcgctgaatggcctgccgcctggcgatttcccgctttccatcttcaacatggtgctcaatggcgtaacggtgcgcggctccatcgtggggacgcggcttgatttgcaggaatcgctcgattttgcagccgacggcaaggtcaaggccaccatccaaaccggcaagctggaagacatcaacgccatcttcgacgatatgcggcaaggcaatatcgaaggccgcatcgtgatggacctgactcaatag

SEQ ID NO: 5159 - protein, 373 aa, Brucella melitensis 16M
MWQPAVSSPASLMLVSSHSPGTMQVRQRRSNSMAKTMKAAVVRAFGKPLTIDEVPIPQPGPGQIQVAIQASGVCHTDLHAAEGDWPVKPNPPFIPGHEGVGFVSAVGSGVKHVKEGDRVGIPWLYTACGHCLGGWETLCEEQLNTGYSVNGGFAEYVVADPNFVGHLPKNIDFNEIAPVLCAGVTVYKGLKVTDTKPGDWVVISGIGGLGHMAVQYARAMGLNVAAVDIDDRKLDLARRLGATVTVNAKTVADPAAYIRKETDGGAQGVLVTAVSPKAFEQALGMVARGGTVSLNGLPPGDFPLSIFNMVLNGVTVRGSIVGTRLDLQESLDFAADGKVKATIQTGKLEDINAIFDDMRQGNIEGRIVMDLTQ

SEQ ID NO: 5160 - DNA, 1047 bp, Pseudomonas putida
  CDS (1)..(1047): transl_table=11
atgctcgcgataaggaaaactaaagcagggccaggagggctatctgtcgatgatgtggccgcccctaaagaggcccacagtactgacgtgctggtgaaagttgaagcggccggtatctgtggtactgacttgttgatctataaatggggcgagttcgccaaaagaatgaaactccccactatcttgggtcatgaagttagcggggtgattgaacaggtcggatctgacgttaaaggtctaaggcctgggatgcgcgtcagtctggagagtcatctcccttgtggaacgtgctacacgtgtcgacgcggttgggcgcatgtttgtcctaagacgcggtatccgggggtcgactttgatggaggcttcgcgtctttcgttgtggttccggaaagcgtgtgttggccggtgccgtgcggaattcctccgctccaggcggcaatgatggagccgttcgggcttgcggtgcatgcaagtctggagggttctggggtttcgggattgaatgttcttgtttctggttgcggtccgatcggacttatgaacattgcagccgccaaagcactgggagcaagcaaggtcattgcaccggacattcatcctctgcgcctcactgcagcagccaaaatgggggcggatgaatgcattaatgcaactgaagagagcgtttataagactgtgcgttcgctgctcggtgagaggggagtagatgttgcaattgactattctgggcaagcagcggcgttaaaggagcttattcaatccatcacccatggtggtgagttgcgactgatgggcgtcccgtcacatgatattttgctcaacttagaggagtggcttttcaaaggccttattgtacgtggcctgcatggcaggcgtctgtatgaaagatgggagcgttcaactagcttattggttacagggcgtgttgatttgtcttcgctcgtatcgcatcgattgccactatcggcggcagaggatgcgttcgaaatggccctaaatggtcagtccttgaaaatcctgtttgagcccaatggctcatgtatctaa

SEQ ID NO: 5161 - protein, 348 aa, Pseudomonas putida
MLAIRKTKAGPGGLSVDDVAAPKEAHSTDVLVKVEAAGICGTDLLIYKWGEFAKRMKLPTILGHEVSGVIEQVGSDVKGLRPGMRVSLESHLPCGTCYTCRRGWAHVCPKTRYPGVDFDGGFASFVVVPESVCWPVPCGIPPLQAAMMEPFGLAVHASLEGSGVSGLNVLVSGCGPIGLMNIAAAKALGASKVIAPDIHPLRLTAAAKMGADECINATEESVYKTVRSLLGERGVDVAIDYSGQAAALKELIQSITHGGELRLMGVPSHDILLNLEEWLFKGLIVRGLHGRRLYERWERSTSLLVTGRVDLSSLVSHRLPLSAAEDAFEMALNGQSLKILFEPNGSCI

SEQ ID NO: 5162 - DNA, 1038 bp, Corynebacterium glutamicum ATCC 13032
  CDS (1)..(1038): transl_table=11
atgaccactgctgcaccccaagaatttaccgctgctgttgttgaaaaattcggtcatgacgtgaccgtgaaggatattgaccttccaaagccagggccacaccaggcattggtgaaggtactcacctccggcatctgccacaccgacctccacgccttggagggcgattggccagtaaagccggaaccaccattcgtaccaggacacgaaggtgtaggtgaagttgttgagctcggaccaggtgaacacgatgtgaaggtcggcgatattgtcggcaatgcgtggctctggtcagcgtgtggcacctgcgaatactgcatcaccggcagggaaactcagtgcaacgaagctgagtatggtggctacacccaaaatggatccttcggccagtacatgctggtggatacccgttacgccgctcgcatcccagacggcgtggactacctcgaagcagcaccaattctgtgtgcaggcgtgactgtctacaaggcactcaaagtctctgaaacccgcccgggccaattcatggtgatctccggtgtcggcggacttggccacatcgcagtccaatacgcagcggcgatgggcatgcgtgtcattgcggtagatattgccgatgacaagctggaacttgcccgtaagcacggtgcggaatttaccgtgaatgcgcgtaatgaagattcaggcgaagctgtacagaagtacaccaacggtggcgcacacggcgtgcttgtgactgcagttcacgaggcagcattcggccaggcactggatatggctcgacgtgcaggaacaattgtgttcaacggtctgccaccgggagagttcccagcatccgtgttcaacatcgtattcaagggcctgaccatccgtggatccctcgtgggaacccgccaagacttggccgaagcgctcgatttctttgcacgcggactaatcaagccaaccgtgagtgagtgctccctcgatgaggtcaatggtgtgcttgaccgcatgcgaaacggcaagatcgatggtcgtgtggcgattcgtttctaa

SEQ ID NO: 5163 - protein, 345 aa, Corynebacterium glutamicum ATCC 13032
MTTAAPQEFTAAVVEKFGHDVTVKDIDLPKPGPHQALVKVLTSGICHTDLHALEGDWPVKPEPPFVPGHEGVGEVVELGPGEHDVKVGDIVGNAWLWSACGTCEYCITGRETQCNEAEYGGYTQNGSFGQYMLVDTRYAARIPDGVDYLEAAPILCAGVTVYKALKVSETRPGQFMVISGVGGLGHIAVQYAAAMGMRVIAVDIADDKLELARKHGAEFTVNARNEDSGEAVQKYTNGGAHGVLVTAVHEAAFGQALDMARRAGTIVFNGLPPGEFPASVFNIVFKGLTIRGSLVGTRQDLAEALDFFARGLIKPTVSECSLDEVNGVLDRMRNGKIDGRVAIRF

SEQ ID NO: 5164 - DNA, 1017 bp, Streptococcus pyogenes MGAS8232
  CDS (1)..(1017): transl_table=11
atgaaagccgtagttgttaatcaagctagtacaggtgtcgaagttgttgagcatgatcttccaaatgttggtcatggtgaagcgcttgttaaagtagaatactgtggcgtttgtcatactgatttacacgttgcacatggcgattttggtcaggtaccaggacgtattttggggcacgaaggtattggtatagtagaagaaattggagaaggcgtaacatccttaaaggttggtgatcgtgtctctattgcatggttctttgaaggatgtggtcattgcgaatactgtactacagggcgtgagacactttgtcgtagtgttaaaaatgctggatacagtgttgatggaggaatgagtgaatatgcagtagtaacagctgattatgcagttaaagttccagaaggtttagacccggctcaagcttcttccattacttgtgctggtgtaacaacttataaagctattaaagaggcaggtgttgctccaggccaatggattgttatctttggggcaggtggccttggaaatctggctgttcaatacgctaaaaaagtctttaatgcacatgttgtcgcagtggacattaataatgataaacttgagttagctaaagaagttggcgcagatattttagttaacggcaaagaaattgaagatgttccaggctatattcaagaaaaaatcggtggagcacatggtgttgtggtaacggctgtttctaaagttgcttttaaccaagcaattgatagtgtccgtgccggtggaacagttgtagccgtaggtcttccatcagaatacatggaactgtctatcgtaaaaactgttttagatggtatcaaagtggtcggatcacttgtagggacacgtaaagacttggaagaagcctttgcctttggtgcagaaggtctggttgctccggttgtcgaaaaagttccagttgacactgctccagaagtctttgatgaaatggaacgtggtttaatccaagggcgcaaggtcttagatttcatcagctaa

SEQ ID NO: 5165 - protein, 338 aa, Streptococcus pyogenes MGAS8232
MKAVVVNQASTGVEVVEHDLPNVGHGEALVKVEYCGVCHTDLHVAHGDFGQVPGRILGHEGIGIVEEIGEGVTSLKVGDRVSIAWFFEGCGHCEYCTTGRETLCRSVKNAGYSVDGGMSEYAVVTADYAVKVPEGLDPAQASSITCAGVTTYKAIKEAGVAPGQWIVIFGAGGLGNLAVQYAKKVFNAHVVAVDINNDKLELAKEVGADILVNGKEIEDVPGYIQEKIGGAHGVVVTAVSKVAFNQAIDSVRAGGTVVAVGLPSEYMELSIVKTVLDGIKVVGSLVGTRKDLEEAFAFGAEGLVAPVVEKVPVDTAPEVFDEMERGLIQGRKVLDFIS

SEQ ID NO: 5166 - DNA, 1053 bp, Thermoanaerobacter tengcongensis MB4
  CDS (1)..(1053): transl_table=11
atgtctattatggatggacttatgaccgccgtggtaaaacaataccacaaagaaggggcagatatagtaaaaaaggaaataccaaagataggccctgatgaagttttgataaaagttaaagctacttctatttgcggcacagacgttcacatatacgtctggaatgaatgggcaaaaagtagaataaaacctccaaaaacgatgggacacgaatttgtaggagaggttgtagaaattggagaaaatgtcacatcagtaaaagtgggagacttagtaagcgcagaaactcatatagtatgcggaaagtgcagagcctgcagaaccggcaacgctcacatatgtgaaaataccctcattttaggcgttgacacagatggagcttttgcagaatacatcaaagttcctgaaagcaatgtgtggataaacgacaaaaacatacctctagagatactatccatacaggaacctcttggaaacgcagtccacactgttttttcaggagacgtagttggaaaatctgtagctgtcataggatgcggcccaataggaatgatggcaataccacttcttaaaagaacaggtgctgcagcaatattcgcgattgaacctgctgactacaggagagagttggctcacaagcttggtgcaacaagggttataaatcctctccgcgaagacgttgtcagcataataaaaagtgaaacagaaggctatggagcagatgtagttttggacttttcaggtaacccaaccgccataaggcagggtctagagtacattgcaaaaggtggcagaatgtctattctaggccttcctgacaatgaagttccaattgacatcacaaataatgtggtattcaaaggaataactatacaaggcataactggaagaagaatgtacgatacctggtacaccgtaaagggcttactaaaatcaggtcttgcagaagatttaaagccaataatcacccacacattccctcttaccgaataccagaagggaatggaactcatgataaaagggcagtgcggtaaagtcgtattatatccgtaa

SEQ ID NO: 5167 - protein, 350 aa, Thermoanaerobacter tengcongensis MB4
MSIMDGLMTAVVKQYHKEGADIVKKEIPKIGPDEVLIKVKATSICGTDVHIYVWNEWAKSRIKPPKTMGHEFVGEVVEIGENVTSVKVGDLVSAETHIVCGKCRACRTGNAHICENTLILGVDTDGAFAEYIKVPESNVWINDKNIPLEILSIQEPLGNAVHTVFSGDVVGKSVAVIGCGPIGMMAIPLLKRTGAAAIFAIEPADYRRELAHKLGATRVINPLREDVVSIIKSETEGYGADVVLDFSGNPTAIRQGLEYIAKGGRMSILGLPDNEVPIDITNNVVFKGITIQGITGRRMYDTWYTVKGLLKSGLAEDLKPIITHTFPLTEYQKGMELMIKGQCGKVVLYP

SEQ ID NO: 5168 - DNA, 1017 bp, Streptococcus pyogenes MGAS315
  CDS (1)..(1017): transl_table=11
atgaaagccgtagttgttaatcaagctagtacaggtgtcgaagttgttgagcatgatcttccaaatgttggtcatggtgaagcgcttgttaaagtagaatactgtggtgtttgtcatactgatttacacgttgcacatggcgattttggtcaggtaccaggacgtattttggggcacgaaggtattggtatagtagaagaaattggagaaggcgtaacatccttaaaggttggtgatcgtgtctctattgcatggttctttgaaggatgtggtcattgcgaatactgtactacaggacgtgagacactttgtcgtagtgttaaaaatgctggatacagtgttgatggaggaatgagtgaatatgcagtagtaacagctgattatgcagttaaagttccagaaggtttagacccggctcaagcttcttccattacttgtgctggtgtaacaacttataaagctattaaagaggcaggtgctgctccaggccaatggattgttatctttggggcaggtggccttggaaatctggctgttcaatacgctaaaaaagtctttaatgcacatgttgtcgcagtggacattaataatgataaacttgagttagctaaagaagttggcgcagatattgtagttaacggcaaagaaattgaagatgttccaggctatattcaagaaaaaaccggtggagcacatggtgttgtggtaacggctgtttctaaagttgcttttaaccaagcaattgatagtgtccgtgccggtgggacagttgtagccgtaggtcttccatcagaatacatggaactgtctatcgtaaaaactgttttagatggtatcaaagtggtcggatcacttgtagggacacgtaaagacttggaagaagcctttgcctttggtgcagaaggtctggttgttccggttgtcgaaaaagttccagttgacactgctccagaagtctttgatgaaatggaacgtggtttaatccaagggcgcaaggtcttagatttcatcagctaa

SEQ ID NO: 5169 - protein, 338 aa, Streptococcus pyogenes MGAS315
MKAVVVNQASTGVEVVEHDLPNVGHGEALVKVEYCGVCHTDLHVAHGDFGQVPGRILGHEGIGIVEEIGEGVTSLKVGDRVSIAWFFEGCGHCEYCTTGRETLCRSVKNAGYSVDGGMSEYAVVTADYAVKVPEGLDPAQASSITCAGVTTYKAIKEAGAAPGQWIVIFGAGGLGNLAVQYAKKVFNAHVVAVDINNDKLELAKEVGADIVVNGKEIEDVPGYIQEKTGGAHGVVVTAVSKVAFNQAIDSVRAGGTVVAVGLPSEYMELSIVKTVLDGIKVVGSLVGTRKDLEEAFAFGAEGLVVPVVEKVPVDTAPEVFDEMERGLIQGRKVLDFIS

SEQ ID NO: 5170 - DNA, 1035 bp, Oceanobacillus iheyensis HTE831
  CDS (1)..(1035): transl_table=11
atgaaggcattagtgaaaacagagctagggcatggtaatctacacattcaaaatgttgaagaaccaagcgtatctagtcatcaagtgaaaataaaagtagcttatgcaggtatttgcggttcggatattcatacgtacgaaggtcattataaagtagctgctccggtaactttaggacatgagttttccggtcggattgtagaggttggtgaaggagttaccgattttaaagtcggtgatcgtgttacttcagaaacaactttttctatttgtggagaatgtcgctattgtcaaactggtgattataatttatgcaatcatcgtaaagggttaggtacgcagcaaaatggtggatttacgaattacttgattgctagagaagaaagtcttcaccatttgcccgacgaagtggatgatcgttctgcatccatgacagaaccattagcatgtacgtatcatgctattcaaaaaataaatattaagccaggagatttagtcgttgtgcttggaccaggtccaattggtttgttagcagctcaggttgctaaaagctatggagctaccgtcatgatgtccggactcgataatgacaaaattcgtctggataaagcgaaagaagttggcattgactacgttatcaacattcaagaagaagatataaaggaaaaaattgcagctttaacggatggttatggagtggatgtagtattagaatgttctggttcgattcatgctgctaatcaaggtctcgacttactacggaaaaaaggaagctacgcacaagtaggaatttttccagactcacatgtgaagtttgatatggaaaaagtcattcaaaaagaaatacatgttgtaggaagtagaagtcaaaaatcagcagattgggaaccatcacttcagttaatgaaagaaaagaaagtagatgcaaaagccttagtaacgcatgaattcactattgatcagtgggatgaagcataccaagcgataaaagacggagaggcaataaaagtactattaaaaccattacaagattaa

SEQ ID NO: 5171 - protein, 344 aa, Oceanobacillus iheyensis HTE831
MKALVKTELGHGNLHIQNVEEPSVSSHQVKIKVAYAGICGSDIHTYEGHYKVAAPVTLGHEFSGRIVEVGEGVTDFKVGDRVTSETTFSICGECRYCQTGDYNLCNHRKGLGTQQNGGFTNYLIAREESLHHLPDEVDDRSASMTEPLACTYHAIQKINIKPGDLVVVLGPGPIGLLAAQVAKSYGATVMMSGLDNDKIRLDKAKEVGIDYVINIQEEDIKEKIAALTDGYGVDVVLECSGSIHAANQGLDLLRKKGSYAQVGIFPDSHVKFDMEKVIQKEIHVVGSRSQKSADWEPSLQLMKEKKVDAKALVTHEFTIDQWDEAYQAIKDGEAIKVLLKPLQD

SEQ ID NO: 5172 - DNA, 1029 bp, Oceanobacillus iheyensis HTE831
  CDS (1)..(1029): transl_table=11
atgaaagcggtatttgtagaagatgctgagaaaattattgtgaaagatatagaggtccccgagttaaaaccgaatgaggtgcaaatcaaagtaaatgtcgctgggatttgcggttccgatattcatacgtataaaggcttacatccatttcgtaaacccccggtcgttattggacatgaagtagctggagaagttgtagaagttggatcatccgttactaaattcaaggttggtgatcgagtaacggtggagccgcaaatcggtacaggtgagagtgaaggagtaatgacgggaaatgtaaattactctgatacaagactagctccaggaatgggagactggttagggacaatggctgaatatttcgcatcgcctgaagaacaagtaattaaattaccagattccgttagttatgatcaaggtgtattagtcgaacctcttgctgtaggtgtacatgcagcgtttaaaggcgatgttcaaccaaccgatcgagtagcaattttgggagccggaccaattggccttcttacacttatcgctgtgaaagctaaaggcgtaaaagatattgttgttacggatgtgctcgactattcactacaagtggcaaaagaaatgggtgcttcagaagttattaatattaaggataattcaaactggattcatgatgcgaagcagagcttagataaaggatcttttgataaagtatttatcactgcgggtgttcctggtattgtaaatgactctcttaatctactaagaaaaggtggacgagtggttaccgtagccatgttccatggacaacagtctgttgatatcgaacagttacagcaaaatgaaaaagaaattattgggtgcatgacatataaccgtccggatacagaagaagccctagaaataatcgcaagcgggaaacttgatgtagagaaggttatttcccataaattgcattatgaagaagcagcaaagggttttacaattgtagataaaaagaaagataaatccgttaaagtacttgtttcatttgaatag

SEQ ID NO: 5173 - protein, 342 aa, Oceanobacillus iheyensis HTE831
MKAVFVEDAEKIIVKDIEVPELKPNEVQIKVNVAGICGSDIHTYKGLHPFRKPPVVIGHEVAGEVVEVGSSVTKFKVGDRVTVEPQIGTGESEGVMTGNVNYSDTRLAPGMGDWLGTMAEYFASPEEQVIKLPDSVSYDQGVLVEPLAVGVHAAFKGDVQPTDRVAILGAGPIGLLTLIAVKAKGVKDIVVTDVLDYSLQVAKEMGASEVINIKDNSNWIHDAKQSLDKGSFDKVFITAGVPGIVNDSLNLLRKGGRVVTVAMFHGQQSVDIEQLQQNEKEIIGCMTYNRPDTEEALEIIASGKLDVEKVISHKLHYEEAAKGFTIVDKKKDKSVKVLVSFE

SEQ ID NO: 5174 - DNA, 1056 bp, Oceanobacillus iheyensis HTE831
  CDS (1)..(1056): transl_table=11
atgaaggcagcagtttggtatggtaaacacgatattcgtgtagagaataaggaagaacctataattaaacctggaaaggttaaaataaaagtagcatggacaggcatttgtggaagtgacctgcatgcttatcacggcgctgagggagtcgttcaagttggcgaacctcatcctgtaactggtgaaatggcaccattgacgcttgggcatgagttttctggtgtaattcatgaaattggtgaaggtgtaagcggtttatctgttggagatcgtgtagcgattgagccggctattaagtgtggcaagtgtgagaattgtgtacgaggaaactacaacttgtgtgaacacaatggctttgttggcttacaatctgacggtgcttttgctgagtatgcaattgttgatccacatatggttcacaagcttccagataatatatcgtttgaagaagctacagcaattgagcctacagctgtgtctttccacgcgcttaaattaagcaatatgaaagcaggcgatacggtagcggtctttggtgttggcccaattggtcttacggcgattctatgtgcgaaggcagctggtgcgtctcgtatttatgcgattgatgtttccaatgagcgtcttgagatggctcaaaagcttggcgcaactacggttattaatgcgatagaagagaatgcggcagaaaagatatatgctgaaacaggaagtggcgttactatcgcatttgattgtgcaggagctgaagcgactgtgaacagtgcaattgattcacttgctaaaggcggacaacttgtcattgtgtccattattccagaaccgatcaaagtaaatcttttgcaggcgaacttaaaagaaataaacattcttgcaactatcggttacagagatgtgtataaagacgttattgctatggtggaatcaggacagctggatcttaaaccgatcatcactaaaaaaatcggtttggatgatattatcgaagaaggcttccacgcccttacaaatgataagagccaagcaaaaattcttgtgagcccaacaggggtttaa

SEQ ID NO: 5175 - protein, 351 aa, Oceanobacillus iheyensis HTE831
MKAAVWYGKHDIRVENKEEPIIKPGKVKIKVAWTGICGSDLHAYHGAEGVVQVGEPHPVTGEMAPLTLGHEFSGVIHEIGEGVSGLSVGDRVAIEPAIKCGKCENCVRGNYNLCEHNGFVGLQSDGAFAEYAIVDPHMVHKLPDNISFEEATAIEPTAVSFHALKLSNMKAGDTVAVFGVGPIGLTAILCAKAAGASRIYAIDVSNERLEMAQKLGATTVINAIEENAAEKIYAETGSGVTIAFDCAGAEATVNSAIDSLAKGGQLVIVSIIPEPIKVNLLQANLKEINILATIGYRDVYKDVIAMVESGQLDLKPIITKKIGLDDIIEEGFHALTNDKSQAKILVSPTGV

SEQ ID NO: 5176 - DNA, 1035 bp, Brucella suis 1330
  CDS (1)..(1035): transl_table=11
atggcaaagacgatgaaagctgcggtcgtgcgtgccttcggcaaaccgctgacgattgatgaagtgccgatacctcaacccggtcccggccagattcaggttgccattcaggcttccggcgtatgccataccgaccttcatgccgccgagggcgattggccggtaaaacccaatccgcccttcattccgggtcatgagggtgtcggtttcgtttccgccgtgggcagcggcgtcaagcatgtcaaggaaggcgaccgtgtcggcattccatggctttacactgcctgcggccattgccgccattgccttggtggctgggaaacgctttgcgaggaacagctcaataccggctattccgtcaatggcggctttgccgaatatgtggtggccgatccgaatttcgtcggccacttgccgaagaatatcgatttcaacgagattgcgccggtgctctgcgcgggcgtgacggtctataagggcctcaaggtcacggatacgaagcccggtgactgggtggtcatttcaggcataggcgggctcggccacatggctgtgcaatatgccagggccatggggctgaatgttgccgccgtcgatattgacgaccgcaagctcgatctcgcccgcagacttggcgcaaccgttacggtcaacgctaagacggttgccgacccggcagcctatattcgcaaggaaaccgatggcggtgcgcaaggcgtgctggtgacggcggtttcgcccaaggcttttgaacaggcgctgggcatggttgcgcgcggcggtactgtttcgctgaatggcctgccgcctggcgatttcccgctttccatcttcaacatggtgctcaatggcgtaacggtgcgcggctccatcgtggggacgcggcttgatttgcaggaatcgctcgattttgcagccgacggcaaggtcaaggccaccatccaaaccggcaagctggaagacatcaacgccatcttcgacgatatgcggcaaggcaatatcgaaggccgcatcgtgatggacctgactcaatag

SEQ ID NO: 5177 - protein, 344 aa, Brucella suis 1330
MAKTMKAAVVRAFGKPLTIDEVPIPQPGPGQIQVAIQASGVCHTDLHAAEGDWPVKPNPPFIPGHEGVGFVSAVGSGVKHVKEGDRVGIPWLYTACGHCRHCLGGWETLCEEQLNTGYSVNGGFAEYVVADPNFVGHLPKNIDFNEIAPVLCAGVTVYKGLKVTDTKPGDWVVISGIGGLGHMAVQYARAMGLNVAAVDIDDRKLDLARRLGATVTVNAKTVADPAAYIRKETDGGAQGVLVTAVSPKAFEQALGMVARGGTVSLNGLPPGDFPLSIFNMVLNGVTVRGSIVGTRLDLQESLDFAADGKVKATIQTGKLEDINAIFDDMRQGNIEGRIVMDLTQ

SEQ ID NO: 5178 - DNA, 1071 bp, Streptomyces avermitilis MA-4680
  CDS (1)..(1071)
atgaaagcactcgttttccacggatccggagagtcagtctgggaggacgtggcggaccccggtatccaggacgccggcgacgcgatcgtccgtgtcgacaccgtcaccatctgcgggacggacctgcacattctcaagggggatctcccggaggtacgccccggcaccgtgctcggtcacgaggccgtcggtgagatcgtcgaaacgggcggcgacgtacgcacggtccgccccggcgaccgtgtcctcgtctcgtgcatcacggcgtgcggccgctgccgcttctgccgcgagtcggcgtacgggcagtgccgcggcggcggaggctggatcctcggccacctgatcaacggcacgcaggccgaatacgtccgcgtgccccacgccgatctgtccgtgcatccgctgcccggggcgatggacagcaaggacgccgttctgctggccgacatcctccccaccgcctacgaggtgggcgtgctcaatgggcgggtacggcccggagacaccgtcgtcgtggtcggtgcgggccccgtcggtctcgccgccgtcgccacgtcccgcctctacacacccgagaagatcatcgcggtggacctcgccccggcccggctggacgcggccaaacgcctcggcgcggacgcggtggccgtcgcgggcgaggaagccgagccactggtcgccgacctcaccctggggctcggggccgacgtcgtcatcgaagcggtcggggtgcccgagaccttcgagatgtgcacgcgcatggtgcggccgggcgggcacgtggccaacgtcggcgtgcacggcaggcccgcggtgctgcacctcgaagacctgtggatcaagaacgtgacgatcaccaccggactggtcgacacgcgctccactccgaccctgctgcgcatgatggccgccggccacctgcccgcgtcgtccatggtcacccacaccttcccgctggacgccatggaggaggcgtacgacgtcttctcgagggccgccgataccggcgcgctcaaggtcgtcctcggtgagcagcagcacgacgtcctgatggtcagggcggcctga

SEQ ID NO: 5179 - protein, 356 aa, Streptomyces avermitilis MA-4680
MKALVFHGSGESVWEDVADPGIQDAGDAIVRVDTVTICGTDLHILKGDLPEVRPGTVLGHEAVGEIVETGGDVRTVRPGDRVLVSCITACGRCRFCRESAYGQCRGGGGWILGHLINGTQAEYVRVPHADLSVHPLPGAMDSKDAVLLADILPTAYEVGVLNGRVRPGDTVVVVGAGPVGLAAVATSRLYTPEKIIAVDLAPARLDAAKRLGADAVAVAGEEAEPLVADLTLGLGADVVIEAVGVPETFEMCTRMVRPGGHVANVGVHGRPAVLHLEDLWIKNVTITTGLVDTRSTPTLLRMMAAGHLPASSMVTHTFPLDAMEEAYDVFSRAADTGALKVVLGEQQHDVLMVRAA

SEQ ID NO: 5180 - DNA, 1041 bp, Rhodopirellula baltica SH 1
  CDS (1)..(1041): transl_table=11
atgaaggcattgttgctgaccgaatacaaaaacatgcaggtgacggatgtggatgagcccgaggtgggcccagatgacgttttggtccaagtcgaagcgtgtgggatctgcggcagtgacattcatggatacgatggcagcaccgggcgtcgtatcccgcctttggtgatggggcacgaggctgccggggtggtggttcaggtcggcgaaaacgtccgcgatttggaactcggagcccgcgtcacgtttgattcgatggtgtcctgcggaaactgtgagttttgtcgcgaagggcacgggaacctttgtgacaaccgaatggttctcggcgtttcctgtggtgattaccgacgtcatggtgcgttcgcggaacgcatctcggttccgcgtcggatagtctatcgattacccgacactttgcccttcgaacacgcagctttggtcgaagcggtcagcgtcgcggtccatgcagcggaagtcactccgatcaagctaggtgataccgccgttgtggttggtgctggcatgatcggattgttggctgtgcaagccgtgcgagcagcgggtgcgacgcaggtcatcgcggtggatctaaacgacaaacgcctggaaacagccggaacgttgggagccgacgtgttgttgcgagccgatcaagtggacgtgccggaaaaggttcgcgaactgaccggtggccgcggggcagacgtggcattggaagtcgtcggtgcgacgccgacggtcaaaacagcgattgaatccgttcgcaagggtggagcggtcacgttggtcggcaacgtctcgccgacgatcgaattgcctttgcagtcagtcgttacgcgagaaattcgattgcagggcacatgtggttgcaacggtgaatacccacagtgcatcgatttgatgaatcgcggcgtcatcaacgttgaacctttgatcacggccaaaatttctttggcggacggtcccaaatggtttgaccgcctgcacgccggtgatgcggagcaaatgaaggtgttggtttgtcctcgttcggagtga

SEQ ID NO: 5181 - protein, 346 aa, Rhodopirellula baltica SH 1
MKALLLTEYKNMQVTDVDEPEVGPDDVLVQVEACGICGSDIHGYDGSTGRRIPPLVMGHEAAGVVVQVGENVRDLELGARVTFDSMVSCGNCEFCREGHGNLCDNRMVLGVSCGDYRRHGAFAERISVPRRIVYRLPDTLPFEHAALVEAVSVAVHAAEVTPIKLGDTAVVVGAGMIGLLAVQAVRAAGATQVIAVDLNDKRLETAGTLGADVLLRADQVDVPEKVRELTGGRGADVALEVVGATPTVKTAIESVRKGGAVTLVGNVSPTIELPLQSVVTREIRLQGTCGCNGEYPQCIDLMNRGVINVEPLITAKISLADGPKWFDRLHAGDAEQMKVLVCPRSE

SEQ ID NO: 5182 - DNA, 1029 bp, Photorhabdus luminescens subsp. laumondii TTO1
  CDS (1)..(1029): transl_table=11
atgaaagcattagtattagaaaaagcaggtcagatttcaattcaagactgggaaacccccgaaatattgggtgaaaatgatgttgaaataaaaattcactcggtggggatttgtggcagcgatgtgcattattatcaatacgggcgtattgggccatttattgtcgaaaagccgatgatcctcgggcacgaagcatcaggtgtcatcaccgcagtaggtaaaaatgtgactcacttaaaaatcggcgatcgtgtctgtatggaacctggcattcctaatctgcaatcaccacaatcacgggcaggtatttataacttagatccagaagtgcgtttctgggcgacgccccctattgatggttgcttacgtgaaagagttattcatccggcagcatttacgttcaaattaccggataatgtcagttttgccgaaggtgcaatggttgaaccattagctatcggtatgcaagccgccacaaaagcagaaattaaaccaggagatatcgcattagttattggtgctggcacgatcggaattgttaccgcacttgccgcattagccggtggttgttctgatgtcattatttgcgatgtgttcgatgaaaagctagaaattgcaaaacagtatccaggtcttcacccggttaatagcaaagtacttactgagaaagtgaatgcattaaccgagggtaatggcgtcaatattctctttgaatgtagtggcgcaaaaccggtcattgccactatttcagagcacattgcaccgggaggaatagctgttctagtcggtatgcctatcgatccggcaccatttgatgttgtctctgctcaagctaaagagatcacattcaaaactattttccgctacgcaaatatgtaccctcgtactattcgtttacttagctcaggtaagctcaaagtaacccctctattatccgcaacctataaatttaaagacagcgttcaggcgtatgaacgagccgcggagggtcgcccgacagatatcaaaattatgttggaaatggagtaa

SEQ ID NO: 5183 - protein, 342 aa, Photorhabdus luminescens subsp. laumondii TTO1
MKALVLEKAGQISIQDWETPEILGENDVEIKIHSVGICGSDVHYYQYGRIGPFIVEKPMILGHEASGVITAVGKNVTHLKIGDRVCMEPGIPNLQSPQSRAGIYNLDPEVRFWATPPIDGCLRERVIHPAAFTFKLPDNVSFAEGAMVEPLAIGMQAATKAEIKPGDIALVIGAGTIGIVTALAALAGGCSDVIICDVFDEKLEIAKQYPGLHPVNSKVLTEKVNALTEGNGVNILFECSGAKPVIATISEHIAPGGIAVLVGMPIDPAPFDVVSAQAKEITFKTIFRYANMYPRTIRLLSSGKLKVTPLLSATYKFKDSVQAYERAAEGRPTDIKIMLEME

SEQ ID NO: 5184 - DNA, 1053 bp, Bacillus cereus ATCC 10987
  CDS (1)..(1053): transl_table=11
atgaaagcattactttggcataatcaacgtgatgtaagagtagaagaagtaccagaaccaactgtaaaaccaggagcagttaagattaaagtgaaatggtgtggtatctgcgggacagacctgcatgaatatttagcaggacctatttttattccaaaagaagagcatccattaacacatgtaaaagcaccggttattttaggtcatgagtttagcggtgaggtagttgaaatcggtgaaggcgttacatctcataaagtgggagaccgcgtcgttgtagaaccaatttattcttgtggtaaatgtgaagcttgtaaacatggacattacaatgtttgtgaacaacttgttttccacggtcttggcggagaaggcggcggtttctctgaatatacagtagtaccagaagatatggttcaccatattccagatgaaatgacgtatgaacaaggtgcacttgtagaaccagcagctgtagcagttcatgcagtacgtcaaagtaaattaaaagaaggggaagctgtagcagtatttggttgtggtccaattggacttcttgttatccaagcagctaaagcagcaggagcaactcctgttattgcagtcgagctttctaaagaacgtcaagagttagcaaaattagcaggtgcggattacgtattaaatccagctactcaagatgtattagcagaaattcgtaacttaacaaatggtttaggtgtaaatgtgagctttgaagtaacaggtgttgaagtagtacttcgtcaagcaattgaaagtacaagtttcgaaggacaaactgtaattgttagtgtatgggaaaaagacgcaacaattactccaaacaatcttgtactaaaagaaaaagaagtggttggtattttaggataccgtcatatcttcccagctgttattaaattaattagctctggccaaattcaagcagagaaattaattacgaaaaaaatcacagtggatcaagttgttgaagaaggatttgaagcacttgtaaaagataaaacacaagtgaaaattcttgtttcacctaaataa

SEQ ID NO: 5185 - protein, 350 aa, Bacillus cereus ATCC 10987
MKALLWHNQRDVRVEEVPEPTVKPGAVKIKVKWCGICGTDLHEYLAGPIFIPKEEHPLTHVKAPVILGHEFSGEVVEIGEGVTSHKVGDRVVVEPIYSCGKCEACKHGHYNVCEQLVFHGLGGEGGGFSEYTVVPEDMVHHIPDEMTYEQGALVEPAAVAVHAVRQSKLKEGEAVAVFGCGPIGLLVIQAAKAAGATPVIAVELSKERQELAKLAGADYVLNPATQDVLAEIRNLTNGLGVNVSFEVTGVEVVLRQAIESTSFEGQTVIVSVWEKDATITPNNLVLKEKEVVGILGYRHIFPAVIKLISSGQIQAEKLITKKITVDQVVEEGFEALVKDKTQVKILVSPK

SEQ ID NO: 5186 - DNA, 1023 bp, Bacillus cereus ATCC 10987
  CDS (1)..(1023): transl_table=11
atgaaagctgcagtgtggtatggtgaaagagatattcgtattgaggaaagagaaacgaaagaattacaacccaatgacgtaaaagttaaagtggcatgggctggtatttgtggttctgatttgcatgcatacttgcatccaggttcagtaccaataaatatgaatacggtaatgggacatgaattttctggtgaaattgcagaggttggttctcatgtaacaaaatttaaaaaaggtgacagagtatgtatctatccaatgatgcttaaagatccttcaaatgctgaaattgaacgtttcatcactttagacgcagttggtgcacaaatcgacggagggtttgctgaatatgtgatacttccacaaaaaacgatttttaaaattccagatcatttaccgctagaattagcagccatggttgaaccagcagctgtatctttccaatccattaaggattcaaatgtaagagaaggggatactgtcgttgtctatggagcgggtcctattgggctatttgctgttttaggtgcaaaagctgcaggtgcttctaatattattgttatcgatctatttgatagtcgacttgataaagcaactgaaatgggtgcaacacatgtctttaatgctaaagaagtaaatcctgttgaagaaattcggaaattattcccaggtggagcagatgttgcaattgaagctgcaggtgtcgagtcaacatttaatcaagctattcaatcaactaaagttcgtggcacaatgatggttatcagcttccacacgcaagatatccaatttaatgttcctgcttcactaatctttagtggtgcaaaattaatggggtctgtaggatacagcaatgaaacttacaatgaggttattgaattatttgctaatggaagattacccgcgcaatcaattattacaagtaaaattgatatagataatattgctgaacaaggctttgaagcgttaattcatgataaatctcaagcgaaaattttagttaaattaagtggcgcacattaa

SEQ ID NO: 5187 - protein, 340 aa, Bacillus cereus ATCC 10987
MKAAVWYGERDIRIEERETKELQPNDVKVKVAWAGICGSDLHAYLHPGSVPINMNTVMGHEFSGEIAEVGSHVTKFKKGDRVCIYPMMLKDPSNAEIERFITLDAVGAQIDGGFAEYVILPQKTIFKIPDHLPLELAAMVEPAAVSFQSIKDSNVREGDTVVVYGAGPIGLFAVLGAKAAGASNIIVIDLFDSRLDKATEMGATHVFNAKEVNPVEEIRKLFPGGADVAIEAAGVESTFNQAIQSTKVRGTMMVISFHTQDIQFNVPASLIFSGAKLMGSVGYSNETYNEVIELFANGRLPAQSIITSKIDIDNIAEQGFEALIHDKSQAKILVKLSGAH

SEQ ID NO: 5188 - DNA, 1080 bp, Aspergillus nidulans FGSC A4
  CDS (1)..(1080)
atgagctcacagaccccaacagctcagaacctctccttcgtcctcgaaggcattcatcgggtcaaattcgaggatcgccccatcccaaagctcaaaagccctcatgatgtcatcgtgaacgttaaatacacaggcatctgcggcagcgatgttcactactgggatcacggagctattgggcaatttgtagtcaaggaacccatggtcctcggccatgaatcttccggaatagtcacacaaattggatcagccgtcactagtctaaaagtgggcgaccacgttgcaatggagcctggtattccctgccgacggtgcgagccctgcaaagcgggcaagtacaacctctgtgagaaaatggcttttgccgcaaccccgccgtatgacggtactttggccaagtactacacgctgcccgaagacttctgttacaaactgcccgagtcgatcagcctgcccgagggtgcactcatggagcccctgggagtcgccgtacacatagtgagacaagcgaatgttactccgggtcaaaccgttgtagtctttggagctggtccagtgggtctattgtgctgtgcggtagccaaagctttcggtgcgatcagaatcatagccgttgatatccaaaagccaagattggattttgcaaaaaaattcgccgcaacagccacattcgagccgtcgaaggcccccgcgaccgaaaacgctacccgcatgattgcagagaatgaccttgggaggggtgctgatgtcgcgattgatgcttcgggtgttgagccgtcagttcacacgggtatccatgttctccgccccggtggcacctatgtacaaggtggcatgggtcggagtgagatgaatttccccatcatggcggcttgcactaaggaactgaatatcaagggaagcttccgatatggtagtggtgattataagctggcagtacaactcgtggcttctgggcagatcaacgtcaaggaactgattactggcattgtcaaatttgaagacgccgagcaagcttttaaggacgttaaaaccggaaaaggcattaaaacgcttattgctggccctggcgccgcataa

SEQ ID NO: 5189 - protein, 359 aa, Aspergillus nidulans FGSC A4
MSSQTPTAQNLSFVLEGIHRVKFEDRPIPKLKSPHDVIVNVKYTGICGSDVHYWDHGAIGQFVVKEPMVLGHESSGIVTQIGSAVTSLKVGDHVAMEPGIPCRRCEPCKAGKYNLCEKMAFAATPPYDGTLAKYYTLPEDFCYKLPESISLPEGALMEPLGVAVHIVRQANVTPGQTVVVFGAGPVGLLCCAVAKAFGAIRIIAVDIQKPRLDFAKKFAATATFEPSKAPATENATRMIAENDLGRGADVAIDASGVEPSVHTGIHVLRPGGTYVQGGMGRSEMNFPIMAACTKELNIKGSFRYGSGDYKLAVQLVASGQINVKELITGIVKFEDAEQAFKDVKTGKGIKTLIAGPGAA

SEQ ID NO: 5190 - DNA, 1110 bp, Oryza sativa (japonica cultivar-group)
  CDS (1)..(1110)
atggggaagggagggaaaggagccgaggcggcggcggcggcggtggccggagccggtgaggaggagaacatggcggcgtggctggtggcgaagaacaccctcaagatcatgcccttcaagctcccgccagttgggccttatgatgtccgtgtccggatgaaggcagtgggcatctgcggcagcgacgtgcactacctcagggagatgcgcattgcgcatttcgtggtgaaggagccgatggtgatcgggcacgagtgcgccggcgtgatagaggaggtcggcagcggcgtgacgcacctcgccgtcggcgaccgcgtggcgctcgagcccggcatcagctgctggcgctgcaggcactgcaagggcggccgctacaacctctgcgaggacatgaagttcttcgccacccctcccgtccacggatccctcgccaaccagatcgtgcaccctggtgatctgtgcttcaagctgccggagaacgtgagcctggaggaaggcgccatgtgcgagccgctgagcgtgggcgtgcacgcgtgccgccgcgccgacgtcgggccggagacgggggtgctgatcatgggcgcggggccgatcggcctggtcaccctgctggcggcgcgcgcgttcggcgcgacgcgcgtcgtgatcgtggacgtggacgaacaccgcctctccgtggcccgatccctcggcgccgacgccgccgtgagggtgtcggcgcgcgcggaggacgtcggcgaggaggtggaacggatcagggcggcgatgggcggggacatcgacgtgagcctggactgcgccgggttcagcaagacggtggcgacggcgctggaggcgacgcgcggcggcgggaaggtgtgcctcgtcgggatggggcacaacgagatgacggtgccgctgacgtcggcggcgatcagggaggtggacgtggtggggatattccggtacaaggacacgtggccgctctgcatcgagttcctccgcagcggcaagatcgacgtgaagccgctcatcacccaccgattcgggttctcgcaggaggacgtggaggaggcgttcgaggtcagcgcccgtggccgcgacgccatcaaggtcatgttcaacctctag

SEQ ID NO: 5191 - protein, 369 aa, Oryza sativa (japonica cultivar-group)
MGKGGKGAEAAAAAVAGAGEEENMAAWLVAKNTLKIMPFKLPPVGPYDVRVRMKAVGICGSDVHYLREMRIAHFVVKEPMVIGHECAGVIEEVGSGVTHLAVGDRVALEPGISCWRCRHCKGGRYNLCEDMKFFATPPVHGSLANQIVHPGDLCFKLPENVSLEEGAMCEPLSVGVHACRRADVGPETGVLIMGAGPIGLVTLLAARAFGATRVVIVDVDEHRLSVARSLGADAAVRVSARAEDVGEEVERIRAAMGGDIDVSLDCAGFSKTVATALEATRGGGKVCLVGMGHNEMTVPLTSAAIREVDVVGIFRYKDTWPLCIEFLRSGKIDVKPLITHRFGFSQEDVEEAFEVSARGRDAIKVMFNL

SEQ ID NO: 5192 - DNA, 1047 bp, Listeria monocytogenes str. 4b F2365
  CDS (1)..(1047): transl_table=11
atgaaagctttaaaattatatggaaaaagagatttgcgttatgaagaagcggatatgccaacaatcgaacagccagatgatgtgattttgaaagtgaaaacggttgggatttgcggatctgatatttcgagatacagtaaacttggtccgtatgtaccaggaatggtgtggggacatgaattttcaggagaagtgattgaggttggtagtgaggttacagatattgagattggtgatagggctgccggatgcccagcactctattgcggagagtgtgaatactgtaaaaaaggcgaattcgcccgctgtcggaagctaacagtaatcggagcaagacatcccggagcctatgctgagtatatcaaacttccagcagaaaatgtagtaaaaataccagacgaattagattatgaagctgctgcacttgtcgagccttccgcagtggtcgttcatgggttttatcatacgaaattacaagcaggcgatgatgtcgtcgttgtcggaagcggcaatataggtttgctagcaattcaatgggcaaaagtttttggcgcaaaaagagttattgcaattgatgtagacgataaaaagttagctcttgcaaaagaagtaggagcagacgtcgttattaattctttaaaagaagatccattagaagtagtcgcagcacatacagatggtctaaacgctgatttagttgtagaagctgcgggatcacctattacatctgcccaagtttttgcctatgcgaaaaaaggtggaggcgtcgttttcctagggattccatacgccgatgtaacaatcgaacgtttctattttgaaaaaattgttcggagtgagcttactgtttggggctcatggaatgcaatttctgcaccatttccaggaaaagaatggcaaacaaccattcatttcctagccaataaacaaatcaacattgaaccaatgattacacatcgtctttcacttgctgaaggaccagaagtttttgagcgaatctatgaaagaaatgaatttttcgggaaagtattatttttcccagaataa

SEQ ID NO: 5193 - protein, 348 aa, Listeria monocytogenes str. 4b F2365
MKALKLYGKRDLRYEEADMPTIEQPDDVILKVKTVGICGSDISRYSKLGPYVPGMVWGHEFSGEVIEVGSEVTDIEIGDRAAGCPALYCGECEYCKKGEFARCRKLTVIGARHPGAYAEYIKLPAENVVKIPDELDYEAAALVEPSAVVVHGFYHTKLQAGDDVVVVGSGNIGLLAIQWAKVFGAKRVIAIDVDDKKLALAKEVGADVVINSLKEDPLEVVAAHTDGLNADLVVEAAGSPITSAQVFAYAKKGGGVVFLGIPYADVTIERFYFEKIVRSELTVWGSWNAISAPFPGKEWQTTIHFLANKQINIEPMITHRLSLAEGPEVFERIYERNEFFGKVLFFPE

SEQ ID NO: 5194 - DNA, 1053 bp, Bacillus thuringiensis serovar konkukian str. 97-27
  CDS (1)..(1053): transl_table=11
atgaaagcattactttggcataatcaacgtgatgtaagagtagaagaagtaccagaaccaactgtaaaaccaggagcagttaagattaaagttaaatggtgtggtatctgcgggacagacttgcatgaatatttagcaggacctatttttattccgacagaagagcatccattaacacatgtaaaagcaccggttattttaggtcatgagtttagcggtgaggtagttgaaatcggtgaaggcgttacatctcataaagtgggagaccgcgtcgttgtagaaccaatttattcttgtggtaaatgtgaagcttgtaaacatggacattacaatgtttgtgaacaacttgttttccacggtcttggcggagaaggcggcggtttctctgaatatacagtagtaccagaagatatggttcaccatattccagatgaaatgacgtatgaacaaggtgctcttgtagaaccagcagcagtagcggttcatgcagtacgtcaaagtaaattaaaagaaggggaagcagtagcagtctttggttgtggtccgattggacttcttgttatccaagcagcgaaagcagcaggagcaactcctgttattgcagttgaactttctaaagaacgtcaagagttagcaaaattagcaggtgcggattacgtattgaatccagcgactcaagatgtattagctgaaattcgcaacttaacaaatggtttaggtgtaaatgtaagctttgaagtaactggtgttgaagtagtacttcgtcaagcgattgaaagtacaagtttcgaaggacaaactgtaattgttagtgtatgggaaaaagacgcaacaattactccaaacaatcttgtactaaaagaaaaagaagtggttggtattttaggataccgtcatatcttcccagctgttattaaattaattagctctggtcaaattcaagcagagaaattaattacgaaaaaaatcacagtagatcaagttgttgaagaaggatttgaagcacttgtaaaagataaaacacaagtgaaaattcttgtttcacctaaataa

SEQ ID NO: 5195 - protein, 350 aa, Bacillus thuringiensis serovar konkukian str. 97-27
MKALLWHNQRDVRVEEVPEPTVKPGAVKIKVKWCGICGTDLHEYLAGPIFIPTEEHPLTHVKAPVILGHEFSGEVVEIGEGVTSHKVGDRVVVEPIYSCGKCEACKHGHYNVCEQLVFHGLGGEGGGFSEYTVVPEDMVHHIPDEMTYEQGALVEPAAVAVHAVRQSKLKEGEAVAVFGCGPIGLLVIQAAKAAGATPVIAVELSKERQELAKLAGADYVLNPATQDVLAEIRNLTNGLGVNVSFEVTGVEVVLRQAIESTSFEGQTVIVSVWEKDATITPNNLVLKEKEVVGILGYRHIFPAVIKLISSGQIQAEKLITKKITVDQVVEEGFEALVKDKTQVKILVSPK

SEQ ID NO: 5196 - DNA, 1044 bp, Staphylococcus aureus subsp. aureus MRSA252
  CDS (1)..(1044): transl_table=11
gtgaaagctttgaaattatatggcgtggaagatttacggtatgaggataatgaaaagccagtcattgaaagtgcgaatgacgttattgttaaagtacgagcgactggaatatgtggttcagacacgtcacgatacaaaaaaatggggccatacattcaaggtatgccatttggtcatgaattttcaggtgttgtagatgccattggaagtgatgttacgcatgttaatgtaggcgacaaagtgacaggttgcccagccataccttgttatcaatgcgagtattgtttaaaaggtgaatatgcacgatgtgaaaagttgttcgtcattggctcatatgaacctggatcgttcgcggaatatgtcaaattgccagcgcaaaatgttttaaaggtaccagacaatgttgattacattgaagcagcaatggttgagccatcagccgttgttgcgcatgggttttataaatcgaatatacaacctggtatgactgttgcagtaatggggtgtggcagtataggattgttagctattcaatgggcacgaatatttggtgctgcgcatatcatcgctatagatatagatgcgcataaactagatattgctacatcattgggcgcacatcaaaccatcaattcaaaagaagaaaatcttgagaaattcatcgaaaatcattacgccaatcaaatcgatatagctatagaatcatcaggtgctaaagttacgattggtcaaatattgacgctacctaaaaaaggtggcgaggtggtattactcggaataccatatgatgatattgagattgatcgcgttcattttgaaaaaattctgcgtaacgagttgacagtatgtggctcttggaactgtttgtccagtaattttccggggaaagagtggacggcaaccttacattatatgaagacgaaagatattaatgtaaagcctattatttctcattttttaccgttagaaaaaggcccggagacatttgataaattagttaacaagaaagaacgatttgataaagtcatgtttacgatttattag

SEQ ID NO: 5197 - protein, 347 aa, Staphylococcus aureus subsp. aureus MRSA252
MKALKLYGVEDLRYEDNEKPVIESANDVIVKVRATGICGSDTSRYKKMGPYIQGMPFGHEFSGVVDAIGSDVTHVNVGDKVTGCPAIPCYQCEYCLKGEYARCEKLFVIGSYEPGSFAEYVKLPAQNVLKVPDNVDYIEAAMVEPSAVVAHGFYKSNIQPGMTVAVMGCGSIGLLAIQWARIFGAAHIIAIDIDAHKLDIATSLGAHQTINSKEENLEKFIENHYANQIDIAIESSGAKVTIGQILTLPKKGGEVVLLGIPYDDIEIDRVHFEKILRNELTVCGSWNCLSSNFPGKEWTATLHYMKTKDINVKPIISHFLPLEKGPETFDKLVNKKERFDKVMFTIY

SEQ ID NO: 5198 - DNA, 1023 bp, Bacillus cereus ZK
  CDS (1)..(1023): transl_table=11
atgaaagccgcagtgtggtatggtgaaaaagatattcgtatcgaggaaagagaaacaaaagagttacaacccaatgatgtaaaagttaaagtggcatgggctggtatttgtggttctgatttacatgcatacttgcatccggattcagtaccaatgaataagaatacggtactcggacatgaattttctggtgaaattgtagaagttggttctcatgtaacaaaatttaaagaaggggacagagtatgtatttatccaatgatgcttaaagatccttcaaatgctgaaactgaacgttttatcactttagacgcagtaggtgcacaaatcgacggagggtttgctgaatacgtgatacttccacaaaaaacgatttttaaaattccagataatttatcactagaagtagcagcaatggtagaaccagcagctgtatcattccaatcaattaaggattcaaatgttgaagaaggagatactgttgttgtctatggagcaggtcctattggactatttgctgttttaggtgcaaaagctgctggtgcttctaatattattgttgttgatttatttgatagtcggcttggcaaagcaaccgaagtgggtgcgacgcatacttttaatgctaaagaagtaaaccctgtagaagaaattcgtaaattattcccagatggagcggatgtgacaattgaagctgcaggtgttgagtcaacatttaatcaagccattcaatcaactaaagttcgtggcacaatgatggttatcagcttccatactcaagatatccaatttaatgctcctgcttccttactctttagtggcgtaaaattaatgggatctgtggggtacagtaatgaaacttataatgaagtcattcaattacttgctaatggaagattacctgcgcaatccattattacaagtaaagttgatatagataatattgctgaacaaggttttgaagcgttaattcatgataaagcgcaagcaaaaattttagttaagttaagcggcgcacattaa

SEQ ID NO: 5199 - protein, 340 aa, Bacillus cereus ZK
MKAAVWYGEKDIRIEERETKELQPNDVKVKVAWAGICGSDLHAYLHPDSVPMNKNTVLGHEFSGEIVEVGSHVTKFKEGDRVCIYPMMLKDPSNAETERFITLDAVGAQIDGGFAEYVILPQKTIFKIPDNLSLEVAAMVEPAAVSFQSIKDSNVEEGDTVVVYGAGPIGLFAVLGAKAAGASNIIVVDLFDSRLGKATEVGATHTFNAKEVNPVEEIRKLFPDGADVTIEAAGVESTFNQAIQSTKVRGTMMVISFHTQDIQFNAPASLLFSGVKLMGSVGYSNETYNEVIQLLANGRLPAQSIITSKVDIDNIAEQGFEALIHDKAQAKILVKLSGAH

SEQ ID NO: 5200 - DNA, 1029 bp, Legionella pneumophila subsp. pneumophila str. Philadelphia 1
  CDS (1)..(1029): transl_table=11
atgacaatgaaatcattggttaaagcaaaaaaagagcctggaatttggatgcaggatattcctgttcctgaatatggagtaaacgatgttttaataaaaattaaaaggactgcaatttgtggtacagatatccatatttattcctgggatgaatgggcgcaagccacaattcctgttcctatgaccgtagggcatgaattttatggtgaaatagtagaggttggaaaagaagtacaaggtttgaaagttggacagagagtttctggtgaaggtcatattacctgtggtttttgcagaaattgtcgtgccggcaagcgtcatttatgtcgtaataccctgggagtgggggtgaatcgaccaggatgctttgctgagtatctggcgcttcctgctaccaatgtcatcgctctccctgacaacattacagaagagcaagcggctattctcgatccttttggaaatgctgctcattgtgcattggcatttgatgtagtaggcgaagacgttttgattactggtgcaggccccataggaataatggccgcagccatcgtaagacatattggcgcacggcatgttgttatcaccgatgttaacgatcatcgattggaactggccaggcaaatgggtgtcagccgagcggttaatgtcaaataccaaaaattaagtgatgtggctaatgagctaggaatgcttgagggttttgatgttggtctggaaatgtccgggaaccctatggcattaaacgatatgatgaaagcgatgaatcatggtggtcatgtggctttattgggtatcccaccacaagaaacccctatagattggaaccaggttatctttaaaggattggttattaagggtatttatggtcgagaaatgtttgaaacctggtataagatgattgctatgttacagagcggtttaaatatttctcccgttattactcataatttcccagtagatgaatatcagcacgcatttcaaattatggcatcgggccagtcagggaaagttatactgaactggtag

SEQ ID NO: 5201 - protein, 342 aa, Legionella pneumophila subsp. pneumophila str. Philadelphia 1
MTMKSLVKAKKEPGIWMQDIPVPEYGVNDVLIKIKRTAICGTDIHIYSWDEWAQATIPVPMTVGHEFYGEIVEVGKEVQGLKVGQRVSGEGHITCGFCRNCRAGKRHLCRNTLGVGVNRPGCFAEYLALPATNVIALPDNITEEQAAILDPFGNAAHCALAFDVVGEDVLITGAGPIGIMAAAIVRHIGARHVVITDVNDHRLELARQMGVSRAVNVKYQKLSDVANELGMLEGFDVGLEMSGNPMALNDMMKAMNHGGHVALLGIPPQETPIDWNQVIFKGLVIKGIYGREMFETWYKMIAMLQSGLNISPVITHNFPVDEYQHAFQIMASGQSGKVILNW

SEQ ID NO: 5202 - DNA, 1011 bp, Geobacillus kaustophilus HTA426
  CDS (1)..(1011): transl_table=11
atgaaagccgccgttgttcacaaattcaagcaaaaacttcaaattgaagaagtggagaaaccaaaactaggatatggcgaagtgcttgtgaaaattgaagcttgtggcgtctgccataccgatttgcatgcggctcatggggattggccggtaaaaccgaaacttccacttattcctggtcatgaaggggtaggaattgttgttgagatcggtgagggagtgaaatcaatccaaattggcgaccgtgttggcattccatggttatactcagcatgcggtgaatgtgaatattgtttaagcggtcaagaaacactttgtccacatcaattaaacggtggatactctgtcgatggcagttatgcagaatattgcaaagccccggccaattatgtcgcacgaattcctaaaaacctcgatcccgtacaagttgctcctattctttgtgctggggtcacaacgtataaagcattaaaagtttcaaatgccaagcctggcgaatgggtcgctatttatggaatcgggggattgggccatattgctcttcaatatgccaaggcaatgggattaaatgttgttgctgttgatatcagtgatgaaaaggcagaacttgcggcaaagttgggtgctgatattacgatcaatggattgcaagaagaccctgtagcagccattcgtgaaaaagtaggcggagtacaagcggctattagcgttgctgtaacgaaaaaagcgttcgaacaagcttatcaatccgtgcgacgcggcggctgccttgtcatagttggactgcctcacgatgaactgccgattcctatttttgacactgtattaaatggcgttacgataaaaggttcgatcgtcggtacacgaaaagatatgcaagaagctctagatttcgccgcacgcggaaaagttcgccctattgtggaagcggtaccattagaaaaaattaacgaagtatttgaacggatggaaaaaggtcaaatcaatggccgcgttgttttaacaatgtaa

SEQ ID NO: 5203 - protein, 336 aa, Geobacillus kaustophilus HTA426
MKAAVVHKFKQKLQIEEVEKPKLGYGEVLVKIEACGVCHTDLHAAHGDWPVKPKLPLIPGHEGVGIVVEIGEGVKSIQIGDRVGIPWLYSACGECEYCLSGQETLCPHQLNGGYSVDGSYAEYCKAPANYVARIPKNLDPVQVAPILCAGVTTYKALKVSNAKPGEWVAIYGIGGLGHIALQYAKAMGLNVVAVDISDEKAELAAKLGADITINGLQEDPVAAIREKVGGVQAAISVAVTKKAFEQAYQSVRRGGCLVIVGLPHDELPIPIFDTVLNGVTIKGSIVGTRKDMQEALDFAARGKVRPIVEAVPLEKINEVFERMEKGQINGRVVLTM

SEQ ID NO: 5204 - DNA, 1044 bp, Silicibacter pomeroyi DSS-3
  CDS (1)..(1044): transl_table=11
atgcgatccaacacgatgaaagcgctggagaaatccaagcctgaggaagggttgtggatggtgcaggcaccggtgcccgagatcggccctgacgatgtgctgatcaagatcaagaagaccggcatttgcggcaccgatatccatatctggaactgggacgaatgggccgcgcacacggtgccggtgccgatgatcaccggccatgaatttgcgggcgagatcgtcgagctgggccgtgatgtcaccggcctcagcatcggtcagcgggtctcgggcgaggggcatctgatcggcaccgaaagccggcagagccgggcaggcaagttccacctggacccgggcacgcgcgggatcggtgtcaacgtgcagggggcctttgcgcaatatctgcgactgcccgccttcaacgtggtgccgctgcccgaggatatcccggacgagatcggcgccatcctcgacccgctgggcaatgcggtgcacaccgcgctgagtttcgacctcttgggcgaggatgtgctgatcaccggtgccgggccgatcggcatcatggcggcggcggtggccaaacatgccggcgcccgccatgtggtgatcaccgatatcaacgccgaccggctgaaactggcgcagcacgtggtgcccagggcgcggaccgtcgatgtcacgcgcgaggatctgggcgacgtggtccacgagcttggcctgaaacaggggttcgatgtcgggctggaaatgtcgggctcgcaagcggcgctcgaccagatggtcgaggcgctggtgatgggcggcaagatcgcgttgctgggtattccgccgggcaagtcgccggtggactggtcgcgcatcgtgttcaaggcgatcaccatcaagggtgtctatggccgcgagatgttcgagacctggtacaagatgatcgccatgttgcagaacgggctggatgtgagccgggtgatcacccatcgttttggcgtcgatgagttccgcgaagggtttgcggcgatgaaatcgggcctcagcggcaaggtggtgctggactggacctga

SEQ ID NO: 5205 - protein, 347 aa, Silicibacter pomeroyi DSS-3
MRSNTMKALEKSKPEEGLWMVQAPVPEIGPDDVLIKIKKTGICGTDIHIWNWDEWAAHTVPVPMITGHEFAGEIVELGRDVTGLSIGQRVSGEGHLIGTESRQSRAGKFHLDPGTRGIGVNVQGAFAQYLRLPAFNVVPLPEDIPDEIGAILDPLGNAVHTALSFDLLGEDVLITGAGPIGIMAAAVAKHAGARHVVITDINADRLKLAQHVVPRARTVDVTREDLGDVVHELGLKQGFDVGLEMSGSQAALDQMVEALVMGGKIALLGIPPGKSPVDWSRIVFKAITIKGVYGREMFETWYKMIAMLQNGLDVSRVITHRFGVDEFREGFAAMKSGLSGKVVLDWT

SEQ ID NO: 5206 - DNA, 1029 bp, Bacillus clausii KSM-K16
  CDS (1)..(1029): transl_table=11
ttgaaagcattagtgaaaacagcacctggatttggacatgttgaactccaaaacaagcccgaacctgctccaggggaaaagcaagtcaaaattaaagtcaaatatgcgggcatttgtgggtccgatatccatacgtatgaaggccattataaagtggccttcccggtaacacttggccatgaatttgcaggagaaattgttgaagtcgggcctggcgttcagtcttttaaagtaggggatcgggtcacctctgaaaccactttctccatttgtgggcaatgtccctattgccaaacgaaagactacaacctttgcagcgagcgcaaagggcttggtacccagcaagatggcgggttcgctgagtatgtacttgcccgggaagagagtttgcatcttttgccagacaatgttgatttccgttcagcagcgatgacagaaccgttagcctgcacgcaccatgcgctagcgaaaacaacaatcaacgcaggcgatttgtgtgttgtcattggtcctggtccgattggcttgctcgctgcccaagccgcgaaaagcaaaggtgcaaaagtcatgataaccggcctcaatcatgacaaggttcgccttgagaaggcgcgtgcccttgggattgattatgttgtcaatggcgaagaaacggatgtcggcgaagtcgtaaatgaactgacaaacggctacggagccgatgtggtgcttgaatgttcaggcgccgtaaaagcagccaatcaagggctaaagttattgcggaaaaaggggcagtatagccaagtcggcatttttgctgcatcagaaattccctttgacctcgaaacaattattcagaaagaaatacacgtcattggcagcagaagccagaagccagctgattgggaaccttctttgatgcttttaaaaacaggcaatgtcaacgctcgtgccctcgtcacccatgaatacgagcttcatcaatgggaggaagcttatcaggcgataaaaagtggagaagcgataaaggttcttttgaaaccagagtaa

SEQ ID NO: 5207 - protein, 342 aa, Bacillus clausii KSM-K16
MKALVKTAPGFGHVELQNKPEPAPGEKQVKIKVKYAGICGSDIHTYEGHYKVAFPVTLGHEFAGEIVEVGPGVQSFKVGDRVTSETTFSICGQCPYCQTKDYNLCSERKGLGTQQDGGFAEYVLAREESLHLLPDNVDFRSAAMTEPLACTHHALAKTTINAGDLCVVIGPGPIGLLAAQAAKSKGAKVMITGLNHDKVRLEKARALGIDYVVNGEETDVGEVVNELTNGYGADVVLECSGAVKAANQGLKLLRKKGQYSQVGIFAASEIPFDLETIIQKEIHVIGSRSQKPADWEPSLMLLKTGNVNARALVTHEYELHQWEEAYQAIKSGEAIKVLLKPE

SEQ ID NO: 5208 - DNA, 1035 bp, Bacillus clausii KSM-K16
  CDS (1)..(1035): transl_table=11
atgaaagctgtttttgtagacgatgcagaaaaaattaacatcaaagaaatcgacataccggtcgtgaaggacaatgacgtgctcattaaagtggccgtggccggtatttgtggatcggacattcatacgtataaaggattgcacccgtttcgaaaaccgcctgtcgtcattggtcatgaagtggctggcgaagttgtgagcgttggccaagcggtaaaacgtgttcaagttggagaccgggtaacggttgaaccgcaaattggcacgggagagagcgaaggcgtaatgacaggccaggcgaacttgtccgataagcgtttggctcctggcatgggcgattggcttgggacaatggctgaatacttcgtctctcctgaggcgcaagtgattaagctgccggatgcggtcagttatgaaaaaggggtgttagttgagccgttggcggttggcgtccatgctgcacgtaaagggggtatccaaccaggggaccgtgtcgcaattttaggtgctggaccgattggcttgttgacgcttatggcggtaaaagcgaaaggtgcttcacacgttgtggtgaccgatgtgttagactactcccttgatgttgccaaacaaatgggggcaacggccgcgattaatataaagggcaagccggattggattgaggaagcaaaaagtaaagtcggccggtcattcgataaagtgctaattaccgctggcgtgccaggcatcattaatgattcattgaacttattaaaaaaagggggacgtgctgtaacggtcgcgatgtttcatggccaacaagattttgatgtggaacaactacagcaaaatgaaaaagaaattgttggctgcatgacatacaatcgtcccgatacggaagaagcgttggatatcatcgccaaaggtgcgcttccagttgaaaaagtgatttctcatcaattgtcttacgaacaggctgacaaagggtttgaaatggtcgataaaaagcaagacaactctgtaaaagtgattgtttcatttgaacaggagggctaa

SEQ ID NO: 5209 - protein, 344 aa, Bacillus clausii KSM-K16
MKAVFVDDAEKINIKEIDIPVVKDNDVLIKVAVAGICGSDIHTYKGLHPFRKPPVVIGHEVAGEVVSVGQAVKRVQVGDRVTVEPQIGTGESEGVMTGQANLSDKRLAPGMGDWLGTMAEYFVSPEAQVIKLPDAVSYEKGVLVEPLAVGVHAARKGGIQPGDRVAILGAGPIGLLTLMAVKAKGASHVVVTDVLDYSLDVAKQMGATAAINIKGKPDWIEEAKSKVGRSFDKVLITAGVPGIINDSLNLLKKGGRAVTVAMFHGQQDFDVEQLQQNEKEIVGCMTYNRPDTEEALDIIAKGALPVEKVISHQLSYEQADKGFEMVDKKQDNSVKVIVSFEQEG

SEQ ID NO: 5210 - DNA, 1026 bp, Colwellia psychrerythraea 34H
  CDS (1)..(1026): transl_table=11
atgaaatctttagctaaattaaaagcagaaccgggcatttggttaacgcgaaccgaaaaaccaaaactaggtcataatgatctgctaatcaaaattaaaaaaacggccatttgtggtacagatatccacatttataattgggatgaatgggcacaaaaaacagtgcctacgcctatggttgttggacatgagtacgcaggtgaagtggttggtatcggccaagaagttaaaggctttactttaggtgaccgggtttctggtgaaggccatattacttgtggtcattgccgtaattgtcgtggtggcagaactcatttatgtcgtaataccgttggtgttggggtcaatcgtgcggggtcatttgcagagtatctagtgatacctgcatacaatgcctttaaattacctgacgaaatttctgatgatttagcgtcaatttttgacccctttggtaatgcagttcataccgcattgtcatttgatttagtgggtgaggatgtattaatcaccggtgctggccctattggtattatggctgcagccgttgctaaacatgtaggtgctcgtcatgtcgttattaccgatattaacgaatatcgtcttgaccttgcaagaaaaatgggcgctactcgtgctgttgatgtgagtaaagaaagcttaaaagatgtcatgaccgatttggggatgaccgagggttttgatgttggtatggaaatgtcaggtgttccaatggcattcactagcatgttagaaagcatgaataatggtggtaaaattgccatgctgggtattcctggtagcgatatggctattgattggagccaagttatttttaaagggcttaccattaaaggtatttatggtcgtgaaatgttcgaaacttggtataagatggcaagtttgattcaatctggtttagatctcaccccgattattacccatcactacaatatcgatgactttcagcaaggctttgatatgatgcgttctggtcaatctggcaaggtcattttagattggacttaa

SEQ ID NO: 5211 - protein, 341 aa, Colwellia psychrerythraea 34H
MKSLAKLKAEPGIWLTRTEKPKLGHNDLLIKIKKTAICGTDIHIYNWDEWAQKTVPTPMVVGHEYAGEVVGIGQEVKGFTLGDRVSGEGHITCGHCRNCRGGRTHLCRNTVGVGVNRAGSFAEYLVIPAYNAFKLPDEISDDLASIFDPFGNAVHTALSFDLVGEDVLITGAGPIGIMAAAVAKHVGARHVVITDINEYRLDLARKMGATRAVDVSKESLKDVMTDLGMTEGFDVGMEMSGVPMAFTSMLESMNNGGKIAMLGIPGSDMAIDWSQVIFKGLTIKGIYGREMFETWYKMASLIQSGLDLTPIITHHYNIDDFQQGFDMMRSGQSGKVILDWT

SEQ ID NO: 5212 - DNA, 1026 bp, Rhodobacter sphaeroides 2.4.1
  CDS (1)..(1026): transl_table=11
atgcgggcactggtgaaggccaaggcggaaccgggcctctggatggaagagcggcccgtgcccgagatcggccccgacgaggtgctcatccgggtccgcaagacggggatctgcggcaccgatgtccatatctggaactgggacgactgggcggcgaagacggtgccggtgccgctcgtcaccgggcacgagtttgcgggcgagatcgtcgaggtgggccgcgacgtgcgcgacctcagcccgggccagcgctgctcgggcgagggccatctgatcggccaccattcgcggcaggtgcgggccgggcgcttccacctcgatcccgagacgcgcggcatcggcgtcaatgttccgggcgccttcgccgactatctgcggcttcccgccttcaacgtggtgccgctgcccgatgccatcgacgacgaggtgggggcgatcctcgatcccctgggcaatgccgtgcacacggcgctcagcttcgatctggtgggagaggatgtgctcgtgaccggcgcaggccccatcgggatcatggccgcggctgtggcgcggcatgtgggcgcgcgccatgtcgtcatcaccgacgtcaatgccgaccggttgcggctgtcaaccgaggtggccgatgtggtgccggtcaatgtggccaccgaggatctgcgctcggtgatgggccgactgaagatcgtgcagggcttcgacgtagggatggagatgtcgggcgcacccgcgggcttcgaccagatggtcgaagcgatggtgatgggcggtcgcatcgcgatgctggggatcccgcccggccgcagccccgtggactggagccggatcgtcttcaaggcgctgaccatcaagggcgtctacggccgcgagatcttcgagacatggtacaagatgatcgcgatgctggagaacggcctcgatatccggcgcgtcatcacccaccgctttcctgtggcggatttcgccgagggttttgccgccatgcgcagcggcgcgtcgggcaaggtggtgctggactggggctga

SEQ ID NO: 5213 - protein, 341 aa, Rhodobacter sphaeroides 2.4.1
MRALVKAKAEPGLWMEERPVPEIGPDEVLIRVRKTGICGTDVHIWNWDDWAAKTVPVPLVTGHEFAGEIVEVGRDVRDLSPGQRCSGEGHLIGHHSRQVRAGRFHLDPETRGIGVNVPGAFADYLRLPAFNVVPLPDAIDDEVGAILDPLGNAVHTALSFDLVGEDVLVTGAGPIGIMAAAVARHVGARHVVITDVNADRLRLSTEVADVVPVNVATEDLRSVMGRLKIVQGFDVGMEMSGAPAGFDQMVEAMVMGGRIAMLGIPPGRSPVDWSRIVFKALTIKGVYGREIFETWYKMIAMLENGLDIRRVITHRFPVADFAEGFAAMRSGASGKVVLDWG

SEQ ID NO: 5214 - DNA, 1029 bp, Burkholderia sp. 383
  CDS (1)..(1029): transl_table=11
atgaaagcactggcaaagctcgaacgcggccccggcctcacgctcacgcgcgtgaagcgtcctgaagtcggccacaacgacgtgctgatcaagatccgccgcacggcgatctgcggcaccgacatccatatctggaagtgggacgactgggcgcagaagacgattcccgtgccgatgcacgtcggtcacgaatacgtcggcgagatcgtcgagatggggcaggaagtgcgcggcttcgcgattggcgatcgcgtgtccggcgaaggccacatcacgtgcggtttctgccgcaactgtcgcgcggggcgccggcatctgtgccgcaacacggtcggtgtcggcgtgaaccgcgaaggcgcgttcgccgagtatctggcgattcctgcgttcaacgcgttcaagattccgccggagatctccgacgatctcgcatcgatcttcgatccgttcggcaacgcgacgcacacggcgctgtcgttcaacctcgtcggcgaagacgtgctgatcaccggcgcgggcccgatcggcatcatggccgtcgcgatcgcgaaacacgtcggcgcgcgcaacgtcgtgatcaccgacatcaacgactaccggctcgaactcgcgcgcaagatgggcgcgacgcgcgcggtcaatgtcgcgcgcgagtcgctgcgcgacgtgatgtccgacctgcacatgaccgaaggctttgacgtcggcctcgaaatgtcgggcgtgccgagcgcgttcacgagcatgctcgaggcgatgaaccacggcggcaaggtcgcgttgctcggcattccgcccgcgcagacggcgatcgactggaaccaggtgatcttcaaggggctcgagatcaagggcatctacggccgcgagatgttcgagacctggtacaagatggtcgcgatgctgcagagcggcctcgacctgtcgccgatcattacgcatcgttttgcggccgacgattacgagaagggattcgccgcgatgttgtcgggtgaaagcggcaaggtgattctcgactggacggcctga

SEQ ID NO: 5215 - protein, 342 aa, Burkholderia sp. 383
MKALAKLERGPGLTLTRVKRPEVGHNDVLIKIRRTAICGTDIHIWKWDDWAQKTIPVPMHVGHEYVGEIVEMGQEVRGFAIGDRVSGEGHITCGFCRNCRAGRRHLCRNTVGVGVNREGAFAEYLAIPAFNAFKIPPEISDDLASIFDPFGNATHTALSFNLVGEDVLITGAGPIGIMAVAIAKHVGARNVVITDINDYRLELARKMGATRAVNVARESLRDVMSDLHMTEGFDVGLEMSGVPSAFTSMLEAMNHGGKVALLGIPPAQTAIDWNQVIFKGLEIKGIYGREMFETWYKMVAMLQSGLDLSPIITHRFAADDYEKGFAAMLSGESGKVILDWTA

SEQ ID NO: 5216 - DNA, 1032 bp, Burkholderia thailandensis E264
  CDS (1)..(1032): transl_table=11
atgaaagcgcttgcaaagctcgaacgcggaccgggcctcacgcttacccgcgtgaagaagcccgaggtcggccacaacgacgtcctcatcaagatccgccgcaccgcgatctgcggcaccgacatccatatctggaagtgggacgactgggcgcagaagacgattccggtgccgatgcacgtcggccacgagtacgtcggcgagatcgtcgagatgggccaggaggtgcgcggcttctcgatcggcgaccgcgtgtccggagaagggcacatcacgtgcggcttctgccgcaactgccgcgcggggcggcgtcacctgtgccgcaatacggtcggcgtcggcgtgaatcgcgaaggcgcgttcgccgagtacctcgcgatacccgcgttcaacgcgttcaagattccgcccgaaatctccgacgatctcgccgcgatcttcgatccgttcggcaacgcgacgcacactgcgctgtcgttcaacctcgtcggcgaggacgtgctgatcacgggcgcggggccgatcggcgtgatggcggtggcgatcgcgaagcacgtcggcgcgcgcaacgtcgtcatcaccgacatcaacgactatcgcctcgaccttgcccgcaggatgggtgcgacgcgcgcggtgaacgtgtcgcgcgaatcgctgcgcgacgtgatggcggacctgcacatgacggagggcttcgacgtcgggctcgagatgtcgggcgtgccgagcgcgttcacgtcgctgctcgaatcgatgaatcacggcggcaaggttgcgctgctcgggattccgcccgcgcaaaccgcgatcgactggaaccaggtgatcttcaagggcctggagatcaagggcatctacgggcgcgagatgttcgagacctggtacaagatggtcgcgatgctgcaaagcgggctcgatctttcgccgatcatcacgcaccgcttcgccgtggacgactacgagaagggcttcgctgcgatgctgtcgggcgaaagcggcaaggtgattctcgactgggccgctgcgtga

SEQ ID NO: 5217 - protein, 343 aa, Burkholderia thailandensis E264
MKALAKLERGPGLTLTRVKKPEVGHNDVLIKIRRTAICGTDIHIWKWDDWAQKTIPVPMHVGHEYVGEIVEMGQEVRGFSIGDRVSGEGHITCGFCRNCRAGRRHLCRNTVGVGVNREGAFAEYLAIPAFNAFKIPPEISDDLAAIFDPFGNATHTALSFNLVGEDVLITGAGPIGVMAVAIAKHVGARNVVITDINDYRLDLARRMGATRAVNVSRESLRDVMADLHMTEGFDVGLEMSGVPSAFTSLLESMNHGGKVALLGIPPAQTAIDWNQVIFKGLEIKGIYGREMFETWYKMVAMLQSGLDLSPIITHRFAVDDYEKGFAAMLSGESGKVILDWAAA

SEQ ID NO: 5218 - DNA, 1056 bp, Francisella tularensis subsp. holarctica
  CDS (1)..(1056): transl_table=11
atgaaagcattagctaaattaaaaaaacaaccaggtatatggatgattaatgatgcgccaataccagaatatggctacaatgatgttttgattaaaattaaaaaaacggctatttgtggtactgatttacatatttataattgggataaatggtcgcaaaacaccattccagttccaatgattaccggacatgagtttgctggtgaagttgtagctaaaggagatggtgttacaagcgtagatatcggcgatagagtgtcaggtgagggtcatcttgtatgtgggcaatgccgtaattgcagagcaggtaaacgtcacctttgtagaaaaactataggtataggagtaaatgtacagggtgcatttgcagaatatctagttatgcctgcggttaatgtttttaagatccctgattctatcagtgatgatatcgctagtacttttgatcctatgggcaatgctattcacaccgcactttcttttaacttaacaggtgaggatgtccttataactggtgctggacctattggcttaatggctgtcaaaatagcaagattctgtggtgcacgcagaatagtaatcacagatattaatgagtatcgcctacaaatggctagggattttggtgcaactgttgctttgaatgttgctccatttaagaatcaagatgagttagtaaaacaaatgcgcaaagttatgtcagatatcggcatgacagaaggatttgatgttggtctagaaatgtctggaattaactctgcaatctcaatgatgcttgatgttatgaatcatggtggtaagctatcacttctaggcatatctgctggtgatatttctgttgattggggagctatattgtttaagggtctgactctcaagggtatatatggtagagaaatgtttgaaacatggtacttaatgactagtatgctccaagctggtatggatatgaaccctatcatcacacatcgacttcatattgatgagtttcaaaaaggatttgaaataatgaaaagtggtcaatgtggtaaagtaatactggattggagcagctag

SEQ ID NO: 5219 - protein, 351 aa, Francisella tularensis subsp. holarctica
MKALAKLKKQPGIWMINDAPIPEYGYNDVLIKIKKTAICGTDLHIYNWDKWSQNTIPVPMITGHEFAGEVVAKGDGVTSVDIGDRVSGEGHLVCGQCRNCRAGKRHLCRKTIGIGVNVQGAFAEYLVMPAVNVFKIPDSISDDIASTFDPMGNAIHTALSFNLTGEDVLITGAGPIGLMAVKIARFCGARRIVITDINEYRLQMARDFGATVALNVAPFKNQDELVKQMRKVMSDIGMTEGFDVGLEMSGINSAISMMLDVMNHGGKLSLLGISAGDISVDWGAILFKGLTLKGIYGREMFETWYLMTSMLQAGMDMNPIITHRLHIDEFQKGFEIMKSGQCGKVILDWSS

SEQ ID NO: 5220 - DNA, 1032 bp, Burkholderia xenovorans LB400
  CDS (1)..(1032): transl_table=11
atgaaagcattggcaaaactcgaacgcgctccgggcctcacgcttacggacgtcaagaaacccgaagtcggccataacgacgtgatgatccgcatcacgcgcaccgcgatttgcggcacggacattcacatctggaagtgggacgactgggcgcagaaaacgattcctgtgccgatgcatgtcggccacgaatacgtgggtgaaatcgtcgaaatgggccaggaagtgcgcggctttgcgatcggcgaccgtgtgtccggcgaaggacatatcacgtgcggcttctgtcgcaattgtcgcgcgggccgcaggcatttgtgccgcaatacggtgggcgtcggcgtgaatcgtgagggggcgttcgccgagtatctggtgattccggccttcaacgcattcaagattccgcccgagatttccgacgacctcgccgctattttcgatccgttcggcaacgccacgcatactgcgctgtcgttcaatctggtcggcgaagacgtgttgattaccggcgccggccccatcggcatcatggcggtggcgatcgcgaagcacgtcggcgcgcgcaacgtggtgattaccgacgtcaacgactatcgcctcgaactcgcgcgcaagatgggcgccacgcgtgcagtcaacgtctcgcgcgaatcgttgcgcgacgtgatggcggatctgcacatggccgaaggtttcgacgtcggcctggaaatgtccggtgtgccgagcgcgttcaccggcatgctcgaagcaatgaaccacggcggcaagatcgcgctgctcggcattccgcccgcgcagaccgcgatcgactggactcaggtgatctttaaaggcctcgaaatcaagggcatttatgggcgcgagatgttcgagacctggtacaagatggtggcgatgctgcaaagcgggctggatctgtcgccgatcctcacacaccatttcaaggtcgacgactatcgggaagcgttcgccacgatgctctcaggcgagagcggcaaagtgattctcgactggaccgccgcgtga

SEQ ID NO: 5221 - protein, 343 aa, Burkholderia xenovorans LB400
MKALAKLERAPGLTLTDVKKPEVGHNDVMIRITRTAICGTDIHIWKWDDWAQKTIPVPMHVGHEYVGEIVEMGQEVRGFAIGDRVSGEGHITCGFCRNCRAGRRHLCRNTVGVGVNREGAFAEYLVIPAFNAFKIPPEISDDLAAIFDPFGNATHTALSFNLVGEDVLITGAGPIGIMAVAIAKHVGARNVVITDVNDYRLELARKMGATRAVNVSRESLRDVMADLHMAEGFDVGLEMSGVPSAFTGMLEAMNHGGKIALLGIPPAQTAIDWTQVIFKGLEIKGIYGREMFETWYKMVAMLQSGLDLSPILTHHFKVDDYREAFATMLSGESGKVILDWTAA

SEQ ID NO: 5222 - DNA, 1053 bp, Acidobacteria bacterium Ellin345
  CDS (1)..(1053): transl_table=11
atgccgaatacaatgcttgcagttatgaaacccgaggccgctccaggctcggagattcgcgaagttcctgttcctaaatttggaccgaacgaagtcctcgtcaaagttaaagttgcttccatctgtggtaccgacctccacatttacaactgggaccagtgggcccagcgccgcattaagccgccgctcatccccggccatgagttctgtggagacgtggttgcggtgggtagtgaagtaacgctggtgaaggaaggcgattttgtttccgccgaaatgcacgtgaactgcgggaagtgcctgcagtgcagaaccggacaggcgcatatttgccaacacgtgaagatcatcggcgtggacgcgaacggcgctttcgccgagtacgtggtgattccggagtcgaacatctggaagctggatccggcgattccgcaggaatacgcctcgattctcgatccgctcggaaacgcggtgcacacagtgctcgcgggcgacattgctgcgaagaccgttgcgatcacgggctgcggacccatcgggttgttttcgatcgccgtggcgaaagcctgtggcgcgacgaaagtgttcgccatcgaagtaaatgaacaccggcgcgcgatcgccaagaagatgaaagccgacttcgtgctcgatcccacgaaggacaacgtgaagcaggtggtactcgataacactgagggcgtgggtgttgacgttctgctcgaaatggctggacgccaggacgcgatcaaactcggcttctcgatcctccggctcgggggacgcgcgtccttgctcggaatccctggcaagcccatcgagatcaacctcgcggaagacatcatcttcaagggcgcgatcgtgcagggcatcaacggccgcaagatgtatgagacctggtaccagatggaagcgctgctcaaggccaagatgctcgatctgcatccggtgattaccgacaagatcccgatgaaggacttcagcacggcgatggcgcgattgcagagcggtgaagccagcaagattttgatgtatccgaatgggacgaaataa

SEQ ID NO: 5223 - protein, 350 aa, Acidobacteria bacterium Ellin345
MPNTMLAVMKPEAAPGSEIREVPVPKFGPNEVLVKVKVASICGTDLHIYNWDQWAQRRIKPPLIPGHEFCGDVVAVGSEVTLVKEGDFVSAEMHVNCGKCLQCRTGQAHICQHVKIIGVDANGAFAEYVVIPESNIWKLDPAIPQEYASILDPLGNAVHTVLAGDIAAKTVAITGCGPIGLFSIAVAKACGATKVFAIEVNEHRRAIAKKMKADFVLDPTKDNVKQVVLDNTEGVGVDVLLEMAGRQDAIKLGFSILRLGGRASLLGIPGKPIEINLAEDIIFKGAIVQGINGRKMYETWYQMEALLKAKMLDLHPVITDKIPMKDFSTAMARLQSGEASKILMYPNGTK

SEQ ID NO: 5224 - DNA, 1047 bp, Silicibacter sp. TM1040
  CDS (1)..(1047): transl_table=11
atgcggcccaatacaatgaaagccctagagaaatccaaaccccaagaggggctttggatggtccaggccccagtgcccgaaatcggcccggatgaggtcctgatcaagatcaacaagaccggcatctgcggtacagatattcacatctggaactgggatgattgggctgcgcacacggtgccggttccgatgatcacgggtcatgagtttgctggcgagatcgttgagctggggcgcaatgtgaccggtctcacggttgggcagcggtgctcgggcgaagggcatctgattggtacagaaagccgtcaatcgcggtcaggcaagtttcaccttgatccgggaacgcgcgggattggggtcaacgagcaaggagcctttgcgcaatacctgcgcctgcccgcttttaacgtggtgccgctgcccgatgacattccggatgacatcggcgccatcctcgacccactcggcaacgcggtccacaccgccttgagctttgatctcctcggtgaggatgtgctcattacgggagccggtccgatcgggatcatggcggccgccgtggcacgacatgcgggcgcgcgccatgtggtgattaccgatgtaaacgcagaccgcctggcgcttgccagtgaggtcacacgcgtgcgcacggtcaacgtcgccgtcgaggatctcaacgatgtgatgcatgaacttggcctcagggaagggtttgatgtcggcctcgagatgtccggcaatcaacaggcgctggaccagatggtcgaagcgctggtgatgggcggcaagattgcgcttcttggtattcccccgggcaaatcccccgtcgactggtctcggatcgtcttcaaggccatcaccatcaaaggcgtctatggacgggagatgttcgagacctggtacaagatgatcgcgatgctgcaaaacggcctggatgtaagcggggtgatcacccaccggtttgcggtcgatgagtttgaacaaggctttgccgccatgaaatcaggacaaagcggcaaggttgtactcgactggactggaggctga

SEQ ID NO: 5225 - protein, 348 aa, Silicibacter sp. TM1040
MRPNTMKALEKSKPQEGLWMVQAPVPEIGPDEVLIKINKTGICGTDIHIWNWDDWAAHTVPVPMITGHEFAGEIVELGRNVTGLTVGQRCSGEGHLIGTESRQSRSGKFHLDPGTRGIGVNEQGAFAQYLRLPAFNVVPLPDDIPDDIGAILDPLGNAVHTALSFDLLGEDVLITGAGPIGIMAAAVARHAGARHVVITDVNADRLALASEVTRVRTVNVAVEDLNDVMHELGLREGFDVGLEMSGNQQALDQMVEALVMGGKIALLGIPPGKSPVDWSRIVFKAITIKGVYGREMFETWYKMIAMLQNGLDVSGVITHRFAVDEFEQGFAAMKSGQSGKVVLDWTGG

SEQ ID NO: 5226 - DNA, 1035 bp, Pseudomonas aeruginosa UCBPP-PA14
  CDS (1)..(1035)
atgaccatgaccctgccacagaccatgaaagccgcggtcgtgcacgcctacggcgcgccgctgcggatcgaggaagtcaaggttccgctgcccggccccgggcaggtactggtgaagatcgaagcctccggcgtctgccacaccgacctgcacgccgccgagggcgactggccggtgaagccgccgttgccgttcattcccggtcacgaaggcgtcggctacgtcgccgcggtgggcagcggagtgacccgggtgaaggaaggcgaccgggtcggcatcccctggctgtacaccgcctgcggctgctgcgagcactgcctgaccggctgggagaccctctgcgagagccagcagaacaccggctactcggtgaacggcggctatgccgaatacgtattggccgacccgaactacgtcggaattctgccgaaaaacgtcgaattcgctgaaatcgcgccgatcctctgcgccggcgtcaccgtctacaaggggctcaagcagaccaacgcgcgccccggccagtgggtggcgatctccggcatcggcggcctcggccacgtcgccgtgcagtacgccagggccatgggcctgcacgtcgccgccatcgacatcgacgacgccaagctggaactggcgcgcaagctcggtgccagcctgacggtcaacgcccggcaggaagacccggtggaggcgctccagcgcgacatcggcggcgcccacggggtgctggtcacagcggtatccaacagcgccttcggccaggccatcggcatggcccgccgcggcggcaccattgccctggtcggcctgccgccgggtgacttcccgacgccgatcttcgacgtggtgctcaagggcctgcacatcgccggctccatcgtcggcacccgcgcggacctgcaggaagccctcgacttcgccggcgaaggcctggtcaaggcgaccatccatccgggcaagctggacgacatcaaccagatcctcgaccagatgcgcgccgggcagatcgaggggcgcatcgtccttgagatgtga

SEQ ID NO: 5227 - protein, 344 aa, Pseudomonas aeruginosa UCBPP-PA14
MTMTLPQTMKAAVVHAYGAPLRIEEVKVPLPGPGQVLVKIEASGVCHTDLHAAEGDWPVKPPLPFIPGHEGVGYVAAVGSGVTRVKEGDRVGIPWLYTACGCCEHCLTGWETLCESQQNTGYSVNGGYAEYVLADPNYVGILPKNVEFAEIAPILCAGVTVYKGLKQTNARPGQWVAISGIGGLGHVAVQYARAMGLHVAAIDIDDAKLELARKLGASLTVNARQEDPVEALQRDIGGAHGVLVTAVSNSAFGQAIGMARRGGTIALVGLPPGDFPTPIFDVVLKGLHIAGSIVGTRADLQEALDFAGEGLVKATIHPGKLDDINQILDQMRAGQIEGRIVLEM

SEQ ID NO: 5228 - DNA, 1074 bp, Rubrobacter xylanophilus DSM 9941
  CDS (1)..(1074)
atgccggagaagaagatgatgagggcggccgtgtaccgcgggccacgagagctgcgcgtcgagcccgtccccgttccggagatcgggccctccgacgtgctcgtgagggttcacagctgcggtatatgcggctcggatctgcacagctacaaggcggggatgtacatccggcccggccagatcatgggacacgagttcatgggcaccgtcgccgccgccggtgaggacgtggaaggtgtggaggagggcgaccgggtcaccggcttcagcatcggggtgtgcggtagctgctactggtgctcccgccagcagtacatcctgtgcccggaactcttccggaactccaccgggtatggccttccgggcgggttcgcagagtacgtcccgatccggaacgcggtggtcggtcagagcatacacccggtccccagcgagctcgacgacgagacggcggccaccacggagcccgtctccgtaggggtgggggccatcgaagcggccggggtgcgtccgggggacagggtggtcgtgctgggggcgggcatgatcggcaacgcctgcatgcaggcggccagggcggccggagcggggcaggttgcggtgatagacgtctctccggtccggctcgaggcggccaggagcctcggcgccgacgccgtcttcgacgcgaggaccggagacgccctgtcgtgggtgaaggagctgtggggggtcgggcgctaccacttcaacgagggcggcatggcggacgtcgtcgtcgaggccgccggcgcgcccgtgacggtccagcaggccttcgagatggtgcgcagcgggggggcgatcgtcttcgtgggcctgcccgaggagccggcgcccatcgacgtaaccaagatcgtgcacaagcagccgcgcatcgtgggttcgctgggcggggactttgccagggccatcgagctgatggccagcgggagcatccggacaaaggagcttatcacccacaggttcccgctcgaggacgccgccgaagccttcgagacccagctgcggacgggcgaggcgatgaaggtcatgatacaaccgcgggaggggtag

SEQ ID NO: 5229 - protein, 357 aa, Rubrobacter xylanophilus DSM 9941
MPEKKMMRAAVYRGPRELRVEPVPVPEIGPSDVLVRVHSCGICGSDLHSYKAGMYIRPGQIMGHEFMGTVAAAGEDVEGVEEGDRVTGFSIGVCGSCYWCSRQQYILCPELFRNSTGYGLPGGFAEYVPIRNAVVGQSIHPVPSELDDETAATTEPVSVGVGAIEAAGVRPGDRVVVLGAGMIGNACMQAARAAGAGQVAVIDVSPVRLEAARSLGADAVFDARTGDALSWVKELWGVGRYHFNEGGMADVVVEAAGAPVTVQQAFEMVRSGGAIVFVGLPEEPAPIDVTKIVHKQPRIVGSLGGDFARAIELMASGSIRTKELITHRFPLEDAAEAFETQLRTGEAMKVMIQPREG

SEQ ID NO: 5230 - DNA, 1074 bp, Methylobacillus flagellatus KT
  CDS (1)..(1074)
atggctaccatgaaagctgctgtattcgtctcccccggcaaaatagcgttgcgcgacaagcccgtccctgaaatcggcccgctggatgccttgatccgcatcaccaccacgaccatctgcggcacagatgtgcatatcctcaagggtgaatacccagttgcggcaggactgacagtcggacacgagcccgtcggcatcattgaaaagctggggtcagaggtacacggcttcaaggtaggccagcgcgtcatcgcaggtgcgatcacgcccagcgggcactccaacgcctgcctgtgcggcatcggcgcccaggatggcccggacagcccgcacggtttcaaggtggcaggtggctggaaatttggcaacaccatagacggcagccaagcggaattcctgcgcgtgccggatgccatggctaacctgagcccgatcccagaccacctcagcgacgagcaagtactgatgtgtccggacatcatgtcgaccggcttctctggcgcagagcggggcaacatcaagattggcgatacagtggtgatatttgcgctgggccccatcggcctctctgccgtcgcaggcgccaaactgctgggagccaccaagatcatcggcgtggattccattcctgacaggctcaacatcgcccgcgcgctaggcgcagaccatgtcatcaacttcaagactcatgacccggtgcaggaaattctcaagctgacagacggacgcggcgtggatgtcgcaatcgaggcactgggcgtgcaacagacattcgagtccagcctgcgcgtgctgcgtccgggcggcaccttgtccagcctgggcgtctattcctccgacctcaggctgccactagatgccttcggggccggactgggggacttcacgatcgtgtccaccctctgtcccggaggcaaggagcgcatgcgcagactgatggaggcagtcggctcgggccgcgctgacctgagcaatctggtgacccatcgcttcaagctcagcgagatcgaggaggcttacgacttgttcgccaatcagcgtgacggcgtcatcaaggtagccatcacaccctag

SEQ ID NO: 5231 - protein, 357 aa, Methylobacillus flagellatus KT
MATMKAAVFVSPGKIALRDKPVPEIGPLDALIRITTTTICGTDVHILKGEYPVAAGLTVGHEPVGIIEKLGSEVHGFKVGQRVIAGAITPSGHSNACLCGIGAQDGPDSPHGFKVAGGWKFGNTIDGSQAEFLRVPDAMANLSPIPDHLSDEQVLMCPDIMSTGFSGAERGNIKIGDTVVIFALGPIGLSAVAGAKLLGATKIIGVDSIPDRLNIARALGADHVINFKTHDPVQEILKLTDGRGVDVAIEALGVQQTFESSLRVLRPGGTLSSLGVYSSDLRLPLDAFGAGLGDFTIVSTLCPGGKERMRRLMEAVGSGRADLSNLVTHRFKLSEIEEAYDLFANQRDGVIKVAITP

SEQ ID NO: 5232 - DNA, 1041 bp, Polaromonas sp. JS666
  CDS (1)..(1041)
atgaaagccgccgttctgcgcgcccccaaggtactgcaactcagcgacatcgccacaccggaagccgcacccggcgagctggtgctgcgtgtgcgggctgcgatggtctgcgggacggatctgcgaattttgactggccgaaagaccaagggggtacgttttccctcggtcatcggacacgagtttgcgggcgaagtggttcaggtcggcgacggcgtgactcagttcaagacgggagaccgtgtctgcatggatcccgtcatcccctgccgggcctgcgcctattgcaagaccgggcacgaaaatgtctgccttcatcggcaggccatgggctatgaattcgacggcgcttttgccgagtacatccgtattccggcgatcgcgctcacggcgggaaatgtgttcatgatgcccgcgcagatgagctttgaatccgccgcactcgccgagcccctggcctgctgcatcaacggccagcgcaatgccggtgtccaggtcggagataccgtggtggtcctcggagccggccccatcggcctgatgcacgccgcgctggcgcgtctctcgggagccaggcaggtgattgtcagcgagcccaatgcggcgcggcgccaggctgccgtcgaccggggcgttgaacatatgtgcgaccccagcaccgagtctgtcatggagtttgtcaaggcccgcaccgacggactcggcgcggatgttgtgattctcgccattggcgtcccgcagcttgccaatgaatcgctcaatctggtccgcaaggggggacacgtcaacctctttgcgggtttctcggccggtgagacctcgaacatcgatgtcaacctgatccactacaacgaaatcgtggtcacgggcgccagtgccctgaggcgacgcgactacgaacttgcgctgaacatgctgtcagccggtcagatcgacgccaattcgctgatcacccatcgctacgaggtcgcggattcgctggcagcctttgacgaagccggcagcggccgggccctgaaggtggcgattcacaatgtctga

SEQ ID NO: 5233 - protein, 346 aa, Polaromonas sp. JS666
MKAAVLRAPKVLQLSDIATPEAAPGELVLRVRAAMVCGTDLRILTGRKTKGVRFPSVIGHEFAGEVVQVGDGVTQFKTGDRVCMDPVIPCRACAYCKTGHENVCLHRQAMGYEFDGAFAEYIRIPAIALTAGNVFMMPAQMSFESAALAEPLACCINGQRNAGVQVGDTVVVLGAGPIGLMHAALARLSGARQVIVSEPNAARRQAAVDRGVEHMCDPSTESVMEFVKARTDGLGADVVILAIGVPQLANESLNLVRKGGHVNLFAGFSAGETSNIDVNLIHYNEIVVTGASALRRRDYELALNMLSAGQIDANSLITHRYEVADSLAAFDEAGSGRALKVAIHNV

SEQ ID NO: 5234 - DNA, 1029 bp, Burkholderia vietnamiensis G4
  CDS (1)..(1029): transl_table=11
atgaaagcactggcaaagctcgaacgcgctccgggtctcacgttgacgcgcgtgaagcgtcccgaggtcggacacaacgacgtgctgatcaagatccgccgcacggcgatctgcggcaccgacatccatatctggaagtgggacgactgggcgcagaagacgatccccgtgccgatgcatgtcggccacgaatacgtcggcgagatcgtcgagatggggcaggaagtgcgcggcttcgcgatcggtgaccgcgtgtccggcgaagggcacatcacctgcggtttctgccgtaactgtcgtgcggggcgtcggcatctgtgccgcaataccgtcggcgtcggcgtgaaccgcgagggcgcgttcgccgaatatctggcgattcccgcattcaacgcgttcaagattccgccggagatctccgacgatctcgcgtcgatcttcgatccgttcggcaacgcgacgcatacggcgctgtcgttcaacctcgtcggcgaggacgtgttgatcaccggcgcggggccgatcggcatcatggccgtggcaatcgccaagcatgtcggcgcgcgcaatgtcgtgatcaccgacatcaacgactatcggctggagcttgcgcgcaagatgggcgcgacgcgtgctgtcaacgtcgcgcgcgagtcgctgcgcgacgtgatggccgagctgcgcatgactgaaggcttcgatgtcgggctcgagatgtcgggcgtgccgagcgcattcacgagcctgctcgaagcgatgaatcacggcggcaaggtcgcgctgctcggcattccgcccgcgcagacggcaatcgactggaatcaggtgatcttcaaggggctcgagatcaagggcatctacggccgcgaaatgttcgagacctggtacaagatggtcgcgatgctccagagtgggctcgacctgtcgccgatcgtcacgcatcgctttgccgtcgacgattacgagaaaggcttcgccgcgatgctgtccggtgaaagcggcaaggtgattctcgactggaccgcgtga

SEQ ID NO: 5235 - protein, 342 aa, Burkholderia vietnamiensis G4
MKALAKLERAPGLTLTRVKRPEVGHNDVLIKIRRTAICGTDIHIWKWDDWAQKTIPVPMHVGHEYVGEIVEMGQEVRGFAIGDRVSGEGHITCGFCRNCRAGRRHLCRNTVGVGVNREGAFAEYLAIPAFNAFKIPPEISDDLASIFDPFGNATHTALSFNLVGEDVLITGAGPIGIMAVAIAKHVGARNVVITDINDYRLELARKMGATRAVNVARESLRDVMAELRMTEGFDVGLEMSGVPSAFTSLLEAMNHGGKVALLGIPPAQTAIDWNQVIFKGLEIKGIYGREMFETWYKMVAMLQSGLDLSPIVTHRFAVDDYEKGFAAMLSGESGKVILDWTA

SEQ ID NO: 5236 - DNA, 1026 bp, Solibacter usitatus Ellin6076
  CDS (1)..(1026): transl_table=11
atgaaggctttggtaaagagcaagagccagccagggttgtggctcgaagagatccccgagcccgcgatcgggatcaatgatgtgctcatccgcgtgttgcggaccggcatatgcggcacggacgtgcacatatacaagtgggacgagtgggcgcgggagacgatccacgtaccgatggcgatcgggcacgagttcgtcggccgcatcgaagcggttggctccaacgtggcggatttcttccccggcgacattgtcagcggcgaaggccacgtggtctgcggccgctgccgcaattgctttgccgggcgacgccacctgtgcgccaagaccatgggcgtcggcgtcaaccgcccaggagcgttcgctgaatacatcgcgctgcccatgacgaatatctggcgacaccacgagggcatcgatctcgatgtcgccgccatcttcgaccccttcggcaatgccgttcacaccgcgctctccttccccgtgctcggtgaggacgtgctgatcaccggcgctgggcctatcggcatcatggccgcggcggtggcccgccacgcggcagcccgctacaccgtgatcaccgacctgaatccctaccggctcgagttggccgccaaactcggggtcacccgcgccgtcaacgtccgcgagcaaaagctcggcgacgtgcagaaggagctcggcatgaccgagggcttcgacgtcggcctcgagatgtccggcaaccccgcgggattccgcgacatgctggccaacatgagtcacggcgccaaaatcgccatgctcggaattcccgccggcgaaatggctatcgattggcgcaccgtaatctttaacatgctcaccatcaagggaatctacggccgtgaaatgtacgagacctggtacaagatgagcgtgatgctgcagtccggcctggacatctcccccgtaatcacgcaccgctaccactacaccgatttcgaaaagggatttgaagtcatgagctccggtaattccggcaaggtcattctgagctgggactaa

SEQ ID NO: 5237 - protein, 341 aa, Solibacter usitatus Ellin6076
MKALVKSKSQPGLWLEEIPEPAIGINDVLIRVLRTGICGTDVHIYKWDEWARETIHVPMAIGHEFVGRIEAVGSNVADFFPGDIVSGEGHVVCGRCRNCFAGRRHLCAKTMGVGVNRPGAFAEYIALPMTNIWRHHEGIDLDVAAIFDPFGNAVHTALSFPVLGEDVLITGAGPIGIMAAAVARHAAARYTVITDLNPYRLELAAKLGVTRAVNVREQKLGDVQKELGMTEGFDVGLEMSGNPAGFRDMLANMSHGAKIAMLGIPAGEMAIDWRTVIFNMLTIKGIYGREMYETWYKMSVMLQSGLDISPVITHRYHYTDFEKGFEVMSSGNSGKVILSWD

SEQ ID NO: 5238 - DNA, 1092 bp, Exiguobacterium sibiricum 255-15
  CDS (1)..(1092): transl_table=11
atgatgacaaaactagtgacagctgtagaagatacgacaaaagtaaaaacgatgcgcgcactcgtcaaggaagaacggggatttggcgctgtcttgaaagaagtcgcagttccttcaccaaaacgtggtgaagtcttgattcgcgtggaagcgacttccatctgcgggacggatgtccacatttacgaatgggacgcgtgggcagcatcacgcgtgaatccgccgtatgttttcggacatgagttttccggtgaagtcgtggaactgggagaagggacgaaacgtctgaaactcggggaccgtgtctcagcggaaacacatatcgtctgtcatcaatgcaaacagtgtctgcgggggcagtatcacatttgtaaaaacacaaaaatcatcggcgtcgatacacaaggctgtttcgccgagtacgtcgtcatgccggaagaaaatctctgggtcaatccggaggatatgccagccgccatcgcatcgattcaagagccgatgggcaatgccgttcacacggttcttgcgagtgacgtcagcgctaaaacggtcgccatcgtcggttgcggtccaatcggtctgatggctgtctcggtcgcaaaagcggcaggagctgcggaagtcattgcgattgatgtcaatccgtaccggttggagcttgcgaaaacgatgggcgcagatgtcgtcatcgattcacgccacgaggatgttctcgaacgggtccggatgatgacggacggggacgggattgatgtcgtctgtgaaatgagcggtcatccggttgcgattcgtcaagcatttgagatggtgacagccggcggagacgtcaacattctcagtctgccggtcaaaccggtcgagattgatctgacgaatcacgttgtttttaaaggtgttcgcgttcaaggcatcaccggacggaaaatgtatgagacatggagtcaagtatccgcattcctgtcgagcggaaaagtcgatgtcaaaccgttgattacacacacattgccactcgaacggtttgaagaaggattcgaattgatgcgacaagggaaatgtggaaaggtcgtactacaaccaagggggacgaattaa

SEQ ID NO: 5239 - protein, 363 aa, Exiguobacterium sibiricum 255-15
MMTKLVTAVEDTTKVKTMRALVKEERGFGAVLKEVAVPSPKRGEVLIRVEATSICGTDVHIYEWDAWAASRVNPPYVFGHEFSGEVVELGEGTKRLKLGDRVSAETHIVCHQCKQCLRGQYHICKNTKIIGVDTQGCFAEYVVMPEENLWVNPEDMPAAIASIQEPMGNAVHTVLASDVSAKTVAIVGCGPIGLMAVSVAKAAGAAEVIAIDVNPYRLELAKTMGADVVIDSRHEDVLERVRMMTDGDGIDVVCEMSGHPVAIRQAFEMVTAGGDVNILSLPVKPVEIDLTNHVVFKGVRVQGITGRKMYETWSQVSAFLSSGKVDVKPLITHTLPLERFEEGFELMRQGKCGKVVLQPRGTN

SEQ ID NO: 5240 - DNA, 1026 bp, Shewanella amazonensis SB2B
  CDS (1)..(1026): transl_table=11
atgaaagcacttgctaaactcaagcctgaagaaggcatttggatggttgatgcccccaagccggaaatgggccataacgatctgctgattaagatccgtaaaaccgccatttgtggcaccgacgtgcatatctacaactgggacgagtggtcgcaaaaaaccattcccgtgcctatggtagtaggtcacgaatatgtcggcgaagtggtgggaattggccaggaagtccgcggcttcaagattggcgaccgcgtatccggtgaaggccatatcacctgtggccattgccgtaactgccgcgccggccgcactcatctgtgccgcaataccacgggcgtgggtgtaaaccgtgaaggctcattcgccgagtatctggtgatcccagcctttaacgcgttcaaaatccccgatgatatcagtgacgatctggctgccatttttgacccattcggtaatgccgttcacacggcgctgtcattcgacctggtaggggaagacgtgcttatcacaggcgccggccccatcggtatcatggctgctgccgtgtgccgtcacgtgggcgcccgccatgtggtgatcaccgacgtgaacgaatatcgtctggaactggctcgaaagatgggtgctacccgtgcggtgaacgtggccaaggaaaacctcaaagacgtgatgaaagacctcggcatgaccgaaggcttcgacgttggcctggaaatgtccggcgtacctgccgccttccatgccatgctggataccatgaaccacggcggcaaaatcgccatgctgggtattcccggcggcgaaatggccatcgactggagcaaggtgatcttcaagggactcatcatcaagggcatctacggccgtgaaatgtttgagacctggtacaagatggccagcctgctgcaatcgggcctggacttgtcccccattgttacccaccacttcaaggtggacgacttccagcaaggcttcgacgccatgcgttccggtcagtccggtaaagtcatcctcagctgggattaa

SEQ ID NO: 5241 - protein, 341 aa, Shewanella amazonensis SB2B
MKALAKLKPEEGIWMVDAPKPEMGHNDLLIKIRKTAICGTDVHIYNWDEWSQKTIPVPMVVGHEYVGEVVGIGQEVRGFKIGDRVSGEGHITCGHCRNCRAGRTHLCRNTTGVGVNREGSFAEYLVIPAFNAFKIPDDISDDLAAIFDPFGNAVHTALSFDLVGEDVLITGAGPIGIMAAAVCRHVGARHVVITDVNEYRLELARKMGATRAVNVAKENLKDVMKDLGMTEGFDVGLEMSGVPAAFHAMLDTMNHGGKIAMLGIPGGEMAIDWSKVIFKGLIIKGIYGREMFETWYKMASLLQSGLDLSPIVTHHFKVDDFQQGFDAMRSGQSGKVILSWD

SEQ ID NO: 5242 - DNA, 1035 bp, Mesorhizobium sp. BNC1
  CDS (1)..(1035): transl_table=11
atgaccaacatgatgaaggccttggtgaaggccaagcccgaggaagggctttggatggagcgggtgccgcttccggagatcggcccgaacgacgtgctgatcaaggtgaggaaagctgccatctgcggcacggacgtccatatctggaactgggacgaatgggcaagaaagaccgtgcccgtgccgctcgtcaccggccatgagttcgtcggcgaggtcgtggatgtcggctcagccgtgaccgaatacagaatcgggcagcgtgtttcgggcgaggggcacattgtctgcggccattgccgcaactgccgggccgggcgtggacatctctgccgaaacacgctgggcgtcggcgttcaccggccgggtgcctttgccgaatatatctcgctgccgcagcacaatgtcgtggcgatccccgacgacgtgccggacgagatcgccgcgattttcgatccgcttggaaacgcggtgcacaccgcgctctctttcgatctggtgggcgaggatgtgctggtgaccggagctggcccgatcggcattatgggcgcgctggtggcgcagtgcgtaggtgcgcgcaaagtggtcatcacggatatcaatccggggcgacttgcgctcgctaagaaactcggcgtgcgtcacgtggtgaatgccagggaagagaagctcaccgatgtaatgaggaagctcggcatgaccgagggcttcgacgtgggcctggagatgtccggctctgcctcggcgtttcgcgacatgatcgatgtcatgaacaatggcggcaaaatagcgatcctcggcatagcgccgacgggtttcgagatcgattggaacaaggtgattttcaagatgctccacctgaagggcatctacggccgggagatgttcgaaacctggtacaagatgatcgcgcttgtgcaggggcctctcgatatctccggcctgatcacgcaccgcatctctgccgatgattaccgcgaaggctttgccgccatgcgcagcggcgaggccggtaaggttgtaatggattggtga

SEQ ID NO: 5243 - protein, 344 aa, Mesorhizobium sp. BNC1
MTNMMKALVKAKPEEGLWMERVPLPEIGPNDVLIKVRKAAICGTDVHIWNWDEWARKTVPVPLVTGHEFVGEVVDVGSAVTEYRIGQRVSGEGHIVCGHCRNCRAGRGHLCRNTLGVGVHRPGAFAEYISLPQHNVVAIPDDVPDEIAAIFDPLGNAVHTALSFDLVGEDVLVTGAGPIGIMGALVAQCVGARKVVITDINPGRLALAKKLGVRHVVNAREEKLTDVMRKLGMTEGFDVGLEMSGSASAFRDMIDVMNNGGKIAILGIAPTGFEIDWNKVIFKMLHLKGIYGREMFETWYKMIALVQGPLDISGLITHRISADDYREGFAAMRSGEAGKVVMDW

SEQ ID NO: 5244 - DNA, 1041 bp, Nocardioides sp. JS614
  CDS (1)..(1041): transl_table=11
gtgcgtgctctcgtgaagacgaccgccggacccgggctcgagctcatcgacgtgcccgagccggcctgtggtgaccgcgacgtgaagatccgggtgctgagagcgggcctctgcggcaccgacctgcacctgctgtcctgggacgactgggcggccgcgacggtgcaggcgccgatgacgatcggccacgagttcttcggggaggtcgtcgaggtcggcgcggacgtcgaccacgtctcggtcggcgaccgggtctccggcgagggacacatcgtgtgcggggcctgccgcaactgccgggccgggcggcgccagctgtgcatcaacaccgtcggcgtcggggtcaaccgggacggcgcgttcgccgactacgtcgtcatcccggcggccaacgcctgggtccagccggccgacctcgacccggacctgggtgcgctgttcgacccgctcggcaacgccacccacaccgccctccagtggccggtggtgggggaggacgtcgtcattacgggggccggcccgatcgggatcatggcgaccgcgatcgtgcggcacgcgggcgcccggcggatcgcggtcaccgacctcagccccgagcggctggagctggcggcaagcgcgggcgccgacctcaccgtcgacgtctcccagggccaggacctggcctgggcacagcggcagctcggcatgctcgagggcttcgacatcggcctggagatgtcgggtgctcccgacgccgtgcgcgacatgctcgagaacctcaaccacggggcccgggtcgcgatgctgggcctgccgcggtcggcgtacgagatcgactggggcaaggtgatcacgcacatgatcacgctgcgcgggatctatggccgcgagatgttcgagacgtggtacctgatgggctcgatgctggcgaccacgccggcgctgcgggacgccgtacagtccgtgatcacgtggcgtggcccggcggaggactgggaggaagccttcgagcacacccggtccggcaccgccggcaaggccgtcctggattggagctga

SEQ ID NO: 5245 - protein, 346 aa, Nocardioides sp. JS614
MRALVKTTAGPGLELIDVPEPACGDRDVKIRVLRAGLCGTDLHLLSWDDWAAATVQAPMTIGHEFFGEVVEVGADVDHVSVGDRVSGEGHIVCGACRNCRAGRRQLCINTVGVGVNRDGAFADYVVIPAANAWVQPADLDPDLGALFDPLGNATHTALQWPVVGEDVVITGAGPIGIMATAIVRHAGARRIAVTDLSPERLELAASAGADLTVDVSQGQDLAWAQRQLGMLEGFDIGLEMSGAPDAVRDMLENLNHGARVAMLGLPRSAYEIDWGKVITHMITLRGIYGREMFETWYLMGSMLATTPALRDAVQSVITWRGPAEDWEEAFEHTRSGTAGKAVLDWS

SEQ ID NO: 5246 - DNA, 1032 bp, Vibrio sp. Ex25
  CDS (1)..(1032)
atgaaaattaaagcattatcaaagctaaagcctgaagaaggcatctggatgactgaggttgataaacctgaagttggccataacgatattctgatcaaaattaagaaaaccgctatctgtggtacagacgtacacatctacaactgggacgaatggtcacaaaagacaattccagttcctatggttgtcggtcacgaatacgtgggtgaagtggttgcgattggtcaggaagttcgtggctttgaaatcggtgaccgcgtatctggtgaaggtcacatcacttgtggtcactgccgtaactgtcgtggcggtcgtactcacttgtgtcgcaacacgatcggtgtgggtgtaaaccgtgaaggcgcatttgcagaatacctagtgattcctgcatttaacgcgtttaagatccctgacgagatttctgacgatctagcatcgatcttcgacccgttcggtaacgcggtacacactgcgctttctttcgatctagtcggtgaagacgtgctcatcactggtgctggcccaatcggtatcatggcagctgcagtcgcaaaacacgttggtgctcgccatgtggttatcacagacgttaacgaataccgtttagaacttgctcgtaagatgggcgtaacacgcgcagtaaacgttgcagaagagaagcttgaagatgtaatggctgaactaggcatgacagaaggctttgacgtaggcctagaaatgtctggtaacccagcggcattcaactcaatgctaaccacaatgaaccacggtggccgtattgcattactcggtattccaccatcagatatgggcattgattggaaccaagtgatcttcaaaggcttagttatcaaaggcatctatggtcgtgaaatgttcgaaacatggtacaagatggcttcactgattcaatctggtctggatctatcaccaattattacgcaccactacaagattgatgacttccaagaaggcttcgatgtcatgcgttcaggcatgtctggcaaagttatccttgattgggaataa

SEQ ID NO: 5247 - protein, 343 aa, Vibrio sp. Ex25
MKIKALSKLKPEEGIWMTEVDKPEVGHNDILIKIKKTAICGTDVHIYNWDEWSQKTIPVPMVVGHEYVGEVVAIGQEVRGFEIGDRVSGEGHITCGHCRNCRGGRTHLCRNTIGVGVNREGAFAEYLVIPAFNAFKIPDEISDDLASIFDPFGNAVHTALSFDLVGEDVLITGAGPIGIMAAAVAKHVGARHVVITDVNEYRLELARKMGVTRAVNVAEEKLEDVMAELGMTEGFDVGLEMSGNPAAFNSMLTTMNHGGRIALLGIPPSDMGIDWNQVIFKGLVIKGIYGREMFETWYKMASLIQSGLDLSPIITHHYKIDDFQEGFDVMRSGMSGKVILDWE

SEQ ID NO: 5248 - DNA, 1026 bp, Shewanella sp. ANA-3
  CDS (1)..(1026): transl_table=11
atgaaagcactaagcaagttaaaagccgaaaaaggcatttggttagtcgatgcgcctaagcctgaaatgggccacaacgatctgctgatcaagattaaaaagaccgccatttgtggcaccgacatgcatatctacaactgggacgaatggtcacaaaaaaccattcctgtgcctatggtggtaggtcacgagtatgtgggtgaagtggttgatatcggtcaagaagttcgtggctttaaaattggtgaccgcgtttctggcgaaggccatatcacctgcggccactgccgtaactgccgcgctggtcgcacccatttatgccgcaacacctcaggtgtgggtgtaaaccgcgaaggttcatttgccgaatacttagtgatcccagcctttaacgccttcaaaattcccgatgatatcagcgacgatttagcctctatcttcgatccattcggtaacgcagtgcacacagcgctgtcattcgacttagtgggcgaagacgtgttaatcactggcgcgggtcctatcggtattatggctgcggccgtgtgtcgccacgttggtgctcgccatgtggtcattaccgacgttaacgaatatcgtttagagctggcacgcaagatgggcgccacccgcgccgttaacgtggctcaggaaagtctgaaagacgtgatgaaagaactcggcatgaccgaaggcttcgacgtgggtctggaaatgtcaggcgtaccttcggccttccacgccatgttagataccatgaaccacggtggcaaaatcgcgatgctcggcattccaggtggcgaaatggcgattgattggagcaaagtgatcttcaagggtctggtcatcaaaggcatttacggccgtgaaatgttcgaaacctggtacaagatggcaagcttgatccaatctggcttagatatttcgcctatcatcacgcaccactacaagattgatgatttccaaaaaggcttcgacgctatgggctcgggccaatcaggtaaagtcatcctcagctgggattaa

SEQ ID NO: 5249 - protein, 341 aa, Shewanella sp. ANA-3
MKALSKLKAEKGIWLVDAPKPEMGHNDLLIKIKKTAICGTDMHIYNWDEWSQKTIPVPMVVGHEYVGEVVDIGQEVRGFKIGDRVSGEGHITCGHCRNCRAGRTHLCRNTSGVGVNREGSFAEYLVIPAFNAFKIPDDISDDLASIFDPFGNAVHTALSFDLVGEDVLITGAGPIGIMAAAVCRHVGARHVVITDVNEYRLELARKMGATRAVNVAQESLKDVMKELGMTEGFDVGLEMSGVPSAFHAMLDTMNHGGKIAMLGIPGGEMAIDWSKVIFKGLVIKGIYGREMFETWYKMASLIQSGLDISPIITHHYKIDDFQKGFDAMGSGQSGKVILSWD

SEQ ID NO: 5250 - DNA, 1026 bp, Shewanella sp. MR-7
  CDS (1)..(1026): transl_table=11
atgaaagcactaagcaagttaaaagccgaaaaaggcatttggttagtcgatgcgcctaagcctgaaatgggccacaacgatctgctgatcaagattaaaaagaccgccatttgtggcaccgacatgcacatctacaactgggacgaatggtcacaaaaaaccattcctgtgcctatggtggtaggtcacgagtatgtgggtgaagtggttgatatcggtcaagaagttcgtggctttaaaattggtgaccgcgtttctggcgaaggccatatcacctgcggccactgccgtaactgccgcgctggccgcacccatttatgccgcaacacctcaggtgtgggtgtaaaccgcgaaggttcatttgccgaatacttagtgatcccagcctttaacgccttcaaaattcccgatgatatcagcgatgatttagcgtctatcttcgacccgttcggtaacgcagtgcacacagcgctgtcattcgacttagtcggcgaagacgtgttaatcactggcgcgggccctatcggtattatggctgcggccgtatgtcgccacgttggtgctcgccatgtggtcattaccgacgttaacgaataccgcttagagttagcccgtaaaatgggtgctacccgcgcagttaacgtggctcaggaaaacctgaaagacgtgatgaaagaactcggcatgaccgaagggttcgacgtgggtctagaaatgtctggcgtaccttcagccttccacgccatgttagataccatgaaccacggtggcaaaatcgctatgctcggtatcccgggtggcgaaatggcgattgattggagcaaagtgatcttcaagggtctggtcatcaaaggcatttacggccgtgaaatgttcgaaacctggtacaagatggcaagcttgatccaatctggcttagacatttcgcctatcatcacgcaccactacaagattgatgatttccaaaaaggcttcgacgctatgggctcgggccaatccggtaaagtcatcctcagctgggattaa

SEQ ID NO: 5251 - protein, 341 aa, Shewanella sp. MR-7
MKALSKLKAEKGIWLVDAPKPEMGHNDLLIKIKKTAICGTDMHIYNWDEWSQKTIPVPMVVGHEYVGEVVDIGQEVRGFKIGDRVSGEGHITCGHCRNCRAGRTHLCRNTSGVGVNREGSFAEYLVIPAFNAFKIPDDISDDLASIFDPFGNAVHTALSFDLVGEDVLITGAGPIGIMAAAVCRHVGARHVVITDVNEYRLELARKMGATRAVNVAQENLKDVMKELGMTEGFDVGLEMSGVPSAFHAMLDTMNHGGKIAMLGIPGGEMAIDWSKVIFKGLVIKGIYGREMFETWYKMASLIQSGLDISPIITHHYKIDDFQKGFDAMGSGQSGKVILSWD

SEQ ID NO: 5252 - DNA, 1044 bp, Sulfitobacter sp. EE-36
  CDS (1)..(1044): transl_table=11
atgagcaacgaaatgaaggcgctgtgtaagtccgagccccgcgaggggctgtggatgacccgcgcgccggtgccggaaatcgggccggatgacgtgctgatcaagatcaacaaaaccggcatttgtggcacggatatccacatctggaactgggatgaatgggcgcagaataccgtgcctgtcccgctgatcaccggccatgagtttgccggagagattgtggaactgggccgcaatgtcacggatctgaccatcgggcagcgctgttcgggcgaggggcatctgatcggaaaaacctcgcgccagtcgcggtccggcaagttccaccttgatcccgccacgcgtggtatcggcgtgaatgaacaaggtgccttcgcgcaatatctgcgactgcccgcgttcaatgtcgtcccgctgcccgacacgatctcggacgatatcggagcgatcctcgacccgcttggcaatgcggtacacaccgcgctgagctttgatctggtgggggaagatgtgctgatcaccggcgcaggccccatcggtatcatggccgcagcggtcgcccgccacgtcggcgcgcgtcatgtggtgattacggatgtgaatcccgcccggctagagctcgccgccaaggtcgccgatgtcgtccccgtcgacgtgcgtcacgaagaccttgccgatgtcatcgcgcggttgaagatgaaacagggcttcgacgtcgggatggagatgtcgggcaatcaggtcgcgctggatcagatggtagaggcgatgaccatgggcgggcggatcgcgatgctgggcatcccgccgggcaaatcgcccgtcgactggtcgcgcatcgtgttcaaggcgatcaccgtcaaaggggtctatggccgcgagatcttcgagacgtggtacaagatgatcgccatgctggagaacggcttggacgtgagtgagatcatcacccatcgttttgacgtcgacgacttccagacgggatttgcgacgatgaaatcgggggcctctggcaaagtggtgctggactggaccggcgcgtga

SEQ ID NO: 5253 - protein, 347 aa, Sulfitobacter sp. EE-36
MSNEMKALCKSEPREGLWMTRAPVPEIGPDDVLIKINKTGICGTDIHIWNWDEWAQNTVPVPLITGHEFAGEIVELGRNVTDLTIGQRCSGEGHLIGKTSRQSRSGKFHLDPATRGIGVNEQGAFAQYLRLPAFNVVPLPDTISDDIGAILDPLGNAVHTALSFDLVGEDVLITGAGPIGIMAAAVARHVGARHVVITDVNPARLELAAKVADVVPVDVRHEDLADVIARLKMKQGFDVGMEMSGNQVALDQMVEAMTMGGRIAMLGIPPGKSPVDWSRIVFKAITVKGVYGREIFETWYKMIAMLENGLDVSEIITHRFDVDDFQTGFATMKSGASGKVVLDWTGA

SEQ ID NO: 5254 - DNA, 1026 bp, Roseovarius nubinhibens ISM
  CDS (1)..(1026): transl_table=11
atgaaggccctcgtgaaatcccgccccgagccgggcctctggatggaacatgtcccggtgccggaaccgggcgatgacgaagtgctcatcaaggtgcgcaaatccgccatctgcggcaccgatgtgcatatctggaaatgggatgaatggtcggccaagaccgtgccggtgccgatggtcgtcggccatgagttctgtggcgagatcgtcgacacgggccgcgccgcgatcaaatacaagatcggccagcgcgtcgcgggcgagggccatgtggtctgtggcacctgccgcaactgtcgcgcggggcgggggcatctgtgccgcaacacgctcggcgtgggggtcaaccggcccggctctttcgcggaatatctctgcatccccgaaagcaatgtggtgccgatccccgatgacatccccgacgagatcgcggcgatcttcgatccgttcggcaatgcggtccacaccgcgctgagctttgatctggtgggtgaggatgtgcttgtcaccggggccggtccgatcggcatcatgggggcgctcgtcgcgcaaaaggccggcgcgcgcaaagtggtgatcaccgacatatcgccctatcgcatcgcgctcgcgcaaaagctcggggtgcagcatgtggtcaacgcggcggaggaaaacctcaaggatgtgatggcgcggctcggcatgaccgaaggttttgacgtcgggctcgagatgtccggcgcggcccccgccatgcgcgacatgatcgacaagatgaacaatggcggcaagatcgcacttctgggcatcgcgccgaccgagttcgcagtcgactggaacaagatcatcttcaagatgctcaacgtcaaaggcatctatggccgcgagatgtacgagacctggtacaagatgatcgcgctggtgcaatcgggcctcgacctgacgccgctgatcacccatcgcatcggcatcgacgcctttgaggatggctttgccgcgatgctctcgggcgaggcgggcaaggtggtgatggactggggctaa

SEQ ID NO: 5255 - protein, 341 aa, Roseovarius nubinhibens ISM
MKALVKSRPEPGLWMEHVPVPEPGDDEVLIKVRKSAICGTDVHIWKWDEWSAKTVPVPMVVGHEFCGEIVDTGRAAIKYKIGQRVAGEGHVVCGTCRNCRAGRGHLCRNTLGVGVNRPGSFAEYLCIPESNVVPIPDDIPDEIAAIFDPFGNAVHTALSFDLVGEDVLVTGAGPIGIMGALVAQKAGARKVVITDISPYRIALAQKLGVQHVVNAAEENLKDVMARLGMTEGFDVGLEMSGAAPAMRDMIDKMNNGGKIALLGIAPTEFAVDWNKIIFKMLNVKGIYGREMYETWYKMIALVQSGLDLTPLITHRIGIDAFEDGFAAMLSGEAGKVVMDWG

SEQ ID NO: 5256 - DNA, 1026 bp, Pseudoalteromonas tunicata D2
  CDS (1)..(1026): transl_table=11
atgaaagcgctatcgaaattaaaagcagaaccgggcatttggatgaccgaagcggcaaaaccagaagtcggtcataatgatttattaattaaaatccgtaaaacagcaatttgtggtacagacgttcacatttataaatgggatgagtgggcgcaaaatacaatccctgtacctatggtggttggccacgaatatgtgggcgaagtagttgatatgggccaagaagtacgcggatttaaaattggtgatcgtgtatcgggcgaaggccatattacatgtggtcattgccgtaactgccgtgcgggtcgagtgcatttatgccgcaataccataggtgtgggtgttaaccgtgaaggatcatttgcagagtatttagtgatccctgcttacaatgcatttaaaatcccagacaatatttctgatgaattagcatcaatttttgatccatttggtaatgcggtacatacagctttatcgtttgatttagtgggtgaagatgtacttatcactggcgcaggcccaattggcattatggcagcagctgttgctaagcatgttggtgctcgttatgttgttgttaccgatgtgaatgaatatcgcttagaccttgcgcgtaaaatgggtgctacacgagcggtaaatatcgcaaacgaaaagcttgaagatgtgatgaaagagcttggtatgacagagggctttgatgttggtcttgaaatgtctggcgtaccttctgcatttaaaaacatgctgagtaatatgaatcatggtggaaaaattgccatgctaggtattccaccttcagacatggcggttgattggaatcaggttatttttaaagggttagtgatcaaaggtatttacggtcgtgaaatgtttgagacctggtataaaatggccagcttaattcaatcggggcttgatttatctccgattattacgcatcagttcccaattgatcaattccaacaaggatttgacaccatgttgtctggtcagtcaggtaaagtgattttagattggtgttaa

SEQ ID NO: 5257 - protein, 341 aa, Pseudoalteromonas tunicata D2
MKALSKLKAEPGIWMTEAAKPEVGHNDLLIKIRKTAICGTDVHIYKWDEWAQNTIPVPMVVGHEYVGEVVDMGQEVRGFKIGDRVSGEGHITCGHCRNCRAGRVHLCRNTIGVGVNREGSFAEYLVIPAYNAFKIPDNISDELASIFDPFGNAVHTALSFDLVGEDVLITGAGPIGIMAAAVAKHVGARYVVVTDVNEYRLDLARKMGATRAVNIANEKLEDVMKELGMTEGFDVGLEMSGVPSAFKNMLSNMNHGGKIAMLGIPPSDMAVDWNQVIFKGLVIKGIYGREMFETWYKMASLIQSGLDLSPIITHQFPIDQFQQGFDTMLSGQSGKVILDWC

SEQ ID NO: 5258 - DNA, 1032 bp, Photobacterium sp. SKA34
  CDS (1)..(1032): transl_table=11
atgaaaatcaaagctctttctaagttaaagcctgaagaaggcatctggatgactgaagtagataagcctgaagttggtcataacgatctgcttatccgcatcaagaaaacagcaatctgtggtactgatgttcatatctacaattgggatgaatggtcacaaaaaacgatccctgtacctatggttgttggtcatgagtatgtcggtgaagtggttgggatgggtcaggaagtgcgtggctttgctattggcgatcgcgtttcaggtgaaggccatattacgtgtggtcactgccgaaactgtcgtggtggccgtacccacttatgccgaaataccattggtgttggtgtaaaccgtgaaggtgcatttgcggaatacttagtgatccctgcatttaacgcattcaaaattcctgatgatatttcagatgatgtagcgtctattttcgacccgttcggcaatgctgttcacaccgcgctgtcgttcgacttagtgggtgaagatgtgctgatcacaggtgcaggtccaattggcattatggctgcggcagtagcaaaacacgtgggtgcgcgtcacgtagtgatcactgatgtgaacgaataccgtttagatcttgcacgcgaaatgggcgtgacccgtgcgattaacgttgctaaagaaagcctgacggatgtgatggcagagcttggcatgaaagaaggctttgacgtgggcatggaaatgtcgggtaatcctgcggcatttaacagcatgctatcaagcatgaaccacggcggtaaaattgcactgctaggtattccaccatcagacatggcaatcgattggaaccaagtgatcttcaaaggtttgatcatcaaaggtatctatggccgtgaaatgtttgaaacatggtacaagatggcaaccttgattcaatcaggtttagatctatcaccaattattactcaccattacaagatcgatgatttccaagagggctttgatgtcatgcgctctggtcaatcaggtaaggttattcttgattgggaataa

SEQ ID NO: 5259 - protein, 343 aa, Photobacterium sp. SKA34
MKIKALSKLKPEEGIWMTEVDKPEVGHNDLLIRIKKTAICGTDVHIYNWDEWSQKTIPVPMVVGHEYVGEVVGMGQEVRGFAIGDRVSGEGHITCGHCRNCRGGRTHLCRNTIGVGVNREGAFAEYLVIPAFNAFKIPDDISDDVASIFDPFGNAVHTALSFDLVGEDVLITGAGPIGIMAAAVAKHVGARHVVITDVNEYRLDLAREMGVTRAINVAKESLTDVMAELGMKEGFDVGMEMSGNPAAFNSMLSSMNHGGKIALLGIPPSDMAIDWNQVIFKGLIIKGIYGREMFETWYKMATLIQSGLDLSPIITHHYKIDDFQEGFDVMRSGQSGKVILDWE

SEQ ID NO: 5260 - DNA, 1026 bp, marine gamma proteobacterium HTCC2207
  CDS (1)..(1026): transl_table=11
atgaaagcattagttaaaaggaattccactgttggtctctggttggaggatgtacccaaaccggaaatgggtattaatgacgttttgatcaagattaagcgcacggccatctgcggcaccgatatgcatatttataactgggatagctgggctcaggaaaccattcccgtacctatggtagtggggcatgagtttgtcggcgagatcgtcgatgtaggctccaatgtaaatgattttcgtcctgggcaaattgtctcgggagagggccatgtagtctgtggtcgctgccgcaattgtctcgccggacgtcgtcatctctgcgcccacaccagtggtataggcgtggatcgctcgggtgcctttgctgaatatttggcgctgccaatgtccaatgtgtgggagcatcgcgcagatatagatctggatgtggctgcgctctttgatcccttgggcaatgccgtgcacaccgcactgcaatacgatctattgggtgaagacgttttgatcactggtgctgggcctattggcgccatggccgccgcagtttgtcgtcatgccggtgcgcgcaatgtggtgatcaccgatattaatccccagcgccttgcgctagcgaaagagctcggcgctacctgtacagttgatgtgcgcaccgagaaactcgctgatgtgcagcgtgcactgggtatgtctgaaggctttgatgtgggtctggagatgtccggtaatcctgctgggtttcgtgacctattaagcaatatgtgccatggcggcaaagtggcaatgctcggtattcctgcggaagaggtagccatcgattggagtctagtgatctttaatatgctcactctgaaaggtatctatggtcgtgagatgtatgagacctggtacaagatgtcggtaatgattgagagcggcttggatatttcttcggtgattacccatcgcatgcactacaccgatttccagaagggttttgatgcgatgaacgccggagaggcgagcaaggtgattttgaattgggactga

SEQ ID NO: 5261 - protein, 341 aa, marine gamma proteobacterium HTCC2207
MKALVKRNSTVGLWLEDVPKPEMGINDVLIKIKRTAICGTDMHIYNWDSWAQETIPVPMVVGHEFVGEIVDVGSNVNDFRPGQIVSGEGHVVCGRCRNCLAGRRHLCAHTSGIGVDRSGAFAEYLALPMSNVWEHRADIDLDVAALFDPLGNAVHTALQYDLLGEDVLITGAGPIGAMAAAVCRHAGARNVVITDINPQRLALAKELGATCTVDVRTEKLADVQRALGMSEGFDVGLEMSGNPAGFRDLLSNMCHGGKVAMLGIPAEEVAIDWSLVIFNMLTLKGIYGREMYETWYKMSVMIESGLDISSVITHRMHYTDFQKGFDAMNAGEASKVILNWD

SEQ ID NO: 5262 - DNA, 1047 bp, Pseudomonas putida
  CDS (1)..(1047): transl_table=11
atgctcgcgataaggaaaactaaagcagggccaggagggctatctgtcgatgatgtggccgcccctaaagaggcccacagtactgacgtgctggtgaaagttgaagcggccggtatctgtggtactgacttgttgatctataaatggggcgagttcgccaaaagaatgaaactccccactatcttgggtcatgaagttagcggggtgattgaacaggtcggatctgacgttaaaggtctaaggcctgggatgcgcgtcagtctggagagtcatctcccttgtggaacgtgctacacgtgtcgacgcggttgggcgcatgtttgtcctaatacgcggtatccgggggtcgactttgatggaggcttcgcgtctttcgtcgtggttccggagagcgtgtgttggccggtgccgtgcggaattcctccgctccaggcggcaatgatggagccgttcgggcttgcggtgcatgcaagtctggaaggttctggggtttcgggattgaatgttcttgtttctggttgcggtccgatcggacttatgaacattgcagccgccaaagcactgggagcaagcaaggtcattgcaactgacattcatcctctgcgcctcactgcagcagccaaaatgggggcggatgaatgcattaatgcaactgaagagagcgtttataagactgtgcgttcgctgctcggtgagaggggagtagatgttgcaattgactattccgggcaagcagcggcgttaaaggagcttattcaatccatcacccatggtggtgagttgcgactgatgggcgtcccgtcacatgatattttgctcaacctagaggagtggctttttaaaggccttattgtacgtggcctgcatggcaggcgtctgtttgaaacatgggagcgttcaactagcttactggttacagggcgtgttgatttgtcttcgctcgtatcgcatcgattgccactatcggcggcagaggatgcgttcgaaatggccttaaatggtcagtccttgaaaatcctgtttgagcccaatggcacatgtatctaa

SEQ ID NO: 5263 - protein, 348 aa, Pseudomonas putida
MLAIRKTKAGPGGLSVDDVAAPKEAHSTDVLVKVEAAGICGTDLLIYKWGEFAKRMKLPTILGHEVSGVIEQVGSDVKGLRPGMRVSLESHLPCGTCYTCRRGWAHVCPNTRYPGVDFDGGFASFVVVPESVCWPVPCGIPPLQAAMMEPFGLAVHASLEGSGVSGLNVLVSGCGPIGLMNIAAAKALGASKVIATDIHPLRLTAAAKMGADECINATEESVYKTVRSLLGERGVDVAIDYSGQAAALKELIQSITHGGELRLMGVPSHDILLNLEEWLFKGLIVRGLHGRRLFETWERSTSLLVTGRVDLSSLVSHRLPLSAAEDAFEMALNGQSLKILFEPNGTCI

SEQ ID NO: 5264 - DNA, 1047 bp, Pseudomonas sp
  CDS (1)..(1047): transl_table=11
atgctcgcgataaggaaaactaaagcagggccaggagggctatctgtcgatgatgtggccgcccctaaagaggcccacagtactgacgtgctggtgaaagttgaagcggccggtatctgtggtactgacttgttgatctataaatggggcgagttcgccaaaagaatgaaactccccactatcttgggtcatgaagttagcggggtgattgaacaggtcggatctgacgttaaaggtctaaggcctgggatgcgcgtcagtctggagagtcatctcccttgtggaacgtgctacacgtgtcgacgcggttgggcgcatgtttgtcctaagacgcggtatccgggggtcgactttgatggaggcttcgcgtctttcgttgtggttccggaaagcgtgtgttggccggtgccgtgcggaattcctccgctccaggcggcaatgatggagccgttcgggcttgcggtgcatgcaagtctggagggttctggggtttcgggattgaatgttcttgtttctggttgcggtccgatcggacttatgaacattgcagccgccaaagcactgggagcaagcaaggtcattgcaacggacattcatcctctgcgcctcactgcagcagccaaaatgggggcggatgaatgcattaatgcagctgaagagagcgtttataagactgtgcgttcgctgctcggtgagaggggagtagatgttgcaattgactattctgggcaagcagcggcgttaaaggagcttattcaatccatcacccatggtggtgagttgcgactgatgggcgtcccgtcacatgatattttgctcaacttagaggagtggcttttcaaaggccttattgtacgtggcctgcatggcaggcgcctgtatgaaacatgggagcgttcaactagcttattggttacagggcgtgttgatttgtcttcgctcgtatcgcatcgattgccactatcggcggcagaggatgcgttcgaaatggccctaaatggtcagtccttgaaaatcctgtttgagcccaatggctcatgtatctaa

SEQ ID NO: 5265 - protein, 348 aa, Pseudomonas sp
MLAIRKTKAGPGGLSVDDVAAPKEAHSTDVLVKVEAAGICGTDLLIYKWGEFAKRMKLPTILGHEVSGVIEQVGSDVKGLRPGMRVSLESHLPCGTCYTCRRGWAHVCPKTRYPGVDFDGGFASFVVVPESVCWPVPCGIPPLQAAMMEPFGLAVHASLEGSGVSGLNVLVSGCGPIGLMNIAAAKALGASKVIATDIHPLRLTAAAKMGADECINAAEESVYKTVRSLLGERGVDVAIDYSGQAAALKELIQSITHGGELRLMGVPSHDILLNLEEWLFKGLIVRGLHGRRLYETWERSTSLLVTGRVDLSSLVSHRLPLSAAEDAFEMALNGQSLKILFEPNGSCI

SEQ ID NO: 5266 - DNA, 1062 bp, Candida sp
  CDS (1)..(1062)
atgtctactcctgaaaacttatcttttgttttacaaaagccttttgacgtcaagttcgaggatagacccatccccaagttgtctgatccttactctgtcaagatccaagtcaagaagactggtatctgtggtagtgatgttcattacttcacccatggagctattggtgactttgtcgtcaaggccccaatggtccttggtcacgaatccagtggtgttgtcttggaagtcggtagcgaggtcaagtcactcaaggttggtgacagagtcgctatggagcctggtgttcccagcagacactctgatgaatacaagtccggtagatacaacttgtgtcctcacatggcatttgctgctactcctccttatgatggtactctttgtaaatactatattcttcctgaagacttctgtgtcaagttacctgagcacgtttctttggaagagggtgctttagttgaacctttaagtgttgcggttcactcctctaagttgggtaacattaagcccggtagccatgttgccatttacggtgcaggacctgttggtttgttagttgccgcagtcgccagtgcttttggtgctgaatctgttactattattgatcttgttgaatctagacttaaccttgccaaggagttaggtgctactgccactgttcaagttgatttcaaggatactcctaaggagtctgctgctaaggttgttgccgctaacaacggaattgcccctgatgttgtcattgatgcttctggtgctgaggcttccattaatagtgctatcaatgccatcagacctggtggcacttacgttcaagtcggtatgggtaagcctgatgtctctttccccattgctactttaattggtaaggagcttactgttaagggatctttcagatatggttacggtgactaccctcttgctgtcagcttgcttgctagtggaaaagtcaatgttaaaaagttgattacccatgaagtcaagtttgaggatgctgctgaagctttccaattggttagagatggaaaggctatcaagtgcatcattaacggccctgagtaa

SEQ ID NO: 5267 - protein, 353 aa, Candida sp
MSTPENLSFVLQKPFDVKFEDRPIPKLSDPYSVKIQVKKTGICGSDVHYFTHGAIGDFVVKAPMVLGHESSGVVLEVGSEVKSLKVGDRVAMEPGVPSRHSDEYKSGRYNLCPHMAFAATPPYDGTLCKYYILPEDFCVKLPEHVSLEEGALVEPLSVAVHSSKLGNIKPGSHVAIYGAGPVGLLVAAVASAFGAESVTIIDLVESRLNLAKELGATATVQVDFKDTPKESAAKVVAANNGIAPDVVIDASGAEASINSAINAIRPGGTYVQVGMGKPDVSFPIATLIGKELTVKGSFRYGYGDYPLAVSLLASGKVNVKKLITHEVKFEDAAEAFQLVRDGKAIKCIINGPE

SEQ ID NO: 5268 - DNA, 1035 bp, Candidatus Kuenenia stuttgartiensis
  CDS (1)..(1035): transl_table=11
gtgaaggcggtagtgaaagcaaatcgtgccagtgggctggaattggtaaagatgccggaaccaaagcttggcccaaaagatgttttaattaaggttcaggttgcctctatatgcggaacggatgttcatatagatgactggacatattgggcgcagcagcgctttacgccgccccgtattataggccatgagtttgccggttatgtgcaggaggttgggaaggaggttacgtttgttaaagctggggagagggtttctgcggaaactcacatttcatgcggctactgctaccaatgcaagaatggatacagagaagtatgcagaaaaagtaaattgttagggattgattacgatggaacgttcgccgaataccttagcctgcctgagcatgtattgtggaaagatgatcctcgtattcctgatgaatgggcgacaattcaggagccgtttggaaatgctgttgacacggtaatgtctgaggatatatcttcaaaaacggtgcttattttgggggcaggtcccattggtctctttgccgtaggtatagcaagggcatgcggggcgtctctcattattgtttctgacccaaatgattatcggctggatatcggtaaaaagatgggtgcggatattgtggcgaatccgaaaaacacagatatcctgaattgtgtgctggaagcgacggagggaaatggcgtagatgtggttctggagttttccggcaataaactggcgcttgatcagggacttaagtctcttactcccggtggaagaatatcgattttggggatatatgaaacccctgttgatattgatctgaatagagaggttatttttaaaaaaatacgcatatatgggattaccggcagaaagatattttctacgtggtataagacgtccaggtttctgtcttccgggctggtggatcctggaccggttattacacacacgtttttactggaagattacgaaaagggcatgcagctaatgagagatggcatgtgtggaaaggttgttttgcaggtcatgccgtaa

SEQ ID NO: 5269 - protein, 344 aa, Candidatus Kuenenia stuttgartiensis
MKAVVKANRASGLELVKMPEPKLGPKDVLIKVQVASICGTDVHIDDWTYWAQQRFTPPRIIGHEFAGYVQEVGKEVTFVKAGERVSAETHISCGYCYQCKNGYREVCRKSKLLGIDYDGTFAEYLSLPEHVLWKDDPRIPDEWATIQEPFGNAVDTVMSEDISSKTVLILGAGPIGLFAVGIARACGASLIIVSDPNDYRLDIGKKMGADIVANPKNTDILNCVLEATEGNGVDVVLEFSGNKLALDQGLKSLTPGGRISILGIYETPVDIDLNREVIFKKIRIYGITGRKIFSTWYKTSRFLSSGLVDPGPVITHTFLLEDYEKGMQLMRDGMCGKVVLQVMP

SEQ ID NO: 5270 - DNA, 1047 bp, Pseudomonas putida
  CDS (1)..(1047): transl_table=11
atgctcgcgataaggaaaactaaagcagggccaggagggctatctgtcgatgatgtggccgcccctaaagaggcccacagtactgacgtgctggtgaaagttgaagcggccggtatctgtggtactgacttgttgatctataaatggggcgagttcgccaaaagaatgaaactccccactatcttgggtcatgaagttagcggggtgattgaacaggtcggatctgacgttaaaggtctaaggcctgggatgcgcgtcagtctggagagtcatctcccttgtggaacgtgctacacgtgtcgacgcggttgggcgcatgtttgtcctaatacgcggtatccgggggtcgactttgatggaggcttcgcgtctttcgtcgtggttccggagagcgtgtgttggccggtgccgtgcggaattcctccgctccaggcggcaatgatggagccgttcgggcttgcggtgcatgcaagtctggaaggttctggggtttcgggattgaatgttcttgtttctggttgcggtccgatcggacttatgaacattgcagccgccaaagcactgggagcaagcaaggtcattgcaactgacattcatcctctgcgcctcactgcagcagccaaaatgggggcggatgaatgcattaatgcaactgaagagagcgtttataagactgtgcgttcgctgctcggtgagaggggagtagatgttgcaattgactattccgggcaagcagcggcgttaaaggagcttattcaatccatcacccatggtggtgagttgcgactgatgggcgtcccgtcacatgatattttgctcaacctagaggagtggctttttaaaggccttattgtacgtggcctgcatggcaggcgtctgtttgaaacatgggagcgttcaactagcttactggttacagggcgtgttgatttgtcttcgctcgtatcgcatcgattgccactatcggcggcagaggatgcgttcgaaatggccttaaatggtgagtccttgaaaatcctgtttgagcccaatggcacatgtatctaa

SEQ ID NO: 5271 - protein, 348 aa, Pseudomonas putida
MLAIRKTKAGPGGLSVDDVAAPKEAHSTDVLVKVEAAGICGTDLLIYKWGEFAKRMKLPTILGHEVSGVIEQVGSDVKGLRPGMRVSLESHLPCGTCYTCRRGWAHVCPNTRYPGVDFDGGFASFVVVPESVCWPVPCGIPPLQAAMMEPFGLAVHASLEGSGVSGLNVLVSGCGPIGLMNIAAAKALGASKVIATDIHPLRLTAAAKMGADECINATEESVYKTVRSLLGERGVDVAIDYSGQAAALKELIQSITHGGELRLMGVPSHDILLNLEEWLFKGLIVRGLHGRRLFETWERSTSLLVTGRVDLSSLVSHRLPLSAAEDAFEMALNGESLKILFEPNGTCI

SEQ ID NO: 5272 - DNA, 1077 bp, Aspergillus niger
  CDS (1)..(1077)
atgagcacccagaacaccaacgctcagaatctttccttcgtcctcgagggaattcaccgcgtcaaattcgaagaccggccaatcccagagatcaacaatcctcacgacgtactggtgaatgtcaggttcacaggtatatgtggtagtgatgttcattattgggaacatggctccattggccaattcattgtcaaggatcccatggtcctgggacatgaatcttccggtgttgtcagcaaggttggctctgccgttaccagtctaaaggtaggagactgcgttgcaatggaaccaggaatcccatgtcgccgctgcgaaccatgcaaggcggggaaatataatctctgcgtgaaaatggctttcgcagcgacacctccatatgatggtaccttggccaagtattacgtcctgcccgaggacttttgctataagcttcctgaaagcatcaccctacaggagggtgcgatcatggagccccttagtgtcgccgtccatatcgttaaacaggctgggatcaacccgggtcaatcagtggtagtctttggtgctggccccgtcggacttctctgctgtgctgtggcgaaggcttacggtgcgtccaaggttatcgcggttgacattcaaaagggtaggctagactttgcgaagaagtatgcagcaactgccacgtttgagccagctaaagccgcagcgttggagaacgctcaacggataataaccgagaatgatctaggctcgggtgcagatgttgccattgacgcttcaggagcagagccctcggttcatacaggcattcacgttctgcgtgctgggggaacatatgtccagggcggtatgggtagaagcgaaatcacctttccaataatggcggcttgcaccaaagaactgaacgtcaagggcagcttccgttatgggagtggtgactataagcttgcagtctccttagtaagcgctggaaaggtgaacgtgaaggaattgatcacgggtgtcgtcaagttcgaggacgccgagcgagcattcgaagaagttagagctggaaagggcatcaaaacgcttattgctggtgtcgattcatag

SEQ ID NO: 5273 - protein, 358 aa, Aspergillus niger
MSTQNTNAQNLSFVLEGIHRVKFEDRPIPEINNPHDVLVNVRFTGICGSDVHYWEHGSIGQFIVKDPMVLGHESSGVVSKVGSAVTSLKVGDCVAMEPGIPCRRCEPCKAGKYNLCVKMAFAATPPYDGTLAKYYVLPEDFCYKLPESITLQEGAIMEPLSVAVHIVKQAGINPGQSVVVFGAGPVGLLCCAVAKAYGASKVIAVDIQKGRLDFAKKYAATATFEPAKAAALENAQRIITENDLGSGADVAIDASGAEPSVHTGIHVLRAGGTYVQGGMGRSEITFPIMAACTKELNVKGSFRYGSGDYKLAVSLVSAGKVNVKELITGVVKFEDAERAFEEVRAGKGIKTLIAGVDS

SEQ ID NO: 5274 - DNA, 1044 bp, Caenorhabditis briggsae
  CDS (1)..(1044)
atgtccgaagacaacctatcagctgtccttcatggggttgatgacctccgtctggagcaggttccaattccgaaaccaggatccaaacaggtcttggtccgagttcatactgtaggaatatgtggaagtgatgtgcattattggactcatggagccattggaccgtttgtggttaaagagccaatgattgttggccatgaaacatcaggagttgtatcagagatcggaagtgaggtgcaacacttgaaagttggtgatcgaattgcaatggaaccaggattgccatgcaaactttgtgagcattgtaaaactggaagatacaatttgtgtcctgaaatgagatttttcgccactcccccaatcaatggaacgctatccagatatgtcgtccatgatgctgacttttgcttcaagctacctgataatctctctttcgaagatggagctctgctagaaccactctcggttgctattcattcctgtcgtcgtggaaatgttcaaatgggtcatagagttttagtcctcggagctggtccgatcggtgttctaaatctgctaactgccaaatcagtgggagctggaaaagttgttatcaccgacctagacgacggtcgtctttccctcgccaagaagctgggagcagatgctacgattaatgtaaaaggcaagtcgttggaggccgtaagagcggagatcatcagcgcgttgggtggacagcagccacatgtctgtgtcgagtgtaccggtgcgcagccgagtattgagacggcgataactactaccaaatcaggtggagtcatagttcttgttggtctgggagccgatagagttgaaattccaattatcgaatcggccacaagagaggttgatatacgaggaatcttcagatatgttaattgttacccaactgccattgaacttcttagctctggaaaactggatctctcgggactgagtcgtgcccattacaaacttgaagagaccttggaagcctttaagagaactcaaaaagctgatgttatcaaagtctttattcaatgttaa

SEQ ID NO: 5275 - protein, 347 aa, Caenorhabditis briggsae
MSEDNLSAVLHGVDDLRLEQVPIPKPGSKQVLVRVHTVGICGSDVHYWTHGAIGPFVVKEPMIVGHETSGVVSEIGSEVQHLKVGDRIAMEPGLPCKLCEHCKTGRYNLCPEMRFFATPPINGTLSRYVVHDADFCFKLPDNLSFEDGALLEPLSVAIHSCRRGNVQMGHRVLVLGAGPIGVLNLLTAKSVGAGKVVITDLDDGRLSLAKKLGADATINVKGKSLEAVRAEIISALGGQQPHVCVECTGAQPSIETAITTTKSGGVIVLVGLGADRVEIPIIESATREVDIRGIFRYVNCYPTAIELLSSGKLDLSGLSRAHYKLEETLEAFKRTQKADVIKVFIQC

SEQ ID NO: 5276 - DNA, 1107 bp, Malus domestica
  CDS (1)..(1107)
atgggcaagggaggccaatcctgcaatggcatggttagagatgtcaaacctgtggagaaggaaaacatggctgcttggctcgttgatgttaacaccatcaagatcctacctttcaagctccccactattggaccgaatgatgttcaaattcgaattaaggctgtcggcatttgcggaagtgatgttcactacctcaagaccatgaaatgtgcggattttgaggttaaagagccgatggtgatcggacatcagtgtgctgggatcgtagacaaagttgggagcgaggtgaagcatctggtgcccggtgaccgagtggcggttgagcccggcatcagctgcgcacattgccagcagtgcaaaggaggccgctacaatctctgtcccgacatgaagtttttcgccaccccaccggttcacggtgccttggctaatcagattgtcgaccctgcagatctgtgctttaaactgcccgaaaacgtgagcttggaggaaggagcaatgtgtgagcccttgagtgttggggttcacgcttgtcggcgagccaatgttggtcccgaaacaactgttctgatcgtcggtgcagggccgattgggctggtttccgtgctcgctgctcgtgctttcggagcaccaagaattgtcatcgtagatatggatagtaagcgtttagccgtggccaagtctctgggagctgatggaaccgtcaaagtttcacgaaaaatggaggatttagatgacgaagttgccaagattaaagaaaccatgggagccgaagttgatgtgaccttcgactgtgtgggtttcaacaaaaccatgtctacgggcctcaatgctactcgtcccggcggcaaagtttgccttgtaggaatggggcacagcatgatgacagtccctctgacagccgctgcagccagggaggttgacgtggttggagttttccggtgtaagaacacatggcctctttgccttgagtttttgagaagcgggaagatcgacgtgaagccgcttattacccaccggtttggatttaccgagaaggaggtggaagaagcatttgcaaccagtgctcgtgggggtgacgccattaaagtcatgtttaatctatag

SEQ ID NO: 5277 - protein, 368 aa, Malus domestica
MGKGGQSCNGMVRDVKPVEKENMAAWLVDVNTIKILPFKLPTIGPNDVQIRIKAVGICGSDVHYLKTMKCADFEVKEPMVIGHQCAGIVDKVGSEVKHLVPGDRVAVEPGISCAHCQQCKGGRYNLCPDMKFFATPPVHGALANQIVDPADLCFKLPENVSLEEGAMCEPLSVGVHACRRANVGPETTVLIVGAGPIGLVSVLAARAFGAPRIVIVDMDSKRLAVAKSLGADGTVKVSRKMEDLDDEVAKIKETMGAEVDVTFDCVGFNKTMSTGLNATRPGGKVCLVGMGHSMMTVPLTAAAAREVDVVGVFRCKNTWPLCLEFLRSGKIDVKPLITHRFGFTEKEVEEAFATSARGGDAIKVMFNL

SEQ ID NO: 5278 - DNA, 1032 bp, Bacillus halodurans
  CDS (1)..(1032): transl_table=11
atgaaagcattagtaaaaacacaacatggcacgggccattttgccgtgcaagagaaacccgaaccaactccagggaaacatcaagtaaaaatcaaagtaaagtacacaggcgtttgtggttcagatattcatacctatgagggccattatcctgtagccgctccagtcacacttggtcatgaattttcaggtgagatcgttgaactcggtgaaggtgtaacaggctttaacgttggcgaccgagtaacatcagaaacgacctactcgatttgcggtaaatgctcatattgcacctcgggtgactataatctttgctctcaccggaaaggacttgggaatcagcaggatggcagttttgctaaatacgtaatcgcgcgacaagagagtttgcaccatctccctgctggtgtggatgatcgctcagcagccatgacagagcccctcgcatgtacacatcatgcgattgcaaaaaccagcatcaacaaaggggacttagttgtcgttactggtcctggtccgattggtttgttagcagctcaagttgcaaaaagtcacggtggaacagtgattattacaggtctatccaatgatcaagtccgattaaaaaaagcaaaggaagtcgggatcgattacgccatcgatacacaggaagtggacataaaagagcttgtctccgagcttacagacggctatggtgcagatgtcgttttagaatgttctggcgctgtgccagccgcaaaacaagggattgatcttttacgcaagaaaggacaatatgcccaagtcggcttatttgcccagcccgagatccaatttaattttgagaaaattattcaaaaagagatttccgtcgttgggagtagaagtcaaaaacctgcggattgggagcctgccctctcacttcttaatgaaaaaaaagtaaatgccaaaacactcgtcacccatgaatacacaatttctgaatgggataaggcctatcacgcgattaaaagtggtgaggctatcaaagtattattgacacctattgattag

SEQ ID NO: 5279 - protein, 343 aa, Bacillus halodurans
MKALVKTQHGTGHFAVQEKPEPTPGKHQVKIKVKYTGVCGSDIHTYEGHYPVAAPVTLGHEFSGEIVELGEGVTGFNVGDRVTSETTYSICGKCSYCTSGDYNLCSHRKGLGNQQDGSFAKYVIARQESLHHLPAGVDDRSAAMTEPLACTHHAIAKTSINKGDLVVVTGPGPIGLLAAQVAKSHGGTVIITGLSNDQVRLKKAKEVGIDYAIDTQEVDIKELVSELTDGYGADVVLECSGAVPAAKQGIDLLRKKGQYAQVGLFAQPEIQFNFEKIIQKEISVVGSRSQKPADWEPALSLLNEKKVNAKTLVTHEYTISEWDKAYHAIKSGEAIKVLLTPID

SEQ ID NO: 5280 - DNA, 1041 bp, Bacillus licheniformis
  CDS (1)..(1041): transl_table=11
ttggacggaaatatgaaagcgcttatcaagaagccgggggagccgggcgccagcttcgagctcgtcccgattccgaagatcgacaaacacgaggtcctgatcaaagtcaaagccgcatcgatttgcggaaccgatgtccatatttataattgggatgaatgggcgaaaagcagggttaaaccgccttatgtgttcggccacgaattttccggcgaagttgttcaagtgggggaaaatgtgactacggtaaaagaaggggagtatgtttcggcagaaacgcacatcgtttgcggaaagtgcctgccgtgtttgaccggaaaagagcatgtctgcaaaaaaacgctgattctcggtgtcgatacagacggctgttttgctgaatatgtcaaaatgcccgccgcaaacatttggaaaaacccggccggcatgcctgaggatctcgcttctattcaagaaccgctcggaaatgccgtgcatacggttctgacgggaatgacggctggagtgaaagtcgctgtcgtcggctgcggaccgatcggactgatggccgtggcagttgcaaaagcgtctggggcggcgcaggtgatcgccatcgataaaaatgaatacaggctcgaccttgcattgcaaatgggggcaaccgatatcatctccgttgaaaaagaagatccgctcaaaaatgtaagcgctttaacaaatggtgaaggggcggacttggtttgcgaaatgtcaggccatccgacggcaatccgccaaagtttaaaaatggcggcaaacggaggacgggttcatgtcttaagcttgcctgagcatcccgtatgcatcgacatgacaaatgatatcgtctttaaaggattgacggtccaaggaattaccggccgcaaaatgtttgaaacgtggagacaggtcagcggtctcctccaatccggcacgattcaaatcaagcctgtcatcactcaccgtttcccgatggaagagtttgaaaaaggctttgaactgatgagaaaagggcaatgcggcaaagtcgtactgataccgtag

SEQ ID NO: 5281 - protein, 346 aa, Bacillus licheniformis
MDGNMKALIKKPGEPGASFELVPIPKIDKHEVLIKVKAASICGTDVHIYNWDEWAKSRVKPPYVFGHEFSGEVVQVGENVTTVKEGEYVSAETHIVCGKCLPCLTGKEHVCKKTLILGVDTDGCFAEYVKMPAANIWKNPAGMPEDLASIQEPLGNAVHTVLTGMTAGVKVAVVGCGPIGLMAVAVAKASGAAQVIAIDKNEYRLDLALQMGATDIISVEKEDPLKNVSALTNGEGADLVCEMSGHPTAIRQSLKMAANGGRVHVLSLPEHPVCIDMTNDIVFKGLTVQGITGRKMFETWRQVSGLLQSGTIQIKPVITHRFPMEEFEKGFELMRKGQCGKVVLIP

SEQ ID NO: 5282 - DNA, 1044 bp, Bacillus subtilis
  CDS (1)..(1044): transl_table=11
atgcagagtggaaagatgaaagctctaatgaaaaaggacggggcgttcggtgctgtgctgactgaagttcccattcctgagattgataaacatgaagtcctcataaaagtgaaagccgcttccatatgcggcacggatgtccacatttataattgggatcaatgggcacgtcagagaatcaaaacaccctatgttttcggccatgagttcagcggcatcgtagagggcgtgggagagaatgtcagcagtgtaaaagtgggagagtatgtgtctgcggaaacacacattgtctgtggtgaatgtgtcccttgcctaacaggaaaatctcatgtgtgtaccaatactgctataatcggagtggacacggcaggctgttttgcggagtatgtaaaagttccagctgataacatttggagaaatcccgctgatatggacccgtcgattgcttccattcaagagcctttaggaaatgcagttcataccgtactcgagagccagcctgcaggaggaacgactgcagtcattggatgcggaccgattggtcttatggctgttgcggttgcaaaagcagcaggagcttctcaggtgatagcgattgataagaatgaatacaggctgaggcttgcaaaacaaatgggagcgacttgtactgtttctattgaaaaagaagacccgctcaaaattgtaagcgctttaacgagtggagaaggagcagatcttgtttgtgagatgtcgggccatccctcagcgattgcccaaggtcttgcgatggctgcgaatggcggaagatttcatattctcagcttgccggaacatccggtgacaattgatttgacgaataaagtggtatttaaagggcttaccatccaaggaatcacaggaagaaaaatgttttcaacatggcgccaggtgtctcagttgatcagttcaaacatgatcgatcttgcacctgttattacccatcagtttccattagaggagtttgaaaaaggtttcgaactgatgagaagcgggcagtgcggaaaagtaattttaattccataa

SEQ ID NO: 5283 - protein, 347 aa, Bacillus subtilis
MQSGKMKALMKKDGAFGAVLTEVPIPEIDKHEVLIKVKAASICGTDVHIYNWDQWARQRIKTPYVFGHEFSGIVEGVGENVSSVKVGEYVSAETHIVCGECVPCLTGKSHVCTNTAIIGVDTAGCFAEYVKVPADNIWRNPADMDPSIASIQEPLGNAVHTVLESQPAGGTTAVIGCGPIGLMAVAVAKAAGASQVIAIDKNEYRLRLAKQMGATCTVSIEKEDPLKIVSALTSGEGADLVCEMSGHPSAIAQGLAMAANGGRFHILSLPEHPVTIDLTNKVVFKGLTIQGITGRKMFSTWRQVSQLISSNMIDLAPVITHQFPLEEFEKGFELMRSGQCGKVILIP

SEQ ID NO: 5284 - DNA, 1032 bp, Burkholderia mallei
  CDS (1)..(1032): transl_table=11
atgaaagcgctggcgaaactcgaacgcgggccgggcctcacgctcacccgtgtgaaaaagccggaggtcggccacaacgacgtcctcatcaagatccgccgcaccgcaatctgcggcaccgacatccatatctggaagtgggacgactgggcgcagaagacgattccggtgccgatgcacgtcggccacgagtacgtcggcgagatcgtcgagatgggccaggaagtgcgcggcttctcgatcggcgatcgcgtatccggcgaaggccacatcacgtgcggcttctgtcggaactgccgcgcggggcggcgccatttgtgccgcaacacggtgggcgtcggcgtgaatcgcgaaggcgcgttcgccgagtacctcgcgattcccgcgttcaacgcgttcaagattccgcccgagatctccgacgatctcgccgcgatcttcgatccgttcggcaacgcgacgcacaccgcgctgtcgttcaacctcgtcggcgaggacgtgctgatcacgggtgcggggccgatcggcgtgatggcggtggcgatcgcgaagcacgtcggcgcgcgcaacgtcgtcatcaccgacatcaacgactatcgcctcgaactcgcgcgcaagatgggcgcgacacgcgcggtgaacgtgtcgcgcgaatcgctgcgcgacgtgatggccgacctgcacatgacggagggcttcgacgtcgggctcgagatgtccggcgtgccgagcgcgttcacgtcgctgctcgaatcgatgaatcacggcggcaaggtcgcgctgctcggcattccgcccgcgcagaccgcgatcgactggaaccaggtgatcttcaagggcctcgagatcaagggcatctatgggcgcgagatgttcgagacgtggtacaagatggtcgcgatgctgcaaagcgggctcgatctttcgccgatcatcacgcaccgcttcgccgtggacgactacgagaaaggtttcgctgcgatgctgtcgggcgaaagcggcaaggtgattctcgactgggccgacgcgtga

SEQ ID NO: 5285 - protein, 343 aa, Burkholderia mallei
MKALAKLERGPGLTLTRVKKPEVGHNDVLIKIRRTAICGTDIHIWKWDDWAQKTIPVPMHVGHEYVGEIVEMGQEVRGFSIGDRVSGEGHITCGFCRNCRAGRRHLCRNTVGVGVNREGAFAEYLAIPAFNAFKIPPEISDDLAAIFDPFGNATHTALSFNLVGEDVLITGAGPIGVMAVAIAKHVGARNVVITDINDYRLELARKMGATRAVNVSRESLRDVMADLHMTEGFDVGLEMSGVPSAFTSLLESMNHGGKVALLGIPPAQTAIDWNQVIFKGLEIKGIYGREMFETWYKMVAMLQSGLDLSPIITHRFAVDDYEKGFAAMLSGESGKVILDWADA

SEQ ID NO: 5286 - DNA, 1026 bp, Chromobacterium violaceum
  CDS (1)..(1026): transl_table=11
atgaaggcgcttgccaagctgaaggccgctcccggcctggaaatgaccgatgttccgctgccggaagtcggccacaacgatctgttgatcaagatcgtcaagaccgcgatctgcggcaccgacatccatatctggaactgggacgagtggtcgcagaagaccatcccggtgccgatgcacgtcgggcacgagtacgtcggcgtcgtcgccggcatgggttcggaagtgcagggcttcaagatcggccagcgcgtgtccggcgaaggccacatcacctgcggctattgccgcaactgccgcgccggccgccgccacctgtgccgcaacaccaccggcgtcggcgtcaaccgcgaaggcgcgttcgccgaatacctggtgattccggccttcaatgccttcccgatcccggacgacatctccgacgacctggcctccatcttcgacccgttcggcaatgccgtgcacaccgcgctgtcgttcaacctggtgggcgaggacgtgctgatcacaggcgccggcccgatcggcatcatggcggtggccatcgccaagcatgtcggcgcgcgccatgtcgtcatcaccgacgtcaacgactaccggctggagctggcgaagaagatgggcgccacccgtgccgtcaacgtcgcccgcgaggacctgaaggcggtgatgcaggagctgcacatgagcgagggcttcgacgtgggcctggaaatgtccggcaatccgcaggctttccgccagatgctggaaacgatgaaccacggcggcaaggtggcgctgctgggcattccgccgtccaataccgccatcgactggaaccaggtgatcttcaagggcctggaaatcaagggcatttacggccgcgagatgttcgagacctggtacaagatggtggccctgatccagtccggcctggacatcagtcctatcatcacccaccacttcaaggtggacgagttcgagcagggcttcgccgcgatgctgtccggccagagcggcaaggtgatcctggactggcgctga

SEQ ID NO: 5287 - protein, 341 aa, Chromobacterium violaceum
MKALAKLKAAPGLEMTDVPLPEVGHNDLLIKIVKTAICGTDIHIWNWDEWSQKTIPVPMHVGHEYVGVVAGMGSEVQGFKIGQRVSGEGHITCGYCRNCRAGRRHLCRNTTGVGVNREGAFAEYLVIPAFNAFPIPDDISDDLASIFDPFGNAVHTALSFNLVGEDVLITGAGPIGIMAVAIAKHVGARHVVITDVNDYRLELAKKMGATRAVNVAREDLKAVMQELHMSEGFDVGLEMSGNPQAFRQMLETMNHGGKVALLGIPPSNTAIDWNQVIFKGLEIKGIYGREMFETWYKMVALIQSGLDISPIITHHFKVDEFEQGFAAMLSGQSGKVILDWR

SEQ ID NO: 5288 - DNA, 1029 bp, Coxiella burnetii
  CDS (1)..(1029): transl_table=11
atgaaagtactttccaaactaaaaccagcccctggcctctggctccacaaggcaccaacgcctaaacccggccgggacgaagtattaattaaaattaaaaaaaccgccatttgcggcacggatttgcatatttataaatgggatgaatgggcgcaaaaaaccattcctgtccccatgcacgtcggccatgaatttgttggtgaaatcgtggaggtaggcgaggccgctagcgcgttggcggttggagatcgggtttcaggggaaggacacatcacgtgcggggattgtcgtaattgtcgcgccggtaagcgccatttgtgtcgctacaccgtaggcgttggcgtaaatcgtcccggcgcgtttgcggaatatttagttatccccgctaaaaatgcgtataaaattccggcaaaaattagcgatgatatcgctgccattttagatcctttcggcaacgccgcacattccgcgttggagtttgatttagtgggcgaagatgtattaattaccggcgcaggccccgtcggattgatgtcagcagccattgcgcggcacgtcggggcgcggcatgtagtgataacggatgtcaatgattaccgtttagctttagccgaaaaagtgggcgtaaccgctgccgttaactcgacaaaaactcccttaacggagacgatgaaaaatcttgggatgacagagggttttgatgtcggtcttgaaatgtcaggaaacgctgaggcttttcgcagcatgttaacggtaatgaataacggcgggaaaatcgcctttttgggtatcccaccggaaccgtttgcgattgattggaatcaagtcgttttcaaaagcttattgataaaagggatttatggacgccgcatgtttgagacgtggtataaaatgactaatttattactaagcgggttagacatttcacccatcatcacgcatgagtttccgatgaaggattttcaacaagcatttgatgtaatgctgtcgggtaaaacaggcaaagtgattttgaattgggagcaatga

SEQ ID NO: 5289 - protein, 342 aa, Coxiella burnetii
MKVLSKLKPAPGLWLHKAPTPKPGRDEVLIKIKKTAICGTDLHIYKWDEWAQKTIPVPMHVGHEFVGEIVEVGEAASALAVGDRVSGEGHITCGDCRNCRAGKRHLCRYTVGVGVNRPGAFAEYLVIPAKNAYKIPAKISDDIAAILDPFGNAAHSALEFDLVGEDVLITGAGPVGLMSAAIARHVGARHVVITDVNDYRLALAEKVGVTAAVNSTKTPLTETMKNLGMTEGFDVGLEMSGNAEAFRSMLTVMNNGGKIAFLGIPPEPFAIDWNQVVFKSLLIKGIYGRRMFETWYKMTNLLLSGLDISPIITHEFPMKDFQQAFDVMLSGKTGKVILNWEQ

SEQ ID NO: 5290 - DNA, 1086 bp, Erwinia carotovora subsp
  CDS (1)..(1086): transl_table=11
atgaaagcattggcaaaattgcgaccggaagaaggtatctggatgatggatgcccccatgccagaactcgggcataacgacatcatgattaaaatccgcaaaagcgcgatttgcggaacggatgtgcatatctataactgggacgaatggtcgcagaagaccattcctgttccgatggtcgtcgggcatgagtacgtgggtgaaattgtcgcgattggtcaggaagttaacggttttcatattggcgaccgggtttctggtgaggggcatattacctgtggctactgccgtaactgtcgcgctgggagacgtcacttatgccgcaatgccatcggtgtcggggtaaaccgtcccggttcgttcgcggaatatctggtgattcctgcctacaatgcatttcgcattcccgacaatatttctgacgaattggccgctattttcgaccctttcggtaacgccgtgcataccgcactttccttcgatttagtgggggaagatgtgttgattacaggggcagggccgataggcatgatggccgcggcggtgtgccgtcacgttggtgcaaggaatgtcgtgattaccgatgtgaatgcgtaccgtctggagctggctagtaaaatgggggcaacgcgtgccgtcaatgtggcagaggaaaagctgactgacgtgatgatagaactgggtatgaccgagggatttgatattgggttagaaatgtcgggcgcaccatcggcctttcgcgcgatgctgaaagcgatgaatcacggtgggcgaatcgccatgctgggcattccgcacgaaccgatgtcgattgactggggcgaagtgatttttaagggattgtttattaaaggcatctacggacgggaaatgttcgaaacctggtacaaaatgtctgcgctgattcagtccggactggatttgtccccgattatcacccaccgctttcacattgatgagtttcaaaaagggttcgatgccatgcgctcaggtcagtcgggcaaggttattctcaattgggatgaggcatatactcgtcatacttcgagttgcatgtgcgttgactgcgctactcggcatacttaa

SEQ ID NO: 5291 - protein, 361 aa, Erwinia carotovora subsp
MKALAKLRPEEGIWMMDAPMPELGHNDIMIKIRKSAICGTDVHIYNWDEWSQKTIPVPMVVGHEYVGEIVAIGQEVNGFHIGDRVSGEGHITCGYCRNCRAGRRHLCRNAIGVGVNRPGSFAEYLVIPAYNAFRIPDNISDELAAIFDPFGNAVHTALSFDLVGEDVLITGAGPIGMMAAAVCRHVGARNVVITDVNAYRLELASKMGATRAVNVAEEKLTDVMIELGMTEGFDIGLEMSGAPSAFRAMLKAMNHGGRIAMLGIPHEPMSIDWGEVIFKGLFIKGIYGREMFETWYKMSALIQSGLDLSPIITHRFHIDEFQKGFDAMRSGQSGKVILNWDEAYTRHTSSCMCVDCATRHT

SEQ ID NO: 5292 - DNA, 1056 bp, Francisella tularensis subsp
  CDS (1)..(1056): transl_table=11
atgaaagcattagctaaattaaaaaaacaaccaggtatatggataattaatgatgcgccaataccagaatatggctacaatgatgttttgattaaaattaaaaaaacggctatttgtggtactgatttacatatttataattgggataaatggtcgcaaaacaccattccagttccaatgattaccggacatgagtttgctggtgaagttgtagctaaaggagatggtgttacaagcgtagatatcggcgatagagtgtcaggtgagggtcatcttgtatgtgggcaatgccgtaattgcagagcaggtaaacgtcacctttgtagaaaaactataggtataggagtaaatgtacagggtgcatttgcagaatatctagttatgcctgcggttaatgtttttaagatccctgattctatcagtgatgatatcgctagtacttttgatcctatgggcaatgctattcacaccgcactttcttttaacttaacaggtgaggatgtccttataactggtgctggacctattggcttaatggctgtcaaaatagcaagattctgtggtgcacgcagaatagtaatcacagatattaatgagtatcgcctacaaatggctagggattttggtgcaactgttgctttgaatgttgctccatttaagaatcaagatgagttagtaaaacaaatgcgcaaagttatgtcagatatcggcatgacagaaggatttgatgttggtctagaaatgtctggaattaactctgcaatctcaatgatgcttgatgttatgaatcatggtggtaaactatcacttctaggcatatctgctggtgatatttctgttgattggggagctatattgtttaagggtctgactctcaagggtatatatggtagagaaatgtttgaaacatggtacttaatgactagtatgctccaagctggtatggatatgaaccctatcatcacacatcgacttcatattgatgagtttcaaaaaggatttgaaataatgaaaagtggtcaatgtggtaaagtaatactggattggagtagctag

SEQ ID NO: 5293 - protein, 351 aa, Francisella tularensis subsp
MKALAKLKKQPGIWIINDAPIPEYGYNDVLIKIKKTAICGTDLHIYNWDKWSQNTIPVPMITGHEFAGEVVAKGDGVTSVDIGDRVSGEGHLVCGQCRNCRAGKRHLCRKTIGIGVNVQGAFAEYLVMPAVNVFKIPDSISDDIASTFDPMGNAIHTALSFNLTGEDVLITGAGPIGLMAVKIARFCGARRIVITDINEYRLQMARDFGATVALNVAPFKNQDELVKQMRKVMSDIGMTEGFDVGLEMSGINSAISMMLDVMNHGGKLSLLGISAGDISVDWGAILFKGLTLKGIYGREMFETWYLMTSMLQAGMDMNPIITHRLHIDEFQKGFEIMKSGQCGKVILDWSS

SEQ ID NO: 5294 - DNA, 1026 bp, Idiomarina loihiensis
  CDS (1)..(1026): transl_table=11
atgaaagctttatcaaaactgcacgcaaaacccggcatttggatgaccgacgtggaaaagccggaatgcggttacaacgatttgctgattaaaattaagaaaaccgccatttgcggtaccgatgttcacatttataaatgggacgactggtcgcagaaaaccattccggtgcctatggtggtcggccacgagtacgtgggtgaagttgccgctatgggcgacggtgttcgtggctttgaaattggcgaccgcgtttccggagaaggtcacattacctgtggtcactgtcgtaactgtcgcgccggccgtcgtcacttatgccgcaatacctatggtgtgggtgtgaatcgtccgggtgcttttgcagaatacctggcactgccagctgaaaacgcttttaaacttccagatgacgttactgatgaaatggcagctgtatttgacccatttggtaatgcggttcacaccgccctggcttttgacctggtgggtgaagacgtgctgattaccggtgcgggtcctattggtattatggcagcagccgttgcccgtcacgttggcgcacgccacgtggttattaccgacgtcaacgaataccgcctggacttagctcgtaaaatgggcgttacccgcgcagtggacgttagcaaagagaagctgtccgacgtaatgactgaactaggcatgaaagaaggttttgatgtgggtctggaaatgtcaggtgtgccatcagctttctcacaaatgctggaaaccatgaaccatggcggcaaaattgccatgctgggcattccgcctgaaaatatcgctatagactggaaccaggttatttttaaaggtctggttattaaaggcatttatggccgcgagatgtttgaaacctggtacaaaatggccagcttgctgcagtccgggctggatatttcgcctattttaacgcacgaaatgcctattgatgactttgagaaaggctttgaaaccatgatttcaggccagtccggcaaagtcatactgaactgggattaa

SEQ ID NO: 5295 - protein, 341 aa, Idiomarina loihiensis
MKALSKLHAKPGIWMTDVEKPECGYNDLLIKIKKTAICGTDVHIYKWDDWSQKTIPVPMVVGHEYVGEVAAMGDGVRGFEIGDRVSGEGHITCGHCRNCRAGRRHLCRNTYGVGVNRPGAFAEYLALPAENAFKLPDDVTDEMAAVFDPFGNAVHTALAFDLVGEDVLITGAGPIGIMAAAVARHVGARHVVITDVNEYRLDLARKMGVTRAVDVSKEKLSDVMTELGMKEGFDVGLEMSGVPSAFSQMLETMNHGGKIAMLGIPPENIAIDWNQVIFKGLVIKGIYGREMFETWYKMASLLQSGLDISPILTHEMPIDDFEKGFETMISGQSGKVILNWD

SEQ ID NO: 5296 - DNA, 1029 bp, Parachlamydia sp
  CDS (1)..(1029): transl_table=11
atgaaaggtttagtcaagaaaatatcagctcccggtctttggatggaaaatctgccaataccgtcgcatgtgaaagatgatgaagttctgattaaaacaattaaaacatccatctgtggcaccgatgttcatatttataaatgggatgcttgggcgcagaaaaatgttcctgtgcctttggtgattggtcatgaatttatcggtgaaatagcagaatttggaaaaaatgttaaaggatttaaaattggagaacgagtatgcggggaaggacatatcgtttgtaatcaatgcccaaattgccgcatgggtcgtaagcatgtctgcatgcacacgaaagggctaggttatcatatttctggctgctttgctgaatattttgttcttcctgcagaaaatgttttttctctacccccttccatttctgatgatttaggcgccatcttcgacccttacggaaatgctgtccatactacgctcgcctttaatcttattggtgaagatgttcttattacaggtgctggcccaattggaatcatggcagccgccattgctaaacaagctggtgcaagacatattgtcatcacagatgtaaacgattatcgtctagaccttgcaagaactatgggtgtctcgcatgctattaatgttaatcgagaatctttagataattttatgcaatctctaggaatcaaatatggctttacagttggacttgagatgtctggccatcctgacggactaaaaactttaacggaaaaaattcgacatggaggaaacatcgcattacttggcattctcccaccagctacttctattgactggaatttagttatttttaaaatgttaactttaaaagggatttatggaagagaaattttctcaacctggtatcagatggttcaccttctggaaattggcttaaatttagctcctatcattacccatcatttttcagttgataattttgaaaaaggatttgaagtgatgttatcaggccaatcaggtaaagtgattcttgattgggtttaa

SEQ ID NO: 5297 - protein, 342 aa, Parachlamydia sp
MKGLVKKISAPGLWMENLPIPSHVKDDEVLIKTIKTSICGTDVHIYKWDAWAQKNVPVPLVIGHEFIGEIAEFGKNVKGFKIGERVCGEGHIVCNQCPNCRMGRKHVCMHTKGLGYHISGCFAEYFVLPAENVFSLPPSISDDLGAIFDPYGNAVHTTLAFNLIGEDVLITGAGPIGIMAAAIAKQAGARHIVITDVNDYRLDLARTMGVSHAINVNRESLDNFMQSLGIKYGFTVGLEMSGHPDGLKTLTEKIRHGGNIALLGILPPATSIDWNLVIFKMLTLKGIYGREIFSTWYQMVHLLEIGLNLAPIITHHFSVDNFEKGFEVMLSGQSGKVILDWV

SEQ ID NO: 5298 - DNA, 1026 bp, Photorhabdus luminescens subsp
  CDS (1)..(1026): transl_table=11
atgaaagcattgtcaaagttaaaagcagaagaaggcatctggatgatcgatgtgcccgagccagagctggggcacaatgatgtgatgatcaaaatccgtaaaacagcgatttgtggtacggatgtgcacatctataactgggatgattggtcacaaaaaaccattcctgtaccgatggttgtcggtcatgaatatgttggtgaagttgttgccattggtcaggaagtaaaaggttttaaaattggtgatcgggtgtctggcgaagggcatattacttgtggttactgccgtaactgtcgtggtggccgtactcacttatgccgtaataccattggcgtaggggtaaaccgcgctggttgttttgcacaatatctggttattcctgcatttaatgcgttcaaaattccagataacatctctgatgaactggctgctatttttgacccatttggcaatgctgttcataccgcgctttcgtttgatctggttggtgaagatgtgctggtttctggtgctggcccaattggtattatggcggcggcagtatgtaaacatgttggcgcgcgtcatgttgtcatcaccgacgttaacgaatatcgccttgagttggcacgtaaaatgggtgtcacccgtgcggtgaacgttagtcaggaaaatctgaccgatgtcatggcggaattgggcatgacggaaggttttgatgttggtttggaaatgtctggtgccccggcggcgtttcgtaccttattaaataccatgaatcacggcggccgtgttgcattgttgggcattcctccatcagatatggcaattgattggaatcaggtgatttttaagggattgtttatcaaaggtatttatggccgtgagatgtttgaaacctggtacaaaatggctacattaatccagtctggtttggatctgacacccattatcacccaccggttctctatcgatgatttccagaaaggctttgacatcatgcgttcagggcagtctggtaaagttattctgaactgggattaa

SEQ ID NO: 5299 - protein, 341 aa, Photorhabdus luminescens subsp
MKALSKLKAEEGIWMIDVPEPELGHNDVMIKIRKTAICGTDVHIYNWDDWSQKTIPVPMVVGHEYVGEVVAIGQEVKGFKIGDRVSGEGHITCGYCRNCRGGRTHLCRNTIGVGVNRAGCFAQYLVIPAFNAFKIPDNISDELAAIFDPFGNAVHTALSFDLVGEDVLVSGAGPIGIMAAAVCKHVGARHVVITDVNEYRLELARKMGVTRAVNVSQENLTDVMAELGMTEGFDVGLEMSGAPAAFRTLLNTMNHGGRVALLGIPPSDMAIDWNQVIFKGLFIKGIYGREMFETWYKMATLIQSGLDLTPIITHRFSIDDFQKGFDIMRSGQSGKVILNWD

SEQ ID NO: 5300 - DNA, 1038 bp, Propionibacterium acnes
  CDS (1)..(1038): transl_table=11
atgaaggccttggtcaagacccgcccggagccgggtctggagctggtggaggtccccgacccggtcgctggccccaacgacgtcatcgtcaaggtgatgcggacaggaatctgtggcaccgacgttcacatcgataaatgggacgggtgggccgccaagacggtgcacaccccgctggtcctcggccacgagttctgcggtgagattgttgaactcggttcggaggtcaatgatctggaggtcggacagttcgtctccggcgaggggcactatgtctgcggacgctgccgggcctgcctagcgggcaaacgtcacctgtgccgcaacacccaaggtattggatatgcggtcaacggtgcctactgccagtacttcgtcatgccggctggcaacgtctgggtacatcacatcccggaccttgaccccgacgtcgcggcgatctttgacccgttcggcaatgccgtacacaccgccttgcagttcccctgcctggccgaggatgtcctcgtttcaggtgctgggccgatcggcatcatggcggccctggtcgctcagttccaaggggcgcgcaatgtcgtcgttaccgacctgtccgacgagaggctggagctggctcagcaactgggcctgaagaacgccgtcaatgtttcccgcgaaggtttggagacggtctgggaccgattcgacatgaaggaggggtttgacatcggcctggagatgtccgggtcggggacagctttaacatccatgattgacaatatgactcatggtggacggattgcgttgctgggaaccccgagcactgacatcaccctcgacttttccaagatcatctttaacatgatcacaattcagggagtgaccgggcgtcagatcttcgaaacgtggtacaccatggcctccctcatccgttccggtctggacatctccggaatcatcaccgaccgataccccatcacggaattccgggaagcctttgacgtcgcaggctcgggccacggcggcaaggttgtcatgaactgggaatgcctcgactga

SEQ ID NO: 5301 - protein, 345 aa, Propionibacterium acnes
MKALVKTRPEPGLELVEVPDPVAGPNDVIVKVMRTGICGTDVHIDKWDGWAAKTVHTPLVLGHEFCGEIVELGSEVNDLEVGQFVSGEGHYVCGRCRACLAGKRHLCRNTQGIGYAVNGAYCQYFVMPAGNVWVHHIPDLDPDVAAIFDPFGNAVHTALQFPCLAEDVLVSGAGPIGIMAALVAQFQGARNVVVTDLSDERLELAQQLGLKNAVNVSREGLETVWDRFDMKEGFDIGLEMSGSGTALTSMIDNMTHGGRIALLGTPSTDITLDFSKIIFNMITIQGVTGRQIFETWYTMASLIRSGLDISGIITDRYPITEFREAFDVAGSGHGGKVVMNWECLD

SEQ ID NO: 5302 - DNA, 1047 bp, Pyrococcus abyssi
  CDS (1)..(1047): transl_table=11
atgtccgagaagatggtagctatcatgaagacgaaaccggcttacggcgctgagctcgtcgaggttgatgttccaaagccaggacctggggaggttctaataaaagttatagcgactagcatttgtggaacagacctacacatctatgagtggaacgagtgggcccaatcaaggataaagcccccacagataatgggtcatgaggttgccggtgaagtagttgaggtgggcccgggagttgagggaattgaggttggagattacgtaagcgttgaaacccacatagtttgtgggaaatgctacgcgtgtagaaggggacagtaccatgtttgtcaaaacacgaagatattcggtgtagacaccgatggtgtatttgctgagtacgcggtggttccagctcaaaacgtttggaagaatccaaagtcaattcctccggagtacgcaacccttcaagaaccacttggaaatgcagttgatactgttctggccgggccaatctctggaaagagcgttttgataactggagctggcccccttggcttacttggaattgcggtggcgaaggcctccggggcttatccggtgatagtttccgagccgagcgatttcaggagagagctagctaagaaggtcggtgcagattacgtgataaatccattcgaggaagacgtcgttaaggaagtcatggacataacggatggaaatggagttgacgtgttccttgagttcagcggagctcctaaggctttagaacagggacttcaggctgttacaccagctggaagagtatccctcctgggcctttacccagggaaggttagcatagacttcaacaatctgataatcttcaaggctctaactgtttatggaatcacaggtaggcacctctgggagacatggtacacagtttctaggctactccagagcggaaagcttaacttggacccaataataacccacaagtacaagggattcgacaagtacgaggaagccttcgagctaatgagggctggaaagacgggtaaggtagtcttcatgctcaagtga

SEQ ID NO: 5303 - protein, 348 aa, Pyrococcus abyssi
MSEKMVAIMKTKPAYGAELVEVDVPKPGPGEVLIKVIATSICGTDLHIYEWNEWAQSRIKPPQIMGHEVAGEVVEVGPGVEGIEVGDYVSVETHIVCGKCYACRRGQYHVCQNTKIFGVDTDGVFAEYAVVPAQNVWKNPKSIPPEYATLQEPLGNAVDTVLAGPISGKSVLITGAGPLGLLGIAVAKASGAYPVIVSEPSDFRRELAKKVGADYVINPFEEDVVKEVMDITDGNGVDVFLEFSGAPKALEQGLQAVTPAGRVSLLGLYPGKVSIDFNNLIIFKALTVYGITGRHLWETWYTVSRLLQSGKLNLDPIITHKYKGFDKYEEAFELMRAGKTGKVVFMLK

SEQ ID NO: 5304 - DNA, 1047 bp, Pyrococcus furiosus
  CDS (1)..(1047): transl_table=11
atgtccgagaagatggttgctatcatgaagacaaaaccagagtacggtgcagagttagttgaagtagatgtaccaaaacctgggccaggggaagtcctaataaaaattcttgcaacaagcatatgtggaactgacctgcacatttatgaatggaatgaatgggctcagacaagaattaggccacctcagataatggggcatgaggttgcaggagaggttgtggaagttggtccaggtgtagagggaattgaagttggtgattacgtttctgttgagactcacatagtctgtggaaagtgttacgcatgtaaaagagggcaatatcacgtatgtcaaaacacaaagatatttggagtagatactgacggtgtttttgccgaatatgcagtagttccagcacaaaacgtctggaagaatccaaagaacatacctcccgaatatgctactctacaagagccattgggaaatgctgtggatacagtacttgctggcccaattgccggaaagagcgttctcattactggagcaggtcccctgggacttcttggaatagcagtggcaaaggcatccggagcctatcctgtgatagtttctgagccaagtgaatttagaagaaacttggcaaagaaggtgggtgcagactacgtaataaatccatttgaagaagatgttgtaaaggaggtaatggacataaccgacggaaacggagttgatgtgttcttggagttcagcggtgctccaaaggctcttgagcaaggactccaggcagtaactccagctggaagggtttctcttctcggactattcccaggaaaagtgagcatagactttaacaaccttataatattcaaggcattgacagtttacggaatcactgggagacacctttgggaaacttggtatacagtctctagactgctccaaagtggaaaattaaatatagacccaataataactcacaagtacaagggatttgacaagtatgaagaagcctttgagctaatgagggctggcaaaactggcaaagttgttttcatgcttaaatga

SEQ ID NO: 5305 - protein, 348 aa, Pyrococcus furiosus
MSEKMVAIMKTKPEYGAELVEVDVPKPGPGEVLIKILATSICGTDLHIYEWNEWAQTRIRPPQIMGHEVAGEVVEVGPGVEGIEVGDYVSVETHIVCGKCYACKRGQYHVCQNTKIFGVDTDGVFAEYAVVPAQNVWKNPKNIPPEYATLQEPLGNAVDTVLAGPIAGKSVLITGAGPLGLLGIAVAKASGAYPVIVSEPSEFRRNLAKKVGADYVINPFEEDVVKEVMDITDGNGVDVFLEFSGAPKALEQGLQAVTPAGRVSLLGLFPGKVSIDFNNLIIFKALTVYGITGRHLWETWYTVSRLLQSGKLNIDPIITHKYKGFDKYEEAFELMRAGKTGKVVFMLK

SEQ ID NO: 5306 - DNA, 1047 bp, Pyrococcus horikoshii
  CDS (1)..(1047): transl_table=11
atgtcagaaaagatggtagctatcatgaagacaaagcctgggtatggtgctgagcttgttgaggtggacgttccaaagcctggacctggagaagttctcattaaggttcttgcaaccagcatatgtggaactgatcttcatatatacgagtggaatgagtgggcacagagcaggattaagccacctcagataatggggcatgaagttgcgggagaagtcgttgaaatcgggccaggtgtggaaggaattgaagttggtgactacgtttccgttgaaacgcacatagtttgtggcaagtgttacgcctgcagaaggggccagtaccacgtctgccagaataccaagatatttggcgtcgatacagatggcgtattcgcagagtatgccgttgttccagcccaaaatatctggaagaatcctaaatcaattccaccagaatatgcaaccctccaggagcccttgggtaatgctgttgataccgttttggcaggaccaatttctggtaagagcgttttaataaccggagcggggccccttggattattgggaattgcagtggcaaaagcgtctggcgcataccctgtgatagtctcagaacctagtgacttcagaagggagttggccaagaaggtaggtgctgattacgttatcaatccattcgaagaggatgtcgttaaggaggtaatggatatcacagatggaaatggtgttgacgtatttctggaattcagtggagctcctaaggctctagagcagggtcttcaagcagttacacctgctggaagggtatctctcctgggtctatacccaggaaaggttaccattgactttaacaatctaataatcttcaaggcgctaacaatctatggaataactggaaggcacctctgggaaacttggtatacagtttcaaggctccttcagagcggaaagctcaacttagatcctattataactcataaatataagggattcgacaagtacgaggaagcctttgagctaatgagggccggcaaaacgggtaaagttgtttttatgcttaaatga

SEQ ID NO: 5307 - protein, 348 aa, Pyrococcus horikoshii
MSEKMVAIMKTKPGYGAELVEVDVPKPGPGEVLIKVLATSICGTDLHIYEWNEWAQSRIKPPQIMGHEVAGEVVEIGPGVEGIEVGDYVSVETHIVCGKCYACRRGQYHVCQNTKIFGVDTDGVFAEYAVVPAQNIWKNPKSIPPEYATLQEPLGNAVDTVLAGPISGKSVLITGAGPLGLLGIAVAKASGAYPVIVSEPSDFRRELAKKVGADYVINPFEEDVVKEVMDITDGNGVDVFLEFSGAPKALEQGLQAVTPAGRVSLLGLYPGKVTIDFNNLIIFKALTIYGITGRHLWETWYTVSRLLQSGKLNLDPIITHKYKGFDKYEEAFELMRAGKTGKVVFMLK

SEQ ID NO: 5308 - DNA, 1053 bp, Pyrococcus kodakaraensis
  CDS (1)..(1053): transl_table=11
atggccgagaaaatgcaggctattatgaagactaagccggcgtacggcgccgaacttgtagaagttgacgttccaaagcctgggccaggagaagtcctcattaaggttctcgcaacgagcatctgcggtacagacctccatatctacgagtggaacgaatgggcgcagagcaggataaagccgccccagataatgggccacgaagtggctggagaggtcgtcgaggtcggtcccggcgttgaggatctccaggttggagattacatcagcgttgaaactcatatcgtctgtggcaagtgctacgcgtgcaagcacaaccgctatcacgtctgccagaacaccaagatattcggagttgatatggacggtgtcttcgcccactacgcgatagttccggccaagaacgcctggaagaacccgaaggacatgccgccagagtacgcagcccttcaggagccgctcggaaacgccgtcgataccgttcttgcaggcccgattgctgggaggagcaccctcataaccggtgctggaccgctcggtcttctcggcatagcagttgccaaggcaagcggggcttatccagtcatcgttagcgagccgagtgagttcagaaggaagctcgccaagaaggtcggtgctgactacgtcgttaaccccttcgaggaagacccagtcaagttcgttatggacataaccgacggagcgggcgttgaagttttccttgagttcagtggtgcacctaaagcccttgagcagggcctcaaggcagtaacacccggaggacgcgtctcacttctcggcctcttcccgagagaggtcacgatagacttcaacaacctcataatcttcaaggcccttgaagtccacggcataaccggaaggcacctctgggaaacctggtacaccgtctcaagcctcatccagagcggcaagctgaacctcgatccgataatcacccacaagtacaagggcttcgacaagttcgaggaagcctttgagcttatgcgcgctggaaagaccggaaaggtcgtcttcttccctcacaagggatga

SEQ ID NO: 5309 - protein, 350 aa, Pyrococcus kodakaraensis
MAEKMQAIMKTKPAYGAELVEVDVPKPGPGEVLIKVLATSICGTDLHIYEWNEWAQSRIKPPQIMGHEVAGEVVEVGPGVEDLQVGDYISVETHIVCGKCYACKHNRYHVCQNTKIFGVDMDGVFAHYAIVPAKNAWKNPKDMPPEYAALQEPLGNAVDTVLAGPIAGRSTLITGAGPLGLLGIAVAKASGAYPVIVSEPSEFRRKLAKKVGADYVVNPFEEDPVKFVMDITDGAGVEVFLEFSGAPKALEQGLKAVTPGGRVSLLGLFPREVTIDFNNLIIFKALEVHGITGRHLWETWYTVSSLIQSGKLNLDPIITHKYKGFDKFEEAFELMRAGKTGKVVFFPHKG

SEQ ID NO: 5310 - DNA, 1035 bp, Rhizobium loti
  CDS (1)..(1035): transl_table=11
atgtcgaacatgatgaaggcgctggtgaaggccaaggccgaaccgggcatctggatggaagaggtgccggtgccggagatcggccccaacgacgtgctgatcaagatcaggaagacggcgatctgcggcaccgacgtgcacatctacaattgggaccagtgggcgcagaagaccgtgccggtgccgatggtgaccggccatgaatttgtcggcacggtggccgattttggcgccgcggtcaccgaatacaaggtcggccagcgcgtctcgggcgagggccacatcgtctgcggccactgccgcaactgccgcgccgggcgagggcatctctgccgcaacacgctcggcgtcggcgtcaaccgccccggcgccttcggcgagtatctggcgatcccgcaacacaatgtcgtgccgatccccgacgatgtgccggacgagatcgccgcgatcttcgatcccctgggcaatgcggtgcatacggcattatccttcgatcttgtcggcgaggacgtgctggtcaccggcgccgggccgatcggcatcatgggcgcgctcgttgcccaatgcgtgggcgcgcgaaaagtcgtcatcaccgatatcaacccggtgcggctggcgctggcgaagaaactcggtgtccagcatgtcgtcgacgcctcgaaggaaaagctgcgcgatgtcatgccagtgctcggcatgaccgagggttttgacgtcggcctcgaaatgtcgggcgccgcccccgccttccgcgacatgatcgacaccatgaacaatggcggcaagatcgccattctgggcatcgcgcccaccggcttcgagatcgactggaacaaggtcatcttcaagatgctgcatctcaaaggcatctacggccgcgaaatgttcgagacctggtacaagatgatcgcgctggtccagggtcctctggatgtttcgggcctgatcacgcaccgcatcggcatcgacgatttccaggaggggttcgatgcgatgcggagcggcagttccggcaaggtggtgatggattggtag

SEQ ID NO: 5311 - protein, 344 aa, Rhizobium loti
MSNMMKALVKAKAEPGIWMEEVPVPEIGPNDVLIKIRKTAICGTDVHIYNWDQWAQKTVPVPMVTGHEFVGTVADFGAAVTEYKVGQRVSGEGHIVCGHCRNCRAGRGHLCRNTLGVGVNRPGAFGEYLAIPQHNVVPIPDDVPDEIAAIFDPLGNAVHTALSFDLVGEDVLVTGAGPIGIMGALVAQCVGARKVVITDINPVRLALAKKLGVQHVVDASKEKLRDVMPVLGMTEGFDVGLEMSGAAPAFRDMIDTMNNGGKIAILGIAPTGFEIDWNKVIFKMLHLKGIYGREMFETWYKMIALVQGPLDVSGLITHRIGIDDFQEGFDAMRSGSSGKVVMDW

SEQ ID NO: 5312 - DNA, 1035 bp, Rhizobium meliloti
  CDS (1)..(1035): transl_table=11
atgaccaacatgatgaaggcactggtcaagacgaagccggaggtagggctctggatggagcgcgtgccggtgccggaaatcgggccgaacgacgtcctgatccgcgtcaggaaatcggcgatctgcggcaccgacgtccacatctggaactgggatcaatgggcggagaagacgatcccagtgccgatggtcgtcggacacgaattcatgggcgaggtcgtcgaggtcgggccggccgtcagcaagcatcatgtcggcgagcgggtttccggagaaggtcacatcgtctgcggcaaatgccgcaattgccgcgcgggcagggggcatctctgccgcaacacgctcggcgtcggcgtcaaccgccccggatccttcgccgagttcgtctgccttcccgaatataatgtcgtgtcgatccccgacgacgtgccggacgagatcgccgcaatcttcgatcccttcggcaacgccgtgcatacggcgctctccttcgatctcgtcggcgaggacgttctggtcaccggtgccgggccgatcggcatcatgggggcgatggtggccaagcgttgcggtgcccgcaaggtggtgatcaccgacatcaatcccgttcgtctcgatctcgcgcgcaagctcggcatcgaccacgtcgtcgacgcgtcgaaggaaaaacttgccgacgtcatgcgggtgatcggcatgaccgagggcttcgatgtggggctggaaatgtcgggcgcggcgcccgctttccgcgacatgatcgacaagatgaacaatggcggcaagattgcgatcctcggcattgcgccggcgggcttcgagatcgactggaacaaggtcatcttcaagatgctcaacctcaagggcatctacggtcgcgaaatgttcgagacctggtacaagatgatcgccttcgtccagggcgggctcgacctctcgccgataatcacccaccgtatcggcatcgacgattttcgcgacggcttcgaggcgatgcgctcgggcaattccggcaaggtggtgatggactggtag

SEQ ID NO: 5313 - protein, 344 aa, Rhizobium meliloti
MTNMMKALVKTKPEVGLWMERVPVPEIGPNDVLIRVRKSAICGTDVHIWNWDQWAEKTIPVPMVVGHEFMGEVVEVGPAVSKHHVGERVSGEGHIVCGKCRNCRAGRGHLCRNTLGVGVNRPGSFAEFVCLPEYNVVSIPDDVPDEIAAIFDPFGNAVHTALSFDLVGEDVLVTGAGPIGIMGAMVAKRCGARKVVITDINPVRLDLARKLGIDHVVDASKEKLADVMRVIGMTEGFDVGLEMSGAAPAFRDMIDKMNNGGKIAILGIAPAGFEIDWNKVIFKMLNLKGIYGREMFETWYKMIAFVQGGLDLSPIITHRIGIDDFRDGFEAMRSGNSGKVVMDW

SEQ ID NO: 5314 - DNA, 1026 bp, Shewanella oneidensis
  CDS (1)..(1026): transl_table=11
atgaaagcactaagcaagttaaaagccgaaaaaggcatttggttagtcgatgcgcctaagcctgaaatgggccataacgatctactgatcaagattaaaaagaccgccatttgcggcaccgacatgcacatctacaactgggacgaatggtcacaaaaaaccattcctgtgcctatggtggtaggtcacgagtatgtgggagaagtggttgatatcgggcaagaagttcgcggctttaacattggtgaccgtgtttctggcgaaggccatatcacctgcggccactgccgtaactgccgcgcgggtcgcacccacttatgccgtaacacctcaggtgtgggtgtaaaccgcgaaggttcatttgccgaatacttagtgatcccagcgtttaacgccttcaaaatccccgatgatatcagcgacgatttagcctctatctttgatccattcggtaacgcagtacacacggcactgtcattcgacttagtgggcgaagatgtgttgattactggcgcgggtcctatcggtattatggctgcggccgtatgtcgccacgttggtgcgcgccatgtagtgatcaccgacgttaacgaataccgtttagaactggcccgtaaaatgggtgccacacgtgccgtaaacgttgctcaagaaaacctcaaagacgtgatgaaagaactcggcatgaccgaagggtttgacgtcggcttagaaatgtctggcgtaccttctgccttccgtgccatgttagataccatgaaccacggtggcaaaatcgcgatgctcggtattccgggtggcgaaatggccattgattggagcaaagtgatcttcaaaggtttggtcattaaaggcatttacggtcgtgaaatgttcgaaacctggtacaagatggcaagccttatccaatctggcttagatatttcgcccatcattacccatcactacaaaattgatgatttccaaaaaggcttcgacgctatgggctcgggccaatcgggtaaagtcatcctcagctgggattaa

SEQ ID NO: 5315 - protein, 341 aa, Shewanella oneidensis
MKALSKLKAEKGIWLVDAPKPEMGHNDLLIKIKKTAICGTDMHIYNWDEWSQKTIPVPMVVGHEYVGEVVDIGQEVRGFNIGDRVSGEGHITCGHCRNCRAGRTHLCRNTSGVGVNREGSFAEYLVIPAFNAFKIPDDISDDLASIFDPFGNAVHTALSFDLVGEDVLITGAGPIGIMAAAVCRHVGARHVVITDVNEYRLELARKMGATRAVNVAQENLKDVMKELGMTEGFDVGLEMSGVPSAFRAMLDTMNHGGKIAMLGIPGGEMAIDWSKVIFKGLVIKGIYGREMFETWYKMASLIQSGLDISPIITHHYKIDDFQKGFDAMGSGQSGKVILSWD

SEQ ID NO: 5316 - DNA, 1029 bp, Streptomyces avermitilis
  CDS (1)..(1029): transl_table=11
ttgaaggcgctggtcaaggagaaggcggagcccgggctctggctcatggacgtcccggagcccgagatcgggcccggcgacgtactgatcaaggtcctcaggaccgggatctgcggcaccgacctgcacatccggtcctgggacggctgggcgcagcaagccgtccgtaccccgctcgtgctcggtcacgagttcgtcggtgaggtcgtcgagaccggccgcgacgtcgtcgacatcaaggccggtgaccgggtcagcggcgagggccacctggtctgcggcaagtgccgcaactgccaggccggacgccgtcatctgtgccgtgcgacggtcgggctcggcgtcggccgggacggggcgttcgccgagtacgtggccctgcccgcggccaacgtctgggtgcaccgcgttcccgtcgacctcgacgtggccgcgatcttcgacccgttcggcaacgccgtgcacacggccctgtccttcccgctggtcggcgaggacgtgctcatcaccggggcgggcccgatcggcctgatggcggccgccgtggcccgtcacgccggcgcccgcaacgtcatgatcaccgacgtcagcgaggagcgcctggaactcgcccgcaagatcggcgtgagcctcgccctgaacgtcgccgacacgaccatcgccgacggccagcgcgcgctcggcctgcgcgagggcttcgacatcggtctggagatgtccggccgccccgaggccatgcgcgacatgatcgccaacatgacgcacggcggccgcatcgccatgctcggtctgccgtcccaggagttccccgtcgactgggcccggatcgtcacctccatgatcacgatcaagggcatctacggccgcgagatgttcgagacctggtacgcgatgtccgtcctcctcgaaggcggcctcgacctcgctcccgtgatcaccggccggtacggctaccgcgactacgaggcggcgttcgccgacgcggcgagcggccgcggcggcaaggtcatcctcgactggaccctctga

SEQ ID NO: 5317 - protein, 342 aa, Streptomyces avermitilis
MKALVKEKAEPGLWLMDVPEPEIGPGDVLIKVLRTGICGTDLHIRSWDGWAQQAVRTPLVLGHEFVGEVVETGRDVVDIKAGDRVSGEGHLVCGKCRNCQAGRRHLCRATVGLGVGRDGAFAEYVALPAANVWVHRVPVDLDVAAIFDPFGNAVHTALSFPLVGEDVLITGAGPIGLMAAAVARHAGARNVMITDVSEERLELARKIGVSLALNVADTTIADGQRALGLREGFDIGLEMSGRPEAMRDMIANMTHGGRIAMLGLPSQEFPVDWARIVTSMITIKGIYGREMFETWYAMSVLLEGGLDLAPVITGRYGYRDYEAAFADAASGRGGKVILDWTL

SEQ ID NO: 5318 - DNA, 1029 bp, Streptomyces coelicolor
  CDS (1)..(1029): transl_table=11
ttgaaggcgctggtcaaggagaacgcggagcccgggctgtggctcgcggacgtcccggagcccaccatcgggtccggtgacgtcctcatcaaggtgctgcgcaccggcatctgcggcaccgacctgcacatccgggcctgggacggctgggcgcagcaggccatccgcaccccgctcgtcgtcggccacgagttcgtcggcgaggtcgtcgacaccgggcgcgacgtcaccgacatcaaggccggcgaccgggtcagcggcgagggccacctggtctgcggcaagtgccgcaactgcctggccggccggcgccacctgtgccgcgccaccgtcggcctcggcgtcggccgggacggggcgttcgccgagtacgtggccctgcccgcgtccaacgtctgggtgcaccgcgtccccgtcgacctcgacgtcgccgcgatcttcgacccgttcggcaacgccgtgcacaccgcgctgtccttcccgctggtcggcgaggacgtcctcatcaccggcgccggaccgatcggcctgatggccgccgccgtggcccggcacgccggcgcccgcaacgtcgtcatcacggacgtgagcgaggagcggctggaactggcccgcaaggtcggcgccaccctcgccctgaacgtttcggacgccaccatcgccgacggacagcgcgaactgggcctgcgcgagggcttcgacatcggcctggagatgtccggccgtcccgaggccatgcgcgacatgatcgccaacatgacgcacggcggccggatcgccatgctcggcctgcccgccgaggagttcccggtcgactgggcccgcgtcgtcacctccatgatcaccgtcaagggcatctacggccgcgagatgttcgagacctggtacgccatgtccgtgctgctcgaaggcggcctcgacctcgcccccgtgatcaccggccgctactcccaccgcgacttcgaggccgcgttcgccgacgcggcgagcggccgcggcggcaaggtcatcctcgactggaccgcgtaa

SEQ ID NO: 5319 - protein, 342 aa, Streptomyces coelicolor
MKALVKENAEPGLWLADVPEPTIGSGDVLIKVLRTGICGTDLHIRAWDGWAQQAIRTPLVVGHEFVGEVVDTGRDVTDIKAGDRVSGEGHLVCGKCRNCLAGRRHLCRATVGLGVGRDGAFAEYVALPASNVWVHRVPVDLDVAAIFDPFGNAVHTALSFPLVGEDVLITGAGPIGLMAAAVARHAGARNVVITDVSEERLELARKVGATLALNVSDATIADGQRELGLREGFDIGLEMSGRPEAMRDMIANMTHGGRIAMLGLPAEEFPVDWARVVTSMITVKGIYGREMFETWYAMSVLLEGGLDLAPVITGRYSHRDFEAAFADAASGRGGKVILDWTA

SEQ ID NO: 5320 - DNA, 1056 bp, Symbiobacterium thermophilum
  CDS (1)..(1056): transl_table=11
gtggcagaaacgatgcgtgctttgcgaaaactggaagctggtcctggcgcgacactgcaggaggttccgatcccgaccatcggcccccgcgacgtcctggtgaaggtccgggcggcctcgatctgcggcacggactaccacatctacacctgggatccgtggtccgcgggccgggtgaagccgccgctcaccattgggcacgagctggccggtgaggtggtggccgtcggccgcgaggtcaccgcatgcaaggtgggcgactacgtctctgccgaaacgcacattgtttgcaaccgctgtccccgctgccacatgggggagtaccacctctgcgagaacacgaagatcctgggggtggacacggacggcgccttcgccgagtacgtcgcggtgccggagcagaacatctgggtgaacgacaaggacatcccctttgagctgcagtcgattcaggagccgctgggcaacgcggtccacacggccctgaacggcgacctcaccgcccggtccgtgctgatcaccggctgcggccccatcggcatcatgtcggtccccgtggccaagatggccggcgcggagatcgtgatggcgatggacatcaacgaataccggctgcagctggcgggccagctgggggccgacgtgctcatcaaccccacgaagcaggatccggtcgaggtggtgcgcagctacacccgcggctacggcgccgacgtggtgctggagatgtcgggtaaccccaccgccatccggcaggggctgaaggccgcccgcaacggcgcccgcatctcgctcctcggtctgcccggccggccgctggagctggacctggcagcggacgtgatcatgcggggcctggtgctgcagggcatcaccggccgccggatgtggcagacctggtatcaggtgcgttccctctaccgggccgggctggcggagcggctgcggccgctggtgacgcaccggatgccgctggagcagatcgacgccgccatggagctcatgggttccggccagagcggcaagatagtgctggtgcctgacctgaaggcgtga

SEQ ID NO: 5321 - protein, 351 aa, Symbiobacterium thermophilum
MAETMRALRKLEAGPGATLQEVPIPTIGPRDVLVKVRAASICGTDYHIYTWDPWSAGRVKPPLTIGHELAGEVVAVGREVTACKVGDYVSAETHIVCNRCPRCHMGEYHLCENTKILGVDTDGAFAEYVAVPEQNIWVNDKDIPFELQSIQEPLGNAVHTALNGDLTARSVLITGCGPIGIMSVPVAKMAGAEIVMAMDINEYRLQLAGQLGADVLINPTKQDPVEVVRSYTRGYGADVVLEMSGNPTAIRQGLKAARNGARISLLGLPGRPLELDLAADVIMRGLVLQGITGRRMWQTWYQVRSLYRAGLAERLRPLVTHRMPLEQIDAAMELMGSGQSGKIVLVPDLKA

SEQ ID NO: 5322 - DNA, 1032 bp, Thermus thermophilus
  CDS (1)..(1032): transl_table=11
atgcgcgctttggccaagctggccccggaggagggcctaaccctggtggaccgccccgtgcccgagccgggccccggggagatcctggtgcgggtggaggcggcgagcatctgcggcaccgacctccacatctggaagtgggacgcctgggcccgggggaggatcaggccccccctcgtcaccgggcacgagttcagcggggtggtggaggccgtgggccccggggtgaagcgcccccaggtgggggaccacgtgagcctagaaagccacgtggtctgccacgcctgccccgcctgccgcacggggaactaccacgtctgcttgaacacaaagatcctcggcgtggaccgggacggcggcttcgccgagtacgtggtggtgccggcggagaacgcctgggtgaaccccaaggaccttccctttgaggtggcggccatcctcgagcccttcggcaacgccgtgcacaccgtctacgcgggaagcggggtctcggggaagagcgtcctcatcacgggggcggggcccatcggcctcatggcggccatggtggcccgggcgagcggggcggggcccatcctcgtctccgacccgaacccctaccgcctggccttcgccaggccctacgccgaccggctggtgaaccccttggaggaggacctcctggaggtggtgcgccgggtgacgggaagcggggtggaggtgcttttggagttttctgggaacgaggccgccatccaccagggcctcatggccctcatccccgggggggaggcgaggatcttggggatcccttccgaccccatccgctttgacctcgccggggagctcgtgatgcgggggatcaccgccttcggcatcgccgggcggaggctctggcagacctggatgcagggcaccgccttggtctactcgggtagggtggacctaagccccctcatcacccaccgcctccccttgagccgctaccgggaggccttcggcctcctcgcctcgggccaggcggtgaaggtgatcctggacccgaaggcctaa

SEQ ID NO: 5323 - protein, 343 aa, Thermus thermophilus
MRALAKLAPEEGLTLVDRPVPEPGPGEILVRVEAASICGTDLHIWKWDAWARGRIRPPLVTGHEFSGVVEAVGPGVKRPQVGDHVSLESHVVCHACPACRTGNYHVCLNTKILGVDRDGGFAEYVVVPAENAWVNPKDLPFEVAAILEPFGNAVHTVYAGSGVSGKSVLITGAGPIGLMAAMVARASGAGPILVSDPNPYRLAFARPYADRLVNPLEEDLLEVVRRVTGSGVEVLLEFSGNEAAIHQGLMALIPGGEARILGIPSDPIRFDLAGELVMRGITAFGIAGRRLWQTWMQGTALVYSGRVDLSPLITHRLPLSRYREAFGLLASGQAVKVILDPKA

SEQ ID NO: 5324 - DNA, 1032 bp, Thermus thermophilus
  CDS (1)..(1032): transl_table=11
atgcgcgctttggccaagctggccccggaggagggcctgaccctggtggaccgccccgtgcccgagccgggccccggggagatcctggtgcgggtggaggcggcgagcatctgcggcaccgacctccacatctggaagtgggacgcctgggcccggggcaggatccgccctcccctcgtcaccgggcacgagttcagcggggtggtggaggccgtgggccccggggtgaggcgaccccaggtgggggaccacgtgagcctggaaagccacatcgtctgccacgcctgccccgcctgccgcacggggaactaccacgtttgcctcaacacccagatcctcggcgtggaccgggacggcggcttcgccgagtacgtggtggtgccggcggagaacgcctgggtgaaccccaaggaccttccctttgaggtggcggccatcctggagcccttcggcaacgccgtgcacaccgtctacgcgggaagcggggtttcggggaagagcgtcctcatcacgggggcggggcccatcggcctcatggcggccatggtggtccgggcgagcggggcggggcccatcctggtctccgacccgaacccctaccgcctggccttcgccaggccctacgccgaccggctggtgaaccccttggaggaggacctcctggaggtggtgcgccgggtgacgggaagcggggtggaggtgcttttggagttttctgggaacgaggccgccatccaccagggcctcatggccctcatccccgggggggaggcgaggatcttggggatcccttccgaccccatccgctttgacctcgccggggagctcgtcatgcgggggatcaccgccttcggcatcgccgggcgcaggctctggcagacctggatgcagggcaccgccttggtctactcgggtagggtggacctaagccccctcctcacccaccgcctccccttgagccgctaccgggaggccttcggccttctggcctcgggccaggcggtgaaggtgatcctggacccgaaggcctaa

SEQ ID NO: 5325 - protein, 343 aa, Thermus thermophilus
MRALAKLAPEEGLTLVDRPVPEPGPGEILVRVEAASICGTDLHIWKWDAWARGRIRPPLVTGHEFSGVVEAVGPGVRRPQVGDHVSLESHIVCHACPACRTGNYHVCLNTQILGVDRDGGFAEYVVVPAENAWVNPKDLPFEVAAILEPFGNAVHTVYAGSGVSGKSVLITGAGPIGLMAAMVVRASGAGPILVSDPNPYRLAFARPYADRLVNPLEEDLLEVVRRVTGSGVEVLLEFSGNEAAIHQGLMALIPGGEARILGIPSDPIRFDLAGELVMRGITAFGIAGRRLWQTWMQGTALVYSGRVDLSPLLTHRLPLSRYREAFGLLASGQAVKVILDPKA

SEQ ID NO: 5326 - DNA, 1032 bp, Vibrio cholerae
  CDS (1)..(1032): transl_table=11
atgaaaatcaaagcactttcaaaactgaaaccagagcagggcatctggatgaacgaagtggacatgcctgagcttggccacaacgacctgctgatcaaaattaagaaaactgccatttgtggcactgacgtacacatttataactgggatgagtggtcacaaaaaaccattccagtgcctatggtagtcggccatgaatatgtgggtgaagtggttgggattggccaagaagtgcgtggtttccaaattggagatcgcgtttctggtgaaggtcacatcacttgtggtcactgccgtaactgccgtggtggccgtacccacctgtgccgcaacaccattggtgtgggcgtaaaccgcacgggttgtttctctgaatacttagtgatcccagcgtttaacgcattcaagatcccggatggtatttcagatgatctggcgtctattttcgacccgtttggaaacgctgtacacactgcgctttcattcgacttagtgggtgaagatgttctgatcaccggtgctggcccaatcggcattatggccgcagctgttgcgaaacatgtaggtgcgcgccatgtggtgatcaccgatgtgaacgaataccgcctcgatttagcccgtaaaatgggcgtgactcgcgctgtgaacgttgctgagcaaaacctagaagacgtgatgaaagaactcggtatgaccgaaggttttgatgtgggcttagagatgtctggtgtaccgagtgcgtttagcgccatgctaaaaaccatgaaccacggtggccgcattgctctgttaggtattccaccgtcatcgatggcgattgattggaaccaagtgatcttcaaaggccttgttattaaagggatttatggaagggaaatgtttgaaacttggtataagatggcgagcctgatccaatcgggtctcgatatcagcccaattatcactcaccacttcaaagtggatgacttccaaaaaggcttcgacatcatgcgcagcggggcttctggcaaagttatcctcgattggcagtaa

SEQ ID NO: 5327 - protein, 343 aa, Vibrio cholerae
MKIKALSKLKPEQGIWMNEVDMPELGHNDLLIKIKKTAICGTDVHIYNWDEWSQKTIPVPMVVGHEYVGEVVGIGQEVRGFQIGDRVSGEGHITCGHCRNCRGGRTHLCRNTIGVGVNRTGCFSEYLVIPAFNAFKIPDGISDDLASIFDPFGNAVHTALSFDLVGEDVLITGAGPIGIMAAAVAKHVGARHVVITDVNEYRLDLARKMGVTRAVNVAEQNLEDVMKELGMTEGFDVGLEMSGVPSAFSAMLKTMNHGGRIALLGIPPSSMAIDWNQVIFKGLVIKGIYGREMFETWYKMASLIQSGLDISPIITHHFKVDDFQKGFDIMRSGASGKVILDWQ

SEQ ID NO: 5328 - DNA, 1032 bp, Vibrio parahaemolyticus
  CDS (1)..(1032): transl_table=11
atgaaaattaaagcactatcaaagctaaagcctgaacaaggcatttggatgaccgaagtagacaaacctgaggttggccataacgacattctgatcaaaattaagaaaactgcgatttgtggtacagacgtacacatttacaactgggacgaatggtcacaaaaaaccattccagtacctatggttgtcggtcacgaatacgtgggtgaagtggtcgcgattggtcaggaagttcgtggctttgaaatcggtgaccgcgtatctggcgaaggtcacatcacgtgtggtcactgtcgtaactgtcgtggcggtcgtactcacttatgccgtaacactatcggtgtgggtgtaaaccgtgaaggcgcatttgcagaatacttggttatcccagcgttcaacgcgttcaagatcccagacgagatctctgacgatctagcgtctatctttgacccgtttggtaacgcagtacacaccgcactttctttcgaccttgtgggtgaagacgtgctgatcacaggtgctggcccaatcggcatcatggcggcagcggttgctaaacacgttggtgctcgtcatgtggttatcacagacgtaaacgaataccgtctagagcttgctcgtaaaatgggcgtaacacgtgcagtaaacgtggctgaagagaagcttgaagatgtaatggctgaactaggcatgacagaaggcttcgacgtaggtcttgaaatgtcgggtaacccagcggcattcaactcaatgctaacaacaatgaatcatggtggtcgtattgctctgttgggtattccgccatcagacatgggtatcgactggaaccaagtgatcttcaaaggtttggttatcaaaggcatttacggccgtgaaatgttcgaaacgtggtacaagatggcttcactgattcaatctggtttggatctatcgccaatcatcacgcaccactacaagattgatgatttccaagaaggctttgacgttatgcgctctggcatgtcgggcaaagttattcttgattgggaatag

SEQ ID NO: 5329 - protein, 343 aa, Vibrio parahaemolyticus
MKIKALSKLKPEQGIWMTEVDKPEVGHNDILIKIKKTAICGTDVHIYNWDEWSQKTIPVPMVVGHEYVGEVVAIGQEVRGFEIGDRVSGEGHITCGHCRNCRGGRTHLCRNTIGVGVNREGAFAEYLVIPAFNAFKIPDEISDDLASIFDPFGNAVHTALSFDLVGEDVLITGAGPIGIMAAAVAKHVGARHVVITDVNEYRLELARKMGVTRAVNVAEEKLEDVMAELGMTEGFDVGLEMSGNPAAFNSMLTTMNHGGRIALLGIPPSDMGIDWNQVIFKGLVIKGIYGREMFETWYKMASLIQSGLDLSPIITHHYKIDDFQEGFDVMRSGMSGKVILDWE

SEQ ID NO: 5330 - DNA, 1032 bp, Vibrio vulnificus
  CDS (1)..(1032): transl_table=11
atgaaaatcaaagcactatcaaagctaaagccagaagaaggcatttggatgaccgaagtggacaagcctgttcttggccacaacgatctgctgatcaaaattaagaaaaccgcgatttgtggtaccgacgtacacatctacaactgggacgaatggtcacaaaaaaccatcccagtacctatggtggttggccatgaatacgtgggtgaagtggttggcattggccaagaagttcgtggttttgagatcggtgaccgcgtttctggcgaaggtcacatcacttgtggccactgtcgtaactgccgtggtggccgcacgcacttgtgccgcaacaccattggtgtgggcgtaaaccgcacaggttgtttctctgaataccttgtgatcccagcgttcaacgcctttaaaatccctgcaaacatctctgatgatcttgcgtctatcttcgacccgtttggcaacgcagtacacactgcactgtcgttcgatctggttggtgaagatgtactgatcaccggcgctggcccaatcggcattatggcggctgcggtcgcgaagcacgttggtgcgcgccacgtcgtgatcaccgatgtgaacgaataccgtctagacctcgcacgcaaaatgggtgtgactcgcgcggtgaacgttgccgagcagaaacttgacgatgtgatggcagagctaggcatgacagaaggcttcgatgtgggcctggaaatgtcgggcaacccatcagcattcaactcaatgctgaaaaccatgaaccacggtggccgcattgcactgcttggcattccaccatcagacatgggcatcgattggaaccaagtgatcttcaaaggcttggtgatcaaaggtatctatggccgtgaaatgtttgaaacttggtacaagatggcaagcttgattcaatctggccttgacctaacaccaattatcactcaccacttcaaagtggatgatttccagcaaggcttcgacatcatgcgcagcggcatgtcaggcaaagtgatccttgattgggaataa

SEQ ID NO: 5331 - protein, 343 aa, Vibrio vulnificus
MKIKALSKLKPEEGIWMTEVDKPVLGHNDLLIKIKKTAICGTDVHIYNWDEWSQKTIPVPMVVGHEYVGEVVGIGQEVRGFEIGDRVSGEGHITCGHCRNCRGGRTHLCRNTIGVGVNRTGCFSEYLVIPAFNAFKIPANISDDLASIFDPFGNAVHTALSFDLVGEDVLITGAGPIGIMAAAVAKHVGARHVVITDVNEYRLDLARKMGVTRAVNVAEQKLDDVMAELGMTEGFDVGLEMSGNPSAFNSMLKTMNHGGRIALLGIPPSDMGIDWNQVIFKGLVIKGIYGREMFETWYKMASLIQSGLDLTPIITHHFKVDDFQQGFDIMRSGMSGKVILDWE

SEQ ID NO: 5332 - DNA, 1032 bp, Vibrio vulnificus
  CDS (1)..(1032): transl_table=11
atgaaaatcaaagcactatcaaagctaaagccagaagaaggcatttggatgaccgaagtggacaagcctgttcttggccacaacgatctgctgatcaaaattaagaaaaccgcgatttgtggtaccgacgtacacatctacaactgggacgaatggtcacaaaaaaccatcccagtacctatggtggttggtcatgaatacgtgggtgaagtggttggcattggccaagaagttcgtggttttgaaatcggcgaccgcgtttctggcgaaggtcacatcacttgtggccactgtcgtaactgccgtggtggccgcacgcacttgtgccgcaacacaattggtgtgggcgtaaaccgcacaggttgtttctctgaatatcttgtgatcccagcgttcaacgcttttaagatccctgcaaacatctctgatgatcttgcgtctatcttcgacccgtttggcaacgcagtacacactgcactgtcgttcgatctggttggtgaagacgtactgatcaccggcgctggcccaatcggcatcatggcggctgcggtagcgaagcacgttggtgcgcgccacgtcgtgatcaccgatgtgaacgaataccgtctagacctcgcacgcaaaatgggcgtgactcgcgcagtgaacgttgctgagcagaagcttgacgatgtgatggtagagctaggcatgacagaaggcttcgacgtgggcctagaaatgtcgggcaacccttcagcattcaactcaatgctgaaaaccatgaaccacggtggtcgtattgcactgctcggcattccaccatcagacatgggtatcgactggaaccaagtgatcttcaaaggcttggtgatcaaaggtatctatggccgtgaaatgtttgaaacttggtacaagatggcaagcttgattcaatctggccttgacctaacaccaattatcactcaccacttcaaagtggatgacttccagcaaggcttcgacatcatgcgcagcggcatgtcaggcaaagtgattcttgattgggaataa

SEQ ID NO: 5333 - protein, 343 aa, Vibrio vulnificus
MKIKALSKLKPEEGIWMTEVDKPVLGHNDLLIKIKKTAICGTDVHIYNWDEWSQKTIPVPMVVGHEYVGEVVGIGQEVRGFEIGDRVSGEGHITCGHCRNCRGGRTHLCRNTIGVGVNRTGCFSEYLVIPAFNAFKIPANISDDLASIFDPFGNAVHTALSFDLVGEDVLITGAGPIGIMAAAVAKHVGARHVVITDVNEYRLDLARKMGVTRAVNVAEQKLDDVMVELGMTEGFDVGLEMSGNPSAFNSMLKTMNHGGRIALLGIPPSDMGIDWNQVIFKGLVIKGIYGREMFETWYKMASLIQSGLDLTPIITHHFKVDDFQQGFDIMRSGMSGKVILDWE

SEQ ID NO: 5334 - DNA, 1023 bp, Xanthomonas axonopodis pv
  CDS (1)..(1023): transl_table=11
atgaaggcgctggtcaagcgcgaagcgaacaagggcatctggctggaacaggtgccagtgccgacgcccggccccaacgaggtgctgatcaagctggaaaagaccgccatttgcggcaccgacctgcacatctacctgtgggacgaatggagccagcgcacgatcgagcctggcctgaccatcggtcatgaattcgtcggccgggtggctgagctcggttcggcagtgaccggctaccagatcggccaacgggtgtcggccgaaggccacatcgtgtgcggccattgccgcaactgccgtggcggccgtccgcacctgtgccccaacacggtcgggatcggtgtcaacgtcaacggcgccttcgccgaatacatggtgatgccggccagcaacctgtggccgatcccggaccagatcccgtccgagcttgccgcgttcttcgacccctacggcaatgccgcgcattgcgcgctggaattcgacgtcatcggcgaggatgtgctgatcaccggcgcaggcccgatcggcatcattgccgccggcatctgcaagcacatcggtgcgcgcaatgtggtggtcaccgacgtcaacgatttccgtctcaagctggctgccgacatgggagccacgcgcgtagtcaacgtctccaagacctcgctcaaggacgtcatggccgacctgcacatggaaggcttcgacgtgggcctggaaatgagcggcaactcgcgcgcgttcaacgacatgctcgattgcatgtaccacggcggcaagatcgccatgctcggcatcatgccgcgtggcgccggttgcgactgggacaagatcatcttcaagggcctcaccgtgcagggcatctacggccgcaagatgtacgagacctggtacaagatgacgcagctggtgctgtcgggttttccgttgcacaaggtgctgacccatcaactgccgatcgacgatttccagaagggcttcgacctgatggaagaaggcaaggccggcaaggtcgtgctgagctggaattga

SEQ ID NO: 5335 - protein, 340 aa, Xanthomonas axonopodis pv
MKALVKREANKGIWLEQVPVPTPGPNEVLIKLEKTAICGTDLHIYLWDEWSQRTIEPGLTIGHEFVGRVAELGSAVTGYQIGQRVSAEGHIVCGHCRNCRGGRPHLCPNTVGIGVNVNGAFAEYMVMPASNLWPIPDQIPSELAAFFDPYGNAAHCALEFDVIGEDVLITGAGPIGIIAAGICKHIGARNVVVTDVNDFRLKLAADMGATRVVNVSKTSLKDVMADLHMEGFDVGLEMSGNSRAFNDMLDCMYHGGKIAMLGIMPRGAGCDWDKIIFKGLTVQGIYGRKMYETWYKMTQLVLSGFPLHKVLTHQLPIDDFQKGFDLMEEGKAGKVVLSWN

SEQ ID NO: 5336 - DNA, 1023 bp, Xanthomonas campestris pv
  CDS (1)..(1023): transl_table=11
atgaaggcgctggtcaagcgcgaagcgagcaagggcatctggctggaacaggtccccgtgcccaccccgggcccgaatgaggtcctgatcaagctggaaaagaccgccatctgcggcaccgacctgcatatctacctgtgggatgagtggagccaacgcaccattacgccgggcctgaccatcggccacgagttcgtcggccgcgtggccgagctcggttcggcggtgaccggctaccaggtcggccagcgcgtgtcggccgaaggccacatcgtctgcgggcattgccgcaactgccgtggcggccgcccgcacctgtgccccaacacggtgggcatcggcgtcaacgtcaacggcgcctttgccgaatacatggtgatgccggccagcaacctgtggccgatccccgaccagatcccctccgagctggccgccttcttcgacccctacggcaacgccgcgcattgcgcgctggaattcgatgtcatcggcgaagacgtgctgatcaccggcgccggcccgatcggcatcattgccgccggcatctgcaagcacatcggtgcgcgcaatgtggtggtcaccgacgtcaacgacttccgcctcaagctggccgccgacctgggcgccacgcgcgtggtcaacgtgtccaagacctcgctcaaggacgtcatggccgacctgcacatggaaggcttcgacgtgggcctggaaatgagcggcaacccgcgcgcgttcaacgacatgctcgattgcatgtaccacggcggcaagatcgcgatgctcggcatcatgccgcgcggcgccggttgcgattgggacaagatcatcttcaagggcctcaccgtgcagggcatctacggacgcaagatgtacgagacctggtacaagatgacccagctggtgctatcgggttttccgctgcagaaagtgctgacccaccagttgtcgatcgacgagttccagaaggggttcgacctgatggaagaaggcaaggccggcaaggttgtgttgagctggaactga

SEQ ID NO: 5337 - protein, 340 aa, Xanthomonas campestris pv
MKALVKREASKGIWLEQVPVPTPGPNEVLIKLEKTAICGTDLHIYLWDEWSQRTITPGLTIGHEFVGRVAELGSAVTGYQVGQRVSAEGHIVCGHCRNCRGGRPHLCPNTVGIGVNVNGAFAEYMVMPASNLWPIPDQIPSELAAFFDPYGNAAHCALEFDVIGEDVLITGAGPIGIIAAGICKHIGARNVVVTDVNDFRLKLAADLGATRVVNVSKTSLKDVMADLHMEGFDVGLEMSGNPRAFNDMLDCMYHGGKIAMLGIMPRGAGCDWDKIIFKGLTVQGIYGRKMYETWYKMTQLVLSGFPLQKVLTHQLSIDEFQKGFDLMEEGKAGKVVLSWN

SEQ ID NO: 5338 - DNA, 1026 bp, Yersinia pestis
  CDS (1)..(1026): transl_table=11
atgaaagcactttctaaactgaaagcagaagaaggcatttggatgaccgatgtgccacagccagagctgggtcacaacgatatcatgatcaaaattcgcaaaacggctatctgtggtactgacgtacatatttataattgggatgaatggtcacaaaaaaccatccccgtacccatggtcgttggccatgaatatgtcggtgaagtggtggccattgggcaggaagttaaagggtttaatattggtgaccgggtgtctggtgaaggccatattacctgtggtcactgccgtaactgccgtggtggtcgtacccacctttgtcgtaatacggtgggtgttggcgtgaatcgccctggttcgtttgccgaatatttggtgatccctgcttttaacgcgttcaagatcccagacaatatttctgatgagcttgcggctatttttgaccccttcggcaatgcagttcataccgcgttatcttttgatttagtcggcgaggatgtgttggtctccggggctggcccaattggtattatggccgccgcagtctgtaagcatgtgggtgctcgtcatgttgtcatcgctgatgtgaatgaatatcgcctggatctggcccgtaaaatgggcgtgacccgtgccgttaacgtcagcaaagagaacctaaatgacgttatgacggaattgggcatgaccgaagggtttgatgtgggcttggagatgtcaggtgctcccccggctttccgttcattacttaattcaatgaatcatggtggtcgtatagcgatgctgggaataccgccgtctgatatgtcgatcgactggaatcaggttatctttaaggggctgtttataaaggggatttatggccgtgagatgttcgaaacctggtacaaaatggccgcgttgattcaatctggtttggacttaactccgatcattacccaccgtttccctattgatgaattccagcaagggtttgacgccatgcgttcgggtaaatcaggcaaagtggtattaagctgggattag

SEQ ID NO: 5339 - protein, 341 aa, Yersinia pestis
MKALSKLKAEEGIWMTDVPQPELGHNDIMIKIRKTAICGTDVHIYNWDEWSQKTIPVPMVVGHEYVGEVVAIGQEVKGFNIGDRVSGEGHITCGHCRNCRGGRTHLCRNTVGVGVNRPGSFAEYLVIPAFNAFKIPDNISDELAAIFDPFGNAVHTALSFDLVGEDVLVSGAGPIGIMAAAVCKHVGARHVVIADVNEYRLDLARKMGVTRAVNVSKENLNDVMTELGMTEGFDVGLEMSGAPPAFRSLLNSMNHGGRIAMLGIPPSDMSIDWNQVIFKGLFIKGIYGREMFETWYKMAALIQSGLDLTPIITHRFPIDEFQQGFDAMRSGKSGKVVLSWD

SEQ ID NO: 5340 - DNA, 1026 bp, Yersinia pseudotuberculosis
  CDS (1)..(1026): transl_table=11
atgaaagcactttctaaactgaaagcagaagaaggcatttggatgaccgatgtgccacagccagagctgggtcacaacgatatcatgatcaaaattcgcaaaacggctatctgtggtactgacgtacatatttataattgggatgaatggtcacaaaaaaccatccccgtacccatggtcgttggccatgaatatgtcggtgaagtggtggccattgggcaggaagttaaagggtttaatattggtgaccgggtgtctggtgaaggccatattacctgtggtcactgccgtaactgccgtggtggtcgtacccacctttgtcgtaatacggtgggtgttggcgtgaatcgccctggttcgtttgccgaatatttggtgatccctgcttttaacgcgttcaagatcccagacaatatttctgatgagcttgcggctatttttgaccccttcggcaatgcagttcataccgcgttatcttttgatttagtcggcgaggatgtgttggtctccggggctggcccaattggtattatggccgccgcagtctgtaagcatgtgggtgctcgtcatgttgtcatcactgatgtgaatgaatatcgccttgatctggcccgtaaaatgggcgtgacccgtgccgttaacgtcagcaaagagaacctaaatgacgttatgacggaattgggcatgaccgaagggtttgatgtgggcttggagatgtcaggtgctcccccggctttccgttcattacttaattcaatgaatcatggtggtcgtatagcgatgctgggaataccgccatctgatatgtcgatcgactggaatcaggttatctttaaggggctgtttataaaggggatttatggccgtgagatgttcgaaacctggtacaaaatggccgcgttgattcaatctggtttggacttaactccgatcattacccaccgtttccctattgatgaattccagcaagggtttgacgccatgcgttcgggtaaatcaggcaaagtggtattaagctgggattag

SEQ ID NO: 5341 - protein, 341 aa, Yersinia pseudotuberculosis
MKALSKLKAEEGIWMTDVPQPELGHNDIMIKIRKTAICGTDVHIYNWDEWSQKTIPVPMVVGHEYVGEVVAIGQEVKGFNIGDRVSGEGHITCGHCRNCRGGRTHLCRNTVGVGVNRPGSFAEYLVIPAFNAFKIPDNISDELAAIFDPFGNAVHTALSFDLVGEDVLVSGAGPIGIMAAAVCKHVGARHVVITDVNEYRLDLARKMGVTRAVNVSKENLNDVMTELGMTEGFDVGLEMSGAPPAFRSLLNSMNHGGRIAMLGIPPSDMSIDWNQVIFKGLFIKGIYGREMFETWYKMAALIQSGLDLTPIITHRFPIDEFQQGFDAMRSGKSGKVVLSWD

SEQ ID NO: 5342 - DNA, 1053 bp, Agrobacterium tumefaciens
  CDS (1)..(1053): transl_table=11
atgaaggcactggtgctggaagaaaaaggcaaactctcgctcagggattttgacattcccggaggcgccgggtccggtgaactcggaccgaaggatgtgcgcattcgcacccatacggtcggcatctgcggctcggacgttcattattatacccatggcaagatcggccacttcgtcgtcaacgcacccatggtgctcggccatgaagcctccggtacggtgatcgaaaccggttccgacgtcacccatctgaagatcggtgaccgcgtctgcatggagcctggtatccccgatcccacatcgcgggcctcgaaactcggcatctataatgtcgatcccgctgtccgcttctgggcaacaccgccgatccatggctgcctgacgcctgaggtcatccaccccgcggccttcacctacaagctgccggataacgtctcctttgccgaaggggcgatggtcgaacccttcgccatcggcatgcaggcggcactgcgggcgcgcatccagcccggcgatatcgccgtcgtcaccggtgccggtcctatcggcatgatggtggcgcttgccgcattggcgggcggttgcgccaaggtcatcgttgccgatctcgctcagccgaagcttgatatcatcgccgcttatgacggcatcgagaccatcaatatccgcgagcgcaaccttgccgaagcggtttcggccgccacggatggctggggttgcgatatcgtcttcgaatgctcaggtgcggcacccgccatactcggcatggcgaaactggcgcgaccgggcggtgccatcgtgctcgttggcatgccggttgacccggttccggtcgatatcgtcggccttcaggccaaagagctgcgggtggaaacggtattccgttacgccaacgtctatgaccgcgcggtggccctcatcgcctccggcaaggttgatctcaagccattgatttcggccaccattcccttcgaagacagtatcgccggtttcgaccgtgcggtggaagcgcgggaaacggatgtgaagttgcagatcgtcatgccgcaataa

SEQ ID NO: 5343 - protein, 350 aa, Agrobacterium tumefaciens
MKALVLEEKGKLSLRDFDIPGGAGSGELGPKDVRIRTHTVGICGSDVHYYTHGKIGHFVVNAPMVLGHEASGTVIETGSDVTHLKIGDRVCMEPGIPDPTSRASKLGIYNVDPAVRFWATPPIHGCLTPEVIHPAAFTYKLPDNVSFAEGAMVEPFAIGMQAALRARIQPGDIAVVTGAGPIGMMVALAALAGGCAKVIVADLAQPKLDIIAAYDGIETINIRERNLAEAVSAATDGWGCDIVFECSGAAPAILGMAKLARPGGAIVLVGMPVDPVPVDIVGLQAKELRVETVFRYANVYDRAVALIASGKVDLKPLISATIPFEDSIAGFDRAVEARETDVKLQIVMPQ

SEQ ID NO: 5344 - DNA, 1492 bp, Triticum aestivum
  CDS (43)..(1197)
agaatctgcacaggcagcaaaccagtaggcaactctccagcaatggctgccgctgcatcgtcgccctcccctccggcggtcatcacctgccgagcggcggtggcatgggggccggggcaggcgctggtgatggaggacgtggaggtcgccccgccggggccactggagatccgcgtcaaggtcgtctccacctccatctgccgcagcgacgtcacccagtggcagtccacggcgcagcccgatctgttccccagaattttcgggcacgaagcatccggggtggtcgagagcgtcggggaaggagtgaccgagttccaagtgggagaccacgcgctcaccgtcttcatcggggaatgcatgagctgcaagcactgcgtgtcggggaaaagcaacatgtgccagacgctcggtctggagaggaagggcgtcatgcacagcgaccagaccacccgcttctccatcggcgggaagcccgtgtaccattactgcgccgtgtcgagcttcagcgagtacgcggttgtccactcgggctgcgcggtcaaggtcagccccaccatgcccatggacaggatatgcctgctcagctgcggcgcgtccgcaggccttggtgcggcttggaatgttgctgatgtatccaaggggtcaagtgtagttatatttggtctgggaactgtaggactttcggtagctcaaggtgctaagctacggggagcttccaagattattggagtagataccaatcctgctaagcaagaaaaggggaaggcttttggtgttacagattttattaatcctgccgaattgaatgaacctgttcagcaggtagtaaaacggcttactgatggaggggctgattactcttttgaatgtgtgggtgataccggagtagtctcgactgcattgcaatcatgttctgatggatggggactgactgtaactcttggtgtaccaaaagcaaaaccagaagtttctgctcattatggattgcttctctctggaagaacactgaaggggtctttgtttggaggatggagacccaaaactgatatacctttgttagtggagaagtacgcaaacaaggaaatccaagttgatggccttgtcacacatgatatgccattcagtgacatcaacaaagcgcttgaactgatgctacaaaacaggtgtttgcgatgcgtgattcacatgccaaagtgacaggattgatttatacatcagtgccatcatacctgtacaattttggtggttttctcatcagtaatttttcacttgatctgctcctggctcgagttttcatgacaccaacatattgaagctccagtgtgattctctattggtgtctcaccttagagttatggtgttatagttgttgaggagattacaaatcatactgatattcccttggaattcctcatatgtccgacctcaagaattattcgtgtaatctaacttgttaaaaattgatctgttagtgattaaaaaaaaaaaaaaa

SEQ ID NO: 5345 - protein, 384 aa, Triticum aestivum
MAAAASSPSPPAVITCRAAVAWGPGQALVMEDVEVAPPGPLEIRVKVVSTSICRSDVTQWQSTAQPDLFPRIFGHEASGVVESVGEGVTEFQVGDHALTVFIGECMSCKHCVSGKSNMCQTLGLERKGVMHSDQTTRFSIGGKPVYHYCAVSSFSEYAVVHSGCAVKVSPTMPMDRICLLSCGASAGLGAAWNVADVSKGSSVVIFGLGTVGLSVAQGAKLRGASKIIGVDTNPAKQEKGKAFGVTDFINPAELNEPVQQVVKRLTDGGADYSFECVGDTGVVSTALQSCSDGWGLTVTLGVPKAKPEVSAHYGLLLSGRTLKGSLFGGWRPKTDIPLLVEKYANKEIQVDGLVTHDMPFSDINKALELMLQNRCLRCVIHMPK

SEQ ID NO: 5346 - DNA, 1814 bp, Glycine max
  CDS (166)..(1449)
tgaatattaaggtagtaagatgagacgtcaagtttggatctctatctcattgttgatttagtattaaatttctatgtagttgttgtttgtagtaatcatcaactcactcagttgccgtaggttgtcgtgatccatcacaacactttgtcactgaaattcagaaaaatggcatcagcaatgtttcgtaggaacatcatcacccactactccaagtttgcttcttctttgtcttcgttgcctcgccattcctcaatctacaaccctctctctatgtctgtttcttcatttcatagcgaaagtgttggtggtggtggtgggttgccatcttccatgcgtggagctgtgtattgggaaccgaacaagccgctaaccatcgaggaatttcacatgcctcgccccaaggccggtgaagttctcatcaaaacaaaggcctgtggagtatgccactctgatctacatgttatgaaaggtgaaattccgtttaccagtccttgtgttgtggggcatgagattaccggtgaggttgttgaacatggagcactcactgacagcaaaaccatagaaaggcttccagttggatctcgagttgttggggccttcatcatgccttgtggcaactgctcctactgttcaaagggccatgatgatctatgtgaagctttctttgcctataaccgggcaaaaggaaccctctatgatggtgaaactcgactcttttttcgaaacagtggaaaaccagcatacatgtatagtatgggagggcttgctgaatactgtgttgtgccagcaaatggagtgtctgtgttaccagactcattgccatatacagagtctgcaattctaggatgtgctgtttttactgcttacggcgctatggctcatgcagctcaagtgcgtcctggtgattctgttgctgttattggaactggaggtgttggttctagttgtttacagatagctagagcctttggtgcctcagatataattgctgtggatgtacgggatgaaaagctacagaaagcaaagacatttggtgctactcacactgtaaattcagcaaaggaagatcccattgaaaagatacttgaaattactggtggaaagggtgttgatgttgctgtggaagccttggggaaaccacagacatttgctcaatgtacacaaagtgtgaaggatgggggaaaagctgtgatgattggactggcacaagctggttctttaggagaggtggatataaatcggcttgttcgcagaaagatacaagttattggctcctatgggggcagggcaaggcaagatcttccaaagttaattagactggcagaaacaggtatcttcaatcttggccatgctgtttcaagaacatacacttttgaggaggcgggaaaagcattccaagatctcaatgaaggaaaaattgtcggtcgagctgtgattgagataatatagctctatattcccagaaatgcttttctgcagcagcaatagctatgcttttcacaccccacaagatatacatgctttggagttgcaaggtgttggtaccctgagaacataaataaatagatgtcttctgatgtttcattgcaggggcatgttcaaatgaaaactgtttttctttttgtgcatttctttgcttctaactcatgtaatcaggtaggtacaccaaggtgaagaataatagtctctgaatgctcatcattggcgtgtcgtaaaactgatgatgaaaatgcaggaaaataacagaaaagctagagatgctccaagaaagtaaattaaaaaaaaaatgtttccgacataaaaaaaaaaaaaaa

SEQ ID NO: 5347 - protein, 427 aa, Glycine max
MASAMFRRNIITHYSKFASSLSSLPRHSSIYNPLSMSVSSFHSESVGGGGGLPSSMRGAVYWEPNKPLTIEEFHMPRPKAGEVLIKTKACGVCHSDLHVMKGEIPFTSPCVVGHEITGEVVEHGALTDSKTIERLPVGSRVVGAFIMPCGNCSYCSKGHDDLCEAFFAYNRAKGTLYDGETRLFFRNSGKPAYMYSMGGLAEYCVVPANGVSVLPDSLPYTESAILGCAVFTAYGAMAHAAQVRPGDSVAVIGTGGVGSSCLQIARAFGASDIIAVDVRDEKLQKAKTFGATHTVNSAKEDPIEKILEITGGKGVDVAVEALGKPQTFAQCTQSVKDGGKAVMIGLAQAGSLGEVDINRLVRRKIQVIGSYGGRARQDLPKLIRLAETGIFNLGHAVSRTYTFEEAGKAFQDLNEGKIVGRAVIEII

SEQ ID NO: 5348 - DNA, 1074 bp, Brassica napus
  CDS (1)..(1074)
atgggagaggtccttaagaaggaggcgtacggactggctgtaaaagacgaatctggagttatctcgcctttccgtttctcaagaagggagacaggagaaaatgatgtgaggttaaaagtgttgttctgtggaatttgccacacagatttaagcatggccataaacgagtgggggtttactagttacccccttgtccccgggcatgaaatagtgggcgtggtgactgaagtcggagccaaagtgactaaattcaacgccggagacaaagtgggagttggttatatggtcagctcatgcgggtcatgtgaaacctgcattgatgaccaagagaactactgtccaaaaatgatcctaacgtccggaggcaagtattacgatgacactataacatatggtggttactccgaccatatggtttgtgaagaggactacatcatccgtattccagaaaatcttcccttagacgctaccgcgccgctactctgcgctgggaccaccgtctattccccgatgaagtatcacgggctcgacaagccgggtatgcacattggtgtggtgggactaggcggtttaggtcatgtagctgtgaaatttgctaaggctatgggtattaaggttacagttattagtacttcggataggaagagagacgaggcgttaactcggcttggtgcggatctgttcttggtgagccgtgacccggaacagatgaaggatgcaatgggtactatggatggtattattgataccgtatctgctactcatccagttcttccgattcttgatttgcttaaatataagggtaaacttattatggttggtgcacctgataaaccacttgagcttccggttctgcctctcatctttgggaaaaagatggtggtgggaagtatggtaggagggataaaagagactcaagagatgatggatttggccggaaaacacaacatcacggcagatattgagcttatctctgcggattatgtcaacactgccatggaacggctccagaaggctgacgttagataccgttttgtgattgatgttgccaacaccttgaagcctagtccttaa

SEQ ID NO: 5349 - protein, 357 aa, Brassica napus
MGEVLKKEAYGLAVKDESGVISPFRFSRRETGENDVRLKVLFCGICHTDLSMAINEWGFTSYPLVPGHEIVGVVTEVGAKVTKFNAGDKVGVGYMVSSCGSCETCIDDQENYCPKMILTSGGKYYDDTITYGGYSDHMVCEEDYIIRIPENLPLDATAPLLCAGTTVYSPMKYHGLDKPGMHIGVVGLGGLGHVAVKFAKAMGIKVTVISTSDRKRDEALTRLGADLFLVSRDPEQMKDAMGTMDGIIDTVSATHPVLPILDLLKYKGKLIMVGAPDKPLELPVLPLIFGKKMVVGSMVGGIKETQEMMDLAGKHNITADIELISADYVNTAMERLQKADVRYRFVIDVANTLKPSP

SEQ ID NO: 5350 - DNA, 1140 bp, Brassica napus
  CDS (1)..(1140)
atggcgactcaaggtcaggttatcacatgcaaagctgcggtggcttacgagccgaacaaacctctggtcatcgaagacgtgcaagtggctccccctcaggccggtgaggttcgcatcaagatcctcttcaccgctctctgtcacaccgacgcctacacctggagcggcaaggatcctgaaggtctcttcccttgtatcctcggtcacgaggctgctgggattgttgagagtgttggtgaaggtgtaactgaggttcaacctggggaccatgttatcccttgttaccaagctgagtgccgtgaatgcaagttctgcaaatctggcaagactaacctctgcggcaaggttcgatccgctactggtgttggggtcatgatgaacgaccgtaagagccgcttctccgttaatgggaaacccatttatcacttcatgggtacctccacgtttagtcagtacactgttgttcatgatgttagtgtcgccaagatcgatcctcaggctcctttggagaaagtctgccttcttggatgtggtgttcccactggccttggagcagtttggaacactgcaaaagtagagcctgggtcaaatgttgccatttttggtcttgggaccgtggggcttgctgttgctgagggtgcgaaaacagctggtgctacaaggatcattggcattgatatcgacagcaagaagtatgaaactgcaaagaagtttggtgttaatgagtttgtgaacccaaaggaccaccaaaagccaattcaggaagtgattgtcgacctcactgatggaggtgttgactacagctttgagtgcatcgggaatgtctccgtgatgagagccgcattggagtgctgtcacaagggatggggaacttcagttatagtgggtgttgcagcatcaggacaagagatatcaacacgaccgttccaacttgtgactggccgtgtgtggaaaggaacagcatttggtggtttcaagagtcgaacccaagtgccttggcttgtagagaagtatatgaacaaggagatcaaagtggatgagtacataacgcacaacatgacattgggagagatcaacaaggcttttgatctgctgcatgaaggcacttgtcttcgttgtgtcctcagtaccagcgaatga

SEQ ID NO: 5351 - protein, 379 aa, Brassica napus
MATQGQVITCKAAVAYEPNKPLVIEDVQVAPPQAGEVRIKILFTALCHTDAYTWSGKDPEGLFPCILGHEAAGIVESVGEGVTEVQPGDHVIPCYQAECRECKFCKSGKTNLCGKVRSATGVGVMMNDRKSRFSVNGKPIYHFMGTSTFSQYTVVHDVSVAKIDPQAPLEKVCLLGCGVPTGLGAVWNTAKVEPGSNVAIFGLGTVGLAVAEGAKTAGATRIIGIDIDSKKYETAKKFGVNEFVNPKDHQKPIQEVIVDLTDGGVDYSFECIGNVSVMRAALECCHKGWGTSVIVGVAASGQEISTRPFQLVTGRVWKGTAFGGFKSRTQVPWLVEKYMNKEIKVDEYITHNMTLGEINKAFDLLHEGTCLRCVLSTSE

SEQ ID NO: 5352 - DNA, 1074 bp, Brassica napus
  CDS (1)..(1074)
atgggaaaggtgcctgcgacggaggcgttcggattggccgcgaaagacgaatccggagttctctcgcctttccgtttctcaagaagggagacgggagagaaggatgtgaggttaaaagtgttgttctgtggaatttgccacactgatgtatgtatggccagaaacgagtggggatttactacttaccctctcgtccccgggcatgagattgttggcgtggtgactgaagtcggagctaaagtgattaaattcaaagccggagacaaagtcggagttggttatatgctcagctcgtgccggtcatgtgacatctgcaccgatgaccaagagaaccactgtccaaaaatgattatgacgtccggaggaaagtactacgatgacaccatgacttatggtggttactctgaccacctggtttgtgaagaggattacatcatccgtattcctgaaaatctcccgttagacgctgccgcgccgctactctgcgctggggtcacggtttattcaccgttgaagtctcacggactcgacaagcccggaatccacattggtgtggtgggactaggcggtttaggtcatgtagctgtgaaatttgctaaggctatgggtattaaggttacagttattagtacttcggataggaagagagacgaggcgttaactcggcttggtgcggatctgttcttggtgagccgtgacccggaacagatgaaggatgcaatgggtactatggatggtattattgataccgtatctgctactcatccagttcttccgattcttaatttgcttaaatataagggtaaacttattatggttggtgcacctgataaaccgcttgagcttccggttctgcctctcatctttgggaaaaagatggtggtgggaagtatggtaggagggataaaagagactcaagagatgatggatttggccggaaaacacaacatcacggcagatattgagcttatctctgcggattatgtcaacactgccatgaaacggctcgagaaggctgacgttagataccgttttgtgattgatgttgccaacaccttgaagcctagtccttaa

SEQ ID NO: 5353 - protein, 357 aa, Brassica napus
MGKVPATEAFGLAAKDESGVLSPFRFSRRETGEKDVRLKVLFCGICHTDVCMARNEWGFTTYPLVPGHEIVGVVTEVGAKVIKFKAGDKVGVGYMLSSCRSCDICTDDQENHCPKMIMTSGGKYYDDTMTYGGYSDHLVCEEDYIIRIPENLPLDAAAPLLCAGVTVYSPLKSHGLDKPGIHIGVVGLGGLGHVAVKFAKAMGIKVTVISTSDRKRDEALTRLGADLFLVSRDPEQMKDAMGTMDGIIDTVSATHPVLPILNLLKYKGKLIMVGAPDKPLELPVLPLIFGKKMVVGSMVGGIKETQEMMDLAGKHNITADIELISADYVNTAMKRLEKADVRYRFVIDVANTLKPSP

SEQ ID NO: 5354 - DNA, 1140 bp, Zea mays
  CDS (1)..(1140)
atggcgaccgcggggaaggtgatcaagtgcaaagctgcggtggcatgggaggccggcaagccactgtcgatcgaggaggtggaggtagcgcctccgcaggccatggaggtgcgcgtcaagatcctcttcacctcgctctgccacaccgacgtctacttctgggaggccaaggggcagactcccgtgttccctcggatctttggccacgaggctggaggtatcatagagagtgttggagagggtgtgactgacgtagctccgggcgaccatgtccttcctgtgttcactggggagtgcaaggagtgtgcccactgcaagtcggcagagagcaacatgtgtgatctgctcaggatcaacaccgaccgcggtgtgatgattgccgatggcaagtcgcggttttcaatcaatgggaagcctatctaccactttgttgggacttccaccttcagcgagtacaccgtcatgcatgtgggttgtgttgcaaagatcaaccctcaggctccccttgataaagtttgcgtccttagctgtggtatttctaccggtcttggtgcatcaattaatgttgcaaaacctccgaagggttcgacagtggctgttttcggtttaggagccgttggtcttgccgctgcagaaggtgcaaggattgctggagcgtcaaggatcattggtgtcgacctgaaccccagcagattcgaagaagctaggaagttcggttgcactgaatttgtgaacccaaaagaccacaacaagccagtgcaggaggtacttgctgagatgaccaacggaggggtcgaccgcagtgtggaatgcactggcaacattaatgctatgatccaagctttcgaatgtgttcatgatggctggggtgttgctgtgctggtgggtgtgccacataaggacgctgagttcaagacccacccgatgaacttcctgaacgaaaggaccctgaaggggaccttctttggcaactataagccacgcactgatctgccaaatgtggtggagctgtacatgaaaaaggagctggaggtggagaagttcatcacgcacagcgtcccgttcgccgagatcaacaaggcgttcgacctgatggccaagggggagggcatccgctgcatcatccgcatggagaactag

SEQ ID NO: 5355 - protein, 379 aa, Zea mays
MATAGKVIKCKAAVAWEAGKPLSIEEVEVAPPQAMEVRVKILFTSLCHTDVYFWEAKGQTPVFPRIFGHEAGGIIESVGEGVTDVAPGDHVLPVFTGECKECAHCKSAESNMCDLLRINTDRGVMIADGKSRFSINGKPIYHFVGTSTFSEYTVMHVGCVAKINPQAPLDKVCVLSCGISTGLGASINVAKPPKGSTVAVFGLGAVGLAAAEGARIAGASRIIGVDLNPSRFEEARKFGCTEFVNPKDHNKPVQEVLAEMTNGGVDRSVECTGNINAMIQAFECVHDGWGVAVLVGVPHKDAEFKTHPMNFLNERTLKGTFFGNYKPRTDLPNVVELYMKKELEVEKFITHSVPFAEINKAFDLMAKGEGIRCIIRMEN

SEQ ID NO: 5356 - DNA, 1164 bp, Glycine max
  CDS (1)..(1164)
atggaacacaaagtagccacaacaactgaaggacaatccataagatgtaaagcggcaatttgtcgcaaagcaggtgaaccactgtgtattgaggagatcattgtggcgccaccaatgcctggtgaagctcgcattcgtattatatgctcctctctctgtcaaaccgatatcagttttcggaacatgcaggaccatcctgccatttatccaagaattctgggtcacgaggcaataggggttgtggaaagtgtaggagaggatgtaactgaagttacaaaaggagatgtggttgttccaattttcttacctgattgtggggagtgtatcgattgcaaatcaagcaagagcaacctttgttcaaagtttccatttgaggtgtctccctggatgcctagatatgccacttctagattcacagatttaaaaggagagatcatacaccatttcttgtctgtttctagttttagcgagtacactgtggtcgacattgcccatctaatcaagattgatccggcaataccacccaacagggcatgcctcatcagctgtggtatatcagcagggataggtgctgcttggagagcagcaggtgtggagccagggtctacagtagctatttttgggctggggagtattggattagcagttgctgagggagctagactttgtggagcaactaagattataggtgtggatgtcaacccagaaagatatgaaatcggaaaaaggtttggactcacggactttgtccattctggagaatgtgaaaataaatctgtgagccaggttatcatagagatgactggtgggggagcagattattgctttgaatgtgttggtatggcatcattgatgcacgaagcatatgcttcttgtagaaagggttgggggaaaacaatagttttgggagtggacaagccaggatccaagttgaaccttagctgtagtgaggtcctagttagtgggaagagcctcaggggatgtttatttggaggactcaaacctaagtctcatgtacccattctccttaaacgctacatggacaaggaactgagtttggacgaagttgtcacacatgaaatggagttcaaggatatcaataaagcttttgatctattgattgaaggacagtgtcttcgatgtgtgatttggatggacaaatga

SEQ ID NO: 5357 - protein, 387 aa, Glycine max
MEHKVATTTEGQSIRCKAAICRKAGEPLCIEEIIVAPPMPGEARIRIICSSLCQTDISFRNMQDHPAIYPRILGHEAIGVVESVGEDVTEVTKGDVVVPIFLPDCGECIDCKSSKSNLCSKFPFEVSPWMPRYATSRFTDLKGEIIHHFLSVSSFSEYTVVDIAHLIKIDPAIPPNRACLISCGISAGIGAAWRAAGVEPGSTVAIFGLGSIGLAVAEGARLCGATKIIGVDVNPERYEIGKRFGLTDFVHSGECENKSVSQVIIEMTGGGADYCFECVGMASLMHEAYASCRKGWGKTIVLGVDKPGSKLNLSCSEVLVSGKSLRGCLFGGLKPKSHVPILLKRYMDKELSLDEVVTHEMEFKDINKAFDLLIEGQCLRCVIWMDK

SEQ ID NO: 5358 - DNA, 1167 bp, Glycine max
  CDS (1)..(1167)
atgaaagatgacaaacaggctccagttcctgcttctacaaccgaaggacaacctatacgatgtaaagcggcggtttctagaagagctggtgagccgttggttattgaggacatcattgtggcgccgccaaagcctcgtgaggctcggattcgtattatttgttcctctctctgccacagcgacatcacacttcggaaccttcaggaccctcctgccattttcccaaggattctaggtcatgaggcaactggggttgtggaaagtgttgggaaggatgtaactgaagttacaaaaggtgatgtggtaattccagttatcctaccagaatgtggggagtgcatagattgcaaatcaaccaagagcaaccggtgcactaattttcctttcaaggtgtctccttggatgcctcgagatggcaccacaagattcactggccaaaatggagagatcatataccatttcttgtttatttcaagtttcagtgagtacactgtggtggacattgctaatctgataaagattgatccagaaattcctcctgacagagcatgccttctcggatgtggtgtttcaacaggggtaggtgctgcttggagaactgcaggtgtggaacccgggtcaacagtagctatttttgggttgggatctattggattagctgttgcaaagggagctagactttgtggagcaactaggattataggtgtggacatcaacccagaaaagtttgaaattggaaagaagtttggagtcacagactttgtcaatgctggagaatgtgggggcaaacctgttggccaggttatcatagagataactgatggaggagcagattattgctttgaatgtgttggtaatgcatcattgatgcatgaagcatatgcttcttgtagaaagggttggggaaaaacaatagttttgggatcggacaagccaagctccaagttgagccttatctgtagtgagatcctcgttagtgggaaaagcctcgtgggatacatgtttagaggactcaaacccaagtctcatatgcctattctcattaaacactacttggacaaagaactaaatttagatgggtttgtcacacataaagtgaagttcaaacatatcaacaaagcttgtaatttaataattaaaggacagtgtcttcgatatgtaatttag

SEQ ID NO: 5359 - protein, 388 aa, Glycine max
MKDDKQAPVPASTTEGQPIRCKAAVSRRAGEPLVIEDIIVAPPKPREARIRIICSSLCHSDITLRNLQDPPAIFPRILGHEATGVVESVGKDVTEVTKGDVVIPVILPECGECIDCKSTKSNRCTNFPFKVSPWMPRDGTTRFTGQNGEIIYHFLFISSFSEYTVVDIANLIKIDPEIPPDRACLLGCGVSTGVGAAWRTAGVEPGSTVAIFGLGSIGLAVAKGARLCGATRIIGVDINPEKFEIGKKFGVTDFVNAGECGGKPVGQVIIEITDGGADYCFECVGNASLMHEAYASCRKGWGKTIVLGSDKPSSKLSLICSEILVSGKSLVGYMFRGLKPKSHMPILIKHYLDKELNLDGFVTHKVKFKHINKACNLIIKGQCLRYVI

SEQ ID NO: 5360 - DNA, 1161 bp, Glycine max
  CDS (1)..(1161)
atggaacataaattagcaacaactgaaggacaacccataagatgtaaagcggcggtttgtcgcaaagctggtgagccactgggtattgaggagatcatggtggcgccaccaatgcctggtgaagctcgcattcgtattatatgctcctctctctgtcgaactgatatcagtttccggaacatgcaggggcctccggccaatttcccaacaattctgggtcatgaggcaataggggttgtggagagcgtaggagaggatgtaactgaagttgcaaaaggagatatggttgtcccaattttcatagctgaatgtggggagtgtatagattgcaaatcaagcaagagcaacctttgttcaaagtttcctttcaagctgtctccttggatgcctagacatgccacttctagattcgtggatttaaaaggagagatcatacaccacttcttgtctgtttctagttttagcgagtacaccgtggtcgacatcgcccatctaaccaagattgatccggaagttcctcccagcaaggcatgcctcctcagttgtggtgtatcaaccggggtaggtgctgcttggagaacagcaggtgtggagccagggtctacagtagctattttcgggctgggaagtattggattagctgttgctgagggagctagactttgtggagcaacaaggattataggtgtggatatcaactcagaaaaatatgaaatcggaaagaagtttggaatcacggattttgttcattctggagaatgtgaaaacaaatctgcgagccaggttatcatagagatgactgatggaggagcagattattgttttgaatgtgttggtaatgcatcattgatgcatgaggcatatgcttcttgtagaaagggttggggaaaaacaatagttttgggatcggacaagccaggctccaagttgagccttagctgtagtgagatcctcgttagtgggaagagcctcgtgggatgcatgtttggaggactcaaacccaagtctcatgtgcctattctcattaaacgctacttggacaaggaactgaatttggatgggtttgtcacacatgaagtggagttcaaagatatcaacaaagcttttgatttaatgattaaaggacagtgtcttcgatgtgtgatttggatggacaaatga

SEQ ID NO: 5361 - protein, 386 aa, Glycine max
MEHKLATTEGQPIRCKAAVCRKAGEPLGIEEIMVAPPMPGEARIRIICSSLCRTDISFRNMQGPPANFPTILGHEAIGVVESVGEDVTEVAKGDMVVPIFIAECGECIDCKSSKSNLCSKFPFKLSPWMPRHATSRFVDLKGEIIHHFLSVSSFSEYTVVDIAHLTKIDPEVPPSKACLLSCGVSTGVGAAWRTAGVEPGSTVAIFGLGSIGLAVAEGARLCGATRIIGVDINSEKYEIGKKFGITDFVHSGECENKSASQVIIEMTDGGADYCFECVGNASLMHEAYASCRKGWGKTIVLGSDKPGSKLSLSCSEILVSGKSLVGCMFGGLKPKSHVPILIKRYLDKELNLDGFVTHEVEFKDINKAFDLMIKGQCLRCVIWMDK

SEQ ID NO: 5362 - DNA, 1284 bp, Glycine max
  CDS (1)..(1284)
atggcatcagcaatgtttcgtaggaacatcatcacccactactccaagtttgcttcttctttgtcttcgttgcctcgccattcctcaatctacaaccctctctctatgtctgtttcttcatttcatagcgaaagtgttggtggtggtggtgggttgccatcttccatgcgtggagctgtgtattgggaaccgaacaagccgctaaccatcgaggaatttcacatgcctcgccccaaggccggtgaagttctcatcaaaacaaaggcctgtggagtatgccactctgatctacatgttatgaaaggtgaaattccgtttaccagtccttgtgttgtggggcatgagattaccggtgaggttgttgaacatggagcactcactgacagcaaaaccatagaaaggcttccagttggatctcgagttgttggggccttcatcatgccttgtggcaactgctcctactgttcaaagggccatgatgatctatgtgaagctttctttgcctataaccgggcaaaaggaaccctctatgatggtgaaactcgactcttttttcgaaacagtggaaaaccagcatacatgtatagtatgggagggcttgctgaatactgtgttgtgccagcaaatggagtgtctgtgttaccagactcattgccatatacagagtctgcaattctaggatgtgctgtttttactgcttacggcgctatggctcatgcagctcaagtgcgtcctggtgattctgttgctgttattggaactggaggtgttggttctagttgtttacagatagctagagcctttggtgcctcagatataattgctgtggatgtacgggatgaaaagctacagaaagcaaagacatttggtgctactcacactgtaaattcagcaaaggaagatcccattgaaaagatacttgaaattactggtggaaagggtgttgatgttgctgtggaagccttggggaaaccacagacatttgctcaatgtacacaaagtgtgaaggatgggggaaaagctgtgatgattggactggcacaagctggttctttaggagaggtggatataaatcggcttgttcgcagaaagatacaagttattggctcctatgggggcagggcaaggcaagatcttccaaagttaattagactggcagaaacaggtatcttcaatcttggccatgctgtttcaagaacatacacttttgaggaggcgggaaaagcattccaagatctcaatgaaggaaaaattgtcggtcgagctgtgattgagataatatag

SEQ ID NO: 5363 - protein, 427 aa, Glycine max; identical to SEQ ID NO: 5347

SEQ ID NO: 5364 - DNA, 1140 bp, Glycine max
  CDS (1)..(1140)
atgtctacagctggtcaggtcatcaagtgcagagctgcggtggcatgggaagcagggaagccactatcgatagaaaccatagaagtggcaccaccccagaaaggtgaagtgcgtttgaagatcctcttcaactccctttgccgtacagatgtttactggtgggatgctaagggccagactccgctgtttcctcgtatcttaggccacgaagcttcggggattgtggagagcgtgggcaagggtgtgacacatctgaaaccaggtgaccatgctctcccaatattcactggggagtgtggtgaatgcacctattgcaagtctgaagagagcaacctgtgtgagcttctcaggatcaacactgacagaggagtgatgctcagtgatggcaaaacaaggttctccaaaaatggacaacctatttaccacttcgttggaacctccactttcagtgaatacactgttctccatgaaggatgtgtcgccaagatcaaccctgctgcccctcttgacaaagttgctgttgtcagttgtggattctgcacaggttttggggctactgtgaatgttgcaaagccaaagcctaataatactgttgctgtatttggattaggagctgttggtcttgctgcctgtgaaggggcaagggtttctggtgcatctagaatcatcggggttgatttacttaccaatcgatttgaacaagccaaacaatttggggtcactgattttgtgaacccgaaagatcacaacaaaccagttcaagaggtcattgctgaaatgactaatggaggagtagatcgtgctattgaatgcacaggaagcatccaagcatcaatctcggcatttgaatgcactcatgatggttggggtactgctgtccttgttagtgtgccaaagaaggatgcagaattcaaaactcatcctatgaagttcatggaagggagaactcttaagggtaccttctatggtcactatagaccccgcactgacattcctggtgttgtggagaagtacctcaacaaggagctggagctggacaaatttatcactcactctgtcccattctcagagatcaacactgcatttgatcttatgctgaaaggggagggaataaggtgcctcatctgcatggaagagtaa

SEQ ID NO: 5365 - protein, 379 aa, Glycine max
MSTAGQVIKCRAAVAWEAGKPLSIETIEVAPPQKGEVRLKILFNSLCRTDVYWWDAKGQTPLFPRILGHEASGIVESVGKGVTHLKPGDHALPIFTGECGECTYCKSEESNLCELLRINTDRGVMLSDGKTRFSKNGQPIYHFVGTSTFSEYTVLHEGCVAKINPAAPLDKVAVVSCGFCTGFGATVNVAKPKPNNTVAVFGLGAVGLAACEGARVSGASRIIGVDLLTNRFEQAKQFGVTDFVNPKDHNKPVQEVIAEMTNGGVDRAIECTGSIQASISAFECTHDGWGTAVLVSVPKKDAEFKTHPMKFMEGRTLKGTFYGHYRPRTDIPGVVEKYLNKELELDKFITHSVPFSEINTAFDLMLKGEGIRCLICMEE

SEQ ID NO: 5366 - DNA, 1143 bp, Glycine max
  CDS (1)..(1143)
atgtcgagcacagctggccaagtcatcaaatgcaaagctgcggtttcatgggaggcagggaagccacttgtgattgaagaagtagaggttgcgccaccacaagctggtgaagtgcgtttgaagatcctctacacctctctttgccacactgatgtttacttctgggaagctaagggccaaactccattgtttcctcgtatatttggtcatgaagctggagggattgtggagagcgtaggtgagggtgtgactcatctgaaaccaggggaccatgccctccctgtgtttaccggggagtgtggggactgccctcattgcaagtcagaggagagcaacatgtgtgatcttctcaggatcaacactgataggggtgtcatgatccatgatagccaaacaaggttttctataaagggacaacctatttaccattttgttggtacctccacattcagtgaatacactgttgttcatgccggatgtgttgccaaagtcaaccctgctgccccacttgacaaaatttgtgttctcagttgtggaatttgcacaggtcttggggctactatcaatgttgcaaaaccaaaacctggttcttctgttgccatttttggacttggagctgttggccttgctgctgctgaaggggcaaggatttctggtgcatcaagaattattggggttgatttagtttctagcagatttgaagaagctaagaagtttggggtcaatgaatttgtgaacccaaaagaccatgacaagcctgtacaagaggtgattgctgcaatgacgaatgggggtgtggatcgtgctgttgaatgtactggcagcatccaagccatgatctcggcattcgaatgcgtccacgatggttggggtgttgctgtacttgttggagtgccaaacaaagatgatgcattcaaaactcatccagtgaatttcttgaacgagagaactctaaagggtaccttctacggaaactacaaaccccgcactgatcttccttctgttgtggagaagtacatgaatggggaattggaactggagaaattcatcactcacacagttccattctcagagattaacaaggcttttgattacatgctgaaaggggagtccatcagatgcatcattcgaatgggggagtaa

SEQ ID NO: 5367 - protein, 380 aa, Glycine max
MSSTAGQVIKCKAAVSWEAGKPLVIEEVEVAPPQAGEVRLKILYTSLCHTDVYFWEAKGQTPLFPRIFGHEAGGIVESVGEGVTHLKPGDHALPVFTGECGDCPHCKSEESNMCDLLRINTDRGVMIHDSQTRFSIKGQPIYHFVGTSTFSEYTVVHAGCVAKVNPAAPLDKICVLSCGICTGLGATINVAKPKPGSSVAIFGLGAVGLAAAEGARISGASRIIGVDLVSSRFEEAKKFGVNEFVNPKDHDKPVQEVIAAMTNGGVDRAVECTGSIQAMISAFECVHDGWGVAVLVGVPNKDDAFKTHPVNFLNERTLKGTFYGNYKPRTDLPSVVEKYMNGELELEKFITHTVPFSEINKAFDYMLKGESIRCIIRMGE

SEQ ID NO: 5368 - DNA, 1083 bp, Glycine max
  CDS (1)..(1083)
atggctaaatctccagaaactgaacttcccgtcgaagctttcggttgggctgcttcagacacttctggcacccttgcaccttttcatttctccagaagagaaaatggcgttgatgacgtcactctcaagattctcttctgcggggtttgccactcggatctccacactctcaaaaacgactggggtttcaccacttaccctgtcgttcctgggcatgaaattgttggtgttgtgacaaaagttggcaacaatgtgaaaaacttcaaagtgggtgataaagttggagttggtgtgatagtggagtcttgcaaggaatgtgaaagttgccaacaagatctggagagttactgtccccgccctgtttttacctataactctccttattatgatgggacacgaaccaaacgtggttattctaacatcatggttgtgcaccagcgttatgtgctccgatttcctgagaacttgcctcttgatgctggtgctcctctgctgtgtgctgggataactgtgtatagcccgatgaaatattatgggatgacagagccaggcaaacatttgggagtggcagggcttggtgggttaggtcatgttgcaatcaaacttgctaaggcgtttgggctgaaagttactgtcatcagtagctctcctaacaagcaagctgaggccattgaccgactcggggctgattctttccttgtttcatcagaccctgcaaaaatgaaggtggctttgggaaccatggactatatcatagacacaatttctgctgttcattccctgattccactgcttggtctgctgaagctgaatgggaagctagttactgtagggttgcctaacaagccccttgagcttcctatctttccattagttgcaggacggaaacttataggggggagcaactttggagggatcaaagaaactcaggaaatgcttgatttctgcgcaaagcacaacataactgcagatattgagctgattaagatggatcagatcaacacagccatggaaaggcttagcaaagctgatgtgaaatatcgctttgtgattgatgtggcgaactctttcgcaagtttgtag

SEQ ID NO: 5369 - protein, 360 aa, Glycine max
MAKSPETELPVEAFGWAASDTSGTLAPFHFSRRENGVDDVTLKILFCGVCHSDLHTLKNDWGFTTYPVVPGHEIVGVVTKVGNNVKNFKVGDKVGVGVIVESCKECESCQQDLESYCPRPVFTYNSPYYDGTRTKRGYSNIMVVHQRYVLRFPENLPLDAGAPLLCAGITVYSPMKYYGMTEPGKHLGVAGLGGLGHVAIKLAKAFGLKVTVISSSPNKQAEAIDRLGADSFLVSSDPAKMKVALGTMDYIIDTISAVHSLIPLLGLLKLNGKLVTVGLPNKPLELPIFPLVAGRKLIGGSNFGGIKETQEMLDFCAKHNITADIELIKMDQINTAMERLSKADVKYRFVIDVANSFASL

SEQ ID NO: 5370 - DNA, 1095 bp, Glycine max
  CDS (1)..(1095)
atgggtaaggggggaatgtcaattgatgaacatggagaaggcaaagaagagaatatggctgcttggcttgttggaatgaacactctcaagattcagcctttcaagcttcctactttgggaccccatgatgtcagagttagaatgaaggctgttggtatctgtgggagtgatgttcactacctcaagacactgaggtgtgctcactttatagttaaagaaccaatggttattggtcatgagtgtgctgggatcatagaagaagttggtagtcaggtaaagagtttggtgcctggtgaccgtgtggcaattgagcctgggatcagttgttggcattgcaaccattgcaaacacggtcgatataacttatgcgatgatatgaagttttttgctactccaccagttcatggttccctggctaatcagatagtgcatcctgcagacctatgttttaagctgccagacaacgtgagcctagaggagggagcaatgtgtgaacccttaagtgttggtgttcatgcttgtaggagagctaatattggaccagaaacatatgtgttaatcatgggagcaggacctataggacttgttacaatgcttgcagctcgtgcttttggggcacccaggactgtcattgtggatgtagatgactatcgtttatctgttgcaaaatcacttggtgccgatgacattgttaaagtctcaacaaacattcaggatgtggctgaagaagttgtgcagatacagaaggttatgggagctgatatagatgttacctttgattgtgctggttttgacaaaaccatgtctacagcactgagtgctactcagccaggtggcaaagtttgtctagtgggaatgggacattctgaaatgactgtcccactcaccccagctgcagcaagggaagttgatgtgcttggagtttttcgctatatgaacacatggcctctttgccttgagtttctaaggagtggaaaaatcgatgtaaaaccccttataactcataggtttgggttttctcaaaaggaagtggaagaagcctttgaaacaagtgctcgtggtggtaacgccatcaaggttatgttcaatctttag

SEQ ID NO: 5371 - protein, 364 aa, Glycine max
MGKGGMSIDEHGEGKEENMAAWLVGMNTLKIQPFKLPTLGPHDVRVRMKAVGICGSDVHYLKTLRCAHFIVKEPMVIGHECAGIIEEVGSQVKSLVPGDRVAIEPGISCWHCNHCKHGRYNLCDDMKFFATPPVHGSLANQIVHPADLCFKLPDNVSLEEGAMCEPLSVGVHACRRANIGPETYVLIMGAGPIGLVTMLAARAFGAPRTVIVDVDDYRLSVAKSLGADDIVKVSTNIQDVAEEVVQIQKVMGADIDVTFDCAGFDKTMSTALSATQPGGKVCLVGMGHSEMTVPLTPAAAREVDVLGVFRYMNTWPLCLEFLRSGKIDVKPLITHRFGFSQKEVEEAFETSARGGNAIKVMFNL

SEQ ID NO: 5372 - DNA, 1071 bp, Glycine max
  CDS (1)..(1071)
atggcaaatgaactacccgtcaaagcttttggttgggctgcttcagacacttctggcacccttgccccttttcatttctccagaagggaaaatggcgtcgatgacgtcactctcaagattctcttctgcggggtttgccactctgatctccacactctcaaaaacgactggggtttcaccacctaccctgtcgttcctgggcatgaaattgttggtgttgtgacagaagttggaaacaatgtgaaaaacttcaaagtgggtgataaagttggagttggtgtgatagtggagtcttgcaaggaatgtgaaaattgccaacaggatctggagaattactgtccccgccctgtgtttacctataactctccttattatgatgggacacgaacccaaggtggttattctaacattgtggtcgtgcaccagcgttatgtgctccggtttcctgagaacttgccccttgatgctggtgctcctctgctgtgtgctgggataactgtgtatagcccaatgaaatattatgggatgacagagccaggcaaacatttgggagcggcagggcttggtgggttaggccatgttgcaatcaaacttgctaaggcttttgggctcaaagttactgtcatcagtagctctcctaacaagcaagctgaggccattgaccgactcggggctgattctttccttgtttcatcagaccctgcaaaaatgaaggtggctttgggaaccatggactatatcatagacacaatttctgctgttcattccctgattccactgcttggtctgctgaagctgaatgggaagctagttactgtagggttgcctaacaagccccttgagcttcctatctttccattagttgcaggacggaaacttataggggggagcaactttggagggatcaaagaaactcaggaaatgcttgatttctgcgcaaagcacaacataactgcagatattgagctgattaagatggatcagatcaacacagccatggaaaggcttagcaaagctgatgtgaaatatcgctttgtgattgatgtggcgaactctttcgcaagtttgtag

SEQ ID NO: 5373 - protein, 356 aa, Glycine max
MANELPVKAFGWAASDTSGTLAPFHFSRRENGVDDVTLKILFCGVCHSDLHTLKNDWGFTTYPVVPGHEIVGVVTEVGNNVKNFKVGDKVGVGVIVESCKECENCQQDLENYCPRPVFTYNSPYYDGTRTQGGYSNIVVVHQRYVLRFPENLPLDAGAPLLCAGITVYSPMKYYGMTEPGKHLGAAGLGGLGHVAIKLAKAFGLKVTVISSSPNKQAEAIDRLGADSFLVSSDPAKMKVALGTMDYIIDTISAVHSLIPLLGLLKLNGKLVTVGLPNKPLELPIFPLVAGRKLIGGSNFGGIKETQEMLDFCAKHNITADIELIKMDQINTAMERLSKADVKYRFVIDVANSFASL

SEQ ID NO: 5374 - DNA, 1089 bp, Glycine max
  CDS (1)..(1089)
atggcgtcgtcacaaccagagatggagcatccaaagaaggtttttggttgggctgctcgggactcatctgggcttctctccccattcaacttctccagaagagaaacgggggagaaagatttggtattcaaagtgcaatactgtggaatatgccactcagatctacatatgttaaagaacgagtggggcaacacaacctatcctctggttcctgggcacgagattgctggtgtggtaacagaagttggaagcaaggtgcaaaagttcaaagttggagaccgggtaggtgtggggtgcatgattggatcctgtcgttcatgtgaaagctgtgatgaaaatcttgagaattactgccccaaaatgattctcacatacggtgtcaagtattttgatggcaccataacacatggaggctactctgacttgatggttgcggatgaacactttgtggttagaattccggataacctaccacttgatgctgctgctcctctcctctgtgctgggatcactgtgtatagccctttgagatactatggacttgacaagcctggtctgaatcttggtgtggttggtcttggtggacttggtcacatggctgtcaagtttgccaaagctcttggagctaatgtcacagtgattagcacatctcctaacaaaaagaaggaagccattgagaacataggagctgactcatttgtggttagccgtgaacaagatcagatgcaggctgtaatgggaaccatggatggtatcattgacacagtttctgctgtccatcctcttgtgcctttgattggcctgttgaagcctcatggtaaactagtcatggttggtgcaccagagaagcctttggagttgccagtattttctttacttatggggaggaaaatggttggtggcagtagcatcggagggatgaaagagacgcaagaaatgattgattttgctgctaagcatggagtgaagcctgatattgaggttattcccatagattatgtgaacactgcaatagagcgcctcgccaaagcagatgtgaaatatcgatttgtaattgacattggaaacacgttgaagccaagctcttga

SEQ ID NO: 5375 - protein, 362 aa, Glycine max
MASSQPEMEHPKKVFGWAARDSSGLLSPFNFSRRETGEKDLVFKVQYCGICHSDLHMLKNEWGNTTYPLVPGHEIAGVVTEVGSKVQKFKVGDRVGVGCMIGSCRSCESCDENLENYCPKMILTYGVKYFDGTITHGGYSDLMVADEHFVVRIPDNLPLDAAAPLLCAGITVYSPLRYYGLDKPGLNLGVVGLGGLGHMAVKFAKALGANVTVISTSPNKKKEAIENIGADSFVVSREQDQMQAVMGTMDGIIDTVSAVHPLVPLIGLLKPHGKLVMVGAPEKPLELPVFSLLMGRKMVGGSSIGGMKETQEMIDFAAKHGVKPDIEVIPIDYVNTAIERLAKADVKYRFVIDIGNTLKPSS

SEQ ID NO: 5376 - DNA, 1095 bp, Glycine max
  CDS (1)..(1095)
atgggtaaggggggaatgtcaattgatgaacatggagaaggcaaagaagagaatatggctgcttggcttgttggaatgaacactctcaagattcagcctttcaagcttcctactttgggaccccatgatgtcagagttagaatgaaggctgttggtatctgtgggagtgatgttcactacctcaagacactgaggtgtgctcactttatagttaaagaaccaatggttattggtcatgagtgtgctgggatcatagaagaagttggtagtcaggtaaagagtttggtgcctggtgaccgtgtggcaattgagcctgggatcagttgttggcattgcaaccattgcaaacacggtcgatataacttatgcgatgatatgaagttttttgctactccaccagttcatggttccctggctaatcagatagtgcatcctgcagacctatgttttaagctgccagacaacgtgagcctagaggagggagcaatgtgtgaacccttaagtgttggtgttcatgcttgtagaagagctaatattggaccagaaacatatgtgttgatcatgggagcagggcccataggacttgttacaatgctggcagctcgtgcgtttggggcacccaaaacagtcattgtggatgttgatgaccatcgtttatctgttgcaaaatctcttggtgcagatgatattattaaagtctcaacaaacattaaggatgtggctgaagaagttgtgcagatacagaaggttatgggagctgatatagatgttacctttgattgtgctggttttgacaaaaccatgtctacagcactgagtgctactcagccaggtggcaaagtttgtctagtgggaatgggacattctgaaatgactgtcccactcaccccagctgcagcaagggaagttgatgtgcttggagtttttcgctatatgaacacatggcctctttgccttgagtttctaaggagtggaaaaatcgatgtaaaaccccttataactcataggtttgggttttctcaaaaggaagtggaagaagcctttgaaacaagtgctcgtggtggtaacgccatcaaggttatgttcaatctttag

SEQ ID NO: 5377 - protein, 364 aa, Glycine max
MGKGGMSIDEHGEGKEENMAAWLVGMNTLKIQPFKLPTLGPHDVRVRMKAVGICGSDVHYLKTLRCAHFIVKEPMVIGHECAGIIEEVGSQVKSLVPGDRVAIEPGISCWHCNHCKHGRYNLCDDMKFFATPPVHGSLANQIVHPADLCFKLPDNVSLEEGAMCEPLSVGVHACRRANIGPETYVLIMGAGPIGLVTMLAARAFGAPKTVIVDVDDHRLSVAKSLGADDIIKVSTNIKDVAEEVVQIQKVMGADIDVTFDCAGFDKTMSTALSATQPGGKVCLVGMGHSEMTVPLTPAAAREVDVLGVFRYMNTWPLCLEFLRSGKIDVKPLITHRFGFSQKEVEEAFETSARGGNAIKVMFNL

SEQ ID NO: 5378 - DNA, 1140 bp, Glycine max
  CDS (1)..(1140)
atgtctacagctggtcaggtcatcaagtgcagagctgcggtggcatgggaagcagggaagccactatcgatagaaaccatagaagtggcaccaccccagaaaggtgaagtgcgtttgaagatcctcttcaactccctttgccgtacagatgtttactggtgggatgctaagggccagactccgctgtttcctcgtatcttaggccacgaagcttcggggattgtggagagcgtgggcaagggtgtgacacatctgaaaccaggtgaccatgctctcccaatattcactggggagtgtggtgaatgcacctattgcaagtctgaagagagcaacctgtgtgagcttctcaggatcaacactgacagaggagtgatgctcagtgatggcaaaacaaggttctccaaaaatggacaacctatttaccacttcgttggaacctccactttcagtgaatacactgttctccatgaaggatgtgtagccaagatcaaccctgatgccccacttgacaaagttgctattgtcagctgtggattctgcacaggttttggggctactgtgaatgttgcaaaaccaaagcctagtaatactgttgctgtctttggcttaggagctgttggtcttgctgcctgtgaaggggcaagggtttctggtgcatctagaatcatcggggttgatttacttaccaatcgatttgaacaagccaaacaatttggggtcactgattttgtgaacccgaaagatcacaacaaaccagttcaagaggtcattgctgaaatgactaatggaggagtagatcgtgctattgaatgcacaggaagcatccaagcatcaatctcggcatttgaatgcactcatgatggttggggtactgctgtccttgttagtgtgccaaagaaggatgcagaattcaaaactcatcctatgaagttcatggaagggagaactcttaagggtaccttctatggtcactatagaccccgcactgacattcctggtgttgtggagaagtacctcaacaaggagctggagctggacaaatttatcactcactctgtcccattctcagagatcaacactgcatttgatcttatgctgaaaggggagggaataaggtgcctcatctgcatggaagagtaa

SEQ ID NO: 5379 - protein, 379 aa, Glycine max
MSTAGQVIKCRAAVAWEAGKPLSIETIEVAPPQKGEVRLKILFNSLCRTDVYWWDAKGQTPLFPRILGHEASGIVESVGKGVTHLKPGDHALPIFTGECGECTYCKSEESNLCELLRINTDRGVMLSDGKTRFSKNGQPIYHFVGTSTFSEYTVLHEGCVAKINPDAPLDKVAIVSCGFCTGFGATVNVAKPKPSNTVAVFGLGAVGLAACEGARVSGASRIIGVDLLTNRFEQAKQFGVTDFVNPKDHNKPVQEVIAEMTNGGVDRAIECTGSIQASISAFECTHDGWGTAVLVSVPKKDAEFKTHPMKFMEGRTLKGTFYGHYRPRTDIPGVVEKYLNKELELDKFITHSVPFSEINTAFDLMLKGEGIRCLICMEE

SEQ ID NO: 5380 - DNA, 1071 bp, Glycine max
  CDS (1)..(1071)
atggcaaatgaactacccgtcaaagcttttggttgggctgcttcagacacttctggcacccttgccccttttcatttctccagaagggaaaatggcgtcgatgacgtcactctcaagattctcttctgcggggtttgccactctgatctccacactctcaaaaacgactggggtttcaccacctaccctgtcgttcctgggcatgaaattgttggtgttgtgacagaagttggaaacaatgtgaaaaacttcaaagtgggtgataaagttggagttggtgtgatagtggagtcttgcaaggaatgtgaaaattgccaacaggatctggagaattactgtccccgccctgtgtttacctataactctccttattatgatgggacacgaacccaaggtggttattctaacattgtggtcgtgcaccagcgttatgtgctccggtttcctgagaacttgccccttgatgctggtgctcctctgctgtgtgctgggataactgtgtatagcccaatgaaatattatgggatgacagagccaggcaaacatttgggagtggcagggcttggtgggttaggccatgttgcaatcaaacttgctaaggcttttgggctcaaagttactgtcatcagtagctctcctaacaagcaagctgaggccattgaccgactcggggctgattctttccttgtttcatcagaccctgcaaaaatgaaggtggctttgggaaccatggactatatcatagacacaatttctgctgttcattccctgattccactgcttggtctgctgaagctgaatgggaagctagttactgtagggttgcctaacaagccccttgagcttcctatctttccattagttgcaggacggaaacttataggggggagcaactttggagggatcaaagaaactcaggaaatgcttgatttctgcgcaaagcacaacataactgcagatattgagctgattaagatggatcagatcaacacagccatggaaaggcttagcaaagctgatgtgaaatatcgctttgtgattgatgtggcgaactctttcgcaagtttgtag

SEQ ID NO: 5381 - protein, 356 aa, Glycine max
MANELPVKAFGWAASDTSGTLAPFHFSRRENGVDDVTLKILFCGVCHSDLHTLKNDWGFTTYPVVPGHEIVGVVTEVGNNVKNFKVGDKVGVGVIVESCKECENCQQDLENYCPRPVFTYNSPYYDGTRTQGGYSNIVVVHQRYVLRFPENLPLDAGAPLLCAGITVYSPMKYYGMTEPGKHLGVAGLGGLGHVAIKLAKAFGLKVTVISSSPNKQAEAIDRLGADSFLVSSDPAKMKVALGTMDYIIDTISAVHSLIPLLGLLKLNGKLVTVGLPNKPLELPIFPLVAGRKLIGGSNFGGIKETQEMLDFCAKHNITADIELIKMDQINTAMERLSKADVKYRFVIDVANSFASL

SEQ ID NO: 5382 - DNA, 1140 bp, Glycine max
  CDS (1)..(1140)
atggcaactcaaggtcaagtcattacctgcaaagctgcggtggcctgggaacccaacaagcccttaaccgtccaagacgttcaggttgctccgcctcaggccggcgaggtccgtgtccaaatcctcttcaccgctctctgccacaccgatgcttacacttggggcggcaaggatcccgaaggtctcttcccctgtattctcggccacgaagctgcagggattgtggagagtgttggagaaggtgttactaatgttcagcctggggatcatgtcattccctgttaccaggctgagtgtggggagtgcaagacttgcaaatcggggaagacaaacctctgtggcaaggttcgttccgccactggagttggggtcatgctcaatgatggaaagagccggttctccattaatgggaagcccatttatcatttcatgggaacatccacttttagtcaatacactgttgttcatgacgttagtgtagctaagattgacccggtagctcccttggagaaagtttgccttcttggatgtggtgtttcaactggacttggagctgtctggaacactgcaaaagtggagtcagggtcaattgttgctatttttggccttggaactgttgggcttgctgttgcagagggtgcaaaaactgctggtgcatcccgggttattggcatagatattgacagcaagaagtttgatatagcgaaaaactttggagtcaccgagtttataaatccaaacgaacatgataaaccaatccagcaggtcatcattgatcgcacagatggtggagttgattatagctttgagtgcattggaaatgtctctgtgatgagagctgctttggaatgctgccacaagggctgggggacgtcagttattgtgggtgttgcagcatcagggcaggaaatatctacccgtcctttccagttggtgagtggacgtgtctggaaaggaacagcttttggtggcttcaagagcaggtcacaggtgccttggcttgtagacaagtacttgaagaaagaaatcaaggttgatgagtatattacccatactttgaccctttcggagatcaacaaggcttttgatcttttgcatgaagggagatgtcttcgttgcgtgctgtcaacacaagaatga

SEQ ID NO: 5383 - protein, 379 aa, Glycine max
MATQGQVITCKAAVAWEPNKPLTVQDVQVAPPQAGEVRVQILFTALCHTDAYTWGGKDPEGLFPCILGHEAAGIVESVGEGVTNVQPGDHVIPCYQAECGECKTCKSGKTNLCGKVRSATGVGVMLNDGKSRFSINGKPIYHFMGTSTFSQYTVVHDVSVAKIDPVAPLEKVCLLGCGVSTGLGAVWNTAKVESGSIVAIFGLGTVGLAVAEGAKTAGASRVIGIDIDSKKFDIAKNFGVTEFINPNEHDKPIQQVIIDRTDGGVDYSFECIGNVSVMRAALECCHKGWGTSVIVGVAASGQEISTRPFQLVSGRVWKGTAFGGFKSRSQVPWLVDKYLKKEIKVDEYITHTLTLSEINKAFDLLHEGRCLRCVLSTQE

SEQ ID NO: 5384 - DNA, 1146 bp, Glycine max
  CDS (1)..(1146)
atgtcgtcgagcacagttggtcaagtcatcaaatgcaaagctgcggtttcatgggaggcagggaagccacttgtgattgaagaagtagaggttgcgccaccacaagctggtgaagtgcgtttgaagatcctctacacctctctttgccacactgatgtttacttctgggaagccaagggccaaactccattgtttcctcgtatatttggtcatgaagctggagggattgtggagagcgtaggtgagggtgtgactcatctcaaaccaggggaccatgccctcccagtgtttaccggggagtgtggagaatgccctcattgcaagtcagaggagagcaacatgtgtgatcttctcaggatcaacactgataggggtgtcatgatccatgacagccaaacaagattttctattaagggacaacctatttaccattttgttggtacctccacattcagtgaatacactgttgttcatgccggatgtgttgccaaagtcaaccctgctgccccacttgacaaaatttgtgttctcagttgtggaatttgcacaggtcttggggctactatcaatgttgcaaaaccaaaacctggttcttctgttgccatttttggacttggagctgttggccttgctgctgctgaaggggcaaggatttctggtgcatcaagaattattggggttgatttagtttctagcagatttgaagaagctaagaagtttggggtcaatgaatttgtgaacccaaaagaccatgacaagcctgtacaagaggtgattgctgcaatgacgaatgggggtgtggatcgtgctgttgaatgtactggcagcatccaagccatgatctcggcattcgaatgcgtccacgatggttggggtgttgctgtacttgttggagtgccaaacaaagatgatgcattcaaaactcatccagtgaatttcttgaacgagagaactctaaagggtaccttctacggaaactacaaaccccgcactgatcttccttctgttgtggagaagtacatgaatggggaattggaactggagaaattcatcactcacacagttccattctcagagattaacaaggcttttgattacatgctgaaaggggagtccatcagatgcatcattcgaatgggggagtaa

SEQ ID NO: 5385 - protein, 381 aa, Glycine max
MSSSTVGQVIKCKAAVSWEAGKPLVIEEVEVAPPQAGEVRLKILYTSLCHTDVYFWEAKGQTPLFPRIFGHEAGGIVESVGEGVTHLKPGDHALPVFTGECGECPHCKSEESNMCDLLRINTDRGVMIHDSQTRFSIKGQPIYHFVGTSTFSEYTVVHAGCVAKVNPAAPLDKICVLSCGICTGLGATINVAKPKPGSSVAIFGLGAVGLAAAEGARISGASRIIGVDLVSSRFEEAKKFGVNEFVNPKDHDKPVQEVIAAMTNGGVDRAVECTGSIQAMISAFECVHDGWGVAVLVGVPNKDDAFKTHPVNFLNERTLKGTFYGNYKPRTDLPSVVEKYMNGELELEKFITHTVPFSEINKAFDYMLKGESIRCIIRMGE

SEQ ID NO: 5386 - DNA, 1071 bp, Triticum aestivum
  CDS (1)..(1071)
atggcgaaaggcatgcctgctatcggttgggcggcgagggacacgtccggtgtcctctccccctacagcttctcacgaagggctctgaaggacgacgatgtcacgatcaaagtgctcttctgcgggatctgccacaccgacctccacatcgccaagaacgagtggggcaacgccctctaccccgtcgtccccgggcatgagattgttggcgtcgtcaccgaggttggccccggcgtcaagaacttcaaggccggggacgcggtgggcgtgggctacttcgtcgactcctgccgctcctgcgtgagctgcggcagcgggcacgagaaccactgccccacgctcgtgctcacctccaacgccgtggactacgacggcgccaccacccagggaggcttctccgacgtcctcgtcgtcgaccagggctacgtcgtccgcgtcccggagggcctgcccctggacggggcggcgccgctgctctgcgccggcgtcacggtgtacagccccatgatggagttcggcctcaacgcgccggggaagcacctgggcgtggtcggcctcgggggcctcggccacatggccgtcaagttcggcaaggccttcgggatgaccgtcaccgtgatcagctcgtcgccgaggaagcgcgaggaggccgtcgagcggctcggcgccgacgcgttcttggtcagccaggaccccgagcaaatgaaggcggcggccggcacgatggacggcatcatcgacacggtgtcggcggggcacccgatcgtgccgcttctggagctgctaaagccgagggggcagctggtggtggtgggcgcgcccagcacgccgctggagcttcctgcctacgccatcatcggtggcggcaagcgcgtggccgggaacctcgtgggcagcatcggcagctgccaggcgatgctggacttcgcggggaagcacggcatcaccgccgacgtcgaggtcgtcaagatggactacgtcaatacggcggtcgagcggctggagaggaacgacgtgagataccgcttcgtcatcgacgtcgccggcagccagctgggcgccgccgcttag

SEQ ID NO: 5387 - protein, 356 aa, Triticum aestivum
MAKGMPAIGWAARDTSGVLSPYSFSRRALKDDDVTIKVLFCGICHTDLHIAKNEWGNALYPVVPGHEIVGVVTEVGPGVKNFKAGDAVGVGYFVDSCRSCVSCGSGHENHCPTLVLTSNAVDYDGATTQGGFSDVLVVDQGYVVRVPEGLPLDGAAPLLCAGVTVYSPMMEFGLNAPGKHLGVVGLGGLGHMAVKFGKAFGMTVTVISSSPRKREEAVERLGADAFLVSQDPEQMKAAAGTMDGIIDTVSAGHPIVPLLELLKPRGQLVVVGAPSTPLELPAYAIIGGGKRVAGNLVGSIGSCQAMLDFAGKHGITADVEVVKMDYVNTAVERLERNDVRYRFVIDVAGSQLGAAA

SEQ ID NO: 5388 - DNA, 1164 bp, Glycine max
  CDS (1)..(1164)
atggaagataaactagcaacaacaagtgaaggacaacccataagatgtaaagctgcgatttgtcgcaagccaggttctccattgagtattgaggagatcattgtggcaccaccaatgcctcgtgaagctcggattcgtgttatatgcacttctctttgtcacagcgatgttactttttggaaaatggaggtccctcctgcaatttgtccaagaattttgggtcatgaggctgttggggttgtggaaagcgtaggagaggatgtaaccgaagtcacaaaaggagatgtggttgttccaattttcttacctgattgtggggagtgtatagattgcaaatcaagcaagagcaacctttgttcaaagtttccttttgaggtgtctccttggatgcctagacatgccacctctagattcacggatttaaaaggagatatcatacaccatttcttgtttgtgtctagttttagcgagtataccgtggttgacattgctcatctaaccaagattgatccagcaataccacccaacagggcatgcctacttagttgtggtgtatcaaccggggtaggtgctgcttggagaacagcaggtgtggagccagggtctacagtagtcatttttgggttgggaagtattggattagcagttgccgagggagctagactttgtggagcaactaggattataggtgtggatgtcaacccagaaaaatatgaaactggaaaaaagtttggactcactgactttgtccatgctggagaaagtgaaaacaaatctgtgagccaggttatcataaagatgactggtgggggagcagattattgctttgaatgtgttggaatggcaacattggtgcaggaagcatatgcttcttgtagaaagggttggggaaaagcaatagttttaggagtggagaagccgggatccatgttgagccttagctgtaatgaggtcctccatagtgggaagagcctcgtggggtgcttatttggaggactcaaacccaagtctgatgtacctattctccttaaacgctacatggacaaggaactgaatttggatgagtttgtcacacatgaggtggagttcaaggatatcaacaaagcttttgatttattgattgaaggacagtgccttcggtgtgtgatttggatggacagatga

SEQ ID NO: 5389 - protein, 387 aa, Glycine max
MEDKLATTSEGQPIRCKAAICRKPGSPLSIEEIIVAPPMPREARIRVICTSLCHSDVTFWKMEVPPAICPRILGHEAVGVVESVGEDVTEVTKGDVVVPIFLPDCGECIDCKSSKSNLCSKFPFEVSPWMPRHATSRFTDLKGDIIHHFLFVSSFSEYTVVDIAHLTKIDPAIPPNRACLLSCGVSTGVGAAWRTAGVEPGSTVVIFGLGSIGLAVAEGARLCGATRIIGVDVNPEKYETGKKFGLTDFVHAGESENKSVSQVIIKMTGGGADYCFECVGMATLVQEAYASCRKGWGKAIVLGVEKPGSMLSLSCNEVLHSGKSLVGCLFGGLKPKSDVPILLKRYMDKELNLDEFVTHEVEFKDINKAFDLLIEGQCLRCVIWMDR

SEQ ID NO: 5390 - DNA, 1254 bp, Zea mays
  CDS (1)..(1254)
atggccatgtccgcttcctcctcctcgcgcgccctcctccgccggatcggcggcgcgctcctccgccgctccttctcctcctcatccgccgccgccgccgcagggtaccacgtcgcgggcgggcccagctacatgcgcggcgccgtcttctgggagcccggccgcccgctcacgctcgaggagttccgcatgccgcggcccaaggccggcgagctcctcatcaagaccaaagcctgcggggtctgtcactccgatctccatgtcctcaaaggcgagctccctttctccacgccctgtgtcgtgggccatgagatcactggagaggtggttgaccatggcacgcacactcctgttgagatcatcaacaggttcccagtcggaagtcacgtcgtcggcgccttcataatgccatgtgggaactgcttctactgcgttaagggccaagaagatctgtgtgagtctttcttcgcgtataatcgtgccaaggggacactctatgatggcgagacacggctgtttctaaggggcaatgggaaaccggtgtacatgtatagtatgggagggcttgcagagtattgtgttgtcccagccaatgcgctagcagttctccctgactcactgccatacacagaatcagcaattttaggatgtgcagtgtttaccgcgtatggtgccctgaggcatgctgctgaaatgcggcctggtgattcagtagctgtgatcggagttggaggggttgggtcaagctgtttacagatagcaaaagcctttggagcttcccaagtcattgcagtggatgtccttgatgagaagcttcagaacgctacaacacttggagcaacccacactgtaaatgcagcaaaagatgatgcagttgaaaggataaaggaaattactgatggtaggggtgtagatgtggctatagaggcacttggtaaggcgttaacattttcccagtgcgccaagagcgtgcgtgatggaggcaaagctgttatgatcgggcttgctgcaacgaacgtaatgggagaggttgatataacccgtcttgtccgacgacaggtgaaaatcattggctcatatggcgcaagggctaggcaagaccttcctcagatagtgaagctcgcggagagtggtgccttcaatctccaaaacaccatatcaaggaaatgcaaatttgaggaggcgaatggcgcctatgaggatctcaatcagggcaagatcgtaggacgagctgtggttgagatcatggagtga

SEQ ID NO: 5391 - protein, 417 aa, Zea mays
MAMSASSSSRALLRRIGGALLRRSFSSSSAAAAAGYHVAGGPSYMRGAVFWEPGRPLTLEEFRMPRPKAGELLIKTKACGVCHSDLHVLKGELPFSTPCVVGHEITGEVVDHGTHTPVEIINRFPVGSHVVGAFIMPCGNCFYCVKGQEDLCESFFAYNRAKGTLYDGETRLFLRGNGKPVYMYSMGGLAEYCVVPANALAVLPDSLPYTESAILGCAVFTAYGALRHAAEMRPGDSVAVIGVGGVGSSCLQIAKAFGASQVIAVDVLDEKLQNATTLGATHTVNAAKDDAVERIKEITDGRGVDVAIEALGKALTFSQCAKSVRDGGKAVMIGLAATNVMGEVDITRLVRRQVKIIGSYGARARQDLPQIVKLAESGAFNLQNTISRKCKFEEANGAYEDLNQGKIVGRAVVEIME

SEQ ID NO: 5392 - DNA, 1140 bp, Zea mays
  CDS (1)..(1140)
atggcgacagcagggaaggtgatcaagtgcagagctgccgtggcgtgggaggccggcaagccgctgtccatcgaggaggtggaggtagcgccgccgcaggccatggaggtgcgtgtcaagatcctctacaccgcgctctgccacaccgacgtctacttctgggaggccaaggggcaaaccccggtgttcccgaggatcttaggacacgaagcgggaggcatcgtggagagcgtcggagagggcgtgaccgagctcgcgccaggcgaccacgtcctcccggtgttcaccggcgagtgcaaggagtgcgcccactgcaagtcggaggagagcaacatgtgcgacctcctcaggatcaacgtcgaccgcggcgtgatgatcggcgacggcaagtcccgcttcaccatcagcgggcagcccatcttccacttcgtcgggacgtccaccttcagcgagtacaccgtcatccacgtcggctgcctggccaagatcaaccccgaggcgcctctcgacaaagtctgcatcctcagctgtggtatctcgaccggccttggcgcgacactgaatgtggcgaaaccagccaagggctcgacggtggcgattttcgggcttggggctgtaggccttgctgctatggaaggtgctagactggctggtgcatcaaggatcatcggcgtggacatcaacccagcaaaatacgagcaagctaagaaatttggctgcactgaattcgttaaccccaaggaccacgacaagccagtgcaagaggtgctgattgagctgaccaacggcggcgtcgaccgcagcgtggagtgcaccggtaacatcaacgccatgatatccgccttcgaatgtgtccacgacggctggggtgtcgccgtgctggtgggtgtcccgcacaaggacgaccagttcaagacccaccccatgaacttcctcagcgagaagacactcaagggcaccttcttcggaaactacaagccccgcaccgacctgcccaacgtcgtcgagatgtacatgaagaaggagctggagctggagaagttcatcacgcacagcgtgcccttctcggagatcaacacggcgttcgacctgatgctcaagggggagagcctgcgctgcatcatgaggatggaggattag

SEQ ID NO: 5393 - protein, 379 aa, Zea mays
MATAGKVIKCRAAVAWEAGKPLSIEEVEVAPPQAMEVRVKILYTALCHTDVYFWEAKGQTPVFPRILGHEAGGIVESVGEGVTELAPGDHVLPVFTGECKECAHCKSEESNMCDLLRINVDRGVMIGDGKSRFTISGQPIFHFVGTSTFSEYTVIHVGCLAKINPEAPLDKVCILSCGISTGLGATLNVAKPAKGSTVAIFGLGAVGLAAMEGARLAGASRIIGVDINPAKYEQAKKFGCTEFVNPKDHDKPVQEVLIELTNGGVDRSVECTGNINAMISAFECVHDGWGVAVLVGVPHKDDQFKTHPMNFLSEKTLKGTFFGNYKPRTDLPNVVEMYMKKELELEKFITHSVPFSEINTAFDLMLKGESLRCIMRMED

SEQ ID NO: 5394 - DNA, 1155 bp, Zea mays
  CDS (1)..(1155)
atggccgccgccgatgcatcttcgttgcctacgtccgccatcacctgccgagcggcggcggcgtggggaccgggccagccactggtgatggaagaggtggaggtcgccccgccggggcccatggagatccgtgtcaaggtcgtctccacctccgtctgccgcagcgacgtcactgcctggcaatccaaggcgcaacttgatctgttccccagagtcttcggccacgaggcatccggagtagtagagagtgtcggtgaaggtgtgaccgagttccaagtcggtgaccacgttctcactgtcttcattggggaatgcaagagctgcaagcactgcgtctcagggaagagcaacatgtgccagaagctcggtctggagaggaagggtgtcatgcacagcgatcagaagacacgcttctctgtcaaggggaaacctgtgtaccattactgtgcagtgtcaagcttcagcgagtacacggttgtccattccggatgtgcggtgaaggttggcttgaccgtgccaatggacagggtgtgcctgctgagctgcggtgtgtctgcaggactcggtgcagtctggaatgtagctaatgtatcaaagggctcaagtgtagctatatttggtcttgggaccgtaggactttctgtcgctcaaggtgctaagcttcgaggggcgtccaagattataggagttgatactaatcctgagaagcaagaaaaggggaaatcatttggtgtcacggactttattaacccagatgaattgagtgaacctgttcaacaggtaatcaaaaggattactgatggaggggtggattactcatttgaatgtgtgggtgattctggagtagtctccactgcacttcaatcatgttctgatggttggggagtaactgtaactcttggcttaccaaaaggaaaactagaagtgtctactcattatgcatttcttctatccggaagaacactgaagggatctatgtttggaggatggaaacctaaatctgatctaccttcattggtggataaatatgcagcaaaggaaatccaagttgatggcctagtcacgcatgatataccattcaatgaaatcaacaaagcgcttgagttgatgctagaaaacaagtgcttgagatgtgtgattcacatgccacggtaa

SEQ ID NO: 5395 - protein, 384 aa, Zea mays
MAAADASSLPTSAITCRAAAAWGPGQPLVMEEVEVAPPGPMEIRVKVVSTSVCRSDVTAWQSKAQLDLFPRVFGHEASGVVESVGEGVTEFQVGDHVLTVFIGECKSCKHCVSGKSNMCQKLGLERKGVMHSDQKTRFSVKGKPVYHYCAVSSFSEYTVVHSGCAVKVGLTVPMDRVCLLSCGVSAGLGAVWNVANVSKGSSVAIFGLGTVGLSVAQGAKLRGASKIIGVDTNPEKQEKGKSFGVTDFINPDELSEPVQQVIKRITDGGVDYSFECVGDSGVVSTALQSCSDGWGVTVTLGLPKGKLEVSTHYAFLLSGRTLKGSMFGGWKPKSDLPSLVDKYAAKEIQVDGLVTHDIPFNEINKALELMLENKCLRCVIHMPR

SEQ ID NO: 5396 - DNA, 1140 bp, Zea mays
  CDS (1)..(1140)
atggcgaccgcggggaaggtgatcaagtgcaaagctgcggtggcatgggaggccggcaagccactgtcgatcgaggaggtggaggtagcgcctccgcaggccatggaggtgcgcgtcaagatcctcttcacctcgctctgccacaccgacgtctacttctgggaggccaaggggcagactcccgtgttccctcggatctttggccatgaggctggaggtatcatagagagtgttggagagggtgtgactgacgtagctccgggcgaccatgtccttcctgtgttcactggggagtgcaaggagtgcgcccactgcaagtcggcagagagcaacatgtgtgatctgctcaggatcaacaccgaccgcggtgtgatgattgccgatggcaagtcgcggttttcaatcaatgggaagcctatctaccactttgttgggacttccaccttcagcgagtacaccgtcatgcatgtcggttgtgttgcaaagatcaaccctcaggctccccttgataaagtttgcgtccttagctgtggtatttctaccggtcttggtgcatcaattaatgttgcaaaacctccgaagggttcgacagtggctgttttcggtttaggagccgttggtcttgccgctgcagaaggtgcaaggattgctggagcgtcaaggatcattggtgtcgacctgaaccccagcagattcgaagaagctaggaagttcggttgcactgaatttgtgaacccaaaagaccacaacaagccagtgcaggaggtacttgctgagatgaccaacggaggggtcgaccgcagtgtggaatgcactggcaacattaatgctatgatccaagctttcgaatgtgttcatgatggctggggtgttgctgtgctggtgggtgtgccacataaggacgctgagttcaagacccacccgatgaacttcctgaacgaaaggaccctgaaggggaccttctttggcaactataagccacgcactgatctgccaaatgtggtggagctgtacatgaaaaaggagctggaggtggagaagttcatcacgcacagcgtcccgttcgccgagatcaacaaggcgttcgacctgatggccaagggggagggcatccgctgcatcatccgcatggagaactag

SEQ ID NO: 5397 - protein, 379 aa, Zea mays; identical to SEQ ID NO: 5355

SEQ ID NO: 5398 - DNA, 1155 bp, Zea mays
  CDS (1)..(1155)
atggccgccgccgatgcatcttcgttgcctccgtccgccatcacctgccgagcggcggtggcgtggggaccgggccagccactggtgatggaggaggtggaggtcgccccgccggggcccatggagatccgtgtcaaggtcgtctccacctccgtctgccgcagcgacgtcactgcctggcaatccaaggcgcaacttgatctgttccccagagtcttcggccacgaggcatccggagtagtagagagtgtcggtgaaggtgtgaccgagttccaagtcggtgaccacgttctcactgtcttcattggggaatgcaagagctgcaagcactgcgtctcagggaagagcaacatgtgccagaagctcggtctggagaggaagggtgtcatgcacagcgatcagaagacacgcttctctgtcaaggggaaacctgtgtaccattactgtgcagtgtcaagcttcagcgagtacacggttgtccattccggatgtgcggtgaaggttggcttgaccgtgccaatggacagggtgtgcctgctgagctgcggtgtgtctgcaggactcggtgcagtctggaatgtagctaatgtatcaaagggctcaagtgtagctatatttggtcttgggaccgtaggactttctgtcgctcaaggtgctaagcttcgaggggcgtccaagattataggagttgatactaatcctgagaagcaagaaaaggggaaatcatttggtgtcacggactttattaacccagatgaattgagtgaacctgttcaacaggtaatcaaaaggattactgatggaggggtggattactcatttgaatgtgtgggtgattctggagtagtctccactgcacttcaatcatgttctgatggttggggagtaactgtaactcttggcttaccaaaaggaaaactagaagtgtctactcattatgcatttcttctatccggaagaacactgaagggatctatgtttggaggatggaaacctaaatctgatctaccttcattggtggataaatatgcagcaaaggaaatccaagttgatggcctagtcacgcatgatataccattcaatgaaatcaacaaagcgcttgagttgatgctagaaaacaagtgcttgagatgtgtgattcacatgccacggtaa

SEQ ID NO: 5399 - protein, 384 aa, Zea mays
MAAADASSLPPSAITCRAAVAWGPGQPLVMEEVEVAPPGPMEIRVKVVSTSVCRSDVTAWQSKAQLDLFPRVFGHEASGVVESVGEGVTEFQVGDHVLTVFIGECKSCKHCVSGKSNMCQKLGLERKGVMHSDQKTRFSVKGKPVYHYCAVSSFSEYTVVHSGCAVKVGLTVPMDRVCLLSCGVSAGLGAVWNVANVSKGSSVAIFGLGTVGLSVAQGAKLRGASKIIGVDTNPEKQEKGKSFGVTDFINPDELSEPVQQVIKRITDGGVDYSFECVGDSGVVSTALQSCSDGWGVTVTLGLPKGKLEVSTHYAFLLSGRTLKGSMFGGWKPKSDLPSLVDKYAAKEIQVDGLVTHDIPFNEINKALELMLENKCLRCVIHMPR

SEQ ID NO: 5400 - DNA, 1113 bp, Zea mays
  CDS (1)..(1113)
atggcaccggtggaggcggagcagcaccggcggagggcgttggcgctcgcggcgcacgacgcctccggcgccgtctcccccatccgcatctcgcgaagggacactggagatgacgatgttgccatacagatactgtactgcgggatatgccactctgacctgcacaccatcaagaacgagtggaagaacgccaactaccctgttgtccctgggcacgagatcgccgggctgatcaccgaggttggcaagaacgtgaagaggttcaacgtcggagacaaggttggcgtcgggtgcatggtcaacacatgccagtcctgcgagagctgcgagggagggcacgagaactactgctccaagatcatcttcacctacaactcccacgacagggacggcaccgtcacctacggtggctactctgacatggttgtcgtcaacgagcgcttcgtcatccggttccctgatggcatgcccctcgacagaggcgcgccgctgctctgtgcagggataaccgtgtacaaccccatgaagcaccacgggctaaacgaggcaggcaagcacatcggcgtggttggactcggggggcttgggcacgtcgccgtgaagttcgcgaaggcgttcgggatgagggtgaccgtgatcagcacgtccccggggaagagggaggaagctatggagacgcttggtgcagacgcctttgttgtcagcggtgatgctaaccagatgaaggctgcgaagggcacaatggatggcattatgaacacggcctctgcaagcatgtccatgtacgcttaccttgctctcctcaagccccagggcaagatgatcctgcttggcctgcctgagaagcctctgcagatctctgccttctctttggttactgggggcaagactctggccgggagctgcatggggagcatcagggacacgcaggagatgatggacttcgcagccaagcacgggttggcagcggacatcgaactgatcggcaccgaagaagttaatgaggccatggaacgcctcgccaagggcgaggtcaggtaccgcttcgtcatcgacatcggcaacaccctcaacgcggcatcactagggagctcgccggtcccagctctgtag

SEQ ID NO: 5401 - protein, 370 aa, Zea mays
MAPVEAEQHRRRALALAAHDASGAVSPIRISRRDTGDDDVAIQILYCGICHSDLHTIKNEWKNANYPVVPGHEIAGLITEVGKNVKRFNVGDKVGVGCMVNTCQSCESCEGGHENYCSKIIFTYNSHDRDGTVTYGGYSDMVVVNERFVIRFPDGMPLDRGAPLLCAGITVYNPMKHHGLNEAGKHIGVVGLGGLGHVAVKFAKAFGMRVTVISTSPGKREEAMETLGADAFVVSGDANQMKAAKGTMDGIMNTASASMSMYAYLALLKPQGKMILLGLPEKPLQISAFSLVTGGKTLAGSCMGSIRDTQEMMDFAAKHGLAADIELIGTEEVNEAMERLAKGEVRYRFVIDIGNTLNAASLGSSPVPAL

SEQ ID NO: 5402 - DNA, 1140 bp, Zea mays
  CDS (1)..(1140)
atggcgaccgcggggaaggtgatcaagtgcaaagctgcggtggcatgggaggccggcaagccactgtcgatcgaggaggtggaggtagcgcctccgcaggccatggaggtgcgcgtcaagatcctcttcacctcgctctgccacaccgacgtctacttctgggaggccaaggggcagactcccgtgttccctcggatctttggccatgaggctggaggtatcatagagagtgttggagagggtgtgactgacgtagctccgggcgaccatgtccttcctgtgttcactggggagtgcaaggagtgcgctcactgcaagtcggcagagagcaacatgtgtgatctgctcaggatcaacaccgaccgcggtgtgatgattgccgatggcaagtcgcggttttcaatcaatgggaagcctatctaccactttgttgggacttccaccttcagcgagtacactgtcatgcatgtcggttgtgttgcaaagatcaatcctcaggctccccttgataaagtttgcgtccttagctgtggtatttctaccggtcttggtgcatcaattaatgttgcaaaacctccgaagggttcgacagtggctgttttcggtttaggagccgttggtcttgccgctgcagaaggtgcaaggattgctggagcgtcaaggatcattggtgtcgacctgaaccccagcagattcgaagaagctaggaagttcggttgcactgaatttgtgaacccaaaggaccacaacaagccagtgcaggaggtacttgctgagatgaccaacggaggggtcgaccgcagcgtggaatgcactggcaacatcaatgctatgatccaagctttcgaatgtgttcatgatggctggggtgttgctgtgctggtgggtgtgccacataaggacgctgagttcaagacccacccgatgaacttcctgaacgaaaggaccctgaaggggaccttctttggcaactataagccacgcactgatctgccaaatgtggtggagctgtacatgaaaaaggagctggaggtggagaagttcatcacgcacagcgtcccgttcgccgagatcaacaaggcgttcgacctgatggccaagggggagggcatccgctgcatcatccgcatggagaactag

SEQ ID NO: 5403 - protein, 379 aa, Zea mays; identical to SEQ ID NO: 5355

SEQ ID NO: 5404 - DNA, 1140 bp, Zea mays
  CDS (1)..(1140)
atggcgacagcagggaaggtgatcaagtgcagagccgccgtggcgtgggaggccggcaaaccgctgtccatcgaggaggtggaggtagcgccgccgcaggccatggaggtgcgtatcaagatcctctacaccgcgctctgccacaccgacgtctacttctgggaggccaaggggcaaaccccggtgttcccgaggatcttaggacacgaagcgggaggcatcgtggagagcgtcggagagggcgtgaccgagctcgcgccaggcgaccacgtcctcccggtgttcaccggcgagtgcaaggagtgcgcccactgcaagtcggaggagagcaacatgtgcgacctcctcaggatcaacgtcgaccgcggcgtgatgatcggcgacggtaagtcccgcttcaccatcagcgggcagcccatcttccacttcgtcgggacgtccaccttcagcgagtacaccgtcatccacgtcggctgcctggccaagatcaaccccgaggcgcctctcgacaaagtctgcatcctcagctgtggtatctcgaccggccttggcgcgacactgaatgtggcgaaaccagccaagggctcgacggtggcgattttcgggcttggggctgtaggccttgctgctatggaaggtgctagactggctggtgcatcaaggatcatcggcgtggacatcaacccagcaaaatacgagcaagctaagaaatttggctgcactgaattcgttaaccccaaggaccacgacaagccagtgcaagaggtgctgattgagctgaccaacggcggcgtcgaccgcagcgtggagtgcaccggtaacatcaacgccatgatatccgccttcgaatgtgtccacgacggctggggtgtcgccgtgctggtgggtgtcccgcacaaggacgaccagttcaagacccaccccatgaacttcctcagtgagaagacactcaagggcaccttcttcggaaactacaagccccgcaccgacctgcccaacgtcgtcgagatgtacatgaagaaggagctggagctggagaagttcatcacgcacagcgtgcccttctcggagatcaacacggcgttcgacctgatgctcaagggggagagcctgcgctgcatcatgaggatggaggattag

SEQ ID NO: 5405 - protein, 379 aa, Zea mays
MATAGKVIKCRAAVAWEAGKPLSIEEVEVAPPQAMEVRIKILYTALCHTDVYFWEAKGQTPVFPRILGHEAGGIVESVGEGVTELAPGDHVLPVFTGECKECAHCKSEESNMCDLLRINVDRGVMIGDGKSRFTISGQPIFHFVGTSTFSEYTVIHVGCLAKINPEAPLDKVCILSCGISTGLGATLNVAKPAKGSTVAIFGLGAVGLAAMEGARLAGASRIIGVDINPAKYEQAKKFGCTEFVNPKDHDKPVQEVLIELTNGGVDRSVECTGNINAMISAFECVHDGWGVAVLVGVPHKDDQFKTHPMNFLSEKTLKGTFFGNYKPRTDLPNVVEMYMKKELELEKFITHSVPFSEINTAFDLMLKGESLRCIMRMED

SEQ ID NO: 5406 - DNA, 1254 bp, Zea mays
  CDS (1)..(1254)
atggccatgtccgcttcctcctcctcgcgcgccctcctccgccggatcggcggcgcgctcctccgccgctccttctcctcctcatccgccgccgccgccgcagggtaccacgtcgcgggcgggcccagctacatgcgcggcgccgtcttctgggagcccggccgcccgctcacgctcgaggagttccgcatgccgcgccccaaggccggcgagctcctcatcaagaccaaagcctgcggggtctgccactccgatctccatgtcctcaaaggcgagctccctttctccacgccctgtgtcgtgggccatgagatcactggagaggtggttgaccatggcacgcacactcctgctgagatcatcaacaggttcccagtcggaagtcacgtcgtcggcgccttcataatgccatgtgggaactgcttctactgcgttaagggccaagaagatctgtgcgagtctttcttcgcgtataatcgtgccaaggggacactctatgatggcgagacacggctgtttctaagaggcaatgggaaaccggtgtacatgtatagtatgggagggcttgcagagtattgtgttgtcccggccaatgcgctagcagttctccctgactcactgccatacacagaatcagcaattttaggatgtgcagtgtttaccgcgtatggtgccctgaggcatgctgctgaaatgcggcctggtgattcagtagctgtgatcggagttggaggggttgggtcaagctgtttacagatagcaaaagcctttggagcttcccaagtcattgcagtggatgtccttgatgagaagctccagaacgctacaacacttggagcaacccacactgtaaatgcagcaaaagctgatgcagttgaaaggataaaggaaattactgatggtaggggtgtagatgtggctatagaggcacttggtaaggcgttaacattttcccagtgcgccaagagcgtgcgtgatggaggcaaagctgttatgatcgggcttgctgcaacgaacgtaatgggagaggttgatataacccgtcttgtccgacgacaggtgaaaatcattggctcatatggcgcaagggccaggcaagaccttcctcagatagtgaagctcgcggagagtggtgccttcaatctccagaacaccatatcaaggaaatgcaaattcgaggaggcgaatggcgcctatgaggatctcaatcagggcaagatcgtaggacgagctgtggttgagatcatgcagtga

SEQ ID NO: 5407 - protein, 417 aa, Zea mays
MAMSASSSSRALLRRIGGALLRRSFSSSSAAAAAGYHVAGGPSYMRGAVFWEPGRPLTLEEFRMPRPKAGELLIKTKACGVCHSDLHVLKGELPFSTPCVVGHEITGEVVDHGTHTPAEIINRFPVGSHVVGAFIMPCGNCFYCVKGQEDLCESFFAYNRAKGTLYDGETRLFLRGNGKPVYMYSMGGLAEYCVVPANALAVLPDSLPYTESAILGCAVFTAYGALRHAAEMRPGDSVAVIGVGGVGSSCLQIAKAFGASQVIAVDVLDEKLQNATTLGATHTVNAAKADAVERIKEITDGRGVDVAIEALGKALTFSQCAKSVRDGGKAVMIGLAATNVMGEVDITRLVRRQVKIIGSYGARARQDLPQIVKLAESGAFNLQNTISRKCKFEEANGAYEDLNQGKIVGRAVVEIMQ

SEQ ID NO: 5408 - DNA, 1062 bp, Zea mays
  CDS (1)..(1062)
atgggaaaggaggcatttggattggccgcgaaagacaattctggagttctctcgcctttccatttctctagaagggagacaggagagaaggatgttaggttcaaagttttgttctgtggaatctgtcactctgatttgcatatgatcaagaatgagtggggaatatctacttaccctctcgtccccgggcatgagattgttggtgtggtgactgaagtgggaagcaaagtgactaaattcaaaactggagacaaagtcggagtaggttgcatggttggctcgtgcggatcatgtgatagctgcaccgaaggtctcgagaactactgtccaaaatcgatccaaacgtacggattcaagtattacgacgacacaataacctacggtggttactccgacaacatggtttgcgacgaaggtttcatcatccgtatgcccgaaaatctcccattggacgctgctgctccgctactatgcgcggggatcacggtctactccccgctgaaacatcacgggctcgacaagcctggcatgcacattggtgtggttggactaggcggtttgggtcatgtggcggtgaaatttgctaaggctatgggtcttaaggttacggttattagtacttcggatagtaagagagatgaagcgattaataggcttggtgcggacgcgttcgtggtgagccgtgaccaaaaacagattaaggatgcaatgaggacattggatggtattattaataccgtatctgcgactcattcccttcttcctttgctcggtttgctaaagcctaagggaaaacttgttatggttggtgcaccagaaaagccactcgagctcccggtcatgcctctcatcttcgagaggaagatggtaatgggaagtatgataggagggataaaggagactcaagagatggtggatatggcaggaaaacacaacatcactgctgatattgagcttatctctgcggactatgtcaacactgccatggaacggctcgagaaggccgacgttagataccgttttgtgattgatgttgccaacacattgaagcctactccttaa

SEQ ID NO: 5409 - protein, 353 aa, Zea mays
MGKEAFGLAAKDNSGVLSPFHFSRRETGEKDVRFKVLFCGICHSDLHMIKNEWGISTYPLVPGHEIVGVVTEVGSKVTKFKTGDKVGVGCMVGSCGSCDSCTEGLENYCPKSIQTYGFKYYDDTITYGGYSDNMVCDEGFIIRMPENLPLDAAAPLLCAGITVYSPLKHHGLDKPGMHIGVVGLGGLGHVAVKFAKAMGLKVTVISTSDSKRDEAINRLGADAFVVSRDQKQIKDAMRTLDGIINTVSATHSLLPLLGLLKPKGKLVMVGAPEKPLELPVMPLIFERKMVMGSMIGGIKETQEMVDMAGKHNITADIELISADYVNTAMERLEKADVRYRFVIDVANTLKPTP

SEQ ID NO: 5410 - DNA, 1146 bp, Zea mays
  CDS (1)..(1146)
atggcttcccccacccagggccaggtcatcacctgcaaagcggcggtggcgtacgagccgaacaagccactcgtgatcgaggacgtgcaggtggcgccgccgcaggccggcgaggtccgcgtcaagatcctattcaccgcgctctgccacaccgaccactacacctggagcggcaaggatcctgagggtcttttcccttgcattcttggccacgaagctgccggaattgtggaaagtgtcggtgaaggagtaactgatgtgcagcctggggatcatgtcattccttgctaccaagcagaatgcaaagaatgcaagttttgcaagagcggaaagaccaacctctgtggtaaggtccggagtgccacaggcgtaggtgtcatgatgaatgatatgaagagcaggttctctgtaaatggaaagcccatttaccatttcatggggacatcaacattcagccagtacactgtggtgcatgatgtcagtgttgcaaagatcaacccacaggcacccttagataaagtctgcctgctcggttgtggtgttcctactggtcttggagcggtgtggaatactgcaaaggttgaatctggctcagttgttgctgtttttggccttggaacagttggacttgcagttgctgagggagcaaaagctgctggtgcttctcgagttattggcattgacatcgacaataaaaagtttgatgttgcaaagaactttggagttacagaatttgttaacccaaaagagcatgacaaaccgatacagcaggtcctggtcgatcttacagatggcggcgtggattacagctttgagtgcattggaaatgtttcggttatgagggctgcactggaatgctgccacaagggctggggaacctccgtcatcgtcggcgtcgccgcctctggccaggagatcgccacacgaccattccagctcgtgactgggcgtgtctggaagggaaccgctttcggtggcttcaagagccggacccaggtcccatggcttgttgacaagtacatgaaaaaggaaattaaggtggacgagtacattacgcacaacatgaacctggctgacatcaacgacgccttccacctgctgcacgaaggtggctgtctgcgttgtgtgctggcaatgcagatttga

SEQ ID NO: 5411 - protein, 381 aa, Zea mays
MASPTQGQVITCKAAVAYEPNKPLVIEDVQVAPPQAGEVRVKILFTALCHTDHYTWSGKDPEGLFPCILGHEAAGIVESVGEGVTDVQPGDHVIPCYQAECKECKFCKSGKTNLCGKVRSATGVGVMMNDMKSRFSVNGKPIYHFMGTSTFSQYTVVHDVSVAKINPQAPLDKVCLLGCGVPTGLGAVWNTAKVESGSVVAVFGLGTVGLAVAEGAKAAGASRVIGIDIDNKKFDVAKNFGVTEFVNPKEHDKPIQQVLVDLTDGGVDYSFECIGNVSVMRAALECCHKGWGTSVIVGVAASGQEIATRPFQLVTGRVWKGTAFGGFKSRTQVPWLVDKYMKKEIKVDEYITHNMNLADINDAFHLLHEGGCLRCVLAMQI

SEQ ID NO: 5412 - DNA, 25 bp, Artificial sequence
  primer
atgaaagcgttatccaaactgaaag

SEQ ID NO: 5413 - DNA, 24 bp, Artificial sequence
  primer
ttaatcccagctcagaataacttt

SEQ ID NO: 5414 - protein, 393 aa, Artificial sequence
  consensus sequence
  Variant (2)..(34): Xaa in position 2 to 34 is any amino acid
  Variant (35)..(40): Xaa in position 35 to 40 is any or no amino acid
  Variant (42)..(43): Xaa in position 42 to 43 is any amino acid
  Variant (45)..(56): Xaa in position 45 to 56 is any amino acid
  Variant (57)..(68): Xaa in position 57 to 68 is any or no amino acid
  Variant (70)..(71): Xaa in position 70 to 71 is any amino acid
  Variant (72)..(72): Xaa in position 72 is any or no amino acid
  Variant (76)..(77): Xaa in position 76 to 77 is any amino acid
  Variant (79)..(83): Xaa in position 79 to 83 is any amino acid
  Variant (85)..(86): Xaa in position 85 to 86 is any amino acid
  Variant (87)..(91): Xaa in position 87 to 91 is any or no amino acid
  Variant (93)..(97): Xaa in position 93 to 97 is any amino acid
  Variant (99)..(100): Xaa in position 99 to 100 is any amino acid
  Variant (102)..(108): Xaa in position 102 to 108 is any amino acid
  Variant (109)..(111): Xaa in position 109 to 111 is any or no amino acid
  Variant (113)..(113): Xaa in position 113 is any amino acid
  Variant (114)..(114): Xaa in position 114 is any or no amino acid
  Variant (116)..(116): Xaa in position 116 is any amino acid
  Variant (117)..(125): Xaa in position 117 to 125 is any or no amino acid
  Variant (127)..(129): Xaa in position 127 to 129 is any amino acid
  Variant (130)..(133): Xaa in position 130 to 133 is any or no amino acid
  Variant (135)..(145): Xaa in position 135 to 145 is any amino acid
  Variant (146)..(168): Xaa in position 146 to 168 is any or no amino acid
  Variant (170)..(213): Xaa in position 170 to 213 is any amino acid
  Variant (214)..(225): Xaa in position 214 to 225 is any or no amino acid
  Variant (227)..(228): Xaa in position 227 to 228 is any amino acid
  Variant (230)..(232): Xaa in position 230 to 232 is any amino acid
  Variant (234)..(234): Xaa in position 234 is any amino acid
  Variant (236)..(237): Xaa in position 236 to 237 is any amino acid
  Variant (239)..(244): Xaa in position 239 to 244 is any amino acid
  Variant (246)..(247): Xaa in position 246 to 247 is any amino acid
  Variant (248)..(248): Xaa in position 248 is any or no amino acid
  Variant (251)..(256): Xaa in position 251 to 256 is any amino acid
  Variant (258)..(265): Xaa in position 258 to 265 is any amino acid
  Variant (266)..(266): Xaa in position 266 is any or no amino acid
  Variant (268)..(270): Xaa in position 268 to 270 is any amino acid
  Variant (272)..(291): Xaa in position 272 to 291 is any amino acid
  Variant (292)..(304): Xaa in position 292 to 304 is any or no amino acid
  Variant (306)..(311): Xaa in position 306 to 311 is any amino acid
  Variant (313)..(326): Xaa in position 313 to 326 is any amino acid
  Variant (328)..(328): Xaa in position 328 is any amino acid
  Variant (330)..(334): Xaa in position 330 to 334 is any amino acid
  Variant (336)..(353): Xaa in position 336 to 353 is any amino acid
  Variant (354)..(359): Xaa in position 354 to 359 is any or no amino acid
  Variant (361)..(381): Xaa in position 361 to 381 is any amino acid
  Variant (382)..(392): Xaa in position 382 to 392 is any or no amino acid
AXXXXXXXXXXXXXXXXXXXXXXXXXXXXXXXXXXXXXXXCXXDXXXXXXXXXXXXXXXXXXXXXXXXPXXXGHEXXGXXXXXGXXXXXXXVXXXXXGXXVXXXXXXXXXXCXXCXXXXXXXXXXCXXXXXXXCXXXXXXXXXXXXXXXXXXXXXXXXXXXXXXXXXXGXXXXXXXXXXXXXXXXXXXXXXXXXXXXXXXXXXXXXXXXXXXXXXXXXXXXXXXXGXXVXXXGXGXXGXXXXXXAXXXGAXXXXXXDXXXXXXXXXAXXXGXXXXXXXXXXXXXXXXXXXXXXXXXXXXXXXXXDXXXXXXGXXXXXXXXXXXXXXGXGXXXXXGXXXXXXXXXXXXXXXXXXXXXXXXGXXXXXXXXXXXXXXXXXXXXXXXXXXXXXXXXT

SEQ ID NO: 5415 - protein, 20 aa, Artificial sequence
  protein pattern
  Variant (2)..(6): Xaa in position 2 to 6 is any or no amino acid
  Variant (9)..(9): Xaa in position 9 is any amino acid
  Variant (10)..(10): Xaa in position 10 is Ala, Gly, Ser or Val
  Variant (12)..(12): Xaa in position 12 is any amino acid
  Variant (13)..(13): Xaa in position 13 is Ile or Val
  Variant (14)..(14): Xaa in position 14 is any amino acid
  Variant (15)..(15): Xaa in position 15 is Ala, Asp, Glu, Gly, Gln or Ser
  Variant (16)..(16): Xaa in position 16 is any amino acid
  Variant (18)..(19): Xaa in position 18 to 19 is any amino acid
GXXXXXHEXXGXXXXXGXXV

SEQ ID NO: 5416 - protein, 26 aa, Artificial sequence
  protein pattern
  Variant (2)..(3): Xaa in position 2 to 3 is any amino acid
  Variant (4)..(5): Xaa in position 4 to 5 is any or no amino acid
  Variant (7)..(7): Xaa in position 7 is any amino acid
  Variant (8)..(9): Xaa in position 8 to 9 is any or no amino acid
  Variant (11)..(11): Xaa in position 11 is any amino acid
  Variant (13)..(13): Xaa in position 13 is Ala, Gly, Pro, Ser or Thr
  Variant (14)..(14): Xaa in position 14 is Ile, Leu or Val
  Variant (16)..(17): Xaa in position 16 to 17 is any amino acid
  Variant (18)..(18): Xaa in position 18 is Ala, Cys, Gly, Asn, Thr or Val
  Variant (19)..(25): Xaa in position 19 to 25 is any amino acid
GXXXXVXXXGXGXXGXXXXXXXXXXG

SEQ ID NO: 5417 - DNA, 717 bp, Escherichia coli K12
  CDS (1)..(717): transl_table=11
atgcgtttttaccggcctttggggcgcatctcggcgctcacctttgacctggatgataccctttacgataaccgtccggtgattttgcgcaccgagcgagaggcgcttacctttgtgcaaaattatcatccggcgctgcgcagcttccagaatgaagatctgcaacgcctgcgccaggcggtacgggaagcggaacccgagatttatcacgacgtgacgcgctggcgttttcgttcgattgaacaagcgatgctcgacgccgggctgagtgccgaagaagccagtgcaggcgcacacgcagcaatgatcaactttgccaaatggcgcagccgaatcgacgtcccgcagcaaactcacgacaccttaaaacagctggcgaagaaatggccgctggtggcgatcaccaacggtaacgcccagccggagctgtttggtttgggggattattttgagtttgtgctgcgcgctggcccgcacgggcgctcaaaaccgttcagcgatatgtactttttggctgcggaaaaactcaacgtgccgatcggcgagatcttacatgttggggacgatctcaccactgacgtgggtggggcaattcgcagcggaatgcaggcttgttggatcagaccggaaaatggcgatctgatgcaaacctgggacagccgtttactgccgcatctggaaatttcccggttggcatctctgacctcgctgatataa

SEQ ID NO: 5418 - protein, 238 aa, Escherichia coli K12
MRFYRPLGRISALTFDLDDTLYDNRPVILRTEREALTFVQNYHPALRSFQNEDLQRLRQAVREAEPEIYHDVTRWRFRSIEQAMLDAGLSAEEASAGAHAAMINFAKWRSRIDVPQQTHDTLKQLAKKWPLVAITNGNAQPELFGLGDYFEFVLRAGPHGRSKPFSDMYFLAAEKLNVPIGEILHVGDDLTTDVGGAIRSGMQACWIRPENGDLMQTWDSRLLPHLEISRLASLTSLI

SEQ ID NO: 5419 - DNA, 720 bp, Vibrio cholerae O1 biovar eltor str. N16961
  CDS (1)..(720): transl_table=11
atgctgttttaccgcccattggcttcgattcaagcactgacgtttgatttggacgataccctttacgataaccgtccggtcatcaaacaggtcgaggaaaaagtcactgagtggttgttaagtgagcatcccattacggcgacgcgtcctttggcttggtggctggcgatgaagcgtgatatagcgcgccgctttccggagcagtgccatgatgtgagccaatggcgttatttacaggtgcagcatggtttactggaattaggctatgcgcagccagaggcggagcaagcggcgagcgagacgcttgagcaagtgatgcgctggcgtaatcaagtcgatgttcctgccgaaacgcatcgggtgttggctcagttagcggctaaagtgccgctgattgcgatcaccaatggcaatgtccagatagaaaaaattggtttaagtggctatttccaaacggtattgcgcgcagggccagacggccgtgccaaaccgtatcccgatctctttgcacaagcagcacaacagcttcagcttgagccccgttcaatcttgcatgtcggggatcatttacaaaccgatgtgctaggggcgcggcaaaatggttttcaagcctgctggtttaacgatcaagggcagagtattcgtcggctcgccaaagcgagcgtattacccgacgtggagatcgagcgtctctcggaattacttctgatagttaactag

SEQ ID NO: 5420 - protein, 239 aa, Vibrio cholerae O1 biovar eltor str. N16961
MLFYRPLASIQALTFDLDDTLYDNRPVIKQVEEKVTEWLLSEHPITATRPLAWWLAMKRDIARRFPEQCHDVSQWRYLQVQHGLLELGYAQPEAEQAASETLEQVMRWRNQVDVPAETHRVLAQLAAKVPLIAITNGNVQIEKIGLSGYFQTVLRAGPDGRAKPYPDLFAQAAQQLQLEPRSILHVGDHLQTDVLGARQNGFQACWFNDQGQSIRRLAKASVLPDVEIERLSELLLIVN

SEQ ID NO: 5421 - DNA, 711 bp, Pasteurella multocida subsp. multocida str. Pm70
  CDS (1)..(711): transl_table=11
atgaaattctaccgcactttacgccctttcaaattaatcagttttgatttggacgacaccctgtacgataacagcgacgtgattcgcctcgcggaagaaaattttattgaaaaagtcaaacttgaaagccagttaaatatctcatcagaagaatggcgagcctggaagcaacgtatcgaacaacgtcatcctatgttgtgtgaagatgtggttgcttggcggattgaaaccttgcaccaactcttagcaaattatcagaaaagtgcggcagagattgagcgagtttgtcagcaagcgatggcgttatttgtggaatggcgtcataaaattgatgtgccggtgcaaagtcaacaggtgttgaatttactaaaacaaaaatatccactggtggcgattactaacggtaatgttgagccacaacgtataggtttatcacaatttgatctcgtactacggggcggtgaacagggcagagcgaaaccccatcaagatttattccatcaaaccgcacaacactttggcgttcagccgcacgagattttacacgtcggtgataatttaatgacagacgtacaaggcgcgattcaggctgattgtcaggcggtttggattaatctttcaggcaaagtgctacgggatttcccagaagcaagattaatgccaaccttagaaattaccgagttgaaacagttgttaatgttggtggcgtaa

SEQ ID NO: 5422 - protein, 236 aa, Pasteurella multocida subsp. multocida str. Pm70
MKFYRTLRPFKLISFDLDDTLYDNSDVIRLAEENFIEKVKLESQLNISSEEWRAWKQRIEQRHPMLCEDVVAWRIETLHQLLANYQKSAAEIERVCQQAMALFVEWRHKIDVPVQSQQVLNLLKQKYPLVAITNGNVEPQRIGLSQFDLVLRGGEQGRAKPHQDLFHQTAQHFGVQPHEILHVGDNLMTDVQGAIQADCQAVWINLSGKVLRDFPEARLMPTLEITELKQLLMLVA

SEQ ID NO: 5423 - DNA, 699 bp, Pseudomonas aeruginosa PAO1
  CDS (1)..(699): transl_table=11
atgagcagcctgcgactggtcaccttcgacctcgacgacaccctgtgggacgtcgccccggtgatgaacaacgccgaggccctgctccgcgaatggctggcgagcaacgccgcgcgcctgggtccggtacccatcgagcacctgtgggcgatccgcacccgcctgctggatcgcgagccgatgctgcgccaccgtctcagcgagctgcgccggcgcatcctgttccatgctctgctcgacgctggttatccacaggcggaggcggaaagcctggccgaggccggtttccaggtattcctcgaagcgcgccaccgggtcaccctgtttcccgaggtccacccgaccctggagatcctcgccgaccgcttcaccctcggcgtgctcaccaacggtaacgccgacgtgcgccgcctgggcctggccgactacttccggttcgccctctgcgccgaagaactgggcgtcggcaagcccgacccgacgccattccgcgaagccctgaagcgcgccggcgtcgaggcctcggcagcgatacacatcggcgaccaccccagcgacgacatcgccggagcgcgccgcgccggcatgcgtgccatctggttcaacccaagcggcaagccctgggccggggaggaagagccgagcgcggagatccgcagcctcgccgagctgccggccctgctcgcccgcctgcaatga

SEQ ID NO: 5424 - protein, 232 aa, Pseudomonas aeruginosa PAO1
MSSLRLVTFDLDDTLWDVAPVMNNAEALLREWLASNAARLGPVPIEHLWAIRTRLLDREPMLRHRLSELRRRILFHALLDAGYPQAEAESLAEAGFQVFLEARHRVTLFPEVHPTLEILADRFTLGVLTNGNADVRRLGLADYFRFALCAEELGVGKPDPTPFREALKRAGVEASAAIHIGDHPSDDIAGARRAGMRAIWFNPSGKPWAGEEEPSAEIRSLAELPALLARLQ

SEQ ID NO: 5425 - DNA, 717 bp, Salmonella enterica subsp. enterica serovar Typhi str. CT18
  CDS (1)..(717): transl_table=11
atgcgtttttaccggcctttggggcgtattgccgcgctcacctttgacctggatgataccctttatgataaccgtccggtgattttgcgtactgagcaggaagcgctcgcttttatgcaaaattatcacccgtcgctacgttcgtttcaaaacgtcgatttacagcggatacggcaggcggtgcgtgaagcggagccggaaatctatcatgacgttacccgctggcgccatcgcgcgatagagcaggccatgcgggatgcgggattatcggcgcaggagtccattgccggtgcgaatgcggcgatgatgcattttgccaaatggcgcagccagattgaggttccgcaggctacccatgagacgttacagcagcttgcgaaaaaatggccgctggtggcgatcactaacggcaatgcccagccggaactgtttggcctcggcgattactttaagtttgtactgcgcgccggcccggatggacgttccaaaccgtttagcgacatgtatttcctggcggcggaaaaactgcatgtgccgatcggcgagatcctgcatgtcggcgacgatctgactaccgatgtggctggcgctattcgctgtgggatgcaggcctgctggattaaacctgaaaatgccgacctgatgcggacgcaggacagccgtttactgccgcatatcgaaatttcgcggttggcatctctcacctcgctgatataa

SEQ ID NO: 5426 - protein, 238 aa, Salmonella enterica subsp. enterica serovar Typhi str. CT18
MRFYRPLGRIAALTFDLDDTLYDNRPVILRTEQEALAFMQNYHPSLRSFQNVDLQRIRQAVREAEPEIYHDVTRWRHRAIEQAMRDAGLSAQESIAGANAAMMHFAKWRSQIEVPQATHETLQQLAKKWPLVAITNGNAQPELFGLGDYFKFVLRAGPDGRSKPFSDMYFLAAEKLHVPIGEILHVGDDLTTDVAGAIRCGMQACWIKPENADLMRTQDSRLLPHIEISRLASLTSLI

SEQ ID NO: 5427 - DNA, 717 bp, Salmonella typhimurium LT2
  CDS (1)..(717): transl_table=11
atgcgtttttaccggcctttggggcgtattgccgcgctcacctttgacctggatgataccctttatgataaccgtccggtgattttgcgtactgagcaggaagcgctcgcttttatgcagaattatcacccgtcgctacgttcgtttcaaaacgtcgatttacagcggatacggcaggcggtgcgtgaagcggagccggaaatctatcatgacgttacccgctggcgccatcgcgcgatagagcaggccatgcgggatgcgggattatcggcgcaggaggccattgccggcgcgaatgcggcgatgatgcattttgccaaatggcgcagccagattgaggttccgcaggctacccatgagacgttacagcagcttgcgaaaaaatggccgctggtggcgatcactaacggcaatgcccagccggaactgtttggcctcggcgattactttaagtttgtactgcgcgccggcccggatggacgttccaagccctttagcgacatgtatttcctggcggcggaaaaactgcatgtgccgatcggcgagatcctgcatgtcggcgatgatctgactaccgatgtggctggcgctattcgctgtgggatgcaggcctgctggattaaacctgaaaatgccgacctgatgcggacgcaggacagccgtttactgccgcatatcgaaatttcgcggttggcatctctcacctcgctgatataa

SEQ ID NO: 5428 - protein, 238 aa, Salmonella typhimurium LT2
MRFYRPLGRIAALTFDLDDTLYDNRPVILRTEQEALAFMQNYHPSLRSFQNVDLQRIRQAVREAEPEIYHDVTRWRHRAIEQAMRDAGLSAQEAIAGANAAMMHFAKWRSQIEVPQATHETLQQLAKKWPLVAITNGNAQPELFGLGDYFKFVLRAGPDGRSKPFSDMYFLAAEKLHVPIGEILHVGDDLTTDVAGAIRCGMQACWIKPENADLMRTQDSRLLPHIEISRLASLTSLI

SEQ ID NO: 5429 - DNA, 717 bp, Yersinia pestis KIM
  CDS (1)..(717): transl_table=11
atgcatttttatcgtccacttgagcgtatttccgctattaccttcgatttggatgacacgttgtacgacaatcggccagtgatcgcgcggactgaacagcagtctgtggcttttttacaacagtatcatcccaatttagccctattacagccagcggatttccagcgcttacgtgctgaattattggcacaagatcccggtatctaccacgatgtcacgcaatggcgctggcaggcgattgaactgggcttgatgcgccatggcctgagtaaggcagaggcgcaagcgggagcggatgcggcgatggcaaactttgcgctatggcgcagccgtattgatgtgccgcaagccacacacgatacactgagcgcattagcggagcattacccactggtggccatcactaacggcaatgctgatcctaaagcttgcgggttggatcgctattttcaatttgtcttgcgctctgggcctcatggccgcgccaagccattccgcgatatgtatcataaagcggcgaaccatttggatattccgttaaaacatattctgcatgttggcgatgacctaacgacggatgttgccggctcactgcgctgtggtatgcaagcctgttggattaacgataggcaacaaaacctgatgactgcccgtgatagccgtttactgccacatattgaaatttcccagttggcatccctgacagcattgctataa

SEQ ID NO: 5430 - protein, 238 aa, Yersinia pestis KIM
MHFYRPLERISAITFDLDDTLYDNRPVIARTEQQSVAFLQQYHPNLALLQPADFQRLRAELLAQDPGIYHDVTQWRWQAIELGLMRHGLSKAEAQAGADAAMANFALWRSRIDVPQATHDTLSALAEHYPLVAITNGNADPKACGLDRYFQFVLRSGPHGRAKPFRDMYHKAANHLDIPLKHILHVGDDLTTDVAGSLRCGMQACWINDRQQNLMTARDSRLLPHIEISQLASLTALL

SEQ ID NO: 5431 - DNA, 723 bp, Shewanella oneidensis MR-1
  CDS (1)..(723): transl_table=11
atgcgttgttatcttagaccgcagaatattcgcgcgattagttttgatctcgacgacaccttatacgataacgaacctcacattatcaatgccgaagccgagttaatgcagtttttgcatcaggcttttccgttgacacaagcttggcagccgcagcagtggcgacgactcaaattacagctgctacagcaaaatccggccctagcccatgatacttcagcggcaagaatcgccacactccaccatggtttatcactcctaggttacagcgagtcggaggcgaaacgcggcgcagaggaaggtttggcctgtttctattttcatcgcagccattttcacgtttcagacgaggtcttggcactactctcgcgcttgtcggcccattttaggctgattgggatcaccaatggtaatgtggatgccgagcgggttggcttaggtgaagtatttgaatttgtgctgcatccgggaagcggtgtgcggatgaagccagcaaaagatatgttttcagaggcttgtgaacgcctaaatatcggcttagaacagttgttgcatgttggcgacagtatgaatgctgatgttcgtggcgcgcgcttggcgggatgtcaatcggtttggttaaatcccagttttggccgcgtggcatcgttgcctattgcagcactcttgccccatatggaaatagccacacttgattcattgctagagatgttattgccttga

SEQ ID NO: 5432 - protein, 240 aa, Shewanella oneidensis MR-1
MRCYLRPQNIRAISFDLDDTLYDNEPHIINAEAELMQFLHQAFPLTQAWQPQQWRRLKLQLLQQNPALAHDTSAARIATLHHGLSLLGYSESEAKRGAEEGLACFYFHRSHFHVSDEVLALLSRLSAHFRLIGITNGNVDAERVGLGEVFEFVLHPGSGVRMKPAKDMFSEACERLNIGLEQLLHVGDSMNADVRGARLAGCQSVWLNPSFGRVASLPIAALLPHMEIATLDSLLEMLLP

SEQ ID NO: 5433 - DNA, 696 bp, Pseudomonas putida KT2440
  CDS (1)..(696): transl_table=11
atgagcatcaagctgatcaccttcgacctcgacgataccctgtgggacaccgcgccggtgattgccaccgcggaagtcgtgctgcgcgactggctcgaggccaacgcaccaaccctcggcagcgtgccggtggaacacctgttcgccatccgcgagcgcctggtgcaagcagagcccggcctcaagcaccgcatcagcgccctgcgcaggcgcgtgctgtttcatgccctggaagaggtcggctacagcgaacagcacgcacaggcgctggccaacgaaggcttcgaagtgttcctgcatgcccgccaccaggtggagatcttcccagaggtgcagccggtgcttgaaatcttgcgccatcaatacatcctgggggtggtcaccaacggcaatgccgacgtcagccggctggggttggccgattacttccgctttgccctgtgcgccgaggacctgggcattggcaagccagacccggcgccgttcctcgaagcgctacgccgtggcgaggtggacgcgggtgcggcggtgcacatcggcgatcaccctggcgatgacattgccggtgcccagcgcgccggtttgcgcgcggtgtggttcaacccgcagggcaaggcctggactggcgatcaggcgccggatgccgaaatccagcgcctgtcgcagctgcccgacgtgctcgcgcgctggcgctga

SEQ ID NO: 5434 - protein, 231 aa, Pseudomonas putida KT2440
MSIKLITFDLDDTLWDTAPVIATAEVVLRDWLEANAPTLGSVPVEHLFAIRERLVQAEPGLKHRISALRRRVLFHALEEVGYSEQHAQALANEGFEVFLHARHQVEIFPEVQPVLEILRHQYILGVVTNGNADVSRLGLADYFRFALCAEDLGIGKPDPAPFLEALRRGEVDAGAAVHIGDHPGDDIAGAQRAGLRAVWFNPQGKAWTGDQAPDAEIQRLSQLPDVLARWR

SEQ ID NO: 5435 - DNA, 717 bp, Vibrio vulnificus CMCP6
  CDS (1)..(717): transl_table=11
atgaaacattaccgcccgctgcagccgatcgcggcaatgaccttcgacttagacgataccttgtatgataaccgtccggtgattgaacgcttggagcgtgaggtgttggcgtggctcgccgcgcagcatcctgcgacacaagtgatgagtcatagcgattggtctcagttaaagcgtgaagtggcggcaagctccccgcaattgcgcagtgatgtgacgcagctgcgtcatcagcaactgacccaggcatttttgcgtcttgggtacgatgtggtggcagcgcagcaagcggcggatgagggtgttgcggtagcgttgtattggcgcagccaattggtagtgccatcagaaacgcaccgtgtcatgagattactggcggacaagctgcctttagtggcgatcactaatggtaacgtggatgtcgcggcgatcggtttgcaaggctactttcaagccatcttaaaagcgggccctgatggagtggctaaaccagcgggcgatctgttccagcgtgcggagcagatcttgcagttgccggcgcagcgcattctccatgttggcgaccacttgctctcggatgtacatggtgccaatttgcatggttttatgtcgtgctggatcaatccaaagcagatcaatctacgtcagcaagccaaagccaaaactcttcctaatttagaaatcaatgaattaagtcagttactcctacttttgtaa

SEQ ID NO: 5436 - protein, 238 aa, Vibrio vulnificus CMCP6
MKHYRPLQPIAAMTFDLDDTLYDNRPVIERLEREVLAWLAAQHPATQVMSHSDWSQLKREVAASSPQLRSDVTQLRHQQLTQAFLRLGYDVVAAQQAADEGVAVALYWRSQLVVPSETHRVMRLLADKLPLVAITNGNVDVAAIGLQGYFQAILKAGPDGVAKPAGDLFQRAEQILQLPAQRILHVGDHLLSDVHGANLHGFMSCWINPKQINLRQQAKAKTLPNLEINELSQLLLLL

SEQ ID NO: 5437 - DNA, 693 bp, Pseudomonas syringae pv. tomato str. DC3000
  CDS (1)..(693): transl_table=11
atgattaagctggtgacgttcgatctcgacgacacgctctgggacaccgcgcctgccattgtcggcgcagaagccgcgctgcgtgactggctggccgagcaggcgccaaagctcgggccggtccccgtggagcatctgtgggaaatccgctcacgcctgctggacgaagacccttcgttcaagcaccggatcagtgcactgcgacgccgcgtgctgtttcacgcccttgaagatgctggctacgactccgacgaagctcagcaactggccgacgagagctttgaagtctttctgcatggccgccatcaagtgcagattttcccggaggtgcagcccactctggaaattctcgccaagaccttcacgctcggcgttatcaccaacggcaatgctgacgtgcgtcgcctggggctggccgactactttgcctttgccctgtgtgccgaggacctgggcatcggcaagcccgacccggccccgtttctcgaagcgctgcgccgtgcaaaagtcgatgccagcgcggccgtgcacgtcggcgaccaccccagcgacgacattgccggcgcacaacaggcgggcatgcgcgccatttggtacaacccgcagggcaaggcatgggacgcagatcgcttgccggatgccgagattcacaacctgtcgcaattgccggaagtactggcgcgctgggcctga

SEQ ID NO: 5438 - protein, 230 aa, Pseudomonas syringae pv. tomato str. DC3000
MIKLVTFDLDDTLWDTAPAIVGAEAALRDWLAEQAPKLGPVPVEHLWEIRSRLLDEDPSFKHRISALRRRVLFHALEDAGYDSDEAQQLADESFEVFLHGRHQVQIFPEVQPTLEILAKTFTLGVITNGNADVRRLGLADYFAFALCAEDLGIGKPDPAPFLEALRRAKVDASAAVHVGDHPSDDIAGAQQAGMRAIWYNPQGKAWDADRLPDAEIHNLSQLPEVLARWA

SEQ ID NO: 5439 - DNA, 717 bp, Vibrio parahaemolyticus RIMD 2210633
  CDS (1)..(717): transl_table=11
atgaaattttaccgccgtatcgagccgattaaggccatgacattcgatctggatgacacgctgtatgacaaccatccagtgattatccgtatggagagcgagttactgacttggttgcaacaaacgcatcctgcagtggcgcacatggaaaaggccgattggttgcaggtaaaaaaacatgttctccagcaaagtcctgatctcaaaagcgatgtgacgctttggcgcctagtgcagttaaagcatgcttttctatccgttggctacgatgaagcgcaagctcaagtcgcagcggaagagggcgtgcaactggcgttggaatggcgcagtcagtttgacgtgccacagcaaagtctcgatgtattggcggagttgggagaacgcattcctctggtggcgatcaccaatggtaatgtcgacttagataaaatcggtttgacgccatacttccaatgcgtattaaaagcgggccctgacggtctcgccaagcctgctgccgatttgtttgtcaaagcgcagcagttcctcgatttacctgccgaaaacattttgcatgttggtgaccacctcacgacggatgtatatggtgcaaagttagcgggttttgccgcatgttggtttaatgatatgaataaaaatgtcattaatcattcaagaacacgtacgttacctgacattgaaatcaatagtttgcagccgttactcacacttttttaa

SEQ ID NO: 5440 - protein, 238 aa, Vibrio parahaemolyticus RIMD 2210633
MKFYRRIEPIKAMTFDLDDTLYDNHPVIIRMESELLTWLQQTHPAVAHMEKADWLQVKKHVLQQSPDLKSDVTLWRLVQLKHAFLSVGYDEAQAQVAAEEGVQLALEWRSQFDVPQQSLDVLAELGERIPLVAITNGNVDLDKIGLTPYFQCVLKAGPDGLAKPAADLFVKAQQFLDLPAENILHVGDHLTTDVYGAKLAGFAACWFNDMNKNVINHSRTRTLPDIEINSLQPLLTLF

SEQ ID NO: 5441 - DNA, 717 bp, Wigglesworthia glossinidia endosymbiont of Glossina brevipalpis
  CDS (1)..(717): transl_table=11
atgtatttttacagattaataaaaccatttaaagcaataacatttgatctagatgatactctttatgataataaaccagtaatagatcttgctgaaaaaaatttagtaaaatttttaatacaatctcatccaaacttaaaaaattttaatcataagtattataaattttgtaaaagtaaattattattgaataatccttgtatttattatgatatcaacttttggagaaaattatcaattaaattatcattaagaatttttaaaataaactctattgaaacgaatattattgcaaaaaaagccatgaaaatagcaaatttttggagaaataaagtttttatatcagaaaatacacatagaattctaaacaaacttagcaaaaaatttccattaatagcaattacaaatggagatttagacataaataaatgtaatttaaataaatattttttaaaaattttcagatctggaaaagatggatacccaaaacctttttctgacatgtatgatttatcagcaaaaaaattaaaattatctccacatcatattttacatgtaggagatagtttagaaactgatgtatttggttccataagatatggaatgcaatcctgttgggttaattttaaaaaaaaaaaaataatatctgatttaagcgcaaaaacacttcctcattttgaaatttctgatttaaaatatcttatgaattttatataa

SEQ ID NO: 5442 - protein, 238 aa, Wigglesworthia glossinidia endosymbiont of Glossina brevipalpis
MYFYRLIKPFKAITFDLDDTLYDNKPVIDLAEKNLVKFLIQSHPNLKNFNHKYYKFCKSKLLLNNPCIYYDINFWRKLSIKLSLRIFKINSIETNIIAKKAMKIANFWRNKVFISENTHRILNKLSKKFPLIAITNGDLDINKCNLNKYFLKIFRSGKDGYPKPFSDMYDLSAKKLKLSPHHILHVGDSLETDVFGSIRYGMQSCWVNFKKKKIISDLSAKTLPHFEISDLKYLMNFI

SEQ ID NO: 5443 - DNA, 729 bp, Candidatus Blochmannia floridanus
  CDS (1)..(729): transl_table=11
gtgatttattttcatcgaaagtttaaacctttttatgctataacactagatttagataatactttatataataattatccagttattgataaagttgaaaaagagttacggttgtttttacgaaaatatcatcctgttttacgtaactttaaaaaagaagattatcatattattcgggaaaaaattagattaattgatccagatatttaccataatgttaatagttggcgatggaaatctttggagagaatatttttacaatcaggattgtctgaacatgaagcaacattaggagctgataatgcaatggaatttgttttattttggcgtaatcaaattaatgtatctttaaaaacagatatggcattatcggctttaagttctaaatggcctttaattgctattactaatggtaatgctgattctgtattgtataattttaaaaggtattttagtgatattttgagggctggaattcatggaagagctaaaccttatacagatatgtatgatttagcatcaaaatattttgaaataccttgtcggtatattttacatataggagatgatttatatactgatgttcaaggagcaatgcgatcaggaatgcagtcttgctggataaaggaatatagtttggatatgaaaaataataatatattgatgaatccacaattgtgtccgaatttagaaatttcagatttaatgtcattaacatatttactataa

SEQ ID NO: 5444 - protein, 242 aa, Candidatus Blochmannia floridanus
MIYFHRKFKPFYAITLDLDNTLYNNYPVIDKVEKELRLFLRKYHPVLRNFKKEDYHIIREKIRLIDPDIYHNVNSWRWKSLERIFLQSGLSEHEATLGADNAMEFVLFWRNQINVSLKTDMALSALSSKWPLIAITNGNADSVLYNFKRYFSDILRAGIHGRAKPYTDMYDLASKYFEIPCRYILHIGDDLYTDVQGAMRSGMQSCWIKEYSLDMKNNNILMNPQLCPNLEISDLMSLTYLL

SEQ ID NO: 5445 - DNA, 717 bp, Photorhabdus luminescens subsp. laumondii TTO1
  CDS (1)..(717): transl_table=11
atgcgtttttaccggcctcttgcgccagtgttagcgatgacatttgatctggatgatacgctgtatgataatcatccagtcatggataaggcagaagaggaagtactgaactttgtacggcagtatgatcctaggttcagccaccttaatcatcaggatctatgtgctttccgtgaattgacacttgagcagcatcctgaaatttatcatgacatgactttatggcgctggtactcctcaaagttgatgttttgccattacggttttagccgtgaagacgctgatcggggggcagatgatgtcatggcgcatttcacactttggcgtaatcgaattgatatccctgaatcaacacataaaactctggcggcacttgctgaacaaatgccactggtagccattactaatggcaatgcagaaccagccgcctgtggtcttgccccttattttaaatttgtgctgcaagctggccctgatggacgcgcaaaaccttgcagcgatatgtactgtttggccgcggatcgtctgggtttagcgcttgggcaaatcttacatattggtgatgacttgaatactgatgtggcaggagcgctgggtagtggtatgcaagcttgctggatgaatactaagaataaaaaattattgcagacgatggaaagccgcctactgcctcacattgagatttacgatttggcttctttgacagcattgatataa

SEQ ID NO: 5446 - protein, 238 aa, Photorhabdus luminescens subsp. laumondii TTO1
MRFYRPLAPVLAMTFDLDDTLYDNHPVMDKAEEEVLNFVRQYDPRFSHLNHQDLCAFRELTLEQHPEIYHDMTLWRWYSSKLMFCHYGFSREDADRGADDVMAHFTLWRNRIDIPESTHKTLAALAEQMPLVAITNGNAEPAACGLAPYFKFVLQAGPDGRAKPCSDMYCLAADRLGLALGQILHIGDDLNTDVAGALGSGMQACWMNTKNKKLLQTMESRLLPHIEIYDLASLTALI

SEQ ID NO: 5447 - DNA, 717 bp, Vibrio vulnificus YJ016
  CDS (1)..(717): transl_table=11
atgaaacattaccgcccgctgcagccgatcgcggcaatgaccttcgacttagacgataccttgtatgataaccgtccggtgattgaacgcttggagcgtgaggtgctggcgtggctcgccgcgcagcatcctgcgacacaagtgatgagtcatagcgattggtctcagttaaagcgtgaagtggcggcaagctccccgcaattgcgcagtgatgtgacgcagctgcgtcatcagcaactgacccaggcatttttgcgtcttgggtacgatgtggcggcggcgcagcaagctgcggatgagggggtcgcggtggcgttgtattggcgcagccagttggtagtgccatccgaaacgcaccgtgtcatgagattattggcggacaaactgcctttagtggcgatcactaatggtaacgtggatgtcgcggcgatcggcctggatggctactttcaagccatcttaaaagcgggtcctgatggagtggctaaaccagcgagcgatctgttccagcgtgcggagcagatcttacagttgccggcgcagcgcattctccatgttggcgaccacttgctctcggatgtgcacggcgctaacttgcatggttttatgtcgtgctggatcaatccaaagcagatcaacctacgtcagcaagccaaagccaaaactcttcctaatttagaaatcaatgaattaagtcagttactcctacttttgtaa

SEQ ID NO: 5448 - protein, 238 aa, Vibrio vulnificus YJ016
MKHYRPLQPIAAMTFDLDDTLYDNRPVIERLEREVLAWLAAQHPATQVMSHSDWSQLKREVAASSPQLRSDVTQLRHQQLTQAFLRLGYDVAAAQQAADEGVAVALYWRSQLVVPSETHRVMRLLADKLPLVAITNGNVDVAAIGLDGYFQAILKAGPDGVAKPASDLFQRAEQILQLPAQRILHVGDHLLSDVHGANLHGFMSCWINPKQINLRQQAKAKTLPNLEINELSQLLLLL

SEQ ID NO: 5449 - DNA, 717 bp, Erwinia carotovora subsp. atroseptica SCRI1043
  CDS (1)..(717): transl_table=11
atgcatttttaccgatctcttggtccgatccgtgcgatcacgttcgatctggatgacacgctatacgacaacgcggacgtcattcgacgcacagggcaagagtcaatccgcttcctgcaagagtaccatcctgcgcttcgtgattttcaggcagatgatttccagaacttacgccagaccttgctggagcgcgaaccggacatctatcacgacgtcactgaatggcggcgccgtgcagttgaactggcgatgttagatcgtggcctgagtgccgcagagtctaaggatggcgcaaaagcggcaatggaaaactttgcccactggcgtagtcagattgcgattaccgaagagacgcaccagacgttggcagcattagctgagaaagtgccgctggcggcgatcaccaacggcaacgccgagccgcatcggttcggcctcgaacgctatttttctttcatcctgcgtgccggcccgcacggtcgtgccaagccgtttgatgatatgtaccatctggcggcggaaaaactcaatctgcctttgcatgagattctgcatgttggcgacgatctcacgaccgatgtggcggggtcgatccgctgcggtatgcaagcctgctggattaacctgcgtgaaggcagcctgacacagattggcgacgctcggctgctgccgcatattgaaatttcgcggttggcatcgctgtcggcattgctataa

SEQ ID NO: 5450 - protein, 238 aa, Erwinia carotovora subsp. atroseptica SCRI1043
MHFYRSLGPIRAITFDLDDTLYDNADVIRRTGQESIRFLQEYHPALRDFQADDFQNLRQTLLEREPDIYHDVTEWRRRAVELAMLDRGLSAAESKDGAKAAMENFAHWRSQIAITEETHQTLAALAEKVPLAAITNGNAEPHRFGLERYFSFILRAGPHGRAKPFDDMYHLAAEKLNLPLHEILHVGDDLTTDVAGSIRCGMQACWINLREGSLTQIGDARLLPHIEISRLASLSALL

SEQ ID NO: 5451 - DNA, 717 bp, Yersinia pseudotuberculosis IP 32953
  CDS (1)..(717): transl_table=11
atgcatttttatcgtccacttgagcgtatttccgctattaccttcgatttggatgacacgttgtacgacaatcggccagtgatcgcgcggactgaacagcagtctgtggcttttttacaacagtatcatcccaatttagccctattacagccagtggatttccagcgcttacgtgctgaattattggcacaagatcccggtatctaccacgatgtcacgcaatggcgctggcaggcgattgaactgggcttgatgcgccatggcctgagtaaggcagaggcgcaagcgggagcggatgcggcgatggcaaacttcgcgctatggcgcagccgtattgatgtgccgcaagccacacacgatacactgagcgcattggcggagcattacccgctggtggccatcactaacggcaatgctgatcctaaagcttgcgggttggatcgctattttcaatttgtcttacgctctgggcctcatggccgcgccaagccattccgcgatatgtatcataaagcggcgaaccatttggatattccgttaaaacatattctgcatgttggcgatgacctaacgacggatgttgccggctcactgcgctgtggtatgcaagcctgttggattaacgataggcaacaaaacctgatgactgcccgtgatagccgtttactgccacatattgaaatttcccagttggcatccctgacagcattgctataa

SEQ ID NO: 5452 - protein, 238 aa, Yersinia pseudotuberculosis IP 32953
MHFYRPLERISAITFDLDDTLYDNRPVIARTEQQSVAFLQQYHPNLALLQPVDFQRLRAELLAQDPGIYHDVTQWRWQAIELGLMRHGLSKAEAQAGADAAMANFALWRSRIDVPQATHDTLSALAEHYPLVAITNGNADPKACGLDRYFQFVLRSGPHGRAKPFRDMYHKAANHLDIPLKHILHVGDDLTTDVAGSLRCGMQACWINDRQQNLMTARDSRLLPHIEISQLASLTALL

SEQ ID NO: 5453 - DNA, 717 bp, Mannheimia succiniciproducens MBEL55E
  CDS (1)..(717): transl_table=11
atgaaattttaccgcactttagaagattttaaggttatctcttttgatttggacgatacgctttatgataattcgcaggttattttagatgcggagcggcattcggtggattttttacgggaaatcagtcaaattccgcaattggacggcggttattggcggtattggaaaaataaaaccgcactggattttccgcttttggcggaagatgtcacccaatggcgaataaaaactatcgtcgagttgttgcgggctcatcaaaaaagtgcggtcgaaattgagcgaatttctcatgcggcaatggaagatttctttgaatggcggcataaaatgcaggtaccgcagcaaagttttgaagtattaaataaattgaagagacagtataaattagccgcattaaccaacggaaacgtaacgccgtcaagagcggggtttgatcagttcgaattagtactcaccggcggtgtgcaagggcgggcaaagccccatcaggatctattccgccagaccgccggctactttaatgtgcggccccatgaaattttacacgtaggcgataatttagtcacagatgtgcaaggcgccattcaagcgggttgtcaggcagtttggattaatttatccgacaaaaaaattcagcatttcagtgaggcgacattagtacctacgttcgaaatcactgatttaaatgagttgctgttcttccgcaatctgtag

SEQ ID NO: 5454 - protein, 238 aa, Mannheimia succiniciproducens MBEL55E
MKFYRTLEDFKVISFDLDDTLYDNSQVILDAERHSVDFLREISQIPQLDGGYWRYWKNKTALDFPLLAEDVTQWRIKTIVELLRAHQKSAVEIERISHAAMEDFFEWRHKMQVPQQSFEVLNKLKRQYKLAALTNGNVTPSRAGFDQFELVLTGGVQGRAKPHQDLFRQTAGYFNVRPHEILHVGDNLVTDVQGAIQAGCQAVWINLSDKKIQHFSEATLVPTFEITDLNELLFFRNL

SEQ ID NO: 5455 - DNA, 693 bp, Pseudomonas syringae pv. syringae B728a
  CDS (1)..(693): transl_table=11
atgattaagctggtgacgtttgatcttgacgacacgctctgggacaccgccccggccattgccggtgccgaagtcacgctgcgtgactggctgggcgaacacgcgccccggctgggagcggttcctgtcgagcacctgtgggaaatccgctcgcgtctggtggccgaagacccgtccttcaagcaccgtatcagcgccttgcgccgccgcgtgctgttccatgcgctcgaagatgccggctacgacccggacgaggcgcaggacctggccgaccggggctttgaagtgttcctgcagggccgtcatcaggtgcagattttccctgaggtgcaaccgatgctggaaattctcgccaagaccttcacgctcggcgtgattaccaatggcaatgccgatgtgcgtcgtctggggctggcggactactttgccttcgcgctgtgcgccgaggacctgggcatcggcaagcctgatccggcaccgttcgtggaggcgttgcgccgcgcaaaggtcgatgccggcgcggcggtgcatgtcggtgaccatcccaaggacgatatcgcaggtgcccagcaggccggcatgcgcgccatctggtacaacccgcaaggcaaggcctgggatgcggatcgactgcccgatgccgagatccacaacctgtcgcaactgcccgaggtgctggcgcgctgggcctga

SEQ ID NO: 5456 - protein, 230 aa, Pseudomonas syringae pv. syringae B728a
MIKLVTFDLDDTLWDTAPAIAGAEVTLRDWLGEHAPRLGAVPVEHLWEIRSRLVAEDPSFKHRISALRRRVLFHALEDAGYDPDEAQDLADRGFEVFLQGRHQVQIFPEVQPMLEILAKTFTLGVITNGNADVRRLGLADYFAFALCAEDLGIGKPDPAPFVEALRRAKVDAGAAVHVGDHPKDDIAGAQQAGMRAIWYNPQGKAWDADRLPDAEIHNLSQLPEVLARWA

SEQ ID NO: 5457 - DNA, 705 bp, Pseudomonas fluorescens Pf-5
  CDS (1)..(705): transl_table=11
atgaccatcaagctgatcaccttcgacctcgacgacaccctgtgggataccgccccggtcatcgtcagtgccgaagccaccctgcgccagtggctgaccgaacacgcaccgaatctcggaggcgtgccggtggagcatctgtgggccattcgcgagcgggtgctgctcgcccagccgaacctcaagcacaggatcagcgccctgcgccgccaggtgctgtttcatgccctggaagaagccgggtatgaccatgcccaggccaaccagttggccgaccagagttttgaagttttcctgcatgcccggcatcagctggagatctttccagaagtccagccgaccctggaagccctggccaatcacttcgcccttggcgtggtcaccaacggcaacgccgacgtgcgccgcctgggcctggcggactatttcaagttcgcgctgtgcgccgaggacatcggcatcgccaagcccgacgcccggctgttccacgaagccttgcagcgtggcgaagcgactgccgacaccgccgtgcatatcggcgaccacccgggggatgacattgccggtgcacagcaggcagggctgcgtgcgatctggttcaatcccaacggcaagacctgggaagccgaacacgcgccagacgccgagatccgcagcctgaatgaactacccgggctgcttgcccgctggcatcgcggcgcctga

SEQ ID NO: 5458 - protein, 234 aa, Pseudomonas fluorescens Pf-5
MTIKLITFDLDDTLWDTAPVIVSAEATLRQWLTEHAPNLGGVPVEHLWAIRERVLLAQPNLKHRISALRRQVLFHALEEAGYDHAQANQLADQSFEVFLHARHQLEIFPEVQPTLEALANHFALGVVTNGNADVRRLGLADYFKFALCAEDIGIAKPDARLFHEALQRGEATADTAVHIGDHPGDDIAGAQQAGLRAIWFNPNGKTWEAEHAPDAEIRSLNELPGLLARWHRGA

SEQ ID NO: 5459 - DNA, 774 bp, Colwellia psychrerythraea 34H
  CDS (1)..(774): transl_table=11
atgcaattttaccgacgtttaaccgcgattaaagccattagttttgatttagatgacaccttgtataataaccgaccaataatgcagtcggttgaacagcaaatggcgcattactttactgaaaagtttgccattttattacctgagctactcgttgaaccaaagcaggtctttaatcgacgtttttgggcaccgtatcgacaacaagcgataaaagcacatcaggatatttctcacgatgtggtaagactgcgttttgaaagttatcgtttaggtttgctggcgcataatctctctgcagaagcagcgagaaaagaagcacaagcgggcttagattatttcattaacttacgaagtgattttaccgtacccaaagaaagccatgaactcttagcgagtttaagtaaagcgtttccgttggtctcaatcagtaatggtaatgtagacaccagagccctgggcattgatcattattttcaacatatttatcatgccggttttcaaacaggcaattgtcatgatgaaagtgaacatttgctaaaacaaaaacctgaaaccgatatgttttccttagtttgtcagcaactcgatattttacctgaacagttattacatgtcggagattgtggttttgccgatattcatggtgcattaaatgccggttgccaaactgcttggttaccgcaatacggtgtgggtaaaagcctacagcaaatacctcatattgaattaagcctagtaagcgacctgtcacaactaattcgaaaagcttaa

SEQ ID NO: 5460 - protein, 257 aa, Colwellia psychrerythraea 34H
MQFYRRLTAIKAISFDLDDTLYNNRPIMQSVEQQMAHYFTEKFAILLPELLVEPKQVFNRRFWAPYRQQAIKAHQDISHDVVRLRFESYRLGLLAHNLSAEAARKEAQAGLDYFINLRSDFTVPKESHELLASLSKAFPLVSISNGNVDTRALGIDHYFQHIYHAGFQTGNCHDESEHLLKQKPETDMFSLVCQQLDILPEQLLHVGDCGFADIHGALNAGCQTAWLPQYGVGKSLQQIPHIELSLVSDLSQLIRKA

SEQ ID NO: 5461 - DNA, 693 bp, Pseudomonas syringae pv. phaseolicola 1448A
  CDS (1)..(693): transl_table=11
atgattaagctggtgacgtttgatcttgacgacacgctctgggacaccgcccctgccattgccggtgccgaagtcacactgcgtgactggctggccgaacacgcgccaaagctgggggcgattcctgtcgagcacctgtgggaaattcgctcgcgccttgtggctgaagacccgtccttcaagcaccgcatcagcgccttgcgacgccgcgtgctgttccatgcgctcgaagatgccggctacgacccggacgaggcgcaggaccttgccgaccgcggctttgaagtcttcctgcatggccgccatcaggtgcagattttccctgaggtgcaacccatgctggaaattctcgccaagaccttcacgctgggcgtgattaccaatggcaatgccgatgtgcgtcgtttggggctggctgactattttgccttcgcgctgtgcgccgaggacctgggtatcggtaagcccgaccccgcaccgtttgtggaagcgttacggcgcgcaaaagtcgatgccagcgcagccgtgcacgtaggcgatcacccgaaggacgatatcgcaggtgcccaacaggcgggcatgcgcgccatctggtacaacccgcaaggcaaggcctgggacgcagaccggctgccggatgccgagatccacaacctgtcgcagctgccggaagtcctggcacgctgggcctga

SEQ ID NO: 5462 - protein, 230 aa, Pseudomonas syringae pv. phaseolicola 1448A
MIKLVTFDLDDTLWDTAPAIAGAEVTLRDWLAEHAPKLGAIPVEHLWEIRSRLVAEDPSFKHRISALRRRVLFHALEDAGYDPDEAQDLADRGFEVFLHGRHQVQIFPEVQPMLEILAKTFTLGVITNGNADVRRLGLADYFAFALCAEDLGIGKPDPAPFVEALRRAKVDASAAVHVGDHPKDDIAGAQQAGMRAIWYNPQGKAWDADRLPDAEIHNLSQLPEVLARWA

SEQ ID NO: 5463 - DNA, 705 bp, Pseudomonas fluorescens PfO-1
  CDS (1)..(705): transl_table=11
atgagcatccagttgatcaccttcgacctcgacgacaccctgtgggataccgccccggtgatcgtcagcgcagaagcggttttgcgcgaatggctgagcgaacatgcaccgaagctgggcgcggtgccggtggagcatctgtggtcgatccgcgagcgcgtgctgagcagcgaaccgggactcaagcaccgcatcagcgcgctgcgccggcgagtgctgttccatgctttggaagagtccgggtacgcccacggcgaagcgtcggagctggcagacaagagttttgaagtgttcctgcatgcgcggcatcagatcgaggtgttcccggaagtcgagccgatcctggaaaccctggccaaacactacgccctcggcgtggtcaccaacggcaacgccgatgtgcgtcggttggggctggcggactacttcaagtttgcgctgtgcgccgaagacatcggcatcgccaagccggatgcgcgactgttccatgaagcgttgcagcgcggcggcgtcagcgccgaagcggcggtgcatattggcgatcacccgggggatgacatcgccggggcgcagcaggccggtctgcgagcgatctggttcaaccccgccggcaaggtctgggaagcggagcgcctgccggatgccgagattcgtagcctgaacgatctgcccgcggtgctcgcccgctggaacagccgcggctaa

SEQ ID NO: 5464 - protein, 234 aa, Pseudomonas fluorescens PfO-1
MSIQLITFDLDDTLWDTAPVIVSAEAVLREWLSEHAPKLGAVPVEHLWSIRERVLSSEPGLKHRISALRRRVLFHALEESGYAHGEASELADKSFEVFLHARHQIEVFPEVEPILETLAKHYALGVVTNGNADVRRLGLADYFKFALCAEDIGIAKPDARLFHEALQRGGVSAEAAVHIGDHPGDDIAGAQQAGLRAIWFNPAGKVWEAERLPDAEIRSLNDLPAVLARWNSRG

SEQ ID NO: 5465 - DNA, 723 bp, Burkholderia sp. 383
  CDS (1)..(723): transl_table=11
atgcgcctcacccaagtttccgctctctcgttcgacctggacgacaccctgtggccgttcgggccgtccgtcgtacgggccgaagcgacgcttcgcacgtggctgatcgagcatgcgcccggtaccgagcgtgtgctgcccacgcagcagtcgctaagcgacttgcgtgaggaatacgaacgattgtgtcccgagcttgccggcgacttccgtgccatgagaatcgggtcgatcaggcttgcgctggagcgtgcgaacgaagatgtcgcgctcaccgaccgtgcgtacgccgccttctatgccgcgcgcaaccgggtcgaattctatgacgatgcattgccggcgctcgcgtggctgagcgcgcggtttccgttgatcgcggtgaccaacggcaacgcggacctccggctgaccggcggcggcgaattctttcgtgcgacgctcagcgcgcaggcgttcggcgtcgcgaagcctgagcccgggatctttcatgcggcagcggaaacgctcgacgtgcagccggcggaactgctgcatgtcggcgacgactatcacctcgatatcgtcggtgcgttgaacgcggggcttcaggccgcgtgggtggttcgcgatacgcatccggaagcggagcgtgcgcagcaacaggccgcgacgccgcacctcacgctcagcgacctgtcgatgctgtgccgcatgctcggcgggcctgacgacgtcgcgtga

SEQ ID NO: 5466 - protein, 240 aa, Burkholderia sp. 383
MRLTQVSALSFDLDDTLWPFGPSVVRAEATLRTWLIEHAPGTERVLPTQQSLSDLREEYERLCPELAGDFRAMRIGSIRLALERANEDVALTDRAYAAFYAARNRVEFYDDALPALAWLSARFPLIAVTNGNADLRLTGGGEFFRATLSAQAFGVAKPEPGIFHAAAETLDVQPAELLHVGDDYHLDIVGALNAGLQAAWVVRDTHPEAERAQQQAATPHLTLSDLSMLCRMLGGPDDVA

SEQ ID NO: 5467 - DNA, 708 bp, Ralstonia metallidurans CH34
  CDS (1)..(708): transl_table=11
atgcgtctggccggtatctccgcaatatctctcgatctcgacgacaccctttgggctttcgaacctgccgtcgtgcgcgcggaacaggtcctgcatgactggttgctgcagcaagcgcccaaatccgcaccgatcctttcatcgccccaggtgctgcgtgacctccgcgtccagttcgaggccatgcgccccgaactggctggcaacatgcgcgcgctgcggctgggctcgatccggctggtgctcgacatgtcgaacgaagaccccggccttgccgaggccgcctacgacgctttctacgctgcgcgccagcaggtcgatttcttcgacgatgcgctgcccgcgctggaatggctgagccagcggtttccactcgtcgcggtatcgaatggcaatgcgaatctcaagctgactggcgggcaccagttcttccgggcatcgctgaacccgcagagcttcggcagcggcaaacccggcgccgcgattttccacgcggcagccgatgcagccggatgcgcgcccggccgaatgcttcacgtcggtgacgatcccgacctcgacgtagccggcgcgatcgccgccggcgcacaggccgcatgggtggtgcgctccgaagaggcgtccgccgcgcaatggtcacgcagcagcccgcctccgcacctgatcgttcgcgatctgcgggcgctgtgtcaggcactggacgcctga

SEQ ID NO: 5468 - protein, 235 aa, Ralstonia metallidurans CH34
MRLAGISAISLDLDDTLWAFEPAVVRAEQVLHDWLLQQAPKSAPILSSPQVLRDLRVQFEAMRPELAGNMRALRLGSIRLVLDMSNEDPGLAEAAYDAFYAARQQVDFFDDALPALEWLSQRFPLVAVSNGNANLKLTGGHQFFRASLNPQSFGSGKPGAAIFHAAADAAGCAPGRMLHVGDDPDLDVAGAIAAGAQAAWVVRSEEASAAQWSRSSPPPHLIVRDLRALCQALDA

SEQ ID NO: 5469 - DNA, 699 bp, Pseudomonas aeruginosa UCBPP-PA14
  CDS (1)..(699)
atgagcagcctgcgactgatcaccttcgacctcgacgacaccctgtgggacgtcgccccggtgatgaacaacgccgaggccctgctccgcgaatggctggcgagcaacgcggcgcgcctgggtccggtgcccatcgagcacctgtgggcgatccgcacccgcctgctggatcgcgaaccgatgctgcgccaccgtctcagcgagctgcgccggcgcatcctgttccatgccctgctcgacgccggttatccacaggcggaggcggaaagcctggccgaggccggtttccaggtattcctcgaagcgcgccaccgggtcaccctgtttcccgaagtccacccgaccctggagatcctcgccgaccgcttcaccctcggcgtgctcaccaacggtaacgccgacgtgcgccgcctgggcctggccgactacttccggttcgccctctgcgccgaggaactgggcgtcggcaagcccgacccgacgccattccgcgaagccctgaagcgcgccggcgtcgaggcctcggcagcggtacacatcggcgaccaccccaacgacgacatcgccggagcgcgccgcgccggcatgcgtgccatctggttcaacccaaacggcaagccctgggccggggaggaagagccgagcgcggagatccgcagcctcgccgagctgccggccctgctcgcccgcctgcaatga

SEQ ID NO: 5470 - protein, 232 aa, Pseudomonas aeruginosa UCBPP-PA14
MSSLRLITFDLDDTLWDVAPVMNNAEALLREWLASNAARLGPVPIEHLWAIRTRLLDREPMLRHRLSELRRRILFHALLDAGYPQAEAESLAEAGFQVFLEARHRVTLFPEVHPTLEILADRFTLGVLTNGNADVRRLGLADYFRFALCAEELGVGKPDPTPFREALKRAGVEASAAVHIGDHPNDDIAGARRAGMRAIWFNPNGKPWAGEEEPSAEIRSLAELPALLARLQ

SEQ ID NO: 5471 - DNA, 708 bp, Rubrivivax gelatinosus PM1
  CDS (1)..(708)
atgaacctggacactggcaagctccgcgcgctgacgctggatctggacgacacgctgtggccgatctggccgaccatcgctcgcgctgaatcggccttgcaggcctggctgcagcggcatgctccgcgcgtcaccgagcggttcgacctggccgcgatgcgggccgaccgcgaggcggtggcgcgcgagcgacccgactgggcgcacgatctcagtgccctgcggcgcgagagcatccggcgcctgctggtcgcggcgggggagacggaagccttgctcgacgccgcgttctcggtctttctcgccgagcgacagtgcgtcgatctctatgccgattcgctgccggcattgcagcggctggctgcgcgctggccgctgttcgcactgagcaatggcaacgccgatctcgtgcggatcgggctgcaaccctggttccgaggcagcctcgcggcgcgagaattcggggtcggcaagcccgatcctcgcatcttcgccgcggcctgcgagcgtctgggttgcgcaccgaacgaagtgctgcacgtcggtgacgatctgcggctcgacgtgcacggtgcgctcgacgctggcatgcaggccgcctgggtgcgccgtgacggtgagggacgagaagacgatgtcatcggggccggggtgcgctgctggcaggggcccgatctgctcgcactggccgaccgattgggggtctga

SEQ ID NO: 5472 - protein, 235 aa, Rubrivivax gelatinosus PM1
MNLDTGKLRALTLDLDDTLWPIWPTIARAESALQAWLQRHAPRVTERFDLAAMRADREAVARERPDWAHDLSALRRESIRRLLVAAGETEALLDAAFSVFLAERQCVDLYADSLPALQRLAARWPLFALSNGNADLVRIGLQPWFRGSLAAREFGVGKPDPRIFAAACERLGCAPNEVLHVGDDLRLDVHGALDAGMQAAWVRRDGEGREDDVIGAGVRCWQGPDLLALADRLGV

SEQ ID NO: 5473 - DNA, 717 bp, Vibrio sp. Ex25
  CDS (1)..(717)
atgaaattttatcgccgtatcgagcctattaaggccatgaccttcgatcttgatgacacgctgtatgacaattacccggtgattatccgtatggagcgtgagttgctggcttggttgcagcaaacacatcctgccgtggcgcacatggataaggctgattggatgcaggtaaaaaaacatgtgctccagcagagaccggatctcagaagcgatgtgacgctttggcgtttagtgcagctaaagcatggttttctttcagttggctatgatgaagctcaagctcaagccgcagctgaagagggtgtgcagctcgctttggattggcgcagtcagtttgaagtgccccaatcaagcttagatgttttgacacaactgggagagcgagttccgctcgtggcgatcacaaacggcaacgtcgatttagataaaattggcttaacgccatattttcaatgtgtactcaaagcggggccagatgggttagcgaaacccgccaccgatatgtttactaaggcgaaacggttcttggatattccagcagagaatattctgcatgtcggtgatcacctaaccacggatgtgcatggtgcaaagtcggctggttttgcggcttgttggttcaatgatatgaataaaaatgtcattaaccattcaaaaacacgtactttacctgatattgaaatcaatagtttgcagccgttactcacacttttttaa

SEQ ID NO: 5474 - protein, 238 aa, Vibrio sp. Ex25
MKFYRRIEPIKAMTFDLDDTLYDNYPVIIRMERELLAWLQQTHPAVAHMDKADWMQVKKHVLQQRPDLRSDVTLWRLVQLKHGFLSVGYDEAQAQAAAEEGVQLALDWRSQFEVPQSSLDVLTQLGERVPLVAITNGNVDLDKIGLTPYFQCVLKAGPDGLAKPATDMFTKAKRFLDIPAENILHVGDHLTTDVHGAKSAGFAACWFNDMNKNVINHSKTRTLPDIEINSLQPLLTLF

SEQ ID NO: 5475 - DNA, 723 bp, Shewanella sp. ANA-3
  CDS (1)..(723): transl_table=11
atgcgttgttatcttagaccccagaatattcgtgcgatcagcttcgatcttgacgataccttatacgataacgagcctcatattctgaatgccgaagccgagctaacgcagtttttgcatcaggcttttccgctgactcaagcttggcaaccgcagcaatggcgactgctcaagttacagttgctacagcaaaatcctgccttagcccatgatacctcggcggcgcgaattgcgactctgcataaaggtctttcgctgctcggttatagcgagtcggaggcaaaacggggtgcgcaggaagggttggattgtttctatttccatcgcagccattttcaggtttcagacgaagtcttggcgctgctcgcgcgcttatcggcccattttcggttgattggtatcaccaatggcaatgtggacgcacagcgcattggcttgagtgaggtgttcgaatttgtgctgcatcctggtagtggtgtacggatgaaacccgctaaagatatgttttcacaggcttgtgaaaggctggatatcggcttagacgaactgctgcacgtgggtgatagtatgaatgccgatgttcgcggtgcgcgcttagcgggctgccagtcggtctggctcaacccgagttttggccgcgtggcgtcgctgccgatagcagccctattaccccatatggaaattgcgaccctcgatgctctgctggagatgttactgccataa

SEQ ID NO: 5476 - protein, 240 aa, Shewanella sp. ANA-3
MRCYLRPQNIRAISFDLDDTLYDNEPHILNAEAELTQFLHQAFPLTQAWQPQQWRLLKLQLLQQNPALAHDTSAARIATLHKGLSLLGYSESEAKRGAQEGLDCFYFHRSHFQVSDEVLALLARLSAHFRLIGITNGNVDAQRIGLSEVFEFVLHPGSGVRMKPAKDMFSQACERLDIGLDELLHVGDSMNADVRGARLAGCQSVWLNPSFGRVASLPIAALLPHMEIATLDALLEMLLP

SEQ ID NO: 5477 - DNA, 723 bp, Shewanella sp. MR-7
  CDS (1)..(723): transl_table=11
atgcgttgttatcttagaccccagaatattcgcgcgatcagcttcgatctcgacgacaccttatacgataacgaacctcacattctgaatgccgaagccgagttaacgcagtttttgcatcaggcttttccgctgacacaagcttggcaaccgcagcagtggcgactgctcaagttgcagctgatacaacagaacccagccctagcccatgacacctcggcggcgcgaattgcgactctgtataaaggtctttcgctgctcggttatagcgagtcggaggcaaaacggggcgcgcaggaaggtttggattgtttctattttcatcgcagccattttcaagtttcagacgaagtcttggcgctactcacgcgtttatcggcgcactttcggttgattggtatcaccaatggcaatgtggacgcacagcgtatcggcttgagtgaggtgttcgaatttgtgctgcatcctggcagtggtgtgcggatgaagcctgctaaagatatgttttcacaggcttgtgaaaggctggatatcggcttagacgaactgctgcacgtgggtgatagtatgaatgccgatgttcgcggtgcgcgcttagcggggtgtcagtcggtctggctcaacccgagttttggtcgcgtggcgtcgctgccgatagcagccctattaccccatatggaaattgcgaccctcgatgctctgctggagatgttgctgccataa

SEQ ID NO: 5478 - protein, 240 aa, Shewanella sp. MR-7
MRCYLRPQNIRAISFDLDDTLYDNEPHILNAEAELTQFLHQAFPLTQAWQPQQWRLLKLQLIQQNPALAHDTSAARIATLYKGLSLLGYSESEAKRGAQEGLDCFYFHRSHFQVSDEVLALLTRLSAHFRLIGITNGNVDAQRIGLSEVFEFVLHPGSGVRMKPAKDMFSQACERLDIGLDELLHVGDSMNADVRGARLAGCQSVWLNPSFGRVASLPIAALLPHMEIATLDALLEMLLP

SEQ ID NO: 5479 - DNA, 705 bp, Alkalilimnicola ehrlichei MLHE-1
  CDS (1)..(705): transl_table=11
atgcctgagtcgggcgcgatccgggcggtcaccttcgatctcgacttcaccctctgggacttggaacacgtcattcagcgtgccgagcagcgcatgcagcgctttctggcggcgcgctatccgcgggtcagcgagcatttcgacgaggaggccatgcgccggctgcggttgcgtatggcggaggagcacccggagttgcggatcaatgtcagcgccatgcgccgtgcgtcgctgcgacgcatcgcgctgacctgcggctatggtgaggatatggtggaggcggccttccatgtcttcatggaggggcgccacgaagtggtgccatatgacgacgtggcccccaccctgacggcattgcgccgtcactaccggatcggagcgctgaccaacggtaatgccgacgtcaaccgcctggccttgggcgagtactttgacttcagtgtctcagcggtggaggtcggcgcggccaagccgagccggatcatcttcgaggcggcctgtcatcgggccggcatcgcccccggtgagatggtccatgtgggtgatgaggtgcacagcgacgtgctgggcgcggtgcgctttgggatgggggccgtttggctcaaccgccggggcgaaccctggccggaggacctggagcggctgcctcatgtggaattggcggacctgagccggttgccgacggtgctggcccgctggcgttga

SEQ ID NO: 5480 - protein, 234 aa, Alkalilimnicola ehrlichei MLHE-1
MPESGAIRAVTFDLDFTLWDLEHVIQRAEQRMQRFLAARYPRVSEHFDEEAMRRLRLRMAEEHPELRINVSAMRRASLRRIALTCGYGEDMVEAAFHVFMEGRHEVVPYDDVAPTLTALRRHYRIGALTNGNADVNRLALGEYFDFSVSAVEVGAAKPSRIIFEAACHRAGIAPGEMVHVGDEVHSDVLGAVRFGMGAVWLNRRGEPWPEDLERLPHVELADLSRLPTVLARWR

SEQ ID NO: 5481 - DNA, 723 bp, Shewanella sp. MR-4
  CDS (1)..(723): transl_table=11
atgcgttgttatcttagaccccagaatattcgtgcgatcagcttcgatctcgacgataccttatacgataacgagcctcatattctgaatgccgaagctgagctaacacagtttttgcatcaggcttttccgctgactcaggcttggcaaccgcagcaatggcgactgctcaagttacagttgctacagcaaaatccagccttagcccatgacacctcggcggcgcgaattgcgactctgcataaaggcctttcgctgctcggttatagcgagtcggaggcaaaacggggcgcgcaggaaggtttggattgtttttatttccatcgcagccattttcaggtttcagacgaagtcttggcactgctcacgcgcttatcggcccattttcggttgattggtatcaccaatggtaatgtggacgcacaacgcattggcttgagtgaggtgttcgagtttgtgctgcatcctggtagtggtgtgcggatgaagcctgctaaagatatgttttcacaagcctgtgaaaggctggatatcggtttagatgaactgctgcacgtgggtgatagtatgaatgccgatgttcgcggtgcgcgcttagcgggctgccagtcggtctggctcaacccgagttttggccgcgtggcgtcgttgcccattgctgcactgttaccccatatggaaattgcgaccctcgatgctctgctggagatcttgttgccttaa

SEQ ID NO: 5482 - protein, 240 aa, Shewanella sp. MR-4
MRCYLRPQNIRAISFDLDDTLYDNEPHILNAEAELTQFLHQAFPLTQAWQPQQWRLLKLQLLQQNPALAHDTSAARIATLHKGLSLLGYSESEAKRGAQEGLDCFYFHRSHFQVSDEVLALLTRLSAHFRLIGITNGNVDAQRIGLSEVFEFVLHPGSGVRMKPAKDMFSQACERLDIGLDELLHVGDSMNADVRGARLAGCQSVWLNPSFGRVASLPIAALLPHMEIATLDALLEILLP

SEQ ID NO: 5483 - DNA, 768 bp, Pseudoalteromonas tunicata D2
  CDS (1)..(768): transl_table=11
atgacaacacacacccaagagcaaaaaaacaacgttgatttttcatttttaaggcttcactctgtgcaaatatttaaaaaattaaatgaaattaaagccataagcttcgatttagacgataccctttatgataatcgaccgatcattatcgctgcggtacaagcgcaaaacgattatctcaagcagcttgatctttggcctaaaacagctgagttttggcacgactgccgtaatcaagtaataatagagcagcctcacctgattgataatgtcaccatgtggcgacaatgcgcgttatattttggtttaaagcaaattggatattgtgatgctgacgccaaacatcatgccaacatggcttatcaagcatttgccgaggccagaagcaacattattgttgctgacgaagttttgttgctgttaaaggcccttagaacacgctttaaaattattgcgattaccaatggaaatgtagacgttgaccagtttaatttaaaaggccatttcgatttagtgttaatggcaggccgagatggtaaagctaaacctcaccccgaacttttcgatttagcagcgtggcactttgatttatcacttgggcatatactccatgttggtgatagtctcgatactgatgtgcaaggggcaaacatcgcaggttgcatgtctgcttggttagaaaatcagttcacaccatatcgttataaaggccttgcacacctcacaatcaaagagattagtgaactacaacaacttcttatagattaa

SEQ ID NO: 5484 - protein, 255 aa, Pseudoalteromonas tunicata D2
MTTHTQEQKNNVDFSFLRLHSVQIFKKLNEIKAISFDLDDTLYDNRPIIIAAVQAQNDYLKQLDLWPKTAEFWHDCRNQVIIEQPHLIDNVTMWRQCALYFGLKQIGYCDADAKHHANMAYQAFAEARSNIIVADEVLLLLKALRTRFKIIAITNGNVDVDQFNLKGHFDLVLMAGRDGKAKPHPELFDLAAWHFDLSLGHILHVGDSLDTDVQGANIAGCMSAWLENQFTPYRYKGLAHLTIKEISELQQLLID

SEQ ID NO: 5485 - DNA, 729 bp, Photobacterium sp. SKA34
  CDS (1)..(729): transl_table=11
atgcatttttaccgccaattaacaccaattagagccttaacttttgatcttgacgataccttatacgataaccgtccggtgattgttcgtgctgaacaagcaatgtttgactggttaacgcagatcttaccgtcacgtatcatgattgataaaaccgtttgggcatcgcttaaatcgcaattagcaatgctagatccaatgctcaaacatgatgtcagtttgtggcgatatgaaaccattaaaataggtttaatgcagctagggtttcgtctgccagaggcagaaactttagcgcagcaggggttagatactgtactggcggttcgcaaccaagtcgaggttcctgtagaaacacatcgagttttaaaacaattaagtgaccatttaccgctagtcgggttaacaaatggtaatgttgatgcagaaaaaattggcttagcgccatattttgtcgacgtgtttcaagcgggcaaagatggtttggcaaaacctgaggctgatttatttaaccttgctgttaatacccttaatttaccagcagcgacaattttacatgtgggtgatcatcttattaccgatgtcaaaggtgcgaaacagcatggctttcaggtgtgttggtttaacgatcagcaaaaattgattcagcagcaatcgaaagcgttgattttacctgacgtagaaattactcaattggcgcagctgcttgagattgttggattagagatttaa

SEQ ID NO: 5486 - protein, 242 aa, Photobacterium sp. SKA34
MHFYRQLTPIRALTFDLDDTLYDNRPVIVRAEQAMFDWLTQILPSRIMIDKTVWASLKSQLAMLDPMLKHDVSLWRYETIKIGLMQLGFRLPEAETLAQQGLDTVLAVRNQVEVPVETHRVLKQLSDHLPLVGLTNGNVDAEKIGLAPYFVDVFQAGKDGLAKPEADLFNLAVNTLNLPAATILHVGDHLITDVKGAKQHGFQVCWFNDQQKLIQQQSKALILPDVEITQLAQLLEIVGLEI

SEQ ID NO: 5487 - DNA, 717 bp, Serratia marcescens
  CDS (1)..(717): transl_table=11
atgcatttttatcgcccgctgcgcccgctggcggcgctgactttcgatctggacgacacgctgtatgacaatcgtccggtgattagacagaccgaacaacagtcggtggctttcctgcagagctaccatcccggtctgaacagcttccagtcggcggatttccaccgcctgcgccaggagctgcgtgagcaggatccggagatctaccacgatgtcacccagtggcgctggcgcgccattcatctggcgctgagccggcaggggctgcgcgacgctgaagcggcaatcggggccgatgcggcgatgcaaaacttcgcgctgtggcgcagccgcatcgaggtaccggaagcgacccacgccacgctgaaggcgctggccgcgcgctatccgctggtggcgatcaccaacggcaacgccgatccggcgcagtgcggcctggacggctacttccagttcgtgttgcgctccgggccggacgggcgcgccaaaccgtaccaggacatgtatcacctggccgtcgaacggctgggcgtggcgcccgggcagatcctgcacgtgggcgacgatctgactaccgacgtcgccggcgcgctgcgcgcggggctgcaggcctgttggatcaacgatcggcaacgctgcctgatgcaggccgccgacagccgcctgctgccgcatattgagatttcgcagttggcatcgctgacagcattgttataa

SEQ ID NO: 5488 - protein, 238 aa, Serratia marcescens
MHFYRPLRPLAALTFDLDDTLYDNRPVIRQTEQQSVAFLQSYHPGLNSFQSADFHRLRQELREQDPEIYHDVTQWRWRAIHLALSRQGLRDAEAAIGADAAMQNFALWRSRIEVPEATHATLKALAARYPLVAITNGNADPAQCGLDGYFQFVLRSGPDGRAKPYQDMYHLAVERLGVAPGQILHVGDDLTTDVAGALRAGLQACWINDRQRCLMQAADSRLLPHIEISQLASLTALL

SEQ ID NO: 5489 - DNA, 23 bp, Artificial sequence
  primer
atgcgtttttaccggcctttggg

SEQ ID NO: 5490 - DNA, 24 bp, Artificial sequence
  primer
ttatatcagcgaggtcagagatgc

SEQ ID NO: 5491 - protein, 243 aa, Artificial sequence
  consensus sequence
  Variant (8)..(8): Xaa in position 8 is any amino acid
  Variant (10)..(11): Xaa in position 10 to 11 is any amino acid
  Variant (13)..(13): Xaa in position 13 is any amino acid
  Variant (15)..(17): Xaa in position 15 to 17 is any amino acid
  Variant (19)..(24): Xaa in position 19 to 24 is any amino acid
  Variant (26)..(28): Xaa in position 26 to 28 is any amino acid
  Variant (29)..(29): Xaa in position 29 is any or no amino acid
  Variant (31)..(49): Xaa in position 31 to 49 is any amino acid
  Variant (50)..(60): Xaa in position 50 to 60 is any or no amino acid
  Variant (62)..(70): Xaa in position 62 to 70 is any amino acid
  Variant (72)..(82): Xaa in position 72 to 82 is any amino acid
  Variant (84)..(88): Xaa in position 84 to 88 is any amino acid
  Variant (89)..(92): Xaa in position 89 to 92 is any or no amino acid
  Variant (94)..(103): Xaa in position 94 to 103 is any amino acid
  Variant (105)..(116): Xaa in position 105 to 116 is any amino acid
  Variant (118)..(119): Xaa in position 118 to 119 is any amino acid
  Variant (121)..(125): Xaa in position 121 to 125 is any amino acid
  Variant (127)..(129): Xaa in position 127 to 129 is any amino acid
  Variant (134)..(139): Xaa in position 134 to 139 is any amino acid
  Variant (142)..(143): Xaa in position 142 to 143 is any amino acid
  Variant (144)..(144): Xaa in position 144 is any or no amino acid
  Variant (146)..(148): Xaa in position 146 to 148 is any amino acid
  Variant (150)..(153): Xaa in position 150 to 153 is any amino acid
  Variant (154)..(155): Xaa in position 154 to 155 is any or no amino acid
  Variant (157)..(158): Xaa in position 157 to 158 is any amino acid
  Variant (159)..(168): Xaa in position 159 to 168 is any or no amino acid
  Variant (171)..(177): Xaa in position 171 to 177 is any amino acid
  Variant (179)..(190): Xaa in position 179 to 190 is any amino acid
  Variant (195)..(198): Xaa in position 195 to 198 is any amino acid
  Variant (200)..(201): Xaa in position 200 to 201 is any amino acid
  Variant (204)..(206): Xaa in position 204 to 206 is any amino acid
  Variant (208)..(211): Xaa in position 208 to 211 is any amino acid
  Variant (213)..(225): Xaa in position 213 to 225 is any amino acid
  Variant (226)..(232): Xaa in position 226 to 232 is any or no amino acid
  Variant (234)..(235): Xaa in position 234 to 235 is any amino acid
  Variant (238)..(239): Xaa in position 238 to 239 is any amino acid
  Variant (241)..(242): Xaa in position 241 to 242 is any amino acid
FDLDDTLXDXXPXIXXXEXXXXXXLXXXXPXXXXXXXXXXXXXXXXXXXXXXXXXXXXXXPXXXXXXXXXRXXXXXXXXXXXGXXXXXXXXXAXXXXXXXXXXRXXXXXXXXXXXXLXXLXXXXXLXXXTNGNXXXXXXGLXXXFXXXLXXXXXXGXXXXXXXXXXXXKPXXXXXXXAXXXXXXXXXXXXHVGDXXXXDXXGAXXXGXXXXWXXXXXXXXXXXXXXXXXXXXPXXEIXXLXXL

SEQ ID NO: 5492 - protein, 58 aa, Artificial sequence
  protein pattern
  Variant (2)..(7): Xaa in position 2 to 7 is any amino acid
  Variant (8)..(8): Xaa in position 8 is any or no amino acid
  Variant (10)..(11): Xaa in position 10 to 11 is any amino acid
  Variant (12)..(14): Xaa in position 12 to 14 is any or no amino acid
  Variant (17)..(20): Xaa in position 17 to 20 is any amino acid
  Variant (21)..(21): Xaa in position 21 is Phe or Tyr
  Variant (22)..(23): Xaa in position 22 to 23 is any amino acid
  Variant (25)..(29): Xaa in position 25 to 29 is any amino acid
  Variant (30)..(30): Xaa in position 30 is Ala, Ile, Leu or Val
  Variant (31)..(35): Xaa in position 31 to 35 is any amino acid
  Variant (36)..(36): Xaa in position 36 is Ile, Leu or Val
  Variant (38)..(38): Xaa in position 38 is Ile or Val
  Variant (41)..(43): Xaa in position 41 to 43 is any amino acid
  Variant (44)..(44): Xaa in position 44 is Ala, Asp, Ser or Thr
  Variant (46)..(46): Xaa in position 46 is Ile or Val
  Variant (47)..(47): Xaa in position 47 is any amino acid
  Variant (49)..(49): Xaa in position 49 is Ala or Ser
  Variant (50)..(52): Xaa in position 50 to 52 is any amino acid
  Variant (54)..(55): Xaa in position 54 to 55 is any amino acid
  Variant (56)..(56): Xaa in position 56 is Ala, Ser or Val
  Variant (57)..(57): Xaa in position 57 is any amino acid
FXXXXXXXGXXXXXKPXXXXXXXAXXXXXXXXXXXXHXGDXXXXDXXGXXXXGXXXXW

SEQ ID NO: 5493 - protein, 37 aa, Artificial sequence
  protein pattern
  Variant (2)..(3): Xaa in position 2 to 3 is any amino acid
  Variant (4)..(4): Xaa in position 4 is Phe, Ile, Leu, Met or Val
  Variant (5)..(5): Xaa in position 5 is any amino acid
  Variant (6)..(6): Xaa in position 6 is Phe, Ile, Leu or Val
  Variant (7)..(8): Xaa in position 7 to 8 is any amino acid
  Variant (9)..(9): Xaa in position 9 is Ala, Asp, Glu, Gln or Ser
  Variant (10)..(10): Xaa in position 10 is Ala, Ser, Thr or Val
  Variant (11)..(13): Xaa in position 11 to 13 is any amino acid
  Variant (14)..(14): Xaa in position 14 is Leu or Met
  Variant (15)..(16): Xaa in position 15 to 16 is any amino acid
  Variant (18)..(22): Xaa in position 18 to 22 is any amino acid
  Variant (24)..(24): Xaa in position 24 is Ala, Gly, Ile or Val
  Variant (25)..(25): Xaa in position 25 is Ala, Gly or Val
  Variant (26)..(26): Xaa in position 26 is Ile, Leu or Val
  Variant (31)..(31): Xaa in position 31 is Ala or Val
  Variant (32)..(32): Xaa in position 32 is Asp, Glu, Gln or Thr
  Variant (33)..(33): Xaa in position 33 is Ala, Ile, Leu, Pro or Val
  Variant (34)..(36): Xaa in position 34 to 36 is any amino acid
RXXXXXXXXXXXXXXXLXXXXXLXXXTNGNXXXXXXG

SEQ ID NO: 5494 - protein, 14 aa, Artificial sequence
  protein pattern
  Variant (8)..(8): Xaa in position 8 is Trp or Tyr
  Variant (10)..(10): Xaa in position 10 is Asn, Thr or Val
  Variant (11)..(11): Xaa in position 11 is any amino acid
  Variant (12)..(12): Xaa in position 12 is Asp or Pro
  Variant (13)..(13): Xaa in position 13 is any amino acid
  Variant (14)..(14): Xaa in position 14 is Ile or Met
FDLDDTLXDXXXXX

SEQ ID NO: 5495 - DNA, 1452 bp, Escherichia coli K12
  CDS (1)..(1452): transl_table=11
atggagtcatccttacgtattgtcgcgatcaccaactgccccgccgggatcgctcacacctacatggtggcggaagccctggaacagaaagcccgttctctcggtcataccataaaagtggaaactcaagggtccagtggcgttgaaaaccgcttatccagcgaagagattgccgctgccgattacgtcattctcgctaccgggcgtggcctgagcggtgatgatcgcgcgcggtttgccgggaagaaagtttatgagattgccatctcccaggcgttgaaaaatatcgaccagattttcagcgaattaccgacaaactcgcagctttttgccgcagatagcggcgtgaagcttggcaaacaggaagtgcaaagcggtagcgtgatgagccacctgatggcgggcgtctctgcggcgctgccgtttgtcatcggcggtggtatcctggtggcgcttgccaacatgctggtgcagttcggtttgccgtataccgatatgtcgaaaggcgcgccgtcgtttacctgggtagttgaatccatcggttaccttggcttcacctttatgatccccatcatgggcgcttatattgcctcgtcgattgccgataaaccggctttcgctccggcgtttctggtttgctatctggcgaacgacaaagcgctgctcggcacccagtcgggtgcgggattcctcggcgcggtggtgctggggctggcgattggctatttcgtcttctggttccgcaaagtgcgccttggcaaagcattacaaccgctgctcggttcaatgctgatcccgttcgttactctgctggttttcggcgtgctcacttactacgttatcgggccggtgatgtccgacctcatgggcgggctgctccacttcctgaataccattcctccatcaatgaagtttgcggcagcgtttctggtcggtgcgatgctggcgttcgatatgggcggccccatcaataaaaccgcctggttcttctgcttctcactgctggaaaaacacatttatgactggtacgccatcgtcggcgttgtcgcgctgatgccgcccgtcgcggcgggtcttgcgacgttcattgcgcccaaactgtttacccgacaggaaaaagaggctgccagtagtgccattgtggtcggtgccacagtcgcaaccgaaccggctattccttacgctctggcagctccgttgccgatgattaccgccaatacgctggcgggcggcattaccggcgtgctggtgatcgctttcggaatcaaacgtctggcacctggtttgggtatctttgacccgctgatcggcctgatgtcgccggtgggttcgttttatctggtgctggcgattggcctcgcgctgaacatttcattcattatcgtcctgaaaggattgtggttacgccgcaaagcgaaagccgcgcaacaggagcttgtccatgaacattga

SEQ ID NO: 5496 - protein, 483 aa, Escherichia coli K12
MESSLRIVAITNCPAGIAHTYMVAEALEQKARSLGHTIKVETQGSSGVENRLSSEEIAAADYVILATGRGLSGDDRARFAGKKVYEIAISQALKNIDQIFSELPTNSQLFAADSGVKLGKQEVQSGSVMSHLMAGVSAALPFVIGGGILVALANMLVQFGLPYTDMSKGAPSFTWVVESIGYLGFTFMIPIMGAYIASSIADKPAFAPAFLVCYLANDKALLGTQSGAGFLGAVVLGLAIGYFVFWFRKVRLGKALQPLLGSMLIPFVTLLVFGVLTYYVIGPVMSDLMGGLLHFLNTIPPSMKFAAAFLVGAMLAFDMGGPINKTAWFFCFSLLEKHIYDWYAIVGVVALMPPVAAGLATFIAPKLFTRQEKEAASSAIVVGATVATEPAIPYALAAPLPMITANTLAGGITGVLVIAFGIKRLAPGLGIFDPLIGLMSPVGSFYLVLAIGLALNISFIIVLKGLWLRRKAKAAQQELVHEH

SEQ ID NO: 5497 - DNA, 1977 bp, Escherichia coli
  CDS (1)..(1977)
atggtattgttttatcgggcacactggcgcgactataaaaacgatcaagtgaggatcatgatgaatctgacgactctgacccaccgcgatgcgttgtgtctgaatgcgcgctttaccagccgtgaagaggccatccacgcgttgactcaacgtcttgctgctctggggaaaatttccagtactgagcaatttctggaagaagtgtatcgccgtgaaagccttggcccgaccgccttaggtgaagggttggctgtgccgcatggcaaaactgctgcggtaaaagaagcggcgtttgcggtcgccacactcagcgagccgcttcagtgggaaggcgttgatggcccggaagcagttgatttagtggtgctgctggcgattccccccaatgaagcgggtactacgcatatgcaactgctgacagcgctgaccacgcgccttgcggatgatgagattcgggcgcgtatacagtcggcgacgacgcctgatgagttgctctcggcgctggatgacaagggaggcacgcaaccttctgcctctttttccaacgcgccaactatcgtctgcgtaacggcctgtccggcgggtattgctcacacctatatggctgcggaatatctggaaaaagccggacgcaaactcggcgtaaatgtttacgttgaaaaacaaggcgctaacggcattgaagggcgtttaacggcggatcaactcaatagtgcaaccgcctgtatttttgcggctgaagtcgccatcaaggagagtgagcgttttaatggcattcccgcgctttcagtgcctgttgccgagccgattcgccatgcagaagcgttgatccaacaagcgcttaccctcaagcgtagcgatgagacgcgtaccgtacagcaagatacgcaaccggtgaaaagtgtcaaaacggagctgaaacaggcactgttgagcggaatctcttttgccgtaccgttgattgtcgcggggggcacggtgctggcggtcgcggtattactgtcgcaaatcttcgggctacaagatctgtttaatgaagaaaactcctggctgtggatgtaccgcaagctgggcggcgggctgctcggaattttgatggtaccggtgctcgcggcctataccgcctattctctggcagataaaccggcgttagcgccaggctttgcggctggacttgccgccaacatgatcggctccgggtttctcggcgcggtcgttggcggattgatagccggttacttgatgcgctgggtgaaaaatcacttgcgtcttagcagtaaattcaatggattcctgactttttatctctacccggtgctcggtacgttgggagcgggcagtctgatgctgtttgtggtgggggaacctgtcgcctggatcaataactcgcttaccgcctggctgaacggtctgtcaggaagtaacgcgctgttgctgggtgccattctcggttttatgtgttcctttgaccttggagggccagtgaataaagccgcttatgcattctgcctgggcgcaatggcgaacggcgtttacggcccgtatgccattttcgcctccgtcaaaatggtttcggcatttaccgtaaccgcttccacgatgctcgcaccgcgcctgtttaaagagtttgaaattgagaccgggaaatccacctggctgttagggctggcaggtattaccgaaggggcgatcccgatggcgattgaagatccgctgcgggttattggttcgtttgtgctgggctctatggtaacgggcgctattgtcggtgcgatgaatatcggcctttcgacacccggtgccggcattttctcgctctttttacttcatgataatggcgcgggcggtgttatggcggcaattggctggtttggcgcggcattggtgggggctgcaatctcgactgcaattctcctgatgtggcggcgtcacgcggttaagcatggcaactatctgactgatggcgtaatgccataa

SEQ ID NO: 5498 - protein, 658 aa, Escherichia coli
MVLFYRAHWRDYKNDQVRIMMNLTTLTHRDALCLNARFTSREEAIHALTQRLAALGKISSTEQFLEEVYRRESLGPTALGEGLAVPHGKTAAVKEAAFAVATLSEPLQWEGVDGPEAVDLVVLLAIPPNEAGTTHMQLLTALTTRLADDEIRARIQSATTPDELLSALDDKGGTQPSASFSNAPTIVCVTACPAGIAHTYMAAEYLEKAGRKLGVNVYVEKQGANGIEGRLTADQLNSATACIFAAEVAIKESERFNGIPALSVPVAEPIRHAEALIQQALTLKRSDETRTVQQDTQPVKSVKTELKQALLSGISFAVPLIVAGGTVLAVAVLLSQIFGLQDLFNEENSWLWMYRKLGGGLLGILMVPVLAAYTAYSLADKPALAPGFAAGLAANMIGSGFLGAVVGGLIAGYLMRWVKNHLRLSSKFNGFLTFYLYPVLGTLGAGSLMLFVVGEPVAWINNSLTAWLNGLSGSNALLLGAILGFMCSFDLGGPVNKAAYAFCLGAMANGVYGPYAIFASVKMVSAFTVTASTMLAPRLFKEFEIETGKSTWLLGLAGITEGAIPMAIEDPLRVIGSFVLGSMVTGAIVGAMNIGLSTPGAGIFSLFLLHDNGAGGVMAAIGWFGAALVGAAISTAILLMWRRHAVKHGNYLTDGVMP

SEQ ID NO: 5499 - DNA, 2187 bp, Corynebacterium glutamicum
  CDS (101)..(2167)
cgactgcggcgtctcttcctggcactaccattcctcgtcctgaccaactcgccacagctggtgcaacggtcacccaagtcaaaggattgaaagaatcagcatgaatagcgtaaataattcctcgcttgtccggctggatgtcgatttcggcgactccaccacggatgtcatcaacaaccttgccactgttattttcgacgctggccgagcttcctccgccgacgcccttgccaaagacgcgctggatcgtgaagcaaagtccggcaccggcgttcctggtcaagttgctatcccccactgccgttccgaagccgtatctgtccctaccttgggctttgctcgcctgagcaagggtgtggacttcagcggacctgatggcgatgccaacttggtgttcctcattgcagcacctgctggcggcggcaaagagcacctgaagatcctgtccaagcttgctcgctccttggtgaagaaggatttcatcaaggctctgcaggaagccaccaccgagcaggaaatcgtcgacgttgtcgatgccgtgctcaacccagcaccaaaaaccaccgagccagctgcagctccggctgcggcggcggttgctgagagtggggcggcgtcgacaagcgttactcgtatcgtggcaatcaccgcatgcccaaccggtatcgcacacacctacatggctgcggattccctgacgcaaaacgcggaaggccgcgatgatgtggaactcgttgtggagactcagggctcttccgctgtcaccccagtcgatccgaagatcatcgaagctgccgacgccgtcatcttcgccaccgacgtgggagttaaagaccgcgagcgtttcgctggcaagccagtcattgaatccggcgtcaagcgcgcgatcaatgagccagccaagatgatcgacgaggccatcgcagcctccaagaacccaaacgcccgcaaggtttccggttccggtgtcgcggcatctgctgaaaccaccggcgagaagctcggctggggcaagcgcatccagcaggcagtcatgaccggcgtgtcctacatggttccattcgtagctgccggcggcctcctgttggctctcggcttcgcattcggtggatacgacatggcgaacggctggcaagcaatcgccacccagttctctctgaccaacctgccaggcaacaccgtcgatgttgacggcgtggccatgaccttcgagcgttcaggcttcctgttgtacttcggcgcagtcctgttcgccaccggccaagcagccatgggcttcatcgtggcagccctgtctggctacaccgcatacgcacttgctggacgcccaggcatcgcgccgggcttcgtcggtggcgccatctccgtcaccatcggcgctggcttcattggtggtctggttaccggtatcttggctggtctcattgccctgtggattggctcctggaaggtgccacgcgtggtgcagtcactgatgcctgtggtcatcatcccgctacttacctcagtggttgttggtctcgtcatgtacctcctgctgggtcgcccactcgcatccatcatgactggtttgcaggactggctatcgtcaatgtccggaagctccgccatcttgctgggtatcatcttgggcctcatgatgtgtttcgacctcggcggaccagtaaacaaggcagcctacctctttggtaccgcaggcctgtctaccggcgaccaagcttccatggaaatcatggccgcgatcatggcagctggcatggtcccaccaatcgcgttgtccattgctaccctgctgcgcaagaagctgttcaccccagcagagcaagaaaacggcaagtcttcctggctgcttggcctggcattcgtctccgaaggtgccatcccattcgccgcagctgacccattccgtgtgatcccagcaatgatggctggcggtgcaaccactggtgcaatctccatggcactgggcgtcggctctcgggctccacacggcggtatcttcgtggtctgggcaatcgaaccatggtggggctggctcatcgcacttgcagcaggcaccatcgtgtccaccatcgttgtcatcgcactgaagcagttctggccaaacaaggccgtcgctgcagaagtcgcgaagcaagaagcacaacaagcagctgtaaacgcataatcggaccttgacccgatgtc

SEQ ID NO: 5500 - protein, 688 aa, Corynebacterium glutamicum
MNSVNNSSLVRLDVDFGDSTTDVINNLATVIFDAGRASSADALAKDALDREAKSGTGVPGQVAIPHCRSEAVSVPTLGFARLSKGVDFSGPDGDANLVFLIAAPAGGGKEHLKILSKLARSLVKKDFIKALQEATTEQEIVDVVDAVLNPAPKTTEPAAAPAAAAVAESGAASTSVTRIVAITACPTGIAHTYMAADSLTQNAEGRDDVELVVETQGSSAVTPVDPKIIEAADAVIFATDVGVKDRERFAGKPVIESGVKRAINEPAKMIDEAIAASKNPNARKVSGSGVAASAETTGEKLGWGKRIQQAVMTGVSYMVPFVAAGGLLLALGFAFGGYDMANGWQAIATQFSLTNLPGNTVDVDGVAMTFERSGFLLYFGAVLFATGQAAMGFIVAALSGYTAYALAGRPGIAPGFVGGAISVTIGAGFIGGLVTGILAGLIALWIGSWKVPRVVQSLMPVVIIPLLTSVVVGLVMYLLLGRPLASIMTGLQDWLSSMSGSSAILLGIILGLMMCFDLGGPVNKAAYLFGTAGLSTGDQASMEIMAAIMAAGMVPPIALSIATLLRKKLFTPAEQENGKSSWLLGLAFVSEGAIPFAAADPFRVIPAMMAGGATTGAISMALGVGSRAPHGGIFVVWAIEPWWGWLIALAAGTIVSTIVVIALKQFWPNKAVAAEVAKQEAQQAAVNA

SEQ ID NO: 5501 - DNA, 1758 bp, Pseudomonas aeruginosa
  CDS (1)..(1758)
atgaaactagcgatcgtcaccgcctgccctggcggacaggtcaccagcgtgctcgccgcgcgcctgctgcggggcgccgccgagcgcctgggctgggaaacctgcgtcgaggcgaatgccgggtcgaggcccgagggcgaactgagcgccgaacagatcgccgaagccgactgggtcctgctggtcggcgtcgagccgctggcggcggcgcgtttcgtcggcaagccggtgtatcgcgcgcgtcccgccgaggcgctggccgatccgcgcgccttcctccagcgggccgccgccctggcgagcgtggaggtcgccggggacgaggccggcctggttgcgccggaggccggagcggcaccgcggattgtcgcggtgaccgcctgtccgaccggcgtggcgcacaccttcatggccgccgaggcgttgcagctcgcggcggggcaactgggcttcgcgttgcaggtcgagacccagggctcggtcggcgcgcgcaacccgctcgacccggcggacatcgccgccgccgacgtggtcctgctggccgccgacatcgacgtggacacggcccgtttcgccggcaagaagatctaccgttgcggcaccggcgtggccctcaagcaggcccgcgcgacgctcgagcgggcgctggcggaagggcaggtcgagagcgcgggcgcagccagcgcggtggtcgccagggacgagaagcgcggggtgtacaagcacctgctgaccggggtgtcgttcatgttgccgatggtggtcgcgggcggcctgctgatcgccctgtcgctggccttcggcatcgatgcctacaagcagccgggcagcctggcggcggtgctgaggacggtcggcgacacggctttcgtcctgatggtgccgatgctcgccggctacatcgcctattccatcgccgaccgcccgggcctggcgccgggcatgctcggcggcctgctcgccgggaccctcggcgccgggttcatcggcgggatagtcgccggcttcatcgccggctatgcggcgcgggccatcagccacgggctgaggctgccggcgagcctggaagcgctgaagccgatcctggtcatcccgttgctggccagcctggtcaccggcctgctgatgctctacgtggtcggcaagccggtggccgggatgctcgcggcactgaccgggttcctcgacggcatgggtacctccaatgccatcctcctcggcctgctgctcggcgggatgatgtgcgtcgacctcggcggaccggtcaacaaggccgcctacgccttttccgtcggcctgctctcgtcgcacagctacgcgccgatggcagcggtgatggcggcgggcatggtgccgccgatcggcatgggcctggcgaccctgctggcgcggcgcaagttcgccgagagcgagcggcaggccggcaaggcagcctcggtgctggggctgtgcttcatctccgaaggcgccatcccgttcgccgccaaggacccgttgcgggtgatcccggcgagcatcgccggcggcgcgctgaccggcgccctgtcgatgtatttcggctgcaagttgcaggcgcctcacggcgggttgttcgtgatgctggtgcccaacgcgatcaaccacgccctggcgtacctgctggcgatcgtcgccggcagcctgcttaccgggctgctctacgccgtgctcaagcgcggcgccgagccgggactggcgttggggacctcgtcctcgcgggagccggcggctggcggatag

SEQ ID NO: 5502 - protein, 585 aa, Pseudomonas aeruginosa
MKLAIVTACPGGQVTSVLAARLLRGAAERLGWETCVEANAGSRPEGELSAEQIAEADWVLLVGVEPLAAARFVGKPVYRARPAEALADPRAFLQRAAALASVEVAGDEAGLVAPEAGAAPRIVAVTACPTGVAHTFMAAEALQLAAGQLGFALQVETQGSVGARNPLDPADIAAADVVLLAADIDVDTARFAGKKIYRCGTGVALKQARATLERALAEGQVESAGAASAVVARDEKRGVYKHLLTGVSFMLPMVVAGGLLIALSLAFGIDAYKQPGSLAAVLRTVGDTAFVLMVPMLAGYIAYSIADRPGLAPGMLGGLLAGTLGAGFIGGIVAGFIAGYAARAISHGLRLPASLEALKPILVIPLLASLVTGLLMLYVVGKPVAGMLAALTGFLDGMGTSNAILLGLLLGGMMCVDLGGPVNKAAYAFSVGLLSSHSYAPMAAVMAAGMVPPIGMGLATLLARRKFAESERQAGKAASVLGLCFISEGAIPFAAKDPLRVIPASIAGGALTGALSMYFGCKLQAPHGGLFVMLVPNAINHALAYLLAIVAGSLLTGLLYAVLKRGAEPGLALGTSSSREPAAGG

SEQ ID NO: 5503 - DNA, 1377 bp, Clostridium acetobutylicum
  CDS (1)..(1377)
atgaaaaagttagttgctataacatcttgtccaacaggaattgcacatacgtacatggcagcagaggcacttcagatggcagcagaagaaatgggtcataaaataaaagttgaaactcaaggttcggtaggagcagaaaacgtaataactactagtgatgtaaacgatgcagacgcagttattatagcagcagatactaacgttgataaatccagatttgctggtaaggtattaatagaagttccagttaaagatgctataaaggatccaaagggacttataaatacagcacttagctcaaacaaaatatacggaaacagtaatgaaaaatctaaagtagaagagaaaagagaagataagggcagagcttcaggagtatataaacacttaatgacaggagtttccttcatgataccttttgttgtagcaggaggaatacttatagcactaggatttgcaatcggcggaatatatgttttcaaaacaccaggaacaatcggagagacaatatttagtacaggaaaacaagcatttgcattgatgttaccagttttagcaggatatatttcattctctattgctgacagaccaggacttgttccgggatttgttggtggtgctttagcaagtactataggcgcaggatttataggagcgttgctagcaggttttatcgcaggatattttgttgtactattaaagaaatatataaaacttccaaaagcacttgatagtttgatgccagtacttataataccagtactttccacattatttatagcactcgtaatgatgtttattctaggcgacccagtaaaagcaatcaataatggacttacaggtttcttaaagggattaagtggagcaaatgcagcagtgttaggtatagttttaggatgcatgatggcatttgatatgggaggtcctttcaataaagcagcatacgtattcgctacaggaacaataacaactacaggaacaactataatggctgctacaatggcagcaggaatggtaccacctcttgcaatagcacttgcaacagtaataggaaagaagaaatttaatgagcaggaaagagaagcaggaaaagcagcatgggcacttggattatcattcataacagaaggcgcaataccatttgcagcagcagatcctcttagagttattccttcgatgatggcaggctcagcagtaactggagcattatcaatgatatttggttcaagacttgcagttccacatggaggagtatgggtattatttatacctcatgttgttacaaatttaggaggatatataatatcaatactagtaggtatggtagtatcagcgttattacttgtagctttaaagaaagacatagtaagaaaataa

SEQ ID NO: 5504 - protein, 458 aa, Clostridium acetobutylicum
MKKLVAITSCPTGIAHTYMAAEALQMAAEEMGHKIKVETQGSVGAENVITTSDVNDADAVIIAADTNVDKSRFAGKVLIEVPVKDAIKDPKGLINTALSSNKIYGNSNEKSKVEEKREDKGRASGVYKHLMTGVSFMIPFVVAGGILIALGFAIGGIYVFKTPGTIGETIFSTGKQAFALMLPVLAGYISFSIADRPGLVPGFVGGALASTIGAGFIGALLAGFIAGYFVVLLKKYIKLPKALDSLMPVLIIPVLSTLFIALVMMFILGDPVKAINNGLTGFLKGLSGANAAVLGIVLGCMMAFDMGGPFNKAAYVFATGTITTTGTTIMAATMAAGMVPPLAIALATVIGKKKFNEQEREAGKAAWALGLSFITEGAIPFAAADPLRVIPSMMAGSAVTGALSMIFGSRLAVPHGGVWVLFIPHVVTNLGGYIISILVGMVVSALLLVALKKDIVRK

SEQ ID NO: 5505 - DNA, 1986 bp, Staphylococcus epidermidis
  CDS (1)..(1986)
atgtatgcgtttacaattattgttaggaaaaggagcgtgcatactatgaaaatacttgcaattacatcatgtccaaatggaattgctcatacatatatggctcaagaaaaattagaacaagcagcaaaagatatgggcgttgatattaaggttgaaactcaaggaggcgtcggagcagaaaatgtgctcacttctaaagaaatcaaagaagctgatggaatcatcattgctgccgatagacaggtagatttatcaaggtttaatggtaaacctctcatcaatgaaagtgtacgtgaaggtattcatagacccaaggaattaatacaacgtgtgattgaccaagatgcacaaatttaccatgatcaaaatatttcttcaaatatatctagagaccaggaagaacctcataaaagtaatattcaaatggtatatcagcatttaatgaatggtgtttccttcatggttccatttatcgtcgttggcggtttactcatagctattgccttaactcttggaggacacaccactccaaaaggattagttatcaccgaagattcattttggaaatctattgaaaatattggtagtttatcgtttaaattcatggttcccatccttgctggttatatcgcggtgagtattgctgataagcctggtcttgttccaggtatgattggtggtgccattgctgctgatggtagtttatatggaagtgaagcaggagccggtttcgttggtggtatcgtcgcaggtttcttagcgggctatattgcaaaatggattaaacagattaaagttcctaaagctatggctcctattatgcctattattattatacctattctatcttctttaatagttggtctcatttttatatttgtaataggcacaccaatttcaaatatatttggtgcattaacatcatggttaaaaggaatgcaaggtgctaacatcattattcttgctcttattattggcgcgatgattgcttttgatatgggaggtccagtaaacaaagtagcattcttattcggttctgcattaattactgaaggcaactacactgtgatgggaatggttgctgtagcagtatgtacaccaccgattggtttaggtttagctacatttgttcgtaaacaccaattcaataaagcagaacaagaaatgggtaaggcatcatttacgatgggattatttggtattactgaaggggcaatcccttttgctgcacaagatcctctaagaatcattccagccaatatgattggcgcgatgattgcttcagtaatagcggcggttggaggtgtcggtgataaagttgctcatggaggtcctattgtcgctgtactaggtggaataagtaatattttatggttctttatagctgttgtcgttggaagcttagtaaccatgttcacagtcttgttatttaagcgtcacacccctgctatagcaaaaagcaataatggaaatgatacttctgttggaactgaaaatgtattttctgatgaccaatctattaatcacagcaaacaactctcacatcatatggtgttcgataaatcactcattgaaattaccaaggaaccaatgacaagagatcaagctattgatagattacttactaagttatgccatcgtcattacattacgaatatagaagaggtaagaaccgcaatccttaaacgagaggctgagtcaacaactgctatcggaatgaacgttgcaataccacatgctaaatctcatgcagttaaacgtcctatcgtcgctgtattaaatcataaagcaggtgtagagtgggaaagtctagatgaatcaaatcctcagctcatttttcttattgcagttcccaatgataataacgatacacatttaaaactgctacaacggttatcacgaacgctcatgaaagataatacgcgtgatgagttaattcatgctcaaagtcgtgatgaaatatttaatattttaaaagagatataa

SEQ ID NO: 5506 - protein, 661 aa, Staphylococcus epidermidis
MYAFTIIVRKRSVHTMKILAITSCPNGIAHTYMAQEKLEQAAKDMGVDIKVETQGGVGAENVLTSKEIKEADGIIIAADRQVDLSRFNGKPLINESVREGIHRPKELIQRVIDQDAQIYHDQNISSNISRDQEEPHKSNIQMVYQHLMNGVSFMVPFIVVGGLLIAIALTLGGHTTPKGLVITEDSFWKSIENIGSLSFKFMVPILAGYIAVSIADKPGLVPGMIGGAIAADGSLYGSEAGAGFVGGIVAGFLAGYIAKWIKQIKVPKAMAPIMPIIIIPILSSLIVGLIFIFVIGTPISNIFGALTSWLKGMQGANIIILALIIGAMIAFDMGGPVNKVAFLFGSALITEGNYTVMGMVAVAVCTPPIGLGLATFVRKHQFNKAEQEMGKASFTMGLFGITEGAIPFAAQDPLRIIPANMIGAMIASVIAAVGGVGDKVAHGGPIVAVLGGISNILWFFIAVVVGSLVTMFTVLLFKRHTPAIAKSNNGNDTSVGTENVFSDDQSINHSKQLSHHMVFDKSLIEITKEPMTRDQAIDRLLTKLCHRHYITNIEEVRTAILKREAESTTAIGMNVAIPHAKSHAVKRPIVAVLNHKAGVEWESLDESNPQLIFLIAVPNDNNDTHLKLLQRLSRTLMKDNTRDELIHAQSRDEIFNILKEI

SEQ ID NO: 5507 - DNA, 1902 bp, Vibrio cholerae O1 biovar eltor str. N16961
  CDS (1)..(1902): transl_table=11
atgatcaaccaattgattaatgccgatttaattcagcttgatctgcaagcgaattccaaacaagccgtatttgaagaactgataaatattctacatgcccaagggcgaatttcagataaagcggcattcttaaaagatattcaagctcgtgaagagttaggtaataccggatttgaagatggtgtcgctattccgcatgctaaaagtgcagcggtgactcaaccagctgttgcaattggtgtcagccgagagggtatcgactatggcgcagaagatggtttgccttccaagctttttttcatgatcgcctcccccgatggcggcgataaccaccacattgaagtgctggccgaactctcttccaaactgattgaagaaggttttatcgaggcttttctcaacaccaaaaactcagagcaagcactagaattactgctgaaaaaatccgcgcctacacctcttgcaaaccaagcagaaagcaaagggctgattatcggtgttaccggttgcccggcaggtattgctcacacttaccttgcggctgaagcactggaaaaaggcgcggcggctttgggttttgagatcaaagtggaaaccaatggctcgattggggtgaaaaatagcccaagtgcggaagaaattgaacgcgctgaagcgattgtggtcgcctgtgataaacaagtcgacatggcacgctttgccggcaaacgcctcatcaaaacaaatgtgaaagcgccaattcgtgatgcacaaaagctgattaatgaagcgctaagggcgccaacttatcaagctgaaacggttaaggctcaatcggtggcaaacaaagcctcacaagctcgctcggatttgtatcgctttttgatgaatggcgtttcgcacatgatcccatttgtggtaactggcgggcttttaattgcactggctctcgcggtgggtggtgagccaactgaagcgggtatggccattccagcgggcagtatgtggaaccaaatccttgaagtgggcgtagtggcctttaccttgatgattcccatccttgccggctacatcgcctacgccattgccgatcgccctgcgctctctcccggtttgattggtggctggattgccaataacggctctttttatggtgctgacgcaggtacagggtttatcggtgccatcattgcgggtctcttggtcggttatttcgtgaagtggattacttccattaactatcacaagtttatccaacccctagtgccgatcatgatcgcgccgatcacggcatcgctgttcatcgctggtctgttcattttcgttattggcgctcccattgcgagcctgatggatggcctcactgctctactgactagcatgagttccggcaacgttattctgctcggcatcgtactcggtggcatggcaggctttgatatgggaggcccattcaacaaagtcgctttcctattctctgtaggcatgattgccagcggccaaactcaatttatgggtgcgatggcctgtgcgattcccgttgcaccacttggtatggcactcgcaacagcgatgggtcgtaagctcgaactgtttgagtcttctgagcttgaagcaggtaaagccgcaggcgcaatgggcttagtcggtatctctgaaggcgcgattccttttgcggcgcaagacccaatgtcagtcattccagccaacgtgttgggctctatggttgccgctgtcatggcattctcttttggcatcaccaacagtgtggctcacggtggccccgtagtcgccctgcttggcgcaatgaactacccactgcttgccctactttgtatggcggctggtgcgggtgtcaccgccatcacctgtgtgacgctcaaaaaaatccgctcacaaaagtttgaagccgctgcggcttaa

SEQ ID NO: 5508 - protein, 633 aa, Vibrio cholerae O1 biovar eltor str. N16961
MINQLINADLIQLDLQANSKQAVFEELINILHAQGRISDKAAFLKDIQAREELGNTGFEDGVAIPHAKSAAVTQPAVAIGVSREGIDYGAEDGLPSKLFFMIASPDGGDNHHIEVLAELSSKLIEEGFIEAFLNTKNSEQALELLLKKSAPTPLANQAESKGLIIGVTGCPAGIAHTYLAAEALEKGAAALGFEIKVETNGSIGVKNSPSAEEIERAEAIVVACDKQVDMARFAGKRLIKTNVKAPIRDAQKLINEALRAPTYQAETVKAQSVANKASQARSDLYRFLMNGVSHMIPFVVTGGLLIALALAVGGEPTEAGMAIPAGSMWNQILEVGVVAFTLMIPILAGYIAYAIADRPALSPGLIGGWIANNGSFYGADAGTGFIGAIIAGLLVGYFVKWITSINYHKFIQPLVPIMIAPITASLFIAGLFIFVIGAPIASLMDGLTALLTSMSSGNVILLGIVLGGMAGFDMGGPFNKVAFLFSVGMIASGQTQFMGAMACAIPVAPLGMALATAMGRKLELFESSELEAGKAAGAMGLVGISEGAIPFAAQDPMSVIPANVLGSMVAAVMAFSFGITNSVAHGGPVVALLGAMNYPLLALLCMAAGAGVTAITCVTLKKIRSQKFEAAAA

SEQ ID NO: 5509 - DNA, 1743 bp, Vibrio cholerae O1 biovar eltor str. N16961
  CDS (1)..(1743): transl_table=11
gtgaagatgaaaatagccattgtaaccgcatgcccaagtggcgttgccaatagcattattgcggcgggtttactgcagcaagccagtaaaacgttagggtgggaagcctatatcgaatgtcactcaacagtgattgcaggccacaccttaagcgaagaggaaatcaataaagccgatctggtcatactggccgctaacggcaagattgatatgcagcgttttgtcggtaaaaaagtctaccaaagccctattaccgcctgtacttccgatcccgtcggttaccttaagcaagccgcagaacaagcgactgaactcagctccgagcaggcaacacgctgtgactcccccgccacagcgtctgtttctgccaaaaaaatcgtcgccattactgcttgcccaacgggggttgcacacacctttatggcagcggaagcactagaagcggaagcgacacgtcaaggccatcagatcaaagttgaaacgcgtggttcagtcggtgctaaaaaccaactgacggagcaagaaattgctgccgccgatctcgtgatcatcgcggccgatattgatgttcctctggatcgcttcaatggtaaaaaactctacaaaaccagtactggcctcacgttgaagaaaaccgcgcaggagctcagtaatgccttcgcgcaagcaaaaactttctcaagctctgccaacagcgcgactaacgagaaagcagaagagaaaaaaggcgtgtataaacacttgatgacgggcgtatcgcacatgctgcctgtcgtggtcgctggcggtcttatcatcgcgctctctttcgtatttggtattgaagcgttcaaagaagaaggcactttagctgctgctttaatgcagattggtggaggttcagcatttgcgctgatgattccggtgcttgctggttacattgcattttctattgccgatcgtccgggactggcaccgggtttaattggcggaatgctcgcaagctcaacgggcgccggtttccttggcggtatcgttgcaggtttcctcgcgggttacagcgccaaatttattgccgataaagtgcaactgcctcaatcaatggccgcgctaaaaccgattttgatcatcccgtttattgccagcttatttaccggattagtgatgatttacgtcgtgggcggccccatgtcgagcatcatgagcggtatgaccagcttcctaaacaacatgggatcaaccaacgcgattttgctcggtattgtgcttggtgccatgatgtgtttcgacttaggtggcccagtgaacaaagccgcatacaccttcggcgtcggcttactcgcctcacaaacttatgcgccaatggccgcaatcatggcggcaggtatggtgccagcattgggtatgggcttagcgacctttatcgcgaaagacaagtttgaagcgggagagcgcgaagcaggaaaagcctcttttgttctgggcctatgctttatctctgaaggtgcaattccttttgccgccaaagatccaatgcgtgtgatcccagcgtgtatggtgggtggagcagtgacaggcgcactctctatgctatttggcgcgaaattgatggcgccacacggcggtctgtttgtgctcttgatcccgaatgcgataagcccggtgctgctgtacttggtcgcgattgctgtcggtacggcgattaccggttttggctacgctatgctgaaaaagtcggcacaagccaaagcggtcgcggcttaa

SEQ ID NO: 5510 - protein, 580 aa, Vibrio cholerae O1 biovar eltor str. N16961
MKMKIAIVTACPSGVANSIIAAGLLQQASKTLGWEAYIECHSTVIAGHTLSEEEINKADLVILAANGKIDMQRFVGKKVYQSPITACTSDPVGYLKQAAEQATELSSEQATRCDSPATASVSAKKIVAITACPTGVAHTFMAAEALEAEATRQGHQIKVETRGSVGAKNQLTEQEIAAADLVIIAADIDVPLDRFNGKKLYKTSTGLTLKKTAQELSNAFAQAKTFSSSANSATNEKAEEKKGVYKHLMTGVSHMLPVVVAGGLIIALSFVFGIEAFKEEGTLAAALMQIGGGSAFALMIPVLAGYIAFSIADRPGLAPGLIGGMLASSTGAGFLGGIVAGFLAGYSAKFIADKVQLPQSMAALKPILIIPFIASLFTGLVMIYVVGGPMSSIMSGMTSFLNNMGSTNAILLGIVLGAMMCFDLGGPVNKAAYTFGVGLLASQTYAPMAAIMAAGMVPALGMGLATFIAKDKFEAGEREAGKASFVLGLCFISEGAIPFAAKDPMRVIPACMVGGAVTGALSMLFGAKLMAPHGGLFVLLIPNAISPVLLYLVAIAVGTAITGFGYAMLKKSAQAKAVAA

SEQ ID NO: 5511 - DNA, 1947 bp, Streptococcus pyogenes M1 GAS
  CDS (1)..(1947): transl_table=11
atgaaaattcaagatttattgagaaaagatattatgattctcgatttacaggctatttctaaagaagttgccattgacgagatgattactaaattagttgaaaaagatattgtacatgattttgatgtctttaaaaagagtatcatgacacgtgaagaacaaacatcaacagggcttggtgatgggattgccatgcctcattctaaaaatattgtagtagataaaccagcggtcttgtttgcgaaatcaaataaaggtgtggattacaaggctttagatggtcaaccaacggatctcttctttatgattgctgcgcctcaaggagcaaatgatactcacttggctgcactagcagaattatcacaataccttttgaaagacggctttgctgataaacttcgtgctgcagcgacaccagaagcagtcattgctgtttttgatgaagcgtcaacagctaaagaagaagtggttgctccaacaagtggtcaagactttatcgttgctgttacagcttgtccgacaggaattgctcacacttatatggcagaagaggctttgaaaaaacaagctgcagaaatgggagtagctattaaagttgaaacaaacggtgcttctggtgtggctaatcgtttaaccgctgaagatattcagagagctaaaggagttattgttgcagctgataaagcggttgaaatggaccgttttgatggtaaacaattcattgctcgccctgttgcagatggtatcaagaaaagtcaggaattgatttctttgattttaaacaatgaaggaaacacttatcatgctaaaaatggaaaatctgaaacagcagtatcaactgagaaaacaagtttaggcggtgctttctataaacacttgatgggcggtgtctcacaaatgttgccatttgttattggtggcgggattatgattgctctagcatttttattggataacatgcttggtgtgccaaatgatcagcttggaagtcttggatcctatcatgaaatagcagctatttttatgaacattggtggagcagccttttccttcatgttaccagtactagcaggttatatcgcttattctattgctgaaaaaccgggcttagtagctggttttgtggcaggtgccattgcctcaaatggtcttgcttttggtaaggtaccatttgcagcaggaggagaagtgagcttgggcttaacgggcgtgccatcaggtttccttggggcgcttgtgggtggtttccttgccggtggtgttattcttgcccttcgtaaattgttggcaggcctaccacgttctctagaaggggttaaatctatcctcctttacccattacttggcgtccttgtcactggtttcttgatgctttttgtcaatattccaatggcagctattaacacagcccttaatgatttcttacaaggtctttcaggaagctctgctgtccttatgggacttcttgttggtggaatgatggctgttgacatgggtggtcctgttaataaggcagcttatgtttttggtacaggaactttagcagctactgtggcaaatggtggttcggtcgttatggccgctgttatggcaggtggtatggtacctcctcttgctgtttttgtagccactctcttgtttaaagataaatttaccaaagaagaacgtgaatcaggcttgacaaatattgttatgggactttcattcatcaccgaaggagcaattccgtttggtgcagctgacccagcacgtgcgattcctagctttatcgcaggttctgccttgacaggagctcttgttggtttggctggtattaaattaatggcgccacatggtggtatcttcgtaatcgctttaacaagcaatccaatcttatatcttgtctttgttgtgattggtgcccttgtatcaggtatcttatttggcgctcttcgcaaaaaagcctaa

SEQ ID NO: 5512 - protein, 648 aa, Streptococcus pyogenes M1 GAS
MKIQDLLRKDIMILDLQAISKEVAIDEMITKLVEKDIVHDFDVFKKSIMTREEQTSTGLGDGIAMPHSKNIVVDKPAVLFAKSNKGVDYKALDGQPTDLFFMIAAPQGANDTHLAALAELSQYLLKDGFADKLRAAATPEAVIAVFDEASTAKEEVVAPTSGQDFIVAVTACPTGIAHTYMAEEALKKQAAEMGVAIKVETNGASGVANRLTAEDIQRAKGVIVAADKAVEMDRFDGKQFIARPVADGIKKSQELISLILNNEGNTYHAKNGKSETAVSTEKTSLGGAFYKHLMGGVSQMLPFVIGGGIMIALAFLLDNMLGVPNDQLGSLGSYHEIAAIFMNIGGAAFSFMLPVLAGYIAYSIAEKPGLVAGFVAGAIASNGLAFGKVPFAAGGEVSLGLTGVPSGFLGALVGGFLAGGVILALRKLLAGLPRSLEGVKSILLYPLLGVLVTGFLMLFVNIPMAAINTALNDFLQGLSGSSAVLMGLLVGGMMAVDMGGPVNKAAYVFGTGTLAATVANGGSVVMAAVMAGGMVPPLAVFVATLLFKDKFTKEERESGLTNIVMGLSFITEGAIPFGAADPARAIPSFIAGSALTGALVGLAGIKLMAPHGGIFVIALTSNPILYLVFVVIGALVSGILFGALRKKA

SEQ ID NO: 5513 - DNA, 1953 bp, Staphylococcus aureus subsp. aureus Mu50
  CDS (1)..(1953): transl_table=11
atgaaaattgtagctattacctcatgcccaaatggcattgcacatacatatatggctcaagaaaagcttgagcaggtagcaaaagaaatgggtgtggatattaaagtagagacacagggcggtgttggtgctgaaaatgttttaactacgcaagacatcgaagaagctgacggtgtcataattgcagctgataaacaagttgatctatcccgatttgttggtaaacggttgattaatgaaaatgttcgcgaagggattcataatccgagaggtctaattcaacgtatcattaatcaagatgcgcctatttatcaatctgaaacaaattatcattcgaaagatcgcggtaagtctaaaagtggtattcaaatggtgtatcaacatttaatgaacggtgtatcgtttatggttccttttatcgtagttggtggactccttatcgccatcgcgctgactctaggcggtgaaacgacatcaaaaggattagtcatcccagatgattcattttggaaatccattgaaaacattggtagtttagcctttaaatttatggttccaatactagctggatatatcgctgttagtatcgctgacaagcccggtcttgttcctggtatgattggcggcgctatcgctgctgacggtagtttttatggcagtgatgcaggcgcaggatttttaggtggtattgttgctggtttcttagcaggttatatcgcaaagtggattaaagatattaaagttccaaaagcaatggcaccaattatgcctatcattattattcccattatttcatcggtcgttgtaggattgatatttatatttttaatcggtgcaccaatttctaatatttttgaggcattaacaacctggttaaaaagtatgcaaggtgctaatattattatacttgcgatgattataggtgcgatgatcgccttcgatatgggcggtccagtaaacaaggtagcatttttatttggctcagcacttattgctgaaggtaattacgccgttatgggtatggtcgcagttgctgtatgtacaccaccaatcggtttaggtttagcaacgtttgttcaaaagtataaattcaatcattccgaaagagaaatgggtaaggcttccttcactatgggactatttggtattactgaaggtgctattcctttcgcagcccaagatccattgcgcattatacctgcaaacatcattggtgcaatgattgcatcagtcattgcagccattggtggtgtcggcgatagagtcgcacatggaggtccaatcgtggctgtattaggtggtattgatcatgtattatggtttatctttgcagtgatagtaggtagtcttgtcacaatgactactgtactattattaaaacgcaatacaccagttatagcagtagatgcaccagcgcaacacacgcaacttcatgatacagatattacacaacatgatacagaggttgacaatgtagataaaaccgcgaaacattcacatctcaataaaccttctcatgtttttgatcaacaaactatgataattactgatcacgacatgtctcgaaacgaagcaattgatatgttgattcataaacttaaaatttgccgttatgtagagcacacatcgcatttaaaaaatgcaatactagaacgtgaaatggagtctacgacagctattggcatgaacgtggccattccacatgcaaagtctgatgttgtaaaacaaccgattgtagctgttatgaaaaataatcatggtgttaaatgggacagtctagatggtagtctacctcaattgatattcttaattgccgtaccaaacaacagtcaggatacacatttaaaaatacttcagcgcttatctaaagcgttaatgaatgatgagacacgccaatcactaattaatgcaaacagtactacagaaatttataacttattaatgaaaatatag

SEQ ID NO: 5514 - protein, 650 aa, Staphylococcus aureus subsp. aureus Mu50
MKIVAITSCPNGIAHTYMAQEKLEQVAKEMGVDIKVETQGGVGAENVLTTQDIEEADGVIIAADKQVDLSRFVGKRLINENVREGIHNPRGLIQRIINQDAPIYQSETNYHSKDRGKSKSGIQMVYQHLMNGVSFMVPFIVVGGLLIAIALTLGGETTSKGLVIPDDSFWKSIENIGSLAFKFMVPILAGYIAVSIADKPGLVPGMIGGAIAADGSFYGSDAGAGFLGGIVAGFLAGYIAKWIKDIKVPKAMAPIMPIIIIPIISSVVVGLIFIFLIGAPISNIFEALTTWLKSMQGANIIILAMIIGAMIAFDMGGPVNKVAFLFGSALIAEGNYAVMGMVAVAVCTPPIGLGLATFVQKYKFNHSEREMGKASFTMGLFGITEGAIPFAAQDPLRIIPANIIGAMIASVIAAIGGVGDRVAHGGPIVAVLGGIDHVLWFIFAVIVGSLVTMTTVLLLKRNTPVIAVDAPAQHTQLHDTDITQHDTEVDNVDKTAKHSHLNKPSHVFDQQTMIITDHDMSRNEAIDMLIHKLKICRYVEHTSHLKNAILEREMESTTAIGMNVAIPHAKSDVVKQPIVAVMKNNHGVKWDSLDGSLPQLIFLIAVPNNSQDTHLKILQRLSKALMNDETRQSLINANSTTEIYNLLMKI

SEQ ID NO: 5515 - DNA, 1899 bp, Listeria monocytogenes EGD-e
  CDS (1)..(1899): transl_table=11
atgagaatcactgatttattaagcaaagatgttatgattatgtcattacaggcaacgacaaaagaagctgctatcgatgaaatgattgcttcgttaaagagcaacgggaaaattaatgatgaggtgctatttaaaaaagctataatgaaccgtgaagcacagagttctactggtgtaggtgaaggaattgcaatgcctcacgcgaaaacaaaagcagtaaatgaaccaactgttgtttttgctaagagtgagaagggattggactatgatgctttagatggtcagccagcacacttattctttatgattgctgccccagatggcgctaatgcaactcatttagaaactttagcagcgctttctagactattggttcatccagcatttgttcaatcgttaagagatgctaaaactccagaggaagtaatcaatttattcaacaatgaacaagaagactcagaagaaacagttgttgctccaacctcaaccaatgatactggtaaatcagtcgtagcagttacagcatgtccaacaggaattgcacatacttatatggctgcagaaaaattacaagaaactgctaataaattaggtgtacgaatcaaagttgagacaaatggttctagaggcgttgaaaaccgtttaacagataaagaaattgcagaagctgatggggttattattgcagctgatgtacaagtagatatgcctcgttttgacgggaagcatttaattgctaaaccggttgcagcgggaattcataaaccagaagagctaattaaagaagcaatttcaggcaatgctccaatttataaagcagaggaaggtagtcaagctacggagagcgcagacggactttctatcggtcaacaaatttataaacatttaatgagcggtgtttctcacatgttgccgtttgtaattggtggaggtatcgctatcgccatcgcgtttatgctcgatcaaatgttaggtgttcctcaagatcaactcgcaaaacttggttcatataacgaaatcccagcactattaaaacaaatcggtgatgttgcattcggcttcatgcttccagtattcgctggatatattgcctacagtatatcggatagaccaggacttgtagcaggttttgtagcaggtggagtagcatctgttggtggtgcaggcttccttggagcacttgttggtggtttccttgcaggttatgcagtagaattaattaaactagcacttaaaaagttaccaaaaacattagacggtatcaaagtagttttattctatccagttttatcggtgttaattgtcggacttttaatgttgctattaaatgtaccaatgagcgcattgaacacttggttgaatgacttcttgaatagtttaagcggaacgaacgcagttattttaggattactgttaggtgcaatgatggcagcggatttaggtggaccaattaataaagctgcttatatatttgcaacgggtacactcgcagctagtgtagcaacaggcggtagtgcaatcatggcagcaacaatggctgctggtatggtaccaccactagcaacatttgtagcaactcttatttttagaaataaatttacagctcaagaacgtgatgcaggcttaactaactctattttgggtgcttcattcattactgaaggagctataccatttgcagccgcagatccacttcgaatgattccgagttttattgccggaagtgccatcacaggtgcaatagtaatgttcttaaacattaaagtattagcacctcacggaggagtttttgttatcttccttgtatcccaaccgtggttctatattattgcaattattattggaacattaatcagcgcaggattaattggtgttctacgtaagaaaccaactgtataa

SEQ ID NO: 5516 - protein, 632 aa, Listeria monocytogenes EGD-e
MRITDLLSKDVMIMSLQATTKEAAIDEMIASLKSNGKINDEVLFKKAIMNREAQSSTGVGEGIAMPHAKTKAVNEPTVVFAKSEKGLDYDALDGQPAHLFFMIAAPDGANATHLETLAALSRLLVHPAFVQSLRDAKTPEEVINLFNNEQEDSEETVVAPTSTNDTGKSVVAVTACPTGIAHTYMAAEKLQETANKLGVRIKVETNGSRGVENRLTDKEIAEADGVIIAADVQVDMPRFDGKHLIAKPVAAGIHKPEELIKEAISGNAPIYKAEEGSQATESADGLSIGQQIYKHLMSGVSHMLPFVIGGGIAIAIAFMLDQMLGVPQDQLAKLGSYNEIPALLKQIGDVAFGFMLPVFAGYIAYSISDRPGLVAGFVAGGVASVGGAGFLGALVGGFLAGYAVELIKLALKKLPKTLDGIKVVLFYPVLSVLIVGLLMLLLNVPMSALNTWLNDFLNSLSGTNAVILGLLLGAMMAADLGGPINKAAYIFATGTLAASVATGGSAIMAATMAAGMVPPLATFVATLIFRNKFTAQERDAGLTNSILGASFITEGAIPFAAADPLRMIPSFIAGSAITGAIVMFLNIKVLAPHGGVFVIFLVSQPWFYIIAIIIGTLISAGLIGVLRKKPTV

SEQ ID NO: 5517 - DNA, 1899 bp, Listeria innocua Clip11262
  CDS (1)..(1899): transl_table=11
atgagaattacagacttactcagcaaagacgttatgattatgtcattacaagctacaacaaaagaagctgccattgatgaaatgattgcttcacttaaaagcaacgggaaaattaatgacgaggtactttttaaagaagcgataatgaaccgtgaagcccaaagctctactggagttggcgaaggaattgcaatgccacatgcaaaaacaaaagcagttaatgaaccaactgtagtctttgcgaaaagtgaaaaaggattagattataactccttagatggtcaacctgctcatttgttctttatgattgcggctccagatggtgcaaatgcaactcacttagaaactttagcagcactttcaagattattagttcatccagcatttgttcaatcgttaaaagatgcaaaaacaccagacgatgtaatcactctcttcaacaacgagcaaggtgatgcagaagaaacagttgttgctcctacatcttctaatgatactggcaaaactgttgtcgcggttactgcttgtccaactggtattgcacatacctatatggctgcagaaaagttacaagaaacagcaaacaaattaggcgttcgaattaaagtagaaacaaatggttctagaggtgtggaaaatcgtttaactgataaagaaattgctgaggctgatggagttatcatcgcagctgatgtacaagttgatatgcctcgttttgatggaaaacatttaattgcaaaaccagttgcagcaggaattcataaaccagaagagcttattaaagaagctatctctgggaatgcacctgtttataaagcagaatcgggtagcgaagcaacagaaagtacagatggcctttccattggtcaacaaatttataaacatttaatgagcggcgtttctcatatgttaccatttgtaattggtggcgggatcgcaattgcaatcgcatttatgcttgatcaaattctaggtgtaccacaagatcaacttgcaaaattaggatcatataacgaaattccagcattattaaaacaaattggtgatgttgcattcggatttatgcttccagtgttcgcgggttatatcgcatacagtatatcggatagaccagggcttgtagccggttttgtagcaggtggtgttgcatctgtcggtggagcgggtttccttggcgctttagtaggtggttttcttgctggttatgcagtcgagttaattaaagttatgctgaaaaaattaccaaaaactttagatggcattaaagtagtactattttatccggtgctatctgtactaattgtcggactattgatgttactattaaacgtgccaatgagtgcattaaatacatggttaaatgacttcttaaatagtctaagtggaacaaatgcggttattctaggtttacttttaggagcaatgatggctgctgacttaggtggaccaattaacaaagcggcttacatttttgcaactggaacgcttgcagcaagcgttgcaacaggtggtagcgcgattatggcggctacaatggctgctggtatggtgccaccgctagcaacattcgtagcaactcttgtttttagaaacaaatttactgcacaagaacgtgatgcagggctaacgaactctattttaggcgcgtcattcattacagaaggtgccatcccatttgcagcagcagatccacttcgaatgattccaagttttatcgcaggaagtgcaataactggggcaattgttatgtttttaaatattaaagtattagcaccacacggaggcgtatttgttatcttcttagtatctcaaccatggttctaccttatcgcaatcgtgattggaactataataagtgcagcattaatcggagtattacgcaaaaaaccaacagtataa

SEQ ID NO: 5518 - protein, 632 aa, Listeria innocua Clip11262
MRITDLLSKDVMIMSLQATTKEAAIDEMIASLKSNGKINDEVLFKEAIMNREAQSSTGVGEGIAMPHAKTKAVNEPTVVFAKSEKGLDYNSLDGQPAHLFFMIAAPDGANATHLETLAALSRLLVHPAFVQSLKDAKTPDDVITLFNNEQGDAEETVVAPTSSNDTGKTVVAVTACPTGIAHTYMAAEKLQETANKLGVRIKVETNGSRGVENRLTDKEIAEADGVIIAADVQVDMPRFDGKHLIAKPVAAGIHKPEELIKEAISGNAPVYKAESGSEATESTDGLSIGQQIYKHLMSGVSHMLPFVIGGGIAIAIAFMLDQILGVPQDQLAKLGSYNEIPALLKQIGDVAFGFMLPVFAGYIAYSISDRPGLVAGFVAGGVASVGGAGFLGALVGGFLAGYAVELIKVMLKKLPKTLDGIKVVLFYPVLSVLIVGLLMLLLNVPMSALNTWLNDFLNSLSGTNAVILGLLLGAMMAADLGGPINKAAYIFATGTLAASVATGGSAIMAATMAAGMVPPLATFVATLVFRNKFTAQERDAGLTNSILGASFITEGAIPFAAADPLRMIPSFIAGSAITGAIVMFLNIKVLAPHGGVFVIFLVSQPWFYLIAIVIGTIISAALIGVLRKKPTV

SEQ ID NO: 5519 - DNA, 1722 bp, Ralstonia solanacearum GMI1000
  CDS (1)..(1722): transl_table=11
atgccccatctgttggcaattctcggcgcggacagccacagcacgcgccccctgctggccggcgaagcgctgcggcatgcggcgcagcaagccggctgccggctcgacgtggacgtgcgcacacccgacaccctgtcggcggtggccgccaccgcgctggccaacgccgacgcggtggtgtgggccggtgtcgcgcccgacgccgccgcgcgccaggccaatccgcgcatgatcgaggtggccctcgacgatgtgctggccgatgcccgcgccgtgctggcgcgcatgctggacagccaccccgccccgcccaccgcggccgaacaaggccggcgcatcgtcgccatcacctcgtgcccgaccggcatcgcccatactttcatggccgccgaggcgctgacccaggcagccagcgcgctcggccaccccatccatgtcgagacgcagggctcggtgggggcgcagaacaccttgtcggccgacgcgatcgcccaggcagacatcgtgctgatcgcggcagacacgcaggtcgatctgtcgcgcttcgagggcaagcgcgtcttccgcagcggcaccaaggccgccatccacgacgggcaggcgctgatccgccgcgcgctggccgaggccgccatcgccgcgcccagcgggcaggtccaggccgatgccggcgcgaacgcaacccccgccgaacagcagcgcaccggaccttacaaacacctgatgaccggagtgtcgttcatgctgcctttcgtggtagccggcggcatcctgatcgcgctggcctttgccgtgggcggcatctacgccgccgacgacgcggcgcgcggcacgctcggctgggccctgttccagattggcgccaagtccgcctttgcgctgatggtgccggcgctggccgggtacatcgcctactccgtcgccaaccggcccggcatcgcccccggcatggtcggcggcatgctggccgcgagcctcggcgcgggcttcctgggcggcatcgtggccgggttcgtggccggctacggcacctcggcgctcaaccggtggctgcggctgccgcgcaacctcgacggcctcaagccggtgctgatcctgccggtgctcggctcgctgctgacaggcctggtgatgctctatgtcgtgggcgcgccggtggccacgctgctggcctcgctgaccgcctggctgcgcggcatgcagggcgccaacgccgtgccgctgggcgcgctgctgggcggcatgatggcattcgacatgggcggaccggtcaacaaggccgcctatgccttcagcaccggcctcatcggcagccaggtctacacgccgatggccgcgaccatggccgccggcatgacgccgccgctgggcatcgcgctggcggcctggctgttcccctcgcgcttcaccggcgaggaacggcaggccgcgcgtgccaccgccgtgctcggcctggccttcatcagcgaaggcgcgatcccgtatgccgcgcgcgatccgctgcgcgtcattcccgcgctggtgaccggttcggcctgtgccggcgcgctgtcgatgctgttcggcgtcgagctgcgcgtgccccacggcggcgcgttcgtgctgccgattcccaatgcggtcacgcacctgggcggctacgtggtggcgctcgtcgccggcaccgtgctgacagccgtgctgctggcgctgctcaagcgccgcgtagccgccaccgcctga

SEQ ID NO: 5520 - protein, 573 aa, Ralstonia solanacearum GMI1000
MPHLLAILGADSHSTRPLLAGEALRHAAQQAGCRLDVDVRTPDTLSAVAATALANADAVVWAGVAPDAAARQANPRMIEVALDDVLADARAVLARMLDSHPAPPTAAEQGRRIVAITSCPTGIAHTFMAAEALTQAASALGHPIHVETQGSVGAQNTLSADAIAQADIVLIAADTQVDLSRFEGKRVFRSGTKAAIHDGQALIRRALAEAAIAAPSGQVQADAGANATPAEQQRTGPYKHLMTGVSFMLPFVVAGGILIALAFAVGGIYAADDAARGTLGWALFQIGAKSAFALMVPALAGYIAYSVANRPGIAPGMVGGMLAASLGAGFLGGIVAGFVAGYGTSALNRWLRLPRNLDGLKPVLILPVLGSLLTGLVMLYVVGAPVATLLASLTAWLRGMQGANAVPLGALLGGMMAFDMGGPVNKAAYAFSTGLIGSQVYTPMAATMAAGMTPPLGIALAAWLFPSRFTGEERQAARATAVLGLAFISEGAIPYAARDPLRVIPALVTGSACAGALSMLFGVELRVPHGGAFVLPIPNAVTHLGGYVVALVAGTVLTAVLLALLKRRVAATA

SEQ ID NO: 5521 - DNA, 1893 bp, Clostridium perfringens str. 13
  CDS (1)..(1893): transl_table=11
atgaaaatttctcaattattaagtcttgacacaataaaacttgaccttgctgcatctaataaaaatgaagttatagatcaattagttgatgttttatgggatgctggaaagttaactgataaaaatctttataaagaagagattttaaagagagaaagtttatcttctactggtattggcgaaagaatagcaattcctcatgctaaaacaaaagcagtaaaaaatgcatctttagctcttggtatatacaaatacggtgtagattatgattcacttgatggtgaacctgttaatatagtatttatgattgctgctccagctggagcaaatgatgagcatttagaaactttatctagactttcagtacttttaatgaatcctgatttcaaaaatggacttttaaatgctaaaacaccaaaggaagttatttctcttcttgataaatttgaagaaaatgaagaatctgatgaaaataaggattctaacgaaacagaaaataattcaaataaaaaatatatcttagctgttacagcatgtccaactggtattgctcatacttatatggctgctgattcacttaacaaaactgctaaggaaatggatgtacatataaaggttgaaactaatggttcaacaggagtaaaaaatagattaactcaagaagacatagataaggctgacggtataatagttgcagctgataaacaagttgaaatggctagatttaatggtaaaaaggtcgtaatagttcctgtagttcaagctatgaaaagacctcaagaattaataaacgaagcattaagtggctctgctccagtttattctcattctggagattcttctaatcaatcttctggtaagactgaaagaagaggattttataaacacttaatgaatggtgtttcaaatatgttaccatttgttgttggtggtggtatattaatagctatatcatttatgtttggtattcactcagctgaaataaatgatcctacttttaatccaatagctaaattattaaaagatatcggtggaggaaatgctttcttccttatgattcctgttcttgctggattcattggatcaagtatagctgatagacctggatttgcccctgctatggttggtggtttaattgcttataatagtaattctggattcttaggtggattaatcgctggtttccttggtggatatgtagttgtattcttaaagaaaatatttagtaaattaccacaatcattagaaggtattaaacctgttttactttatcctctatttggtatcttaataactggtgccttaatgtacttagtaattgttggacctgtaactgctttaaataatagcataacaatgtggttacaaaacatgggaactggaaacttagttatccttggaatagtattaggtggaatgatggctatagatatgggtggtcctataaataaggctgcatttacttttggtatagctatgatatcttctggaaattactatccacatgctgctataatggctggtggtatggtacctcctttagctacagctttagcaactacattcttcaaaaataaatttactaaagatgaaagagatgctggtgctactaactacataatgggattaactttcataactgaaggagctattccatttgctgcagctgacccattaagagttattcctgcttgtgttataggttcagctctagctggaggattatcaatgatatttaaaataggtttacctgctcctcacggtggaatattagtagttccagtagttgaaggaaaccctcttttatatattctatcaatattagtaggctctgttgtagctgctctaataataggattcttaaagaaacctgtaaatgaaataaataaataa

SEQ ID NO: 5522 - protein, 630 aa, Clostridium perfringens str. 13
MKISQLLSLDTIKLDLAASNKNEVIDQLVDVLWDAGKLTDKNLYKEEILKRESLSSTGIGERIAIPHAKTKAVKNASLALGIYKYGVDYDSLDGEPVNIVFMIAAPAGANDEHLETLSRLSVLLMNPDFKNGLLNAKTPKEVISLLDKFEENEESDENKDSNETENNSNKKYILAVTACPTGIAHTYMAADSLNKTAKEMDVHIKVETNGSTGVKNRLTQEDIDKADGIIVAADKQVEMARFNGKKVVIVPVVQAMKRPQELINEALSGSAPVYSHSGDSSNQSSGKTERRGFYKHLMNGVSNMLPFVVGGGILIAISFMFGIHSAEINDPTFNPIAKLLKDIGGGNAFFLMIPVLAGFIGSSIADRPGFAPAMVGGLIAYNSNSGFLGGLIAGFLGGYVVVFLKKIFSKLPQSLEGIKPVLLYPLFGILITGALMYLVIVGPVTALNNSITMWLQNMGTGNLVILGIVLGGMMAIDMGGPINKAAFTFGIAMISSGNYYPHAAIMAGGMVPPLATALATTFFKNKFTKDERDAGATNYIMGLTFITEGAIPFAAADPLRVIPACVIGSALAGGLSMIFKIGLPAPHGGILVVPVVEGNPLLYILSILVGSVVAALIIGFLKKPVNEINK

SEQ ID NO: 5523 - DNA, 1947 bp, Streptococcus pyogenes MGAS8232
  CDS (1)..(1947): transl_table=11
atgaaaattcaagatttattgagaaaagatattatgattctcgatttacaggctatttctaaagaagttgccattgacgagatgattactaaattagttgaaaaagatattgtacatgattttgatgtctttaaaaagagtatcatgacacgtgaagaacaaacatcaacagggcttggtgatgggattgccatgcctcattctaaaaatattgtagtagataaaccagcggtcttgtttgcgaaatcaaataaaggtgtggattataaggctttagatggtcaaccaacggatctcttctttatgattgctgcgcctcaaggagcaaatgatactcacttggctgcgctagcagaattatcacaataccttttgaaagacggctttgctgataaacttcgtgctgcagcgacaccagaagcagtcattgctgtttttgatgaagcgtcaacagctaaagaagaagtggttgctccaacaagtggtcaagactttatcgttgctgttacagcttgtccgacaggaattgctcacacttatatggcagaagaggctttgaaaaaacaagctgcagaaatgggagtagctattaaagttgaaacaaacggtgcttctggtgtggctaatcgtttaaccgctgaagatattcagagagctaaaggagttattgttgcagctgataaagcggttgaaatggaccgttttgatggtaaacaattcattgctcgccctgttgcagatggtatcaagaaaagtcaggaattgatttctttgattttgaataatgaaggacacacttaccacgctaagaacagaaagtctgaaacagcagtatcatctgagaaaacaagcttaggcggtgctttctataaacacttgatgggtggtgtctcacaaatgttgccatttgttattggtggcgggattatgattgctctagcatttttattggataacatgcttggtgtgccaaatgatcagcttggaagtcttggatcctatcatgaaatagcagctatttttatgaacattggtggagcagccttttccttcatgttaccagtactagcaggttatatcgcttattctattgctgaaaaaccgggcttagtagctggttttgtggcaggtgccattgcctcaaatggtcttgcttttggtaaggtaccatttgcagcaggaggagaagtgagcttgggattaacgggcgtgccatcaggtttccttggggcgcttgtgggtggtttccttgccggtggtgttattcttgcccttcgtaaattgttggcaggcctaccacgttctctagaaggggttaaatctatcctcctttacccattacttggcgtccttgtcactggtttcttgatgctttttgtcaatattccaatggcagctattaacacagctcttaatgatttcttacaaggtctttcaggaagctctgctgtccttatgggacttcttgttggtggaatgatggctgttgacatgggtggtcctgttaataaggcagcttatgtttttggtacaggaactttagcagctactgtggcaaatggtggttcggtcgttatggccgctgttatggcaggtggtatggtacctcctcttgctgtttttgtagccactctcttgtttaaagataaatttaccaaagaagaacgcgaatcaggtttgaccaacattgtcatgggactttctttcatcactgaaggagcaatcccgtttggcgcagctgacccagcgcgtgcaattcctagctttattgctggttctgcctcgacaggagctcttgttggtttggctggcattaaattaatggcgccacatggtggtatcttcgtaatcgctttaacaagcaatccaatcttatatcttgtctttgttgtgattggtgcccttgtatcaggtatcttatttggcgctcttcgcaaaaaagcctaa

SEQ ID NO: 5524 - protein, 648 aa, Streptococcus pyogenes MGAS8232
MKIQDLLRKDIMILDLQAISKEVAIDEMITKLVEKDIVHDFDVFKKSIMTREEQTSTGLGDGIAMPHSKNIVVDKPAVLFAKSNKGVDYKALDGQPTDLFFMIAAPQGANDTHLAALAELSQYLLKDGFADKLRAAATPEAVIAVFDEASTAKEEVVAPTSGQDFIVAVTACPTGIAHTYMAEEALKKQAAEMGVAIKVETNGASGVANRLTAEDIQRAKGVIVAADKAVEMDRFDGKQFIARPVADGIKKSQELISLILNNEGHTYHAKNRKSETAVSSEKTSLGGAFYKHLMGGVSQMLPFVIGGGIMIALAFLLDNMLGVPNDQLGSLGSYHEIAAIFMNIGGAAFSFMLPVLAGYIAYSIAEKPGLVAGFVAGAIASNGLAFGKVPFAAGGEVSLGLTGVPSGFLGALVGGFLAGGVILALRKLLAGLPRSLEGVKSILLYPLLGVLVTGFLMLFVNIPMAAINTALNDFLQGLSGSSAVLMGLLVGGMMAVDMGGPVNKAAYVFGTGTLAATVANGGSVVMAAVMAGGMVPPLAVFVATLLFKDKFTKEERESGLTNIVMGLSFITEGAIPFGAADPARAIPSFIAGSASTGALVGLAGIKLMAPHGGIFVIALTSNPILYLVFVVIGALVSGILFGALRKKA

SEQ ID NO: 5525 - DNA, 1359 bp, Thermoanaerobacter tengcongensis MB4
  CDS (1)..(1359): transl_table=11
atgaagaaaattgttgccgtaacagcttgtcctacaggtattgcacatacctatatggcggcggagaatctgcagatggcagcaaaagagatgggagttgacataaaagtagagactcaagggtcaataggtgcagaaaatgctcttacagaagaggacataagagaagcggatgctgttataattgctgcttccactaaggtggacaaatcaagatttgctgggaaacctgttctggaagttggcgtggaagatgctataaaagatgcaaaagggcttattgaaaaagctttaaagatggagaaacctactgactatgtggagaaagtacaggagattcacaaagaaagagctgctcagaggacaggagcctacaagcacctcatgacaggtgtttcctacatgataccttttgtagttgcaggcggtattttaattgcgctttctttcttctggggatataaggcgtttgaagtagaaggaaccttaccatgggctttgatgagaattggcggtggttcagcatttgcgctgatggtaccaattttgtcagggtatatagcattttctatagcagatagacctggccttgttcctggtatggtaggtggtatgctggcagtatcaacaggtgcaggatttttaggcggaatcatttcaggatttttggcagggtatacggtagactatttgaagaagttaataaaactgcctaggactttagaaggtttaatgccagtattgatattgccggtattgtctactttaatagtaggacttttaatgatatatgtgattggttcaccaatgaaagctattatgacatctttgactaactggcttacagggatgagctctacaaatgcggttattttcagagcaatattaggacttatgatggcttttgatatgggtggtcctgttaacaagacagcttatacctttgcaacagggcttttgggctcaaatgtgtttactccgatggcagcagttatggcagctggtatgacaccgccacttggccttgcacttgcaacagttttatttaaagatagatttacaaaagatgaaatagaagccggtaaagcagcttgggtattgggagcctcctttataacagaaggggctataccttttgcagcagcagacccatttagggtaataccttctataatggtgggttctgcagttacaggcgcactttcaatgcttttccacattgaattaagggctcctcacggaggtatatttgtgatacctatagctgtttcaaatccacttctttatattggtgtgatagcagtcggtacagttgtaactgccttaatggttgcacttcttaaaaagaaagtagaataa

SEQ ID NO: 5526 - protein, 452 aa, Thermoanaerobacter tengcongensis MB4
MKKIVAVTACPTGIAHTYMAAENLQMAAKEMGVDIKVETQGSIGAENALTEEDIREADAVIIAASTKVDKSRFAGKPVLEVGVEDAIKDAKGLIEKALKMEKPTDYVEKVQEIHKERAAQRTGAYKHLMTGVSYMIPFVVAGGILIALSFFWGYKAFEVEGTLPWALMRIGGGSAFALMVPILSGYIAFSIADRPGLVPGMVGGMLAVSTGAGFLGGIISGFLAGYTVDYLKKLIKLPRTLEGLMPVLILPVLSTLIVGLLMIYVIGSPMKAIMTSLTNWLTGMSSTNAVIFRAILGLMMAFDMGGPVNKTAYTFATGLLGSNVFTPMAAVMAAGMTPPLGLALATVLFKDRFTKDEIEAGKAAWVLGASFITEGAIPFAAADPFRVIPSIMVGSAVTGALSMLFHIELRAPHGGIFVIPIAVSNPLLYIGVIAVGTVVTALMVALLKKKVE

SEQ ID NO: 5527 - DNA, 2100 bp, Streptomyces coelicolor A3(2)
  CDS (1)..(2100): transl_table=11
atgagcgacatgatcaccgcggacctggtcgacctcgacctgtccgccgacaccaagcaggcggcgacgcgcgccctggcggagcggatggtggccctgggccgggtgaccgacctggagggcttcctcgccgacgtggccgcccgtgaggcgcagatgccgaccggcctcgacggcgggatcggcatcccgcactgccgcagcgggcacgtcaccgagccgacgctcgcgttcggacgcagcacggccggcgtcgacttcggggcggcggacggaccggccgacctgatcttcctcatcgccgctccggcgggcgccgacgacgcccacctgacgatcctctcctcgctggcccgccggctgatgaacgccgggttcaccgccgcgctgcgctcgctgggcgagccggcggccgccgccgcgctcatccgcggggaggagccgacaccggccgcggacaccggtgaggacagcaccgaggacgtcgtcgaggacaccaccgaggagaccgcggacaccggggcggtctcggcggcggcctccgccgaggccgccccgggcagcaccggtgaggattccggcgggcccgggcgccccttccgcatcgtcgccgtcacctcctgccccaccggcatcgcgcacacctacatggcggccgagtcgctggagcacgcgggccgcgaggcgggcgtcgaggtcgtcgtcgagacgcagggctcggccggcttcacccggctcgacccggcggtgatcgcggcggcggacggcgtgatcctcgcccacgacgtcgccgtgcgcgagaagggccgcttcgccgggaagcccaccgtcgacaccggcgtcaaggccgccatcaaccggccgggcgagctgatcggcgaggtccgcgacaaggcggcccgcggcgaggtcacctccgcatccccgggcgcgacccccgtcgagcgcggcggcgagtccggcgagggctacggcaccaagctccgcaagtggctgatgtccggcgtcagttacatggtcccgttcgtcgccgcgggcggtctgctgatcgccctgggcttcgcgatcggcggctacgagatcaacaaggcgccctccgtgatggaccacttcgtgtggacccaggcggacagctgggcggcgctgctcttccagatcggcggcgtggccttcgccttcctggtcccggtgctggccggttacatcgcctacggcatggccgaccggccgggcctggtccccggcttcgtcggcggctcgatcgcgctgaccatcaacgccggcttcctcggtggtctggcggccggtctgatctccggcgcggtggtgctggcgatccagcgggtaccgataccgaaggcgctgcgcggcatcatgccggtggtggtgatcccgctcgtctcggcggcggtcgtcgggttcctgatgttcgtcgtgatcggcaagcccatcgcctccgcgcagtcgggcatgaccgactggctgaacggcctgtccggcgccaacgcggtcctgctcggcgcgctgctcggcctgatgatgtgcttcgacctcggcggcccggtcaacaaggtcgcctacaccttcgccaccgcgggcatcgccgtcgccagccccagcgactcggcgatgaagatcatggcggcggtgatggcggccggcatggtcccgccgctggcgatggccctggccaccaccgtgcgcggccggctcttcaacgccgccgagcgcgagaacggcaaggccgcctgggtcctgggcgcctccttcatctccgagggcgcgatcccgttcgccgcggccgacccgctgcgcgtcatcccgtcctcgatggtgggcggcgcggtcaccggcgccctgtcgatggccttcggtgcgacgctgcgcgccccgcacggcggcatcttcgtggtcccgctgatcggcaacccgctgctctacctggtcgccgtcgcggccggggtctgtgtcaccacggccctggtgatcgtcctcaaggggctgcgcaagacggtgccgccggcggcggcccagggacccggcgggggcgcggacccgtcgtcccgggcgccgggcgcgaagcaggcggtggccgcgtaa

SEQ ID NO: 5528 - protein, 699 aa, Streptomyces coelicolor A3(2)
MSDMITADLVDLDLSADTKQAATRALAERMVALGRVTDLEGFLADVAAREAQMPTGLDGGIGIPHCRSGHVTEPTLAFGRSTAGVDFGAADGPADLIFLIAAPAGADDAHLTILSSLARRLMNAGFTAALRSLGEPAAAAALIRGEEPTPAADTGEDSTEDVVEDTTEETADTGAVSAAASAEAAPGSTGEDSGGPGRPFRIVAVTSCPTGIAHTYMAAESLEHAGREAGVEVVVETQGSAGFTRLDPAVIAAADGVILAHDVAVREKGRFAGKPTVDTGVKAAINRPGELIGEVRDKAARGEVTSASPGATPVERGGESGEGYGTKLRKWLMSGVSYMVPFVAAGGLLIALGFAIGGYEINKAPSVMDHFVWTQADSWAALLFQIGGVAFAFLVPVLAGYIAYGMADRPGLVPGFVGGSIALTINAGFLGGLAAGLISGAVVLAIQRVPIPKALRGIMPVVVIPLVSAAVVGFLMFVVIGKPIASAQSGMTDWLNGLSGANAVLLGALLGLMMCFDLGGPVNKVAYTFATAGIAVASPSDSAMKIMAAVMAAGMVPPLAMALATTVRGRLFNAAERENGKAAWVLGASFISEGAIPFAAADPLRVIPSSMVGGAVTGALSMAFGATLRAPHGGIFVVPLIGNPLLYLVAVAAGVCVTTALVIVLKGLRKTVPPAAAQGPGGGADPSSRAPGAKQAVAA

SEQ ID NO: 5529 - DNA, 1743 bp, Xanthomonas axonopodis pv. citri str. 306
  CDS (1)..(1743): transl_table=11
atgtcctcttccatcgtggtcatcgccgctggcgaacgcagtaccgaagccgtgctggcggccgaagcgctgcgccgcgcggccactgccgccggccgtcgcgtgacgatcgaaatccgcagcgaccagggcgtactcggcgccttgccgggcgaactcgccagcggtgccgcccaggtcctggtggtcggcgacgccgatgccgacaccactcgctttggcgatgcgcaactggtgcgcctgagcctgggcgcggtgctggacgacccggccgctgcgatcggcaagctggccgcccacgccgacccggccgtcgccggcagtcccggtggcgccgccagcgacagcaagcgcatcgtcgccatcacctcctgccctaccggcatcgcgcacaccttcatggccgccgaaggcctgcagcaggccgccaagaagctcggctaccagatgcgggtggaaacccagggctcggtgggtgcgcaggacgcgctcaccgacgatgaaatccgtgcggcagacgtggtcatcatcgcggccgaccgcgaggtcgacctggcccgcttcggcggcaagcgcgtgttcaagagcggcaccaagccggcgatcaacgatggcccggcgctgatcaacaaggccctggccgaggccagcgtgcagggcggcgccatgcccgccaccggcagcgctgccagcgccgcggggaacaagggcaatggccgcaccggcgcctacaagcacctgatgaccggcgtctcgttcatgctgccgttcgtgactgccggcggcctgctgattgcgctggcctttgcgctgggcggcatctacgccggcgacgatgcgcaccagggcacgttggcctggtcgctgttccagatcggcgccaaggccggcttcaccctgatggtgccggccctggccggttacatcgcctactccatcgccgaccgccccggcatcgcgcccggcatgatcggcggcctggtggcggccaatctcaatgccggtttcctcggcgggatcattgccggtttcatcgccggctacggcgtggctgcgctcaaccgctacgtccgcctgccgcgcaacctggaaggcctcaagccggtgctgatcctgccggtgctgggcaccctgctggtcgggctggcgatgatgtacgtgttcggccagccggtggccgacctgctggcctggctcaccgcctggctgcgcggcatgcagggcagcagcgcgttgctgctgggcctgctgctcggcggcatgatggccttcgacatgggcgggccggtcaacaaggcggcctatgcgttttccaccggcctgatcgccagccaggtctataccccgatggccgctgccatggtggccggcatgaccccgccgctgggcatcgcgctggcgacctgggtgttccgcaaccgcttcaccgccgaagaacgcggctcggccactgccgccggcgtgctcgggctggccttcgtcaccgaaggcgccatcccgtacgctgcgcgcgacccattgcgcaccatcccggcgctggtgatcggctcggccgtggccggcgccatctcgatgaccgccggtgccgaattgaaggcgccgcatggcggcatcttcgtgctgctgatccccaacgccgtcacccacctgctcaactacgtgctggccctggcggtcggcgtcgtggtcacggccatcgcgctgcgcctgctcaagaaaccggtgaccgacgtcgtcgcctga

SEQ ID NO: 5530 - protein, 580 aa, Xanthomonas axonopodis pv. citri str. 306
MSSSIVVIAAGERSTEAVLAAEALRRAATAAGRRVTIEIRSDQGVLGALPGELASGAAQVLVVGDADADTTRFGDAQLVRLSLGAVLDDPAAAIGKLAAHADPAVAGSPGGAASDSKRIVAITSCPTGIAHTFMAAEGLQQAAKKLGYQMRVETQGSVGAQDALTDDEIRAADVVIIAADREVDLARFGGKRVFKSGTKPAINDGPALINKALAEASVQGGAMPATGSAASAAGNKGNGRTGAYKHLMTGVSFMLPFVTAGGLLIALAFALGGIYAGDDAHQGTLAWSLFQIGAKAGFTLMVPALAGYIAYSIADRPGIAPGMIGGLVAANLNAGFLGGIIAGFIAGYGVAALNRYVRLPRNLEGLKPVLILPVLGTLLVGLAMMYVFGQPVADLLAWLTAWLRGMQGSSALLLGLLLGGMMAFDMGGPVNKAAYAFSTGLIASQVYTPMAAAMVAGMTPPLGIALATWVFRNRFTAEERGSATAAGVLGLAFVTEGAIPYAARDPLRTIPALVIGSAVAGAISMTAGAELKAPHGGIFVLLIPNAVTHLLNYVLALAVGVVVTAIALRLLKKPVTDVVA

SEQ ID NO: 5531 - DNA, 1953 bp, Staphylococcus aureus subsp. aureus MW2
  CDS (1)..(1953): transl_table=11
atgaaaattgtagctattacctcatgcccaaatggcattgcacatacatatatggctcaagaaaagcttgagcaggtagcaaaagaaatgggtgtggatattaaagtagagacacagggcggtgttggtgctgaaaatgttttaactacgcaagacatcgaagaagctgacggtgtcataattgcagctgataaacaagttgatctgtcccgatttgttggtaaacggttgattaatgaaaatgttcgcgaagggattcataatccgagaggtctaattcaacgtatcattaatcaagatgcgcctatttatcaatctgaaacaaattatcattcgaaagatcgcggtaagtctaaaagtggtattcaaatggtgtatcaacatttaatgaacggtgtatcgtttatggttccttttatcgtagttggtggactccttatcgccatcgcgctgactctaggcggtgaaacgacatcaaaaggattagtcatcccagatgattcattttggaaatccattgaaaacattggtagtttagcctttaaatttatggttccaatactagctggatatatcgctgttagtatcgctgacaagcccggtcttgttcctggtatgattggcggcgctatcgctgctgacggtagtttttatggcagtgatgcaggcgcaggatttttaggtggtattgttgctggtttcttagcaggttatatcgcaaagtggattaaagatattaaagttccaaaagcaatggcaccaattatgcctatcattattattcccattatttcatcggtcgttgtaggattgatatttatatttttaatcggtgcaccaatttctaatatttttgaggcattaacaacctggttaaaaagtatgcaaggtgctaatattattatacttgcgatgattataggtgcgatgattgccttcgatatgggcggtccagtaaacaaagtagcatttttatttggctcagcacttattgctgaaggtaattacgccgttatgggtatggtcgcagttgctgtatgtacaccaccaatcggtttaggtttagcaacgtttgttcaaaagtataaattcaatcattccgaaagagaaatgggtaaggcttccttcactatgggactgtttggtattactgaaggtgctattcctttcgcagcccaagatccattgcgcattatacctgcaaacatcattggtgcaatgattgcatcagtcattgcagccattggtggtgtcggcgatagagtcgcacatggaggtccaatcgtggctgtattaggtggtattgatcatgtattatggtttatctttgcagtgatagtaggtagtcttgtcacaatgactactgtactattattaaaacgcaatacaccagttatagcagtagatgcaccagcgcaacacacgcaacttcatgatacagatattacacaacatgatacagaggttgacaatgtagataaaaccgcgaaacattcagatctcaataaacattctcatgtttttgatcaacaaactatgataattactgatcacgacatgtctcgaaacgaagcaattgatatgttgattcataaacttaaaatttgccgttatgtagagcacacatcgcatttaaaaaatgcaatcctagaacgtgaaatggagtctacgacagctattggcatgaacgtggccattccacatgcaaagtctgatgttgtaaaacaaccgattgtagctgttatgaaaaataatcatggtgttaaatgggacagtctagatggtagtctacctcaattgatattcttaattgccgtaccaaacaacagtcaggatacacatttaaaaatacttcagcgcttatctaaagcgttaatgaatgatgagacacgccaatcactaattaatgcaaacagtactacagaaatttataacttattaatgaaaatatag

SEQ ID NO: 5532 - protein, 650 aa, Staphylococcus aureus subsp. aureus MW2
MKIVAITSCPNGIAHTYMAQEKLEQVAKEMGVDIKVETQGGVGAENVLTTQDIEEADGVIIAADKQVDLSRFVGKRLINENVREGIHNPRGLIQRIINQDAPIYQSETNYHSKDRGKSKSGIQMVYQHLMNGVSFMVPFIVVGGLLIAIALTLGGETTSKGLVIPDDSFWKSIENIGSLAFKFMVPILAGYIAVSIADKPGLVPGMIGGAIAADGSFYGSDAGAGFLGGIVAGFLAGYIAKWIKDIKVPKAMAPIMPIIIIPIISSVVVGLIFIFLIGAPISNIFEALTTWLKSMQGANIIILAMIIGAMIAFDMGGPVNKVAFLFGSALIAEGNYAVMGMVAVAVCTPPIGLGLATFVQKYKFNHSEREMGKASFTMGLFGITEGAIPFAAQDPLRIIPANIIGAMIASVIAAIGGVGDRVAHGGPIVAVLGGIDHVLWFIFAVIVGSLVTMTTVLLLKRNTPVIAVDAPAQHTQLHDTDITQHDTEVDNVDKTAKHSDLNKHSHVFDQQTMIITDHDMSRNEAIDMLIHKLKICRYVEHTSHLKNAILEREMESTTAIGMNVAIPHAKSDVVKQPIVAVMKNNHGVKWDSLDGSLPQLIFLIAVPNNSQDTHLKILQRLSKALMNDETRQSLINANSTTEIYNLLMKI

SEQ ID NO: 5533 - DNA, 1965 bp, Streptococcus agalactiae 2603V/R
  CDS (1)..(1965): transl_table=11
atgaaaatccaagacctactaaaaaaagaagttatgattatggatttaaaagcaaccagtaaagaggctgcaattgatgaaatgattacaaaattagttgacacaggtgttgtgacaaactttgctatttttaaagatggtatcatgaagcgtgaggcacaaacatcaactggattaggtgatggtatcgctatgccacatagtaaaaatgctgccgttaaagaagctactgtcctttttgcaaaatctgcatcaggtgttgattacgaagcacttgatggacagccaactgatttattctttatgattgctgcgccagatggtgctaatgatacgcatttagctgccttggcagaactatctaaatatcttttaaaagaagggttcgctgatcaattacgtcaagcaaaaacgccagatgacattattgctacttttgatagtaatagcatttctcaagaaacagtagctccacaaacagtacaatcaacaagtaaaggttcagattatattgttgcagtaacagcttgcactacgggaattgcccacacgtatatggcagaagaagctttaaagaaaaaagcagctgaaatgggtgtaggtattaaagttgaaacaaatggcgcttctggtgtaggaaataagttgacttcaagtgatattgcaagggctaagggtgttattattgcagcagataaggctgtagagatggatcgttttgatggcaaacctttggtatcacgtccggtagctgatggtattaaaaaaagtgaagacttaattaacattattctcgataataaggcacaaacctatcatgcaaaaaatcaaaatgataaacaatcaggtgaatctgatggaaaatcaggcttaggctctgctttttataaacaccttatgggtggtgtatcacaaatgttaccattcgttattggtggtggtattatgattgcgattgctttcctttttgataacatacttggtgtaccaaaagaccaattaagtaatttaggttcataccatgaaattgcagccttattcaaaaatatcggtggcgcagcatttgcatttatgttaccagtattggcaggttatatcgcttattcaatagctgaaaaaccaggactagtagctggcttcgtagctggttcaattgcatcaagtggactggcattcggtaaagtaccttttgcagaaggtgggaaagcaaccttagcattagcaggtgtgccatcaggtttcttaggggctttagtaggtggtttcttagctggtggagttatcctactacttagaaaattactttcaggtctcccaaaatcgcttgaaggtattaaatcaattcttctatacccattgttaggtgttttgattacaggtttcttgatgttgctcgtaaacattccaatggcagctatcaacacagctcttaacactttcttacaaggtttatctggtagttcagcagtcttgatgggcttactagttggtggtatgatggctgtagatatgggtgggcctgttaataaagcagcttatgtttttggtacaggtactcttgcagcaactgttgcaaatggcggctctgttgttatggcagctgtaatggctggaggaatggttccaccgttagcagtatttgtggcaactttattatttaaagataaatttaataatgaagaacgtcaatctggtctaacaaatatcgttatggggttatcttttatcactgaaggtgctattccgtttggtgctgctgacccagctcgtgcaatccctagctttattgtaggttcagccttaactggagcacttgttggtttagctggtatcaagttgatggctcctcatggagggatttttgtcatcgcattaacaagtaatcctttactttatattctatttattctaattggagcggtagtctcaggtgtactctttggcttgttccgtaaaataaaatag

SEQ ID NO: 5534 - protein, 654 aa, Streptococcus agalactiae 2603V/R
MKIQDLLKKEVMIMDLKATSKEAAIDEMITKLVDTGVVTNFAIFKDGIMKREAQTSTGLGDGIAMPHSKNAAVKEATVLFAKSASGVDYEALDGQPTDLFFMIAAPDGANDTHLAALAELSKYLLKEGFADQLRQAKTPDDIIATFDSNSISQETVAPQTVQSTSKGSDYIVAVTACTTGIAHTYMAEEALKKKAAEMGVGIKVETNGASGVGNKLTSSDIARAKGVIIAADKAVEMDRFDGKPLVSRPVADGIKKSEDLINIILDNKAQTYHAKNQNDKQSGESDGKSGLGSAFYKHLMGGVSQMLPFVIGGGIMIAIAFLFDNILGVPKDQLSNLGSYHEIAALFKNIGGAAFAFMLPVLAGYIAYSIAEKPGLVAGFVAGSIASSGLAFGKVPFAEGGKATLALAGVPSGFLGALVGGFLAGGVILLLRKLLSGLPKSLEGIKSILLYPLLGVLITGFLMLLVNIPMAAINTALNTFLQGLSGSSAVLMGLLVGGMMAVDMGGPVNKAAYVFGTGTLAATVANGGSVVMAAVMAGGMVPPLAVFVATLLFKDKFNNEERQSGLTNIVMGLSFITEGAIPFGAADPARAIPSFIVGSALTGALVGLAGIKLMAPHGGIFVIALTSNPLLYILFILIGAVVSGVLFGLFRKIK

SEQ ID NO: 5535 - DNA, 1965 bp, Streptococcus agalactiae NEM316
  CDS (1)..(1965): transl_table=11
atgaaaatccaagacctactaaaaaaagaagttatgattatggatttaaaagcaaccagtaaagaggctgcaattgatgaaatgattacaaaattagttgacacaggtgttgtgacaaactttgctatttttaaagatggtatcatgaagcgtgaggcacaaacatcaactggattaggtgatggtatcgctatgccacatagtaaaaatgctgccgttaaagaagctactgtcctttttgcaaaatctgcatcaggtgttgattacgaagcacttgatggacagccaactgatttattctttatgattgctgcgccagatggtgctaatgatacgcatttagctgccttggcagaactatctaaatatcttttaaaagaagggttcgctgatcaattacgtcaagcaaaaacgccagatgacattattgctacttttgatagtaatagcatttctcaagaaacagtagctccacaaacagtacaatcaacaagtaaaggttcagattatattgttgcagtaacagcttgcactacgggaattgcccacacgtatatggcagaagaagctttaaagaaaaaagcagctgaaatgggtgtaggtattaaagttgaaacaaatggcgcttctggtgtaggaaataagttgacttcaagtgatattgcaagggctaagggtgttattattgcagcagataaggctgtagagatggatcgttttgatggcaaacctttggtatcacgtccggtagctgatggtattaaaaaaagtgaagacttaattaacattattctcgataataaggcacaaacctatcatgcaaaaaatcaaaatgataaacaatcaggtgaatctgatggaaaatcaggcttaggctctgctttttataaacaccttatgggtggtgtatcacaaatgttaccattcgttattggtggtggtattatgattgcgattgctttcctttttgataacatacttggtgtaccaaaagaccaattaagtaatttaggttcataccatgaaattgcagccttattcaaaaatatcggtggcgcagcatttgcatttatgttaccagtattggcaggttatatcgcttattcaatagctgaaaaaccaggactagtagctggcttcgtagctggttcaattgcatcaagtggactggcattcggtaaagtaccttttgcagaaggtgggaaagcaaccttagcattagcaggtgtgccatcaggtttcttaggggctttagtaggtggtttcttagctggtggagttatcctactacttagaaaattactttcaggtctcccaaaatcgcttgaaggtattaaatcaattcttctatacccattgttaggtgttttgattacaggtttcttgatgttgctcgtaaacattccaatggcagctatcaacacagctcttaacactttcttacaaggtttatctggtagttcagcagtcttgatgggcttactagttggtggtatgatggctgtagatatgggtgggcctgttaataaagcagcttatgtttttggtacaggtactcttgcggcaactgttgcaaatggcggctctgttgttatggcagctgtaatggctggaggaatggttccaccgttagcagtatttgtggcaactttattatttaaagataaatttaataatgaagaacgtcaatctggtctaacaaatatcgttatggggttatcttttatcactgaaggtgctattccgtttggtgctgctgacccagctcgtgcaatccctagctttattgtaggttcagccttaactggagcacttgttggtttagctggtatcaagttgatggctcctcatggagggatttttgtcatcgcattaacaagtaatcctttactttatattctatttattctaattggagcggtagtctcaggtgtactctttggcttgttccgtaaaacaaaatag

SEQ ID NO: 5536 - protein, 654 aa, Streptococcus agalactiae NEM316
MKIQDLLKKEVMIMDLKATSKEAAIDEMITKLVDTGVVTNFAIFKDGIMKREAQTSTGLGDGIAMPHSKNAAVKEATVLFAKSASGVDYEALDGQPTDLFFMIAAPDGANDTHLAALAELSKYLLKEGFADQLRQAKTPDDIIATFDSNSISQETVAPQTVQSTSKGSDYIVAVTACTTGIAHTYMAEEALKKKAAEMGVGIKVETNGASGVGNKLTSSDIARAKGVIIAADKAVEMDRFDGKPLVSRPVADGIKKSEDLINIILDNKAQTYHAKNQNDKQSGESDGKSGLGSAFYKHLMGGVSQMLPFVIGGGIMIAIAFLFDNILGVPKDQLSNLGSYHEIAALFKNIGGAAFAFMLPVLAGYIAYSIAEKPGLVAGFVAGSIASSGLAFGKVPFAEGGKATLALAGVPSGFLGALVGGFLAGGVILLLRKLLSGLPKSLEGIKSILLYPLLGVLITGFLMLLVNIPMAAINTALNTFLQGLSGSSAVLMGLLVGGMMAVDMGGPVNKAAYVFGTGTLAATVANGGSVVMAAVMAGGMVPPLAVFVATLLFKDKFNNEERQSGLTNIVMGLSFITEGAIPFGAADPARAIPSFIVGSALTGALVGLAGIKLMAPHGGIFVIALTSNPLLYILFILIGAVVSGVLFGLFRKTK

SEQ ID NO: 5537 - DNA, 2130 bp, Mycoplasma penetrans HF-2
  CDS (1)..(2130): transl_table=4
atggatatatttaataaaaaatatataaaaacaaacttagaagtttcttcaaaaaatgatgctttaaaaaagatatcaaaccttgcaaaagaattaggaataattagtagtgttactgatgttactaatgcactaaaagcaagagaagaagaatctagtactggttttgaaaatggatttgcaatacctcatgctagaacaaaatctatcttaaaacctgcaatactttttataaaatttaaaaaagcaattgattgaaaatctttagataaacaattaacaagttgtgcttttgttttattaattccagaagaagttagttcagttcatttagatttcttatctaaaatttcaactgcactaatggataaaaattttgttaataaaattaaagaaacaaactctaaagatttaatttatgaagaaataaataaatactttacaactgaagattctgcaactaacaattcaactgtcagtgacaattcacaaaaaagaattattgctttaactgcttgtccagttggtgttgctcacacttatttagcagcagataaattaaaagaagctggtaaatctaaaaatatttgaattaaggtagaaacccatggaagtgttgggattaaaaatcaagcaactaatgaagaaattcaaaaagctgatgcaataatagttgctagtgatataggtctagatttatcaagatttaataataaagtattaatccaaacaccaattaaagaagcaattcataatccaagtgaattaattgataaagcactgaattctaaatcaatttataaatcatcagaaacaaaaacaaataattctcaaaaagaatttaataaagatgaaaagaaaaagatgtctgtcatgaaacatattctgtctggaataagttatatgatcccatttgtgattttaggtggtatatgtattgctttatctgcaggattaggtaaagctatatatggccaagataactcagcgcctcaaggagacttcttttactaccttaatgaaattggtagtgttgcattcactttaatgataggagttttaggtgcttatattgcttactcaattgcaggaagagcaacacttgccccagcatttatagtttcaattgtaggtaatacaccaaatgcaatatatacatttgctggaattcaaaatgatggtgtgggaatgggctttttaggttcaatattatttgggcttttaataggttatacagttaaatgaattaatacatgaaaaattcctaaatcaatttcatctatcatgcctatttttgtaattcctttaggtgttggtttattctatggtttaatagcaatatttgtaattggtgctccagttgcatttgtaatggggcaatttattaatgctttaaaaagtatttttgtttcaggtaatacttcaaatgcagtaagtaaagatattagtttaggagtaagtattgcaattggaattctaataggagcaatggctggttttgatatgggtggaccaattaataaagtagctttcttaacttgtacagctttaatttcttctaatgttaatgaacctatgggaatgatggctgcagctattccggttgcaccacttggaatgggtttatgtacaatgatctttagaaataaattcaataaagaagaaaaaacaatgggtataagtgcatttataatgggctttattggtattagtgaaggtgctattccatttgcaatttctgatcctaaaagagcaattgcatgtaatgttataggaagtgcaataactggtggaattgctggtgctttaggtataacttgtgcagctgcacatggtggaccaatagttggaattttaggtgcagttagtagtaatcaatttggattagtaggtggtattggattattctttgtaactattattattggtatgctaattacatgtttcttatatggaataattagaaaaagagataaaaataataatcaagaaaattttaaagatgtttttaaaatttttaaaagatctaaaaatgttaataaagcaaatttatataaacaagaaaaactttttaaaaatcaaaaagttttaatcaataaaactagaggtaatttatgtttgaatttataa

SEQ ID NO: 5538 - protein, 709 aa, Mycoplasma penetrans HF-2
MDIFNKKYIKTNLEVSSKNDALKKISNLAKELGIISSVTDVTNALKAREEESSTGFENGFAIPHARTKSILKPAILFIKFKKAIDWKSLDKQLTSCAFVLLIPEEVSSVHLDFLSKISTALMDKNFVNKIKETNSKDLIYEEINKYFTTEDSATNNSTVSDNSQKRIIALTACPVGVAHTYLAADKLKEAGKSKNIWIKVETHGSVGIKNQATNEEIQKADAIIVASDIGLDLSRFNNKVLIQTPIKEAIHNPSELIDKALNSKSIYKSSETKTNNSQKEFNKDEKKKMSVMKHILSGISYMIPFVILGGICIALSAGLGKAIYGQDNSAPQGDFFYYLNEIGSVAFTLMIGVLGAYIAYSIAGRATLAPAFIVSIVGNTPNAIYTFAGIQNDGVGMGFLGSILFGLLIGYTVKWINTWKIPKSISSIMPIFVIPLGVGLFYGLIAIFVIGAPVAFVMGQFINALKSIFVSGNTSNAVSKDISLGVSIAIGILIGAMAGFDMGGPINKVAFLTCTALISSNVNEPMGMMAAAIPVAPLGMGLCTMIFRNKFNKEEKTMGISAFIMGFIGISEGAIPFAISDPKRAIACNVIGSAITGGIAGALGITCAAAHGGPIVGILGAVSSNQFGLVGGIGLFFVTIIIGMLITCFLYGIIRKRDKNNNQENFKDVFKIFKRSKNVNKANLYKQEKLFKNQKVLINKTRGNLCLNL

SEQ ID NO: 5539 - DNA, 1902 bp, Vibrio vulnificus CMCP6
  CDS (1)..(1902): transl_table=11
atgatcaaccaactgattaatgccaatttaattcagcttgatctgcaagcaaatacaaaacaagccgtttttgaagagctgattgacatcctgcattcgcaaggacgtatttcagataaagcggccttcctacaagacatccaagcgcgtgaagagttaggcaacaccggatttgaagacggcgtcgcgatccctcatgcgaaaagtgccgccgtgacccaacctgccgtcgccattggcgtgagcaaacagggcattgagtacggcgcagaagacggtttgccttccaaactctttttcatgatcgcatcccccgatggaggcgataaccaccatattgaagtgttggctgaactctcttccaagctgatcgaagaaggctttatcgacgcattccttaatgccgaaaacacagagcaagcgctgcagctattgctgaaaaaggccgaacctgcgccagagacccacccatcggagagcaaagggttgatcatcggtgtgacgggttgtcctgcaggtattgcccacacttacctcgcggcagaagcgctggaaaaaggcgcggcggcgttgggctaccaaatcaaagtggaaaccaacggctcgattggggtaaaaaacagcccaaccgcagaagaaattgaacgcgcagaggcgattgttgtcgcatgtgacaaacaggtcgacatggcgcgctttgccggtaaacgtgttgtcaaaaccaacgtcaaagccccaattcgcgatgctcagaagctgattaacgaagcgttaaacgcgccaagctaccaagccgaaagcgccagcacgcagtcggtggcgaacaaagcgtcccaagcgcgctctgatctctatcgtttcttgatgaacggcgtgtctcacatgatcccattcgtggtcacagggggtcttctgattgccttagcccttgcggtcggcggcgagccaaccgaagcgggcatggcgattcctcccggcagtatgtggaaccaaattcttgaagtgggcgtggttgctttcacactgatgatcccgattttggcgggttacattgcctacgcgatcgcagaccgaccagcactggctccgggtttaatcggaggttggattgcgaacaacggctctttctacggcgcagaagcgggaacaggctttattggtgccatcatcgcgggcttgcttgttggttacttcgttaagtggatcacctccatcaactaccacaagttcattcagccactcgttccgatcatgattgcgcccatcaccgcatcgctgttcattgctggtctgttcatcttcgtcatcggcgcccctattgccagcttaatggacggtctcaccgccctgctcaccagcatgagtactggtaacgtgattctactgggcattgtgctgggtggtatggccggctttgacatgggtggcccattcaacaaagtggcgttcttgttctctgtcggcatgattgccagtggccaaacccaattcatgggcgcgatggcgtgtgccattccggttgcaccacttggcatggcgctcgccactgcgatgggtcgcaagttcgatttatttgaatcgtcagaaattgaagcaggtaaagcggcgggcgcaatgggcttagtcggtatctctgaaggggcgattccatttgcggcgcaagatccgatgtcggttattcctgccaacgtattgggctctatggttgcagcggtaatggcgttctctttcggcatcaccaacagcgtggcgcacggtggccctgtggtagcactgcttggcgcgatgaactacccgttattggcgctaatttgcatggtttcaggcgctgcggttacagcaatcacttgtgtgacgctgaagaaaatccgcgcacaaaaactggcggccgcaaccgcttaa

SEQ ID NO: 5540 - protein, 633 aa, Vibrio vulnificus CMCP6
MINQLINANLIQLDLQANTKQAVFEELIDILHSQGRISDKAAFLQDIQAREELGNTGFEDGVAIPHAKSAAVTQPAVAIGVSKQGIEYGAEDGLPSKLFFMIASPDGGDNHHIEVLAELSSKLIEEGFIDAFLNAENTEQALQLLLKKAEPAPETHPSESKGLIIGVTGCPAGIAHTYLAAEALEKGAAALGYQIKVETNGSIGVKNSPTAEEIERAEAIVVACDKQVDMARFAGKRVVKTNVKAPIRDAQKLINEALNAPSYQAESASTQSVANKASQARSDLYRFLMNGVSHMIPFVVTGGLLIALALAVGGEPTEAGMAIPPGSMWNQILEVGVVAFTLMIPILAGYIAYAIADRPALAPGLIGGWIANNGSFYGAEAGTGFIGAIIAGLLVGYFVKWITSINYHKFIQPLVPIMIAPITASLFIAGLFIFVIGAPIASLMDGLTALLTSMSTGNVILLGIVLGGMAGFDMGGPFNKVAFLFSVGMIASGQTQFMGAMACAIPVAPLGMALATAMGRKFDLFESSEIEAGKAAGAMGLVGISEGAIPFAAQDPMSVIPANVLGSMVAAVMAFSFGITNSVAHGGPVVALLGAMNYPLLALICMVSGAAVTAITCVTLKKIRAQKLAAATA

SEQ ID NO: 5541 - DNA, 1458 bp, Lactobacillus plantarum WCFS1
  CDS (1)..(1458): transl_table=11
atggcaaatctaaaaattgtggccgttactaattgtcctgctggaattgcgcatacttacatggtagctgaagcaatcgaagaaaaggctaaatcattaggttatgaggttcacgttgaaactcagggagccagtggtgttgaaaataaactgacaccagaacagattgctaccgccaactacgtcatcttagcattaggtaaaggaatgactgatgaggacaaacaacgttttaatggcaaaagggtcgttgaacttcccgtatcagaagcattaaaagagattgatacgttattcgataatatcgaggatcgggcagaaatctttacagcttcaaaagtgaaactgggaagtgagcaggatgcggttactgacggtatcatgagttatctcatggcaggtgtatccgccgcattgccatttgtaattggcggtggcttattgattgcaattggcagcatgatggttcaatttggaatgccgaatacgcctttagctaaaggtgtgtcaccgtcgttggcttgggtgatcaccagtattgggaatctgggatttacttttatgattccaatcatgggtgcatatattgcgtttgcaatcggggataagccagcttttgcaccagcattcttagtaacttttttggctaatgatactgacttgctaggtactcagtctggtgcagggttcttaggtgcaattgtaattgggctatccgttgggtattttgttaaatactttaaaaaagtacgtcttggtaagaactttcagtctattttaggctttatgattattccttttgtaacattactagtttttgggctactgacgtattatctactggggccgttcatgggctggttaatgagtattctgttggcatttttgaagaatattccaacgtcgatgaagataggtggtggcttcctagttggttgtatgcttgcctttgatatgggggggccaattaataaaacagcatggtttttcagtttttcgttactcagttctggaatttataactggtatgggattgtaggggttgtaactttgttgccaccgatggctgcggcaatttcaacttggattcgccctaaactctttacaaagcaagaacgggctgcaagttggagcgcttttcttgttggtatgacggttgccaccgaaccggcaattccatatgcgttagcagcaccattgccgatgattgcggctaatactttagccggtgggattactggggcgattacaataatgttaaatgtggagcgtatggcacctggaattggtatttttgatccgttaattggtttggagaagccgtggtattggttttacttgtctgtcataattggtctggtattgaacgtattctttattattactttcaaaacggcttggttacgtcgtcgtgagaaaaaggaacaagaaaagttagcacaggttgacgataaataa

SEQ ID NO: 5542 - protein, 485 aa, Lactobacillus plantarum WCFS1
MANLKIVAVTNCPAGIAHTYMVAEAIEEKAKSLGYEVHVETQGASGVENKLTPEQIATANYVILALGKGMTDEDKQRFNGKRVVELPVSEALKEIDTLFDNIEDRAEIFTASKVKLGSEQDAVTDGIMSYLMAGVSAALPFVIGGGLLIAIGSMMVQFGMPNTPLAKGVSPSLAWVITSIGNLGFTFMIPIMGAYIAFAIGDKPAFAPAFLVTFLANDTDLLGTQSGAGFLGAIVIGLSVGYFVKYFKKVRLGKNFQSILGFMIIPFVTLLVFGLLTYYLLGPFMGWLMSILLAFLKNIPTSMKIGGGFLVGCMLAFDMGGPINKTAWFFSFSLLSSGIYNWYGIVGVVTLLPPMAAAISTWIRPKLFTKQERAASWSAFLVGMTVATEPAIPYALAAPLPMIAANTLAGGITGAITIMLNVERMAPGIGIFDPLIGLEKPWYWFYLSVIIGLVLNVFFIITFKTAWLRRREKKEQEKLAQVDDK

SEQ ID NO: 5543 - DNA, 1734 bp, Vibrio parahaemolyticus RIMD 2210633
  CDS (1)..(1734): transl_table=11
atgaatattgccattattactgcctgccctagtggtgttgctaatagcatccttgcggcgggtctattagaacaagcggtcgctaaactaggttggaacgccaagattgaatgccaatccagtgttattgctccaacgccgctgacagacgctgacattgagcaagctgacgcgatcgtaatcgcggcgaacaccaccgttgatacttctcgtttcgtaggtaaaaaagtctaccaagcagaaatcagcgcggtggcaaaagatgctaccgcattcttaacgaccgcagtcgaaagtgcagcaacacttgaacaagcaaccacagttgaagcgcctgtcgaaagtgcttctgcaaccaagaaaatcgtcgctattacggcatgccctactggtgtggcgcatactttcatggcagcagaagcgttagaagaagaaggcaaacgccgtggtcaccaaattaaggtggaaactcgtggctctgttggcgcgaagaaccaactaactgaccaagaaatcgcagatgcggacttggttatcattgcagcggacatcgaagtgccacttgatcgcttcaacggcaaaaaaatgtaccgtacaaaaactggcccagctctgaagaaaaccgctgaagagatggacaaagcgttcgaacaagccacgatttaccaacattcaggcgctgcaagttctgcttcggcaacagacgagaagaaaggcgcatacaaacacctaatgacgggggtttcgcacatgcttcctgtcgtcgtcgcaggtggtttgatcatcgccctatcgttcgtattcggcattgaagcatttaaagaagaaggtacattggcagccgcactcatgaccatcggcggcggatccgcgtttgcactgatgatccctgtgcttgctggttacattgccttctcaattgctgaccgtccgggtctggctccgggtcttgttggtggtatgttggcaagctctactggcgcaggtttccttggtggtatcgcggctggtttcatcgcaggttacgcagcgaaactcttagcagataaagtaaaacttcctcaatcaatggaagcattgaaaccgattctgatcatcccgtttgttgcgacgctatttacgggccttgtgatgatctacatcgttggtggtccggtttctggcatcatgaatggtctgactgacttcctaaacaacatgggttcagacagcgccgttctacttggtattatccttggcgcaatgatgtgcttcgacttgggtggcccggtaaacaaagcagcttacgcattcggtgtaggtctattggcttctcaaacttacgcaccaatggctgcaatcatggcggcaggtatggtgccggcgctaggtatgggtctggccactttcctagcgaagaacaagtttgaaccaaacgagcgtgaagcgggcaaagcatcattcgtgctaggtctgtgctttatctctgaaggtgcaatcccattcgcagcgaaagacccaatgcgtgtaatcccatcttgtatggctggtggcgctctaacaggtgctctatctatgctattcggcgcgaaactgatggcacctcacggcggactattcgtactgcttatccctaacgcaatttctccagtcttgatgtacttggtagcaattgctgcaggtacggcggtaacaggctttacctatgcattcctaaaaaacaaagcggatgcaaaacaagaagttgctgcataa

SEQ ID NO: 5544 - protein, 577 aa, Vibrio parahaemolyticus RIMD 2210633
MNIAIITACPSGVANSILAAGLLEQAVAKLGWNAKIECQSSVIAPTPLTDADIEQADAIVIAANTTVDTSRFVGKKVYQAEISAVAKDATAFLTTAVESAATLEQATTVEAPVESASATKKIVAITACPTGVAHTFMAAEALEEEGKRRGHQIKVETRGSVGAKNQLTDQEIADADLVIIAADIEVPLDRFNGKKMYRTKTGPALKKTAEEMDKAFEQATIYQHSGAASSASATDEKKGAYKHLMTGVSHMLPVVVAGGLIIALSFVFGIEAFKEEGTLAAALMTIGGGSAFALMIPVLAGYIAFSIADRPGLAPGLVGGMLASSTGAGFLGGIAAGFIAGYAAKLLADKVKLPQSMEALKPILIIPFVATLFTGLVMIYIVGGPVSGIMNGLTDFLNNMGSDSAVLLGIILGAMMCFDLGGPVNKAAYAFGVGLLASQTYAPMAAIMAAGMVPALGMGLATFLAKNKFEPNEREAGKASFVLGLCFISEGAIPFAAKDPMRVIPSCMAGGALTGALSMLFGAKLMAPHGGLFVLLIPNAISPVLMYLVAIAAGTAVTGFTYAFLKNKADAKQEVAA

SEQ ID NO: 5545 - DNA, 1947 bp, Streptococcus pyogenes SSI-1
  CDS (1)..(1947): transl_table=11
atgaaaattcaagatttattgagaaaagatattatgattctcgatttacaggctatttctaaagaagttgccattgacgagatgattactaaattagttgaaaaagatattgtacatgattttgatgtctttaaaaagagtatcatgacacgtgaagaacaaacatcaacagggcttggtgatgggattgccatgcctcattctaaaaatattgtagtagataaaccagcggtcttgtttgcgaaatcaaataaaggtgtggattataaggctttagatggtcaaccaacggatctcttctttatgattgctgcgcctcaaggagcaaatgatactcacttggctgcactagcagaattatcacaataccttttgaaagacggctttgctgataaacttcgtgctgcagcgacaccagaagcagtcattgctgtttttgatgaagcgtcaacagctaaagaagaagtggttgctccaacaagtggtcaagactttatcgttgctgttacagcttgtccgacaggaattgctcacacttatatggcagaagaggctttgaaaaaacaagctgcagaaatgggagtagctattaaagttgaaacaaacggtgcttctggtgtggctaatcgtttaaccgctgaagatattcagagagctaaaggagttattgttgcagctgataaagcggttgaaatggaccgttttgatggtaaacaattcattgctcgccctgttgcagatggtatcaagaaaagtcaggaattgatttctttgattttaaacaatgaaggaaacacttatcatgctaaaaatggaaaatctgaaacagcagtatcaactgagaaaacaagtttaggcggtgctttctataaacacttgatgggcggtgtctcacaaatgttgccatttgttattggtggcgggattatgattgctctagcatttttattggataacatgcttggtgtgccaaatgatcagcttggaggtcttggatcctatcatgaaatagcagctatttttatgaacattggtggagcagccttttctttcatgttaccagtactagcaggttatatcgcttattctattgctgaaaaaccgggcttagtagctggttttgtggcaggtgccattgcctcaaatggtcttgcttttggtaaggtaccatttgcagcaggaggagaagtgagcttgggcttaacgggcgtgccatcaggtttccttggggcgcttgtgggtggtttccttgccggtggtgttattcttgcccttcgtaaattgttggcaggcctaccacgttctctagaaggggttaaatctatcctcctttacccattacttggcgtccttgtcactggtttcttgatgctttttgtcaatattccaatggcagctattaacacagcccttaatgatttcttacaaggtctttcaggaagctctgctgtccttatgggacttcttgttggtggaatgatggctgttgacatgggtggtcctgttaataaggcagcttatgtttttggtacaggaactttagcagctactgtggcaaatggtggttcggtcgttatggccgctgttatggcaggtggtatggtacctcctcttgctgtttttgtagccactctcttgtttaaagataaatttaccaaagaagaacgtgaatcaggcttgacaaatattgttatgggactttcattcatcaccgaaggagcaattccgtttggtgcagctgacccagcacgtgcgattcctagctttatcgcaggttctgccttgacaggagctcttattggtttggctggtattaaattaatggcgccacatggtggtatcttcgtaatcgctttaacaagcaatccaatcttatatcttgtctttgttgtgattggcgcccttgtatcaggtatcttatttggcgctcttcgcaaaaaagcctaa

SEQ ID NO: 5546 - protein, 648 aa, Streptococcus pyogenes SSI-1
MKIQDLLRKDIMILDLQAISKEVAIDEMITKLVEKDIVHDFDVFKKSIMTREEQTSTGLGDGIAMPHSKNIVVDKPAVLFAKSNKGVDYKALDGQPTDLFFMIAAPQGANDTHLAALAELSQYLLKDGFADKLRAAATPEAVIAVFDEASTAKEEVVAPTSGQDFIVAVTACPTGIAHTYMAEEALKKQAAEMGVAIKVETNGASGVANRLTAEDIQRAKGVIVAADKAVEMDRFDGKQFIARPVADGIKKSQELISLILNNEGNTYHAKNGKSETAVSTEKTSLGGAFYKHLMGGVSQMLPFVIGGGIMIALAFLLDNMLGVPNDQLGGLGSYHEIAAIFMNIGGAAFSFMLPVLAGYIAYSIAEKPGLVAGFVAGAIASNGLAFGKVPFAAGGEVSLGLTGVPSGFLGALVGGFLAGGVILALRKLLAGLPRSLEGVKSILLYPLLGVLVTGFLMLFVNIPMAAINTALNDFLQGLSGSSAVLMGLLVGGMMAVDMGGPVNKAAYVFGTGTLAATVANGGSVVMAAVMAGGMVPPLAVFVATLLFKDKFTKEERESGLTNIVMGLSFITEGAIPFGAADPARAIPSFIAGSALTGALIGLAGIKLMAPHGGIFVIALTSNPILYLVFVVIGALVSGILFGALRKKA

SEQ ID NO: 5547 - DNA, 2115 bp, Streptomyces avermitilis MA-4680
  CDS (1)..(2115): transl_table=11
atgagcgagatgatcaccgcggacctggtcgacctcgacctgtccgcccagaccaaagaggcggcggcacgtgccctcgccgagcggatggtggcgaagggccgggtgaccgacctggacggcttcctcgccgacgtcgccgcccgcgaggcgcagatgccgaccggcctcgacggcggcatcggcatcccgcactgccgcagcgaacacgtcaccgagcccacgctggccttcggacgcagcgcggccgggatcgacttcggcgcgccggacggccccgccgacctgatcttcctgatcgccgccccggcaggcgcggacgacgcccacctcaccatcctctcctccctcgcccggcagctgatgaacgccgagttcacctccgcactgcgggccgtggacgacgcggccgccgccgccgcactcatccgcggcgacgagaccccggccgccggcacctccgagaactccgtggcggagccgattgcggcggcctccgccggcaccgccacggagggcacggccccggtgccgggcgcgaccgtcgacgacggttccgccccggcgccgggcgccgccgccaccgacggcgcaccgagcgacaacgacgcgcgtcccttccgtgtcgtcgccgtcacctcctgccccaccggcatcgcgcacacctacatggcggccgagtcgctggagaacgcgggccgcgaggcgggcatcgacatcgtcgtcgagacacagggctcggccggcttcacccgcctcgacccggccgtcatcgcggcggcggacggcgtgatcttcgcgcacgacgtacccgtacgggacaaggaccggttcgccggaaagcccaccgtcgacgtcggagtgaaggccggaatcaaccgtcccgccgcactcctcaccgaggtccgcggcaaggccgagcgcggcgaggtgacctccgggtcggccgccgccacaccggtcgagcgcggcggcgagtcgggcgagggctacggcaccaagctgcgcaagtggctgatgagcggcgtgagctacatggttccgttcgtcgcggccggcggtctgctgatcgccctcggcttcgcgatcggcggctacaagatcaacaaggcgccgtcggtcatggaccacttcctgtggacccaggcggacagctggggcgcgctgttcttccagatcggcgtcgtgtccttcggcttcctcgtcccggtcctggccggctacatcgcgtacggcatggcggaccggccgggtctcgtgcccggcttcgtcggcggcgcgatctccctcaccatcaacgcgggcttcctcggcggcctggccgccggtctcatcgccggtggtgtggtgatcgggatccagaaggtcaagatccccgcggccctgcgcggcgtcatgccggtggtggtgatcccgctgatctccgcggcgatcgtcggattcctgatgttcgtcgtgatcggcaaacccatcgcctcggcccagaagggcatgaccgactggctgaacggcctcaccggcaccaacgccgtcctgctcggcgcgctgctcggcctgatgatgtgcttcgacctcggcggcccggtcaacaaggtcgcgtacaccttcgccaccgccggtatcgcggtcgccggccccagcgactcggcgatgaagatcatggccgcggtgatggcggccggcatggttccgccgctggccatggccctggcaacgaccgtacgcggcaagctcttcacccagaccgagcgcgagaacggcaaggccgcctgggtcctcggcgcctccttcatcaccgaaggcgcgatcccgttcgcggcggcggacccgctgcgcgtcatcccctcggccatggcgggcggtgcggtcaccggcgccctgtccatgacgttcggcgccacgctgcgcgccccgcacggcggcatcttcgtggtcccgctgatcggcaacccgctgctgtacctggtcgccatcgcggcaggtgtctgcgtctccaccgccctggtggtcgccctgaagggcatgcgcaagcagagccccgacgacgtcaccaaggaggccgcacaggcgccgataccggccaagaccgactccaagcagccggtcgcggcctga

SEQ ID NO: 5548 - protein, 704 aa, Streptomyces avermitilis MA-4680
MSEMITADLVDLDLSAQTKEAAARALAERMVAKGRVTDLDGFLADVAAREAQMPTGLDGGIGIPHCRSEHVTEPTLAFGRSAAGIDFGAPDGPADLIFLIAAPAGADDAHLTILSSLARQLMNAEFTSALRAVDDAAAAAALIRGDETPAAGTSENSVAEPIAAASAGTATEGTAPVPGATVDDGSAPAPGAAATDGAPSDNDARPFRVVAVTSCPTGIAHTYMAAESLENAGREAGIDIVVETQGSAGFTRLDPAVIAAADGVIFAHDVPVRDKDRFAGKPTVDVGVKAGINRPAALLTEVRGKAERGEVTSGSAAATPVERGGESGEGYGTKLRKWLMSGVSYMVPFVAAGGLLIALGFAIGGYKINKAPSVMDHFLWTQADSWGALFFQIGVVSFGFLVPVLAGYIAYGMADRPGLVPGFVGGAISLTINAGFLGGLAAGLIAGGVVIGIQKVKIPAALRGVMPVVVIPLISAAIVGFLMFVVIGKPIASAQKGMTDWLNGLTGTNAVLLGALLGLMMCFDLGGPVNKVAYTFATAGIAVAGPSDSAMKIMAAVMAAGMVPPLAMALATTVRGKLFTQTERENGKAAWVLGASFITEGAIPFAAADPLRVIPSAMAGGAVTGALSMTFGATLRAPHGGIFVVPLIGNPLLYLVAIAAGVCVSTALVVALKGMRKQSPDDVTKEAAQAPIPAKTDSKQPVAA

SEQ ID NO: 5549 - DNA, 2049 bp, Mycoplasma gallisepticum R
  CDS (1)..(2049): transl_table=4
atctgtaattttttaatgagcataaaagaaagaggtgatccaaaaaccatggaaattaataagcccgagtttgtctttattaatcttaaacaaaagaatagagacgatatcttaaaagaactagctacacgtgctgttaagcttaatttagctactaatcaagatgagctataccaagcttttttagcaagagaaaaagaatcatccacagctttaccagatctgtttggcatcccccatgctagaactgctacagtcaaacaacccgcattgttgtttgcaaaactacatcaagcagttgaatgggatgaagagaaaaaacaagttcaatatctttttgtaatcttagttccccaagatgcatctaacactcatttagagattatctctaatgttgctaagctcattatggataagaacgctaatcaaaagttgattagctctaataatccagatgagatttccaaattaattgtttcttatttaaattcgtcagctacacaaacaactaataataactctgagaagttaatcttagctttaacagcttgtccagtaggtgtagctcacacttatctagccgctgaaaaactaagtgaagcagcaactaaaatgggttatcgaatcaaagtggaaactcacggatcagttggtgctaaaaacccgtttagtgaagaagagataaagaatgctgatctagtgatcgtggctgctgatattggtttagacacatcacgctttaatcataagcgtgtgttccaaaccacaatcaaaccagctatccacgaacccgaaaaattaattaatgaagcttttaataaagctacaacacttaaccaaaaaggatctaaccaaacaacactaggtcaagatgctaaacgcccagggatcatgcgtcacatcttagctggtgtgtcttatatggtaccttttgttatccttggtgggatctgtattgcaatcgccattggtgttggtaaactaatctatggccaacaatacaatgcagttgaaggcgacttcttcttttatttattaaaaatcggtgtagtcgcattcacattaatgatcggtgctctaggagcatttatagctaattcaattggtggaagagccgctattgctcctgcatttattgtctgtgtcttggcaaatactcctgaagcaatctttcccattgctggtatcaaagtagttacagcaatgggattcattggctcaatcttctttggtttagcaatcggattcactgttaaatgaattaatacttgaagaattaataaagcactagcaccaatcatgcctgtctttgttattcctttaggtgtgggattgttttatgctttaatcgctgtatttgttttaggtgctccaattggatttatcatggataaattcattaaggctcttgaagaagcctttagaaacggtaatattggtattggtttgggaataggtttagggatcttaattggagcaatgacaggatttgatatgggtggtcctgttaacaaagttgctttcttaacttgtgcaaccttaattacttcaaatatctatgagccaatgggaatgatggctgctgccattcccattgccccacttggaatgggattatgtaccttaatcttccgtaagaaatttaatgaaggtgaaaaatcacttggaattagtgcaatcctaatgggaactattgggatctcagaaggagcgattccatttgcagttactgaccctaaaaaagcaatcatctcaaacgtagttggatcagctgttgcgggtgctattgctggtgcatttggtgtaacctgtgctgcagcacacggtggaccaatcgttggtttcttattagcagtatcatctaaccgaccacaaggtttagcttgaggtttatcattcttcttcttagctattattattggtagtttagtaacttgtttcatgtatggtttttgaagaactaaaccagctgaagcaggtgtagtactacctgttaataaatgaactttctgaagaaagaaaaaagctaatcttaatatccaagggtaa

SEQ ID NO: 5550 - protein, 682 aa, Mycoplasma gallisepticum R
MCNFLMSIKERGDPKTMEINKPEFVFINLKQKNRDDILKELATRAVKLNLATNQDELYQAFLAREKESSTALPDLFGIPHARTATVKQPALLFAKLHQAVEWDEEKKQVQYLFVILVPQDASNTHLEIISNVAKLIMDKNANQKLISSNNPDEISKLIVSYLNSSATQTTNNNSEKLILALTACPVGVAHTYLAAEKLSEAATKMGYRIKVETHGSVGAKNPFSEEEIKNADLVIVAADIGLDTSRFNHKRVFQTTIKPAIHEPEKLINEAFNKATTLNQKGSNQTTLGQDAKRPGIMRHILAGVSYMVPFVILGGICIAIAIGVGKLIYGQQYNAVEGDFFFYLLKIGVVAFTLMIGALGAFIANSIGGRAAIAPAFIVCVLANTPEAIFPIAGIKVVTAMGFIGSIFFGLAIGFTVKWINTWRINKALAPIMPVFVIPLGVGLFYALIAVFVLGAPIGFIMDKFIKALEEAFRNGNIGIGLGIGLGILIGAMTGFDMGGPVNKVAFLTCATLITSNIYEPMGMMAAAIPIAPLGMGLCTLIFRKKFNEGEKSLGISAILMGTIGISEGAIPFAVTDPKKAIISNVVGSAVAGAIAGAFGVTCAAAHGGPIVGFLLAVSSNRPQGLAWGLSFFFLAIIIGSLVTCFMYGFWRTKPAEAGVVLPVNKWTFWRKKKANLNIQG

SEQ ID NO: 5551 - DNA, 1902 bp, Vibrio vulnificus YJ016
  CDS (1)..(1902): transl_table=11
atgatcaaccaactgattaatgccaatttaattcagcttgatctgcaagcaaatacaaaacaagccgtttttgaagagctgattgacatcctgcattcgcaaggacgtatttcagataaagcggccttcctgcaagacatccaagcgcgtgaagagttaggcaacactggatttgaagacggcgtcgcgatccctcatgcgaaaagtgccgccgtgacccaacctgccgtcgccattggcgtgagcaaacagggcattgagtacggcgcagaagacggtttgccttccaaactctttttcatgatcgcatcccccgatggaggcgataaccaccatattgaagtgttggctgaactctcttccaagctgatcgaagaaggctttatcgacgcattcctcaatgccgaaaacgccgagcaagcactgcagctattgctgaaaaaggccgaaccagcgccagacacccacccatcggagagcaaagggttgatcatcggtgtgacgggttgccctgcaggtattgcccacacttacctcgcggcagaagcgctggaaaaaggcgcggcggcgttgggctaccaaatcaaagtggaaaccaacggctcgattggggtgaaaaacagcccaaccacagaagaaattgaacgcgcagaggcgattgtcgtcgcgtgtgacaagcaggtcgacatggcgcgctttgctggtaaacgtgttgtcaaaaccaacgtcaaagcacccattcgcgacgctcagaagctgattaatgaagcgttaaacgcgccaagctaccaagccgaaagcgccagcacgcagtcggtggcgaacaaagcgtcccaagcgcgctctgatctctatcgtttcttgatgaacggcgtgtctcacatgatcccattcgtggtcacagggggtcttctgattgccttagcccttgcggtcggcggcgagccaaccgaagcgggcatggcgattcctcccggcagtatgtggaaccaaattcttgaagtgggcgtggttgctttcacactgatgatcccgattttggcgggttacattgcctacgcaatcgcagaccgaccagcactggctccgggtttaatcggtggttggattgcgaacaacggttctttctacggcgctgaagcaggaacaggctttattggtgccatcatcgcaggcttgcttgttggctacttcgttaagtggatcacctcaatcaactaccacaagtttattcaaccacttgttccgatcatgatcgcacctatcaccgcatcgctgttcattgctggtctgttcatctttgtcatcggcgcccctattgccagcttaatggacggtttaaccgccctgctcaccagcatgagtacaggtaacgtgattctgctgggcattgtgctgggtggtatggccggctttgacatgggtggcccattcaacaaagtggcgttcttgttctctgtcggcatgattgccagtggccaaacccaattcatgggcgcgatggcgtgtgccattccggttgcaccacttggcatggcactcgccactgcgatgggtcgcaagttcgatttatttgaatcgtcagaaattgaagcaggtaaagcggcgggcgcaatgggcttagtcggtatctctgaaggggcgattccatttgcggcgcaagatccgatgtcggttattcctgccaacgtgttgggctctatggttgcagcagtgatggcgttctctttcggcatcaccaacagcgtggcgcacggtggccctgtggtagcactgcttggcgcgatgaactacccactacttgcgctggtttgtatggcctcaggtgcgggtgtcactgcgatcacttgtgtgacgctgaagaaaatccgcgcacaaaaactggcggccgcaaccgcttaa

SEQ ID NO: 5552 - protein, 633 aa, Vibrio vulnificus YJ016
MINQLINANLIQLDLQANTKQAVFEELIDILHSQGRISDKAAFLQDIQAREELGNTGFEDGVAIPHAKSAAVTQPAVAIGVSKQGIEYGAEDGLPSKLFFMIASPDGGDNHHIEVLAELSSKLIEEGFIDAFLNAENAEQALQLLLKKAEPAPDTHPSESKGLIIGVTGCPAGIAHTYLAAEALEKGAAALGYQIKVETNGSIGVKNSPTTEEIERAEAIVVACDKQVDMARFAGKRVVKTNVKAPIRDAQKLINEALNAPSYQAESASTQSVANKASQARSDLYRFLMNGVSHMIPFVVTGGLLIALALAVGGEPTEAGMAIPPGSMWNQILEVGVVAFTLMIPILAGYIAYAIADRPALAPGLIGGWIANNGSFYGAEAGTGFIGAIIAGLLVGYFVKWITSINYHKFIQPLVPIMIAPITASLFIAGLFIFVIGAPIASLMDGLTALLTSMSTGNVILLGIVLGGMAGFDMGGPFNKVAFLFSVGMIASGQTQFMGAMACAIPVAPLGMALATAMGRKFDLFESSEIEAGKAAGAMGLVGISEGAIPFAAQDPMSVIPANVLGSMVAAVMAFSFGITNSVAHGGPVVALLGAMNYPLLALVCMASGAGVTAITCVTLKKIRAQKLAAATA

SEQ ID NO: 5553 - DNA, 1899 bp, Listeria monocytogenes str. 4b F2365
  CDS (1)..(1899): transl_table=11
atgagaatcactgatttattaagcaaagatgttatgattatgtcattacaggcaacgacaaaagaagctgccatcgatgaaatgattgcttcgttaaagagcaacgggaaaattaatgatgaggtgctgtttaaagaagctataatgaaccgtgaagcacagagttctactggtgtaggtgaaggaattgcaatgcctcacgcgaaaacaaaagcagtaaatgaaccaactgttgtttttgctaagagtgaaaaaggattggattatgatgctttagatggtcagccagcacacttattctttatgattgctgctccagatggcgctaatgcaactcatttagaaactttagcagctctttctagattattggttcatccagcgtttgtgcaatcgttaagagatgctaaaactccagaggaagtaatcaatttattcaacaatgaacaagaagacgcagaagaaacagtcgttgctccaacctcaaccaatgaaactggtaaatcagtcgtagcagttacagcatgtccaacaggaattgcacatacttatatggctgcagaaaaattacaagaaactgctaataaattaggtgtacgaatcaaagttgagacaaatggctctagaggcgttgaaaaccgtttaacagataaagaaattgcagaagctgatggagttattattgcagctgacgtacaagtagatatgcctcgttttgacgggaagcatttaattgctaaaccagttgcagcgggaattcataaaccagaagaactaattaaagaagcaatttcaggcaatgctccaatttataaagcagaggaaggtagtcaagctacggagagcgcagacggactttctatcggtcaacaaatttataaacatttaatgagcggtgtttctcacatgttgccgtttgtaattggtggaggtatcgctatcgccatcgcgtttatgcttgatcaaatgttaggtgttcctcaagatcaactcgcaaaacttggttcatataacgaaatcccagcactattaaaacaaatcggtgatgttgcattcggcttcatgcttccagtattcgctggatatattgcctacagtatatcggatagaccaggacttgtagcaggttttgttgcaggtggagtagcatctgttggtggtgcaggcttccttggagcacttgttggtggtttccttgcaggttatgcagtagagttaattaaactagcacttaaaaagttaccaaaaacattagacggtatcaaagtagttttattctatccagttttatcggtgttaattgtcggacttttaatgttgctattaaatgtaccaatgagcgcattgaacacttggttgaatgacttcttgaatagtttaagcggaacgaacgcagttattttaggattactgttaggtgcaatgatggcagcggatttaggtggaccaattaataaagctgcttatatatttgcaacgggtacactcgcagctagtgtagcaacaggcggtagcgcaatcatggcagcaacaatggctgctggcatggtaccaccactagcaacgtttgtagcaactcttatttttagaaataaatttacagctcaagaacgtgatgcaggcttaactaactctattttgggtgcttcattcattactgaaggagctattccatttgcagcggccgatccacttcgaatgattccgagttttattgccggaagtgctatcacaggtgcggtagtaatgttcttaaacattaaagtattagcacctcacggaggagtttttgttatcttccttgtatcccaaccttggttctatattattgcaattattattggaacattaatcagcgcaggattaattggtgttctacgtaagaaaccaactgtataa

SEQ ID NO: 5554 - protein, 632 aa, Listeria monocytogenes str. 4b F2365
MRITDLLSKDVMIMSLQATTKEAAIDEMIASLKSNGKINDEVLFKEAIMNREAQSSTGVGEGIAMPHAKTKAVNEPTVVFAKSEKGLDYDALDGQPAHLFFMIAAPDGANATHLETLAALSRLLVHPAFVQSLRDAKTPEEVINLFNNEQEDAEETVVAPTSTNETGKSVVAVTACPTGIAHTYMAAEKLQETANKLGVRIKVETNGSRGVENRLTDKEIAEADGVIIAADVQVDMPRFDGKHLIAKPVAAGIHKPEELIKEAISGNAPIYKAEEGSQATESADGLSIGQQIYKHLMSGVSHMLPFVIGGGIAIAIAFMLDQMLGVPQDQLAKLGSYNEIPALLKQIGDVAFGFMLPVFAGYIAYSISDRPGLVAGFVAGGVASVGGAGFLGALVGGFLAGYAVELIKLALKKLPKTLDGIKVVLFYPVLSVLIVGLLMLLLNVPMSALNTWLNDFLNSLSGTNAVILGLLLGAMMAADLGGPINKAAYIFATGTLAASVATGGSAIMAATMAAGMVPPLATFVATLIFRNKFTAQERDAGLTNSILGASFITEGAIPFAAADPLRMIPSFIAGSAITGAVVMFLNIKVLAPHGGVFVIFLVSQPWFYIIAIIIGTLISAGLIGVLRKKPTV

SEQ ID NO: 5555 - DNA, 1953 bp, Staphylococcus aureus subsp. aureus MRSA252
  CDS (1)..(1953): transl_table=11
atgaaaattgtagctattacctcatgcccaaatggcattgcacatacatatatggctcaagaaaaacttgagcaggtagcaaaagaaatgggtgtggatattaaagtagagacacagggcggtgttggtgctgaaaatgttttaactacgcaagacatcgaagaagctgacggtgtcataattgcagctgataaacaagttgatctgtcccgatttgttggtaaacggttgattaatgaaaatgttcgcgaagggattcataatccgagaggtctaattcaacgtatcattaatcaagatgcgcctatttatcaatctgaaacaaattatcattcgaaagatcgcggtaagtctaaaagtggtattcaaatggtgtatcaacatttaatgaacggtgtatcgtttatggttccttttatcgtagttggtggactccttatcgccatcgcgctgactctaggcggtgaaacgacatcaaaaggattagtcataccggatgattcattttggaaatccattgaaaacattggtagtttagcctttaaatttatggtcccaatactagctggatatatcgctgttagtatcgctgacaagcccggtcttgttcctggtatgattggcggcgctatcgctgctgacggtagtttttatggcagtgatgcaggcgcaggatttttaggtggtattgttgctggtttcttagcaggttatatcgcaaagtggattaaagatattaaagttccaaaagcgatggcaccaattatgcctatcattattattcccattatttcatcggtcgttgtaggattgatatttatatttttaatcggtgcaccaatttctaatatttttgaggcattaacaacctggttaaaaagtatgcaaggtgctaatattattatacttgcgatgataataggtgcgatgatcgccttcgatatgggcggtccagtaaacaaagtagcatttttatttggctcagcacttattgctgaaggtaattacgccgttatgggtatggtcgcagttgctgtatgtacaccaccaatcggtcttggtttagcaacgtttgttcaaaagtataaattcaatcattccgaaagagaaatgggtaaggcttccttcactatgggactatttggtattactgaaggtgctattcctttcgcagctcaagacccactacgcattatacctgctaacatgattggagcgatgattgcatcagtcattgcagccatcggtggtgttggagatagagtggcacatggaggtccaatagtggctgtattaggtggtattgatcatatattatggtttatctttgcagtgatagtaggtagtcttgtcacaatgattactgtactattattaaaacgtcgcacaccagttatagcagtagatgcaccagcgcaacatacgcaacttcatgatacagatataacacaacatgatacagaggttgacaatgtagataacaccgcgaaacattcacatctcaataaaccttctcatgtgtttgatcaacaaactatcattattgctgatcataacatgtctcgaaacgaagcaatcgatacgttgattcatcaacttaaagtgtgccgttatgtagagcacacatcgcatttaaaaaatgcaatcctagaacgtgaaatggagtctacgacagctattggcatgaacgtggccattccacatgcaaagtctgatgttgtaaaacaaccgattgtagctgttatgaaaaataatcatggtgttaaatgggaaagtctagatggtagtctacctcaattgattttcttaattgccgtaccaaacaacagtcaggatacacatttaaaaatacttcagcgcttatctaaagcgttaatgaatgatgagacgcgccaatcactaattaatgcaaacagtactacagaaatttataacttattaatgaaaatatag

SEQ ID NO: 5556 - protein, 650 aa, Staphylococcus aureus subsp. aureus MRSA252
MKIVAITSCPNGIAHTYMAQEKLEQVAKEMGVDIKVETQGGVGAENVLTTQDIEEADGVIIAADKQVDLSRFVGKRLINENVREGIHNPRGLIQRIINQDAPIYQSETNYHSKDRGKSKSGIQMVYQHLMNGVSFMVPFIVVGGLLIAIALTLGGETTSKGLVIPDDSFWKSIENIGSLAFKFMVPILAGYIAVSIADKPGLVPGMIGGAIAADGSFYGSDAGAGFLGGIVAGFLAGYIAKWIKDIKVPKAMAPIMPIIIIPIISSVVVGLIFIFLIGAPISNIFEALTTWLKSMQGANIIILAMIIGAMIAFDMGGPVNKVAFLFGSALIAEGNYAVMGMVAVAVCTPPIGLGLATFVQKYKFNHSEREMGKASFTMGLFGITEGAIPFAAQDPLRIIPANMIGAMIASVIAAIGGVGDRVAHGGPIVAVLGGIDHILWFIFAVIVGSLVTMITVLLLKRRTPVIAVDAPAQHTQLHDTDITQHDTEVDNVDNTAKHSHLNKPSHVFDQQTIIIADHNMSRNEAIDTLIHQLKVCRYVEHTSHLKNAILEREMESTTAIGMNVAIPHAKSDVVKQPIVAVMKNNHGVKWESLDGSLPQLIFLIAVPNNSQDTHLKILQRLSKALMNDETRQSLINANSTTEIYNLLMKI

SEQ ID NO: 5557 - DNA, 1728 bp, Acinetobacter sp. ADP1
  CDS (1)..(1728): transl_table=11
ctgatgcaaacacttaaatctcttttatttgtgatcaatagcacgcaacagtatgtcaatgcttcgattttggcaaagaaattaacgcaagctgctgctaaatcggggctggaaagtaaaacaataacaattaaagattcagttccaaatcaagaatttgatttggttatctttattggtcagctacccaagaatctttcaacattcaatgctgtaaaattttctcagattgatcttggaaatgccaatcaaaatgcggatgaagtacttcaacaggcatttcagcattcaaaaagcccagatgaactcaacgctaccacgtccaattcggctcagaaagcccaacgttttgtagcgattacggcctgtccaacaggtgtagcacacacgtttatggccgcagaagccttacagcaaggcgcggatagactcggttacatcattgatgtagaaacacaaggctctgttggagcaaaaaatattctatctgccgaagccattgaagccgcagatattgtcattttggcaacagatatcgaagtcaatacagatcgttttgtaggtaaacgggtttaccgttgcagcacaggttttgctttaaaacaaacagataaagcttttgatcaggcaattgccgaagcaaaactacttgaatcatccaagcaagcatctagcaatgccacaggctctaccaacaaagaaaaaacaggcatttataaacacttattgactggtgtttcttttatgcttccaatggtggtggcaggtggcttgctcattgcactttcactctgttttggtttaaatgctgccgaacaaagcggtagcttggcctatgtattaaaacaaattggggttacagcatttaccctaatggttcccatgctttctggatatattgcgtattcaattgcagatcgtccaggtttgaccccaggcctgattggtggactcctcgcaactcaattacaagcaggctttcttggtgggattgtttctggatttctggcaggatacattgcattattccttgccaaaaaaatcaagctcccaacgagccttgaatcattaaagccaattctgattgtacctttgctcggaacactttctgtcggtctgatcatgtattatgtcgttggtcatccagtggctcagatctttgagatgatgaaagacttcctaaataacatgggtaccaccaatgctgtattaatgggcattgtacttgcctcaatgatgtgtatcgaccttggtggtccaatcaataaagcagcctacgcgtttaccgtaggtctactgaccaccaacacgtatatgccgatggcagcaacaatggcaggcggtatggttcctgcaattggtatggctttagcaaccttttttgccaaaaacaaatttaatataggtgagcgcgatgcaggtaaagccgcatttgtattaggtctttgctttatttccgagggtgcaattccttttgctgcaaaagatccaatgcgtgttatccccacttgtattgcgggtggcgccgttactggtgctttggttgcgctattccattgtgagctggtaacaccacatggcggggtatttgtactactcattccaaatgcgattaaccatgcttggttatatctgattgcaattgcagcaggcagtttggttacaggtattagttatgctgttttaaaacgtcgtgagacgacagcattacaaagtcaaactgtataa

SEQ ID NO: 5558 - protein, 575 aa, Acinetobacter sp. ADP1
MMQTLKSLLFVINSTQQYVNASILAKKLTQAAAKSGLESKTITIKDSVPNQEFDLVIFIGQLPKNLSTFNAVKFSQIDLGNANQNADEVLQQAFQHSKSPDELNATTSNSAQKAQRFVAITACPTGVAHTFMAAEALQQGADRLGYIIDVETQGSVGAKNILSAEAIEAADIVILATDIEVNTDRFVGKRVYRCSTGFALKQTDKAFDQAIAEAKLLESSKQASSNATGSTNKEKTGIYKHLLTGVSFMLPMVVAGGLLIALSLCFGLNAAEQSGSLAYVLKQIGVTAFTLMVPMLSGYIAYSIADRPGLTPGLIGGLLATQLQAGFLGGIVSGFLAGYIALFLAKKIKLPTSLESLKPILIVPLLGTLSVGLIMYYVVGHPVAQIFEMMKDFLNNMGTTNAVLMGIVLASMMCIDLGGPINKAAYAFTVGLLTTNTYMPMAATMAGGMVPAIGMALATFFAKNKFNIGERDAGKAAFVLGLCFISEGAIPFAAKDPMRVIPTCIAGGAVTGALVALFHCELVTPHGGVFVLLIPNAINHAWLYLIAIAAGSLVTGISYAVLKRRETTALQSQTV

SEQ ID NO: 5559 - DNA, 1560 bp, Propionibacterium acnes KPA171202
  CDS (1)..(1560): transl_table=11
atggaggtcggcagcaaccattccagcgctcgctggcagccgggcgagcgcgtcccctcaacaaggagaacgatgaagaaatacgtcggaatcacagcatgtccgaccggtattgcccacacctacatggctgccgagaagctggaggaaaccgccaaggagaccggtaaccagatcaaggttgagacccagggatcgattggtgttgagaatgagctcacagctgatgacattcgcgaggctgatgctgtggttgttgccgccgacactgaggtcgatctgtcccgcttcgacggcaagcgggtcctggtaaccggcgttcaggacggtatttcacgcccagccgagcttttggaacaggccttaaccgctccgacccgtgggggcgctggggctgccgaaccttccgacgagccagccgccgaaacgggaactacctcggccagtaaggatggcaaggagtccgttggtcacaccttgtacaccgccctcatggctggcgtgtcccacatgatcccgtttgtggtctgcggcggcatcatgattgctctggctttgggcatcggtggtaaacccactgctggtggcgtcgccgttcctgaggacagtttctggcagactatcctgcaagttggcacgttggccttctccctcatgatcccgatactcgccggtttcatcgcccaggccattgctgaccgtcctggtcttgtcgtcggtatggtctccggtttcatcgccaatagcggcgcacagtttccctacctgacaacaacaggccccggtggcacaaagaccggcctcaataccggatttatcggtgccatcgttatcggcttcatcgctggctacgtcgccaagtggatgaggaagatcccgtggcacgagtacgtcaagccgatcgtgccgatcctgatcgtcccgattttcggcactgcgatcgtctcgctgctgtacgtctatgtgctcggccgtccgctagctgccctgtttaacgggttaacccacttcctggccagcatgacaacgtcgtcgataaccgtcctcgctatcatcattggcctcatggtcagcttcgatatgggcggtccagtcaataaggtcgccttcctcttcgccgggggcatgattgccgttgatcagggcaaggtcatgggactggccgcggctgccatcccggttgccccgctcggcatgggcctggccactctcatcgatcgtcgtctgttcaccaagcaagagcgtgacgccggtattgctgccctctttatgggcttgtttggcatcaccgaaggtgcgatcccctttgccgcggctgacccagcccgcgtgatcccgtcgaacatggtgggtggagccgttgccgctgtgctggctggcatgtttggcgttcatgacgtcgtcatgcatggcggtccgattgtcggtgttctcggagcgtgcaaacctctgcttgggttctttacggcgatcctcattggcgctttggtgacggctttcatgtccctggccctcaagagaattaccgcccgcaagaaggatcgcgctgtcaccgcgtga

SEQ ID NO: 5560 - protein, 519 aa, Propionibacterium acnes KPA171202
MEVGSNHSSARWQPGERVPSTRRTMKKYVGITACPTGIAHTYMAAEKLEETAKETGNQIKVETQGSIGVENELTADDIREADAVVVAADTEVDLSRFDGKRVLVTGVQDGISRPAELLEQALTAPTRGGAGAAEPSDEPAAETGTTSASKDGKESVGHTLYTALMAGVSHMIPFVVCGGIMIALALGIGGKPTAGGVAVPEDSFWQTILQVGTLAFSLMIPILAGFIAQAIADRPGLVVGMVSGFIANSGAQFPYLTTTGPGGTKTGLNTGFIGAIVIGFIAGYVAKWMRKIPWHEYVKPIVPILIVPIFGTAIVSLLYVYVLGRPLAALFNGLTHFLASMTTSSITVLAIIIGLMVSFDMGGPVNKVAFLFAGGMIAVDQGKVMGLAAAAIPVAPLGMGLATLIDRRLFTKQERDAGIAALFMGLFGITEGAIPFAAADPARVIPSNMVGGAVAAVLAGMFGVHDVVMHGGPIVGVLGACKPLLGFFTAILIGALVTAFMSLALKRITARKKDRAVTA

SEQ ID NO: 5561 - DNA, 1947 bp, Streptococcus pyogenes MGAS10394
  CDS (1)..(1947): transl_table=11
atgaaaattcaagatttattgagaaaagatattatgattctcgatttacaggctatttctaaagaagttgccattgacgagatgattactaaattagttgaaaaagatattgtacatgattttgatgtctttaaaaagagtatcatgacacgtgaagaacaaacatcaacagggcttggtgatgggattgccatgcctcattctaaaaatattgtagtagataaaccagcggtcttgtttgcgaaatcaaataaaggtgtggattataaggctttagatggtcaaccaacggatctcttctttatgattgctgcgcctcaaggagcaaatgatactcacttggctgcgctagcagaattatcacaataccttttgaaagacggctttgctgataaacttcgtgctgcagcgacaccagaagcagtcattgctgtttttgatgaagcgtcaacagctaaagaagaagtggttgctccaacaagtggtcaagactttatcgttgctgttacagcttgtccgacaggaattgctcacacttatatggcagaagaggctttgaaaaaacaagctgcagaaatgggagtagctattaaagttgaaacaaacggtgcttctggtgtggctaatcgtttaaccgctgaagatattcagagagctaaaggagttattgttgcagctgataaagcggttgaaatggaccgttttgatggtaaacaattcattgctcgccctgttgcagatggtatcaagaaaagtcaggaattgatttctttgattttgaataatgaaggacacacttaccacgctaagaacagaaagtctgaaacagcagtatcatctgagaaaacaagcttaggcggtgctttctataaacacttgatgggtggtgtctcacaaatgttgccatttgttattggtggcgggattatgattgctctagcatttttattggataacatgcttggtgtgccaaatgatcagcttggaagtcttggatcctatcatgaaatagcagctatttttatgaacattggtggagcagccttttccttcatgttaccagtactagcaggttatatcgcttattctattgctgaaaaaccgggcttagtagctggttttgtggcaggtgccattgcctcaagtggtcttgcttttggtaaggtaccatttgcagcaggaggagaagtgagcttgggattaacgggcgtgccatcaggtttccttgggacgcttgtgggtggtttccttgccggtggtgttattcttgcccttcgtaaattgttggcaggcctaccacgttctctagaaggggttaaatctatcctcctttacccattacttggcgtccttgtcactggtttcttgatgctttttgtcaatattccaatggcagctattaacacagctcttaatgatttcttacaaggtctttcaggaagctctgctgtccttatgggacttcttgttggtggaatgatggctgttgacatgggtggtcctgttaataaggcagcttatgtttttggtacaggaactttagcagctactgtggcaaatggtggttcggtcgttatggccgctgttatggcaggtggtatggtacctcctcttgctgtttttgtagccactctcttgtttaaagataaatttaccaaagaagaacgcgaatcaggtttgaccaacattgtcatgggactttctttcatcactgaaggagcaatcccgtttggcgcagctgacccagcgcgtgcaattcctagctttattgctggttctgccttgacaggagctcttgttggtttggctggcattaaattaatggcgccacatggtggtatcttcgtaatcgctttaacaagcaatccaatcttatatcttgtctttgttgtgattggtgcccttgtatcaggtatcttatttggcgctcttcgcaaaaaagcctaa

SEQ ID NO: 5562 - protein, 648 aa, Streptococcus pyogenes MGAS10394
MKIQDLLRKDIMILDLQAISKEVAIDEMITKLVEKDIVHDFDVFKKSIMTREEQTSTGLGDGIAMPHSKNIVVDKPAVLFAKSNKGVDYKALDGQPTDLFFMIAAPQGANDTHLAALAELSQYLLKDGFADKLRAAATPEAVIAVFDEASTAKEEVVAPTSGQDFIVAVTACPTGIAHTYMAEEALKKQAAEMGVAIKVETNGASGVANRLTAEDIQRAKGVIVAADKAVEMDRFDGKQFIARPVADGIKKSQELISLILNNEGHTYHAKNRKSETAVSSEKTSLGGAFYKHLMGGVSQMLPFVIGGGIMIALAFLLDNMLGVPNDQLGSLGSYHEIAAIFMNIGGAAFSFMLPVLAGYIAYSIAEKPGLVAGFVAGAIASSGLAFGKVPFAAGGEVSLGLTGVPSGFLGTLVGGFLAGGVILALRKLLAGLPRSLEGVKSILLYPLLGVLVTGFLMLFVNIPMAAINTALNDFLQGLSGSSAVLMGLLVGGMMAVDMGGPVNKAAYVFGTGTLAATVANGGSVVMAAVMAGGMVPPLAVFVATLLFKDKFTKEERESGLTNIVMGLSFITEGAIPFGAADPARAIPSFIAGSALTGALVGLAGIKLMAPHGGIFVIALTSNPILYLVFVVIGALVSGILFGALRKKA

SEQ ID NO: 5563 - DNA, 1374 bp, Symbiobacterium thermophilum IAM 14863
  CDS (1)..(1374): transl_table=11
gtggctctcgtggcgaagaagctggttgccgttacctcttgccccaccggaatcgcccacacgtacatggcggctgaggccctgcagaaggccgccgcggccaggcagctgagcatcaaggtcgagacccggggctccatcggcgccgagaacgtgctgaccgacgaggatatccgcgaggccgacgccgtcatcatcgcggcggacacggcggtcgacacgggccgcttcgccggcaagccgctggtgaaggtcggcgtgagcgaggcgatcaaggaccccgccgggctcatcgaccgggcgctcgcggccaagccgcaggacctggtggcccgggttgaggagatcaagcaggagcggaagtcccaggccaccggctggtataagcacctgatgaccggcgtgtcgtacatgatccccttcaccgtggccggcggcatcctgatcgccatctcgttcatgttcggcatcgaggcggccgcgacggaaggcacgttcgcctacgtgctcaacgtcatcggcgggcaggccggcttcggctttatgatcccgatcctggcaggcttcatcgcctactccatcgcggaccgtcccggcatcgcccccggcatggcggcgggcttcctggccaactccgtcggggccggcttcctcggggcgatcgtcggcggcttcctggccggctacctggtctactacctgaacaagtggatccggctgccccgcaccctggagggcatcaagccggtgctcgtcctgccgctcctgggcgtgggcatcacgggcctcatcatggtgtacgtcctcaacgagcccatggcggcgatcatggcgggcctgcagaactggctgacggggctgaggggcggctccgccgtggtgctgggcttcatcctgggcgccatgatggcgtttgacatgggcggcccggtcaacaaggcggcgtacgccttcagcaccggcctgctcgcctcgcagatctacgagcccatggccgccgtcatggccgccggcatgaccccgccgctgggcctgttcctggccacgctcctggcgccgaagaagtacaccggcgaggagcgggaggcgggcaaggccgccgcggtgctgggcatcagcttcatcaccgaaggtgcgatcccgtttgccgcggcggacccgttccgggtcatccccgccatcatggccggctcggccgtgaccggcgctctttcgatgctgttcgggtgccagctgaaggtgccccacggcggcatctgggtgctgccgatgggcaacgtcgtcaccaacctgggcatgtacgcggtggcgatcgtcgtcggcaccgtgatcacggcgctgctggtgaacctgctgaagccgaacaaggagtaa

SEQ ID NO: 5564 - protein, 457 aa, Symbiobacterium thermophilum IAM 14863
MALVAKKLVAVTSCPTGIAHTYMAAEALQKAAAARQLSIKVETRGSIGAENVLTDEDIREADAVIIAADTAVDTGRFAGKPLVKVGVSEAIKDPAGLIDRALAAKPQDLVARVEEIKQERKSQATGWYKHLMTGVSYMIPFTVAGGILIAISFMFGIEAAATEGTFAYVLNVIGGQAGFGFMIPILAGFIAYSIADRPGIAPGMAAGFLANSVGAGFLGAIVGGFLAGYLVYYLNKWIRLPRTLEGIKPVLVLPLLGVGITGLIMVYVLNEPMAAIMAGLQNWLTGLRGGSAVVLGFILGAMMAFDMGGPVNKAAYAFSTGLLASQIYEPMAAVMAAGMTPPLGLFLATLLAPKKYTGEEREAGKAAAVLGISFITEGAIPFAAADPFRVIPAIMAGSAVTGALSMLFGCQLKVPHGGIWVLPMGNVVTNLGMYAVAIVVGTVITALLVNLLKPNKE

SEQ ID NO: 5565 - DNA, 1953 bp, Staphylococcus aureus subsp. aureus COL
  CDS (1)..(1953): transl_table=11
atgaaaattgtagctattacctcatgcccaaatggcattgcacatacatatatggctcaagaaaagcttgagcaggtagcaaaagaaatgggtgtggatattaaagtagagacacagggcggtgttggtgctgaaaatgttttaactacgcaagacatcgaagaagctgacggtgtcataattgcagctgataaacaagttgatctgtcccgatttgttggtaaacggttgattaatgaaaatgttcgcgaagggattcataatccgagaggtctaattcaacgtatcattaatcaagatgcgcctatttatcaatctgaaacaaattatcattcgaaagatcgcggtaagtctaaaagtggtattcaaatggtgtatcaacatttaatgaacggtgtatcgtttatggttccttttatcgtagttggtggactccttatcgccatcgcgctgactctaggcggtgaaacgacatcaaaaggattagtcatcccagatgattcattttggaaatccattgaaaacattggtagtttagcctttaaatttatggttccaatactagctggatatatcgctgttagtatcgctgacaagcccggtcttgttcctggtatgattggcggcgctatcgctgctgacggtagtttttatggcagtgatgcaggcgcaggatttttaggtggtattgttgctggtttcttagcaggttatatcgcaaagtggattaaagatattaaagttccaaaagcaatggcaccaattatgcctatcattattattcccattatttcatcggtcgttgtaggattgatatttatatttttaatcggtgcaccaatttctaatatttttgaggcattaacaacctggttaaaaagtatgcaaggtgctaatattattatacttgcgatgattataggtgcgatgattgccttcgatatgggcggtccagtaaacaaggtagcatttttatttggctcagcacttattgctgaaggtaattacgccgttatgggtatggtcgcagttgctgtatgtacaccaccaatcggtttaggtttagcaacgtttgttcaaaagtataaattcaatcattccgaaagagaaatgggtaaggcttccttcactatgggactatttggtattactgaaggtgctattcctttcgcagcccaagatccattgcgcattatacctgcaaacatcattggtgcaatgattgcatcagtcattgcagccattggtggtgtcggcgatagagtcgcacatggaggtccaatcgtggctgtattaggtggtattgatcatgtattatggtttatctttgcagtgatagtaggtagtcttgtcacaatgactactgtactattattaaaacgcaatacaccagttatagcagtagatgcaccagcgcaacacacgcaacttcatgatacagatattacacaacatgatacagaggttgacaatgtagataacaccgcgaaacattcacatctcaataaaccttctcatgtttttgatcaacaaactatgataattactgatcacgacatgtctcgaaacgaagcaattgatatgttgattcataaacttaaaatttgccgttatgtagagcacacatcgcatttaaaaaatgcaatactagaacgtgaaatggagtctacgacagctattggcatgaacgtggccattccacatgcaaagtctgatgttgtaaaacaaccgattgtagctgttatgaaaaataatcatggtgttaaatgggacagtctagatggtagtctacctcaattgatattcttaattgccgtaccaaacaacagtcaggatacacatttaaaaatacttcagcgcttatctaaagcgttaatgaatgatgagacacgccaatcactaattaatgcaaacagtactacagaaatttataacttattaatgaaaatatag

SEQ ID NO: 5566 - protein, 650 aa, Staphylococcus aureus subsp. aureus COL
MKIVAITSCPNGIAHTYMAQEKLEQVAKEMGVDIKVETQGGVGAENVLTTQDIEEADGVIIAADKQVDLSRFVGKRLINENVREGIHNPRGLIQRIINQDAPIYQSETNYHSKDRGKSKSGIQMVYQHLMNGVSFMVPFIVVGGLLIAIALTLGGETTSKGLVIPDDSFWKSIENIGSLAFKFMVPILAGYIAVSIADKPGLVPGMIGGAIAADGSFYGSDAGAGFLGGIVAGFLAGYIAKWIKDIKVPKAMAPIMPIIIIPIISSVVVGLIFIFLIGAPISNIFEALTTWLKSMQGANIIILAMIIGAMIAFDMGGPVNKVAFLFGSALIAEGNYAVMGMVAVAVCTPPIGLGLATFVQKYKFNHSEREMGKASFTMGLFGITEGAIPFAAQDPLRIIPANIIGAMIASVIAAIGGVGDRVAHGGPIVAVLGGIDHVLWFIFAVIVGSLVTMTTVLLLKRNTPVIAVDAPAQHTQLHDTDITQHDTEVDNVDNTAKHSHLNKPSHVFDQQTMIITDHDMSRNEAIDMLIHKLKICRYVEHTSHLKNAILEREMESTTAIGMNVAIPHAKSDVVKQPIVAVMKNNHGVKWDSLDGSLPQLIFLIAVPNNSQDTHLKILQRLSKALMNDETRQSLINANSTTEIYNLLMKI

SEQ ID NO: 5567 - DNA, 1389 bp, Moorella thermoacetica ATCC 39073
  CDS (1)..(1389): transl_table=11
atgaaaaaaatagttgctgttacttcctgcccgacaggaatagcccacacctatatggcagcggaagctttgcaaaaggcagctaaagaacagggagtggcgataaaagtagaaacccgtgggtctattggggttgaaaatgaactgacgccagcagatatcgaagaggccgtggcagttattatagctgcagatgctaaagtagatgaggaaaaatttcaagggaagcccatagttaggtcttcaacgggagaagctattaaaaatgctaaaactttgatagacaaaactttaagcttggagggtaaagcgtcctcaaggcaaattactgattttattcgtgaggtcgagcagcgcaaaagtgagcggaggtcccaggctactggtttttataaacacttaatgacaggcgtatcgtatatgataccctttgtggtagcaggtggaataatcattgctctttccttcatatttggtatcgaggcctttaagcaagagggtactttagccgccaaccttatgcgtattggtggcggttcagcttttgccttaatggtgccaatactggcagggtatattgcattttccattgctgatcggccgggcctggctccaggaattataggaggtatgctggctactcaaatgggggcaggttttctgggaggaattgttgctggatttctggctggttatgtggccaaatttttacgagataatattaagctccctgcgggtctggaaggattaaaaccggtattaataattccactaatttctactttaatagtgggtttgttgttaatctacgttataggaactcccgtaaaagttataatggatggtcttgaacattggttgacgtcaatgagcagaggcaatgctgttattttaggctttattctaggtgctatgatggccttagatatgggaggaccggtaaacaaagcggcttatacctttgcggttgggttgcttggtagcaatatttatgagccccaggctgcggttatggctgccggcatgacgcctcctttaggtttagctctagctactttgctgttccctaaaaagtttactagcgaagaaagagaggctggtaaggcagcagcagttttagggatttcttttattaccgaaggcgctattccctttgctgcatctgatcctttcagggtgattccatctattgtggcaggttcagccgtagctggtgctctctccatggcttttaatgcaaccctgagggcgccacatggaggcattttcgtccttgccatccctaatgcagtagggcacttaggattatatagcctgtctattgccattggtaccctcgtcacggctttaatggtgtcacttttgaaacccaacaaagaaataaaataa

SEQ ID NO: 5568 - protein, 462 aa, Moorella thermoacetica ATCC 39073
MKKIVAVTSCPTGIAHTYMAAEALQKAAKEQGVAIKVETRGSIGVENELTPADIEEAVAVIIAADAKVDEEKFQGKPIVRSSTGEAIKNAKTLIDKTLSLEGKASSRQITDFIREVEQRKSERRSQATGFYKHLMTGVSYMIPFVVAGGIIIALSFIFGIEAFKQEGTLAANLMRIGGGSAFALMVPILAGYIAFSIADRPGLAPGIIGGMLATQMGAGFLGGIVAGFLAGYVAKFLRDNIKLPAGLEGLKPVLIIPLISTLIVGLLLIYVIGTPVKVIMDGLEHWLTSMSRGNAVILGFILGAMMALDMGGPVNKAAYTFAVGLLGSNIYEPQAAVMAAGMTPPLGLALATLLFPKKFTSEEREAGKAAAVLGISFITEGAIPFAASDPFRVIPSIVAGSAVAGALSMAFNATLRAPHGGIFVLAIPNAVGHLGLYSLSIAIGTLVTALMVSLLKPNKEIK

SEQ ID NO: 5569 - DNA, 1953 bp, Staphylococcus aureus subsp. aureus NCTC 8325
  CDS (1)..(1953): transl_table=11
atgaaaattgtagctattacctcatgcccaaatggcattgcacatacatatatggctcaagaaaagcttgagcaggtagcaaaagaaatgggtgtggatattaaagtagagacacagggcggtgttggtgctgaaaatgttttaactacgcaagacatcgaagaagctgacggtgtcataattgcagctgataaacaagttgatctgtcccgatttgttggtaaacggttgattaatgaaaatgttcgcgaagggattcataatccgagaggtctaattcaacgtatcattaatcaagatgcgcctatttatcaatctgaaacaaattatcattcgaaagatcgcggtaagtctaaaaatggtattcaaatggtgtatcaacatttaatgaacggtgtatcgtttatggttccttttatcgtagttggtggactccttatcgccatcgcgctgactctaggcggtgaaacgacatcaaaaggattagtcatcccagatgattcattttggaaatccattgaaaacattggtagtttagcctttaaatttatggttccaatactagctggatatatcgctgttagtatcgctgacaagcccggtcttgttcctggtatgattggcggcgctatcgctgctgacggtagtttttatggcagtgatgcaggcgcaggatttttaggtggtattgttgctggtttcttagcaggttatatcgcaaagtggattaaagatattaaagttccaaaagcaatggcaccaattatgcctatcattattattcccattatttcatcggtcgttgtaggattgatatttatatttttaatcggtgcaccaatttctaatatttttgaggcattaacaacctggttaaaaagtatgcaaggtgctaatattattatacttgcgatgattataggtgcgatgattgccttcgatatgggcggtccagtaaacaaggtagcatttttatttggctcagcacttattgctgaaggtaattacgccgttatgggtatggtcgcagttgctgtatgtacaccaccaatcggtttaggtttagcaacgtttgttcaaaagtataaattcaatcattccgaaagagaaatgggtaaggcttccttcactatgggactatttggtattactgaaggtgctattcctttcgcagcccaagatccattgcgcattatacctgcaaacatcattggtgcaatgattgcatcagtcattgcagccattggtggtgtcggcgatagagtcgcacatggaggtccaatcgtggctgtattaggtggtattgatcatgtattatggtttatctttgcagtgatagtaggtagtcttgtcacaatgactactgtactattattaaaacgcaatacaccagttatagcagtagatgcaccagcgcaacacacgcaacttcatgatacagatattacacaacatgatacagaggttgacaatgtagataacaccgcgaaacattcacatctcaataaaccttctcatgtttttgatcaacaaactatgataattactgatcacgacatgtctcgaaacgaagcaattgatatgttgattcataaacttaaaatttgccgttatgtagagcacacatcgcatttaaaaaatgcaatactagaacgtgaaatggagtctacgacagctattggcatgaacgtggccattccacatgcaaagtctgatgttgtaaaacaaccgattgtagctgttatgaaaaataatcatggtgttaaatgggacagtctagatggtagtctacctcaattgatattcttaattgccgtaccaaacaacagtcaggatacacatttaaaaatacttcagcgcttatctaaagcgttaatgaatgatgagacacgccaatcactaattaatgcaaacagtactacagaaatttataacttattaatgaaaatatag

SEQ ID NO: 5570 - protein, 650 aa, Staphylococcus aureus subsp. aureus NCTC 8325
MKIVAITSCPNGIAHTYMAQEKLEQVAKEMGVDIKVETQGGVGAENVLTTQDIEEADGVIIAADKQVDLSRFVGKRLINENVREGIHNPRGLIQRIINQDAPIYQSETNYHSKDRGKSKNGIQMVYQHLMNGVSFMVPFIVVGGLLIAIALTLGGETTSKGLVIPDDSFWKSIENIGSLAFKFMVPILAGYIAVSIADKPGLVPGMIGGAIAADGSFYGSDAGAGFLGGIVAGFLAGYIAKWIKDIKVPKAMAPIMPIIIIPIISSVVVGLIFIFLIGAPISNIFEALTTWLKSMQGANIIILAMIIGAMIAFDMGGPVNKVAFLFGSALIAEGNYAVMGMVAVAVCTPPIGLGLATFVQKYKFNHSEREMGKASFTMGLFGITEGAIPFAAQDPLRIIPANIIGAMIASVIAAIGGVGDRVAHGGPIVAVLGGIDHVLWFIFAVIVGSLVTMTTVLLLKRNTPVIAVDAPAQHTQLHDTDITQHDTEVDNVDNTAKHSHLNKPSHVFDQQTMIITDHDMSRNEAIDMLIHKLKICRYVEHTSHLKNAILEREMESTTAIGMNVAIPHAKSDVVKQPIVAVMKNNHGVKWDSLDGSLPQLIFLIAVPNNSQDTHLKILQRLSKALMNDETRQSLINANSTTEIYNLLMKI

SEQ ID NO: 5571 - DNA, 1899 bp, Listeria monocytogenes str. 1/2a F6854
  CDS (1)..(1899): transl_table=11
atgagaatcactgatttattaagcaaagatgttatgattatgtcattacaggcaacgacaaaagaagctgctatcgatgaaatgattgcttcgttaaagagcaacgggaaaattaatgatgaggtgctatttaaagaagctataatgaaccgtgaagcacagagttctactggtgtaggtgaaggaattgcaatgcctcacgcgaaaacaaaagcagtaaatgaaccaactgttgtttttgctaagagtgagaagggattggactatgatgctttagatggtcagccagcacacttattctttatgattgctgccccagatggcgctaatgcaactcatttagaaactttagcagcgctttctagactattggttcatccagcatttgttcaatcgttaagagatgctaaaactccagaggaagtaatcaatttattcaacaatgaacaagaagactcagaagaaacagttgttgctccaacctcaaccaatgatactggtaaatcagtcgtagcagttacagcatgtccaacaggaattgcacatacttatatggctgcagaaaaattacaagaaactgctaataaattaggtgtacgaatcaaagttgagacaaatggttctagaggcgttgaaaaccgtttaacagataaagaaattgcagaagctgatggggttattattgcagctgatgtacaagtagatatgcctcgttttgacgggaagcatttaattgctaaaccggttgcagcgggaattcataaaccagaagagctaattaaagaagcaatttcaggcaatgctccaatttataaagcagaggaaggtagtcaagctacggagagcgcagacggactttctatcggtcaacaaatttataaacatttaatgagcggtgtttctcacatgttgccgtttgtaattggtggaggtatcgctatcgccatcgcgtttatgctcgatcaaatgttaggtgttcctcaagatcaactcgcaaaacttggttcatataacgaaatcccagcactattaaaacaaatcggtgatgttgcattcggcttcatgcttccagtattcgctggatatattgcctacagtatatcggatagaccaggacttgtagcaggttttgtagcaggtggagtagcatctgttggtggtgcaggcttccttggagcacttgttggtggtttccttgcaggttatgcagtagaattaattaaactagcacttaaaaagttaccaaaaacattagacggtatcaaagtagttttattctatccagttttatcggtgttaattgtcggacttttaatgttgctattaaatgtaccaatgagcgcattgaacacttggttgaatgacttcttgaatagtttaagcggaacgaacgcagttattttaggattactgttaggtgcaatgatggcagcggatttaggtggaccaattaataaagctgcttatatatttgcaacgggtacactcgcagctagtgtagcaacaggcggtagtgcaatcatggcagcaacaatggctgctggtatggtaccaccactagcaacatttgtagcaactcttatttttagaaataaatttacagctcaagaacgtgatgcaggcttaactaactctattttgggtgcttcattcattactgaaggagctataccatttgcagccgcagatccacttcgaatgattccgagttttattgccggaagtgccatcacaggtgcaatagtaatgttcttaaacattaaagtattagcacctcacggaggagtttttgttatcttccttgtatcccaaccgtggttctatattattgcaattattattggaacattaatcagcgcaggattaattggtgttctacgtaagaaaccaactgtataa

SEQ ID NO: 5572 - protein, 632 aa, Listeria monocytogenes str. 1/2a F6854
MRITDLLSKDVMIMSLQATTKEAAIDEMIASLKSNGKINDEVLFKEAIMNREAQSSTGVGEGIAMPHAKTKAVNEPTVVFAKSEKGLDYDALDGQPAHLFFMIAAPDGANATHLETLAALSRLLVHPAFVQSLRDAKTPEEVINLFNNEQEDSEETVVAPTSTNDTGKSVVAVTACPTGIAHTYMAAEKLQETANKLGVRIKVETNGSRGVENRLTDKEIAEADGVIIAADVQVDMPRFDGKHLIAKPVAAGIHKPEELIKEAISGNAPIYKAEEGSQATESADGLSIGQQIYKHLMSGVSHMLPFVIGGGIAIAIAFMLDQMLGVPQDQLAKLGSYNEIPALLKQIGDVAFGFMLPVFAGYIAYSISDRPGLVAGFVAGGVASVGGAGFLGALVGGFLAGYAVELIKLALKKLPKTLDGIKVVLFYPVLSVLIVGLLMLLLNVPMSALNTWLNDFLNSLSGTNAVILGLLLGAMMAADLGGPINKAAYIFATGTLAASVATGGSAIMAATMAAGMVPPLATFVATLIFRNKFTAQERDAGLTNSILGASFITEGAIPFAAADPLRMIPSFIAGSAITGAIVMFLNIKVLAPHGGVFVIFLVSQPWFYIIAIIIGTLISAGLIGVLRKKPTV

SEQ ID NO: 5573 - DNA, 1935 bp, Exiguobacterium sibiricum 255-15
  CDS (1)..(1935): transl_table=11
atgaaaattacagatctgttaacacgtgatacgatccaactcgatttacgttcgtcgaataaagcagctgtcatcgatgaactcgtcgatgtactcaatcgtgccggaaaattaaatgaccgctcggcttaccgcgaagccatcctggcccgggaagcacaaagtacgaccggactcggtgaaggaatcgcgattccgcatgcgaagacggcagccgttaaatcaccggccatcgcttttggacgttcgacaggaatcgattacgaagcacttgacggacaaccaagccgcttgttcttcatgattgctgccggcgaaaatgccgacaacgcgcaccttgaaacattatcaaaactgtctgtctacttgatggacatgaagttccgtgatacgattctttccgctcgttcggaagatgaagtcatcgctgcgatcgaagcaaaagaacgggaagaagaaggtccggtcgacgtctcgtcgtcaagtgtcgcacaggacgcaccatatattcttgccgtcacagcatgtccgaccggtattgcccatacgtatatggcagcagatgccctccgtcaaaaagcggaagaaatgggtgtccgcatcaaagtcgagacaaacggttcgaccggcgtgaaaaacggtctgacaagtcaagatattcaagaagcgacagcaatcatcgtcgctgcggataaagccgtcgagatggatcgtttcaacgggaaacacgttgtcgaagttccggtcgctcaaggaatccgtaaaccaaaagaactgattgaccgtgccgttaaacaggatgcaccggtgtataaaggcagtggatcaagcgacagctcgaaaccggcccgcggcggcttctacaaacacctgatgagcggggtttccgccatgttgccactcgttgttgccggcggactcttaatcgcaatcagcttcttctggggcatcaactcagcgaatccggaagatccgtcatataacgaatttgccgctcaattgatgtcgattggtaaagcagcctttggtctcttaattccgattcttgccggattcatcgcgatgtcgattgccgataaaccgggtctcgcaccaggtttgattgccgggttcctcgcaagccaagggaacgctggattcctcggcggattgattgccggtttccttgccggttatgtcgttctcttactgatcaaagtcttacaaggtcttccgaaagctcttgaagggatcaaaccagtcttgctttacccgctgttcggttcattcatcacaggtatgatcatgttgcttgtcatcaacgaaccgatcgctgctttcatgacatggttgacagattcactcaacggtctcagtggcggtaacgcgatcctgctcggtatgctcgtcgcagcaatgatggcgatcgatatgggtggtccaatcaacaaaacggcttatgtcttcggaacagccgctttaacagcaggaaacacggaagtcatggcagccgtcatggcgggtggtatggttccaccacttctcgtcgcattctcgtctacattgttcgcacgtaagaaatttacaccgcaagaacgcgaagccggtatcgctgcttacgcaatgggtgcttcattcgtcacagaaggtgcgattccattcgcagcagccgatccacttcgtgtcatcccgtcaagcgtcatcggttcagcaatcgccggtgcattgacaatcgtcttcggtgtgttgcttccggcaccacacggcggtgtgttcgtcttcccattacttgacggaccatcaggcacattaatggccgttcttagctacgctggtgcgatcttaatcggagcacttgtcggagctgccatcctctcgatcttgaaaaaaccgctcgtcgatcaagaagttgcgaaaaaagaaatgacttctggcacgggaacaaaagcttcataa

SEQ ID NO: 5574 - protein, 644 aa, Exiguobacterium sibiricum 255-15
MKITDLLTRDTIQLDLRSSNKAAVIDELVDVLNRAGKLNDRSAYREAILAREAQSTTGLGEGIAIPHAKTAAVKSPAIAFGRSTGIDYEALDGQPSRLFFMIAAGENADNAHLETLSKLSVYLMDMKFRDTILSARSEDEVIAAIEAKEREEEGPVDVSSSSVAQDAPYILAVTACPTGIAHTYMAADALRQKAEEMGVRIKVETNGSTGVKNGLTSQDIQEATAIIVAADKAVEMDRFNGKHVVEVPVAQGIRKPKELIDRAVKQDAPVYKGSGSSDSSKPARGGFYKHLMSGVSAMLPLVVAGGLLIAISFFWGINSANPEDPSYNEFAAQLMSIGKAAFGLLIPILAGFIAMSIADKPGLAPGLIAGFLASQGNAGFLGGLIAGFLAGYVVLLLIKVLQGLPKALEGIKPVLLYPLFGSFITGMIMLLVINEPIAAFMTWLTDSLNGLSGGNAILLGMLVAAMMAIDMGGPINKTAYVFGTAALTAGNTEVMAAVMAGGMVPPLLVAFSSTLFARKKFTPQEREAGIAAYAMGASFVTEGAIPFAAADPLRVIPSSVIGSAIAGALTIVFGVLLPAPHGGVFVFPLLDGPSGTLMAVLSYAGAILIGALVGAAILSILKKPLVDQEVAKKEMTSGTGTKAS

SEQ ID NO: 5575 - DNA, 1740 bp, Vibrio sp. Ex25
  CDS (1)..(1740)
atgaatattgccattattactgcctgtccgagcggtgttgcaaatagcatccttgcggcagggttactagaacaagcagccgcaaaattaacctggaatgcaaaaatcgaatgtcaatcaagtgtggttgaacctacactgctgacggaagctgacgttgaacaagcagaagtcattatcattgcggcaaatactagcgtggatacttctcgtttcgtagggaaaaaggtttaccaagcggaaatcagcgaagtagcaaaagacgcaactacgtttctccagcaagcggttgaaaacgccactttacttgaaaaagcaaccacacttgcagcccctatcactcctgaagcaacatcagcagcgaagaaaattgtcgcaatcaccgcttgtcctactggcgttgcgcatacctttatggcagcagaagcgctagaagaagaaggcaaacgccgtggccatcaaatcaaggtggaaactcgtggttcagttggtgcgaaaaaccaactgacagatcaagacatcgcagacgctgatctagtgatcattgctgccgatatcgaagtgccacttgatcgcttcaacggcaaaaagatgtaccgcacgaaaacaggcccagctctgaagaaaacagccgaagagatggacaaagcattcgagcaagccacgatttaccaacattcaggttctgcaaattctgcttcggcagcagacgagaagaaaggcgcttacaaacacttgatgacaggggtatcgcacatgctgcctgtggttgtcgctggtggtttgatcatcgccctatcgttcgtgtttggtattgaagcatttaaagaagaaggcacgctagcagcagcgttgatgaacattggtggtggctctgcattcgcattgatgattcctgttcttgcgggttacatcgcgttctcaattgctgaccgtccgggtctggctcctggtcttgttggcggtatgctggcaagttcaacgggtgctggtttcctaggaggtatcgcagctggcttcattgccggttatgcagcgaagctccttgcggacaaagtaaaactcccacaatcgatggaagcgcttaaaccaattctgatcattccatttgtagcaacactgttcactggccttgtgatgatctacatcgtaggtggcccagtctcaggcatcatgaacagcctaactgacttcctaaacaacatgggatctgacagtgcagttctgctaggtattatccttggtgcgatgatgtgtttcgacctaggtggcccagtaaacaaagccgcttacgcatttggcgtcggtctattggcttcgcaaacttacgcgccaatggcagcaatcatggcagcaggtatggttcctgcgttaggtatgggtttagcgaccttcattgcgaagaacaaatttgaacaaaatgaacgtgaggctggtaaagcatcatttgtattgggcctgtgtttcatctctgaaggcgcaattccatttgccgcgaaagatccaatgcgtgtgattccatcttgtatggcaggtggcgcgcttactggtgccctatcaatgctgttcggtgcaaaattaatggcaccacacggcggtctgttcgtactgttaatccctaacgccatttcaccagtgttaatgtacttagtggctatcgcagctggtacagcagtaactggctttacttacgctttcttaaaaagcaaagcagaagccaaacaagaagtcgcggcataa

SEQ ID NO: 5576 - protein, 579 aa, Vibrio sp. Ex25
MNIAIITACPSGVANSILAAGLLEQAAAKLTWNAKIECQSSVVEPTLLTEADVEQAEVIIIAANTSVDTSRFVGKKVYQAEISEVAKDATTFLQQAVENATLLEKATTLAAPITPEATSAAKKIVAITACPTGVAHTFMAAEALEEEGKRRGHQIKVETRGSVGAKNQLTDQDIADADLVIIAADIEVPLDRFNGKKMYRTKTGPALKKTAEEMDKAFEQATIYQHSGSANSASAADEKKGAYKHLMTGVSHMLPVVVAGGLIIALSFVFGIEAFKEEGTLAAALMNIGGGSAFALMIPVLAGYIAFSIADRPGLAPGLVGGMLASSTGAGFLGGIAAGFIAGYAAKLLADKVKLPQSMEALKPILIIPFVATLFTGLVMIYIVGGPVSGIMNSLTDFLNNMGSDSAVLLGIILGAMMCFDLGGPVNKAAYAFGVGLLASQTYAPMAAIMAAGMVPALGMGLATFIAKNKFEQNEREAGKASFVLGLCFISEGAIPFAAKDPMRVIPSCMAGGALTGALSMLFGAKLMAPHGGLFVLLIPNAISPVLMYLVAIAAGTAVTGFTYAFLKSKAEAKQEVAA

SEQ ID NO: 5577 - DNA, 1743 bp, Xanthomonas campestris pv
  CDS (1)..(1743): transl_table=11
atgtcctcttccatcgtggtcatcgccgccggcgaacgcagtaccgaagccgttctggcggccgaagcgctgcgccgcgcggccaccgccgccgggcgcagcgtgacgatcgaaatccgcagcgaccagggcgtgctcggcgcactgccgaccgagctgaccaacggcgccgcgcacgtcctgatcgtcggcgatgccgatgccgacaccgcgcgcttcggcgacgcgcaactgctgcatctgagcctgggcgcggtactggacgacccggccgccgccgtcagccagctcgctgccaccaccgcaccagccagtacatcggcaacgaccgacgcatccggcgcaggcggcaagcgcatcgttgcgatcacctcctgccccaccggcatcgcgcacactttcatggccgccgaaggcctgcagcaggccgcaaagaagctcggctaccagatgcgcgtggaaacgcaggggtcggtgggcgcgcaggacgcattgaccgacgaggaaatccgcgcggccgacgtggtcatcatcgctgccgaccgcgaagtggacctggcccgtttcggtggcaagcgactgttcaagagcggcaccaagccggcgatcaacgatggcccggcgctcatccagaaagccctggccgaggccggcgtgcacggtggcgcagctccggttgcgggcgccaacgccacatcggacgccaagggcaatgcgcgcaccggcgcctacaagcacctgatgaccggtgtgtcgttcatgctgcccttcgtcaccgctggcggcctgttgatcgcgctggccttcgcgctcggcggcatctatgccggcgacgacgcgcaccagggcacgctggcctggtcgctgttccagatcggcgccaaggccggcttcaccttgatggtgcccgcgctggccggttacatcgcctattccatcgccgaccgccccggcatcgcgccgggcatgatcggcgggctggtcgcggccaatctcaatgccggtttcctcggcggcatcattgccggcttcatcgccggctacggcgtggccgcgctcaaccgctacatcaagctgccgcgcaacctggaagggctcaagccggtgctgatcctgccggtgctgggcacactgctggtcggcctggcgatgatgtatgtgttcggccaaccggtggccgacctgctggcctggctcaccgcctggctgcgcggcatgcagggcagcagcgcgctgctgctgggcctgttgctcggcggcatgatggccttcgacatgggcgggccggtcaacaaggccgcctacgcgttctccaccggcctgatcgccagccaggtctataccccgatggctgcggccatggtggccggcatgaccccgccgctgggcatcgcgctggccacctgggtgttccgcaaccgcttcaccgtcgaagaacgcggctcggccaccgctgccggcgtgctcgggctggccttcgtcaccgaaggcgccatcccgtatgccgcccgcgacccgttgcgcaccatcccggcgctggtgatcggctcggccgtggccggcgcgatctcgatgaccgccggtgccgaactgaaggcgccgcatggcggcatcttcgtgctgctgatccccaatgccgtgacccacctgctcaattacgtgctggccctggtggtcggcgtggtggtcaccgcggtggcgctgcgcctgctcaagaagccggtggccgacgtgatcgcctga

SEQ ID NO: 5578 - protein, 580 aa, Xanthomonas campestris pv
MSSSIVVIAAGERSTEAVLAAEALRRAATAAGRSVTIEIRSDQGVLGALPTELTNGAAHVLIVGDADADTARFGDAQLLHLSLGAVLDDPAAAVSQLAATTAPASTSATTDASGAGGKRIVAITSCPTGIAHTFMAAEGLQQAAKKLGYQMRVETQGSVGAQDALTDEEIRAADVVIIAADREVDLARFGGKRLFKSGTKPAINDGPALIQKALAEAGVHGGAAPVAGANATSDAKGNARTGAYKHLMTGVSFMLPFVTAGGLLIALAFALGGIYAGDDAHQGTLAWSLFQIGAKAGFTLMVPALAGYIAYSIADRPGIAPGMIGGLVAANLNAGFLGGIIAGFIAGYGVAALNRYIKLPRNLEGLKPVLILPVLGTLLVGLAMMYVFGQPVADLLAWLTAWLRGMQGSSALLLGLLLGGMMAFDMGGPVNKAAYAFSTGLIASQVYTPMAAAMVAGMTPPLGIALATWVFRNRFTVEERGSATAAGVLGLAFVTEGAIPYAARDPLRTIPALVIGSAVAGAISMTAGAELKAPHGGIFVLLIPNAVTHLLNYVLALVVGVVVTAVALRLLKKPVADVIA

SEQ ID NO: 5579 - DNA, 23 bp, Artificial sequence
  primer
atggcgatggagtcatccttacg

SEQ ID NO: 5580 - DNA, 26 bp, Artificial sequence
  primer
ttaatgttcatggacaagctcctgtt

SEQ ID NO: 5581 - protein, 545 aa, Artificial sequence
  consensus sequence
  Variant (3)..(3): Xaa in position 3 is any amino acid
  Variant (5)..(5): Xaa in position 5 is any amino acid
  Variant (8)..(8): Xaa in position 8 is any amino acid
  Variant (17)..(17): Xaa in position 17 is any amino acid
  Variant (19)..(19): Xaa in position 19 is any amino acid
  Variant (21)..(23): Xaa in position 21 to 23 is any amino acid
  Variant (24)..(24): Xaa in position 24 is any or no amino acid
  Variant (26)..(28): Xaa in position 26 to 28 is any amino acid
  Variant (30)..(31): Xaa in position 30 to 31 is any amino acid
  Variant (33)..(33): Xaa in position 33 is any amino acid
  Variant (37)..(37): Xaa in position 37 is any amino acid
  Variant (39)..(40): Xaa in position 39 to 40 is any amino acid
  Variant (42)..(43): Xaa in position 42 to 43 is any amino acid
  Variant (45)..(45): Xaa in position 45 is any amino acid
  Variant (47)..(50): Xaa in position 47 to 50 is any amino acid
  Variant (52)..(53): Xaa in position 52 to 53 is any amino acid
  Variant (55)..(56): Xaa in position 55 to 56 is any amino acid
  Variant (59)..(59): Xaa in position 59 is any amino acid
  Variant (61)..(61): Xaa in position 61 is any amino acid
  Variant (63)..(64): Xaa in position 63 to 64 is any amino acid
  Variant (66)..(68): Xaa in position 66 to 68 is any amino acid
  Variant (69)..(71): Xaa in position 69 to 71 is any or no amino acid
  Variant (74)..(74): Xaa in position 74 is any amino acid
  Variant (77)..(86): Xaa in position 77 to 86 is any amino acid
  Variant (88)..(92): Xaa in position 88 to 92 is any amino acid
  Variant (94)..(121): Xaa in position 94 to 121 is any amino acid
  Variant (122)..(136): Xaa in position 122 to 136 is any or no amino acid
  Variant (138)..(139): Xaa in position 138 to 139 is any amino acid
  Variant (142)..(142): Xaa in position 142 is any amino acid
  Variant (146)..(146): Xaa in position 146 is any amino acid
  Variant (148)..(148): Xaa in position 148 is any amino acid
  Variant (152)..(153): Xaa in position 152 to 153 is any amino acid
  Variant (156)..(157): Xaa in position 156 to 157 is any amino acid
  Variant (160)..(181): Xaa in position 160 to 181 is any amino acid
  Variant (182)..(214): Xaa in position 182 to 214 is any or no amino acid
  Variant (217)..(218): Xaa in position 217 to 218 is any amino acid
  Variant (219)..(219): Xaa in position 219 is any or no amino acid
  Variant (222)..(223): Xaa in position 222 to 223 is any amino acid
  Variant (225)..(225): Xaa in position 225 is any amino acid
  Variant (227)..(227): Xaa in position 227 is any amino acid
  Variant (234)..(234): Xaa in position 234 is any amino acid
  Variant (238)..(239): Xaa in position 238 to 239 is any amino acid
  Variant (242)..(244): Xaa in position 242 to 244 is any amino acid
  Variant (246)..(248): Xaa in position 246 to 248 is any amino acid
  Variant (250)..(251): Xaa in position 250 to 251 is any amino acid
  Variant (253)..(257): Xaa in position 253 to 257 is any amino acid
  Variant (258)..(278): Xaa in position 258 to 278 is any or no amino acid
  Variant (281)..(281): Xaa in position 281 is any amino acid
  Variant (283)..(286): Xaa in position 283 to 286 is any amino acid
  Variant (288)..(290): Xaa in position 288 to 290 is any amino acid
  Variant (292)..(302): Xaa in position 292 to 302 is any amino acid
  Variant (303)..(304): Xaa in position 303 to 304 is any or no amino acid
  Variant (306)..(317): Xaa in position 306 to 317 is any amino acid
  Variant (319)..(325): Xaa in position 319 to 325 is any amino acid
  Variant (327)..(334): Xaa in position 327 to 334 is any amino acid
  Variant (335)..(335): Xaa in position 335 is any or no amino acid
  Variant (337)..(343): Xaa in position 337 to 343 is any amino acid
  Variant (345)..(347): Xaa in position 345 to 347 is any amino acid
  Variant (349)..(363): Xaa in position 349 to 363 is any amino acid
  Variant (364)..(377): Xaa in position 364 to 377 is any or no amino acid
  Variant (379)..(379): Xaa in position 379 is any amino acid
  Variant (381)..(383): Xaa in position 381 to 383 is any amino acid
  Variant (385)..(385): Xaa in position 385 is any amino acid
  Variant (389)..(389): Xaa in position 389 is any amino acid
  Variant (392)..(392): Xaa in position 392 is any amino acid
  Variant (394)..(395): Xaa in position 394 to 395 is any amino acid
  Variant (397)..(408): Xaa in position 397 to 408 is any amino acid
  Variant (409)..(413): Xaa in position 409 to 413 is any or no amino acid
  Variant (415)..(423): Xaa in position 415 to 423 is any amino acid
  Variant (426)..(430): Xaa in position 426 to 430 is any amino acid
  Variant (433)..(438): Xaa in position 433 to 438 is any amino acid
  Variant (439)..(440): Xaa in position 439 to 440 is any or no amino acid
  Variant (442)..(444): Xaa in position 442 to 444 is any amino acid
  Variant (446)..(448): Xaa in position 446 to 448 is any amino acid
  Variant (450)..(455): Xaa in position 450 to 455 is any amino acid
  Variant (457)..(459): Xaa in position 457 to 459 is any amino acid
  Variant (461)..(461): Xaa in position 461 is any amino acid
  Variant (470)..(470): Xaa in position 470 is any amino acid
  Variant (473)..(473): Xaa in position 473 is any amino acid
  Variant (475)..(475): Xaa in position 475 is any amino acid
  Variant (478)..(481): Xaa in position 478 to 481 is any amino acid
  Variant (483)..(500): Xaa in position 483 to 500 is any amino acid
  Variant (504)..(505): Xaa in position 504 to 505 is any amino acid
  Variant (507)..(522): Xaa in position 507 to 522 is any amino acid
  Variant (523)..(533): Xaa in position 523 to 533 is any or no amino acid
  Variant (535)..(544): Xaa in position 535 to 544 is any amino acid
VAXTXCPXGIAHTYMAXEXLXXXXAXXXGXXIXVETXGXXGXXNXLXXXXIXXAXXVIXAXDXXVXXXXXXRFXGKXXXXXXXXXXIXXXXXLXXXXXXXXXXXXXXXXXXXXXXXXXXXXXXXXXXXXXXXXXXXYXXLMXGVSXMXPFVXXGGXXIAXXXXXXXXXXXXXXXXXXXXXXXXXXXXXXXXXXXXXXXXXXXXXXXXXXXXXXXIGXXXAFXXMXPXLAGYIAXSIAXXPGXXXGXXXGXXAXXXXXXXXXXXXXXXXXXXXXXXXXXGFXGXXXXGXXXGXXXXXXXXXXXXXPXXXXXXXXXXXXPXXXXXXXGXXXXXXXXXPXXXXXXXLXXXLXXXXXXXXXXXXXXXXXXXXXXXXXXXXXGXMXXXDXGGPXNKXAXXFXXXXXXXXXXXXXXXXXMXXXXXXXXXPPXXXXXATXXXXXXXXFXXXEXXXGXXXXXXGXXXIXEGAIPFAAXDPXRXIPXXXXGXXXXXXXXXXXXXXXXXXHGGXXVXXXXXXXXXXXXXXXXXXXXXXXXXXXGXXXXXXXXXXL

SEQ ID NO: 5582 - protein, 29 aa, Artificial sequence
  protein pattern
  Variant (3)..(3): Xaa in position 3 is Ala, Asn or Thr
  Variant (5)..(5): Xaa in position 5 is Ile or Val
  Variant (9)..(9): Xaa in position 9 is Phe or Tyr
  Variant (11)..(11): Xaa in position 11 is any or no amino acid
  Variant (13)..(14): Xaa in position 13 to 14 is any amino acid
  Variant (15)..(15): Xaa in position 15 is any or no amino acid
  Variant (17)..(19): Xaa in position 17 to 19 is any amino acid
  Variant (20)..(20): Xaa in position 20 is Ala or Gly
  Variant (21)..(23): Xaa in position 21 to 23 is any amino acid
  Variant (24)..(24): Xaa in position 24 is Asp, Gly or Gln
  Variant (25)..(28): Xaa in position 25 to 28 is any amino acid
CPXGXAHTXMXAXXXLXXXXXXXXXXXXV

SEQ ID NO: 5583 - protein, 17 aa, Artificial sequence
  protein pattern
  Variant (2)..(2): Xaa in position 2 is Asp, Ser or Thr
  Variant (3)..(5): Xaa in position 3 to 5 is any amino acid
  Variant (7)..(8): Xaa in position 7 to 8 is any amino acid
  Variant (10)..(11): Xaa in position 10 to 11 is any amino acid
  Variant (12)..(12): Xaa in position 12 is Ile or Val
  Variant (13)..(13): Xaa in position 13 is Ile, Leu or Val
  Variant (14)..(14): Xaa in position 14 is Phe, Ile, Leu or Val
  Variant (16)..(16): Xaa in position 16 is any amino acid
  Variant (17)..(17): Xaa in position 17 is Asp, Gly or Ser
LXXXXIXXAXXXXXAXX

SEQ ID NO: 5584 - protein, 26 aa, Artificial sequence
  protein pattern
  Variant (2)..(3): Xaa in position 2 to 3 is any or no amino acid
  Variant (6)..(6): Xaa in position 6 is Ala, Asp, Gly, Asn or Val
  Variant (9)..(9): Xaa in position 9 is any amino acid
  Variant (10)..(10): Xaa in position 10 is Phe, Ile, Leu, Met or Val
  Variant (11)..(17): Xaa in position 11 to 17 is any amino acid
  Variant (18)..(18): Xaa in position 18 is Ala, Cys, Gly, Pro or Val
  Variant (19)..(25): Xaa in position 19 to 25 is any amino acid
  Variant (26)..(26): Xaa in position 26 is Phe, Ile, Leu or Met
DXXRFXGKXXXXXXXXXXXXXXXXXX

SEQ ID NO: 5585 - DNA, 486 bp, Escherichia coli K12
  CDS (1)..(486): transl_table=11
atgaaatacgatacttccgagctttgtgacatctatcaagaagatgttaacgtcgtggaaccgctgttctccaactttggcggacgggcgtcgtttggcggacaaataatcacggtaaaatgtttcgaggacaacgggttgctgtacgatctgctcgaacagaatggccgtggtcgtgttcttgtcgtcgatggcggtggttctgttcgtcgcgcactggtcgatgctgaactggcgcgtctggcagtacaaaatgaatgggaaggtctggtcatttacggcgcggtgcgtcaggtagatgacctggaagagttggatatcggcatccaggcgatggcggcaattccggttggtgccgctggcgaaggcattggcgaaagcgatgtccgcgtcaattttggcggtgtcaccttcttctccggcgaccatctttatgccgacaataccgggattattctttcagaagatccgctggatattgaatga

SEQ ID NO: 5586 - protein, 161 aa, Escherichia coli K12
MKYDTSELCDIYQEDVNVVEPLFSNFGGRASFGGQIITVKCFEDNGLLYDLLEQNGRGRVLVVDGGGSVRRALVDAELARLAVQNEWEGLVIYGAVRQVDDLEELDIGIQAMAAIPVGAAGEGIGESDVRVNFGGVTFFSGDHLYADNTGIILSEDPLDIE

SEQ ID NO: 5587 - DNA, 501 bp, Glycine max
  CDS (1)..(501)
atggcctttgtcaccactgctgaagtgtgtgatgcgaacccacagttaattttgagtggggagcttcgtgcccttcagccagtttttcagatttatggccgtcgacaggttttctctggacctatagttaccttgaaggtgtttgaagacaatgttttggttcgtgagttccttgaagagaaaggcaatggaagagttctagttgttgatggaggcgcgagtttacgctgcgctatattgggtggcaaccctgtggtacaagctcaaaacaatggatgggcaggtattattgtgaatggatgtataagagatgtggatgagatcaatggttgtgatattggagtgagagcccttgcttcccatcccatgaaagccaataagaaaggcatgggagagaagcaggtccccataaatattgctgggacaaggatcagtgatggggaatggctctatgcagacactgatggaattctgatctctcgaacagagctgtctgtttga

SEQ ID NO: 5588 - protein, 166 aa, Glycine max
MAFVTTAEVCDANPQLILSGELRALQPVFQIYGRRQVFSGPIVTLKVFEDNVLVREFLEEKGNGRVLVVDGGASLRCAILGGNPVVQAQNNGWAGIIVNGCIRDVDEINGCDIGVRALASHPMKANKKGMGEKQVPINIAGTRISDGEWLYADTDGILISRTELSV

SEQ ID NO: 5589 - DNA, 759 bp, Glycine max
  CDS (127)..(627)
cggctgcgagaagacgacagaaggggatattcttctcattttgcttctttgctttcataactttagtgcccaattggacttctttgtttgctttcaacttacaatttctgtggaggagtttgtaacatggctgctctaccaacggcggagcttagtgacgcaaatgcaacacatgtagcaagttgtgatgtgagggtgttgcatccagtgttcaaggtttacggtggggccactgcgttctccggccccgttgtcaccgtgaaggtgtttgaagacaacgtgttggtgagggagcttcttgagacgaaaggcgaaggaagagtattggttgttgatggaggaggaagcttgaggtgtgcattggtgggagggaatttggcactgattgcacataacatgggttgggctgggattgtggtgaatggctgcatcagagatgtggatgagatcaatgcaagtgatattggcgtcagagccttggcttctcatccactcagatccaacaaaaagcgcactggtgaaaagaatgtccctgtttatgttggtggaacatttattcgagaaggagaatggttgtatgctgataatgatggcatcctcgtatcaaaatttgagttgtcaaactaaaatagtttgccttcagttcaatattattgccattgggatgccattttagatttttaggtcaggctctttctggttggtttagtttgtggggaagtgaataaaattttaagaatttcttgtgtgcccattgcc

SEQ ID NO: 5590 - protein, 166 aa, Glycine max
MAALPTAELSDANATHVASCDVRVLHPVFKVYGGATAFSGPVVTVKVFEDNVLVRELLETKGEGRVLVVDGGGSLRCALVGGNLALIAHNMGWAGIVVNGCIRDVDEINASDIGVRALASHPLRSNKKRTGEKNVPVYVGGTFIREGEWLYADNDGILVSKFELSN

SEQ ID NO: 5591 - DNA, 759 bp, Glycine max; identical to SEQ ID NO: 5589
  CDS (127)..(627)

SEQ ID NO: 5592 - protein, 166 aa, Glycine max; identical to SEQ ID NO: 5590

SEQ ID NO: 5593 - DNA, 759 bp, Glycine max; identical to SEQ ID NO: 5589
  CDS (127)..(627)

SEQ ID NO: 5594 - protein, 166 aa, Glycine max; identical to SEQ ID NO: 5590

SEQ ID NO: 5595 - DNA, 1186 bp, Oryza sativa
  CDS (260)..(1186)
ccggccagggtcttgcgcacgcccacgcccacgcccacgcggacgcagcgggtggtgggttattcggtgccctccgccgccggctacctcccctcctccgctcctccccatcttcacaaataccatcccaaccagtgatccagatcgagccaaccaccacccccaatcggatccctcacccgattggcccggccagatcgccgccgatccgaccccgcgcaaccctctcccgcggccgcgagcgagaaccgaatccaatatggctgccttgccattagccacagccgaattatgtgatgcaaatgcacatttgatcatgaatggcgagcttcgtgctctccagcccgtcttccaagtctacggaaggcggcaggttttcgccggccctatcgtgacgctgaaggtctacgaggacaatgttcttgttcgcgagttcctggaggagaagggccaaggcagggttctcgtggtcgatggtggtgggagcctgcggtgcgccattttgggtggcaaccctgtgcagcaggcgcagaacaatgggtgggctggcatcgtcgtcaatggttgcatcagggacgtggatgagatcaatggctgcgacattggtgtccgagctctgaactcgcaccctatgaaagcaaacaagaagggcatcggggagaagcatgtgcctgtgaccattgcagggaccaggatttgcgacggggagtggctctacgccgatactgatgccggcggcgggcacggcgagggcgcggcgggctggtccgacgtcacctgcgtcgacggcggcggtggcagggttgagcaccgccgtggcagggtcgagctcggcggggagaaggcagcctctcgcgcgccgcgcgttgtctcggcgaggaggagcggcggcggctcggcgagaggagcggcggcggcagcgacggcggggcgcgggacgggggacgccgccgctttgcctgaaagccgaggggagcggccggccggcgcggctcgcaatcatcggctgccacagctcgagagaaaggagagagagatccatggcttcccagtccaccccttccccggtggcggcggcggcggaggaggaggaggaggaagaaggaggggcgcggcggcaatggcggcggaggaggaggaggaagaaggaggggcacggtggctgacggtcgcgccgaacggctag

SEQ ID NO: 5596 - protein, 308 aa, Oryza sativa
MAALPLATAELCDANAHLIMNGELRALQPVFQVYGRRQVFAGPIVTLKVYEDNVLVREFLEEKGQGRVLVVDGGGSLRCAILGGNPVQQAQNNGWAGIVVNGCIRDVDEINGCDIGVRALNSHPMKANKKGIGEKHVPVTIAGTRICDGEWLYADTDAGGGHGEGAAGWSDVTCVDGGGGRVEHRRGRVELGGEKAASRAPRVVSARRSGGGSARGAAAAATAGRGTGDAAALPESRGERPAGAARNHRLPQLERKEREIHGFPVHPFPGGGGGGGGGGGRRRGAAAMAAEEEEEEGGARWLTVAPNG

SEQ ID NO: 5597 - DNA, 507 bp, Zea mays
  CDS (1)..(507)
atggctgccttgccattggccaccgcagaagcatgtgatgctaatgctgctttaattatgaatggtgatcttcgttctctccaacctatcttccaaatctatggaggccggcagatttttgctggccctgttgtgacactgaagatctttgaggataacgttctgctccgcgagttccttgaggagaaaggtcacggcagggtcctggtggttgatgccggtgggagcatgcgttgtgcagttttgggtggcaaccttgcccagctgatgcagaacaatgggtgggctggaatcgttgtcaatggctgcatcagggacgtcgacgagataaatggctgcgacgttggtgtccgggctctgaactcacaccctatgaagtcaaacaagaagggcgtcggtgagaagcatgtccctgtgacctttgcagggacaagaatctgcgatggagaatggctctatgccgattccgatggcattctcatctcaagatcagaattgagtgtgtag

SEQ ID NO: 5598 - protein, 168 aa, Zea mays
MAALPLATAEACDANAALIMNGDLRSLQPIFQIYGGRQIFAGPVVTLKIFEDNVLLREFLEEKGHGRVLVVDAGGSMRCAVLGGNLAQLMQNNGWAGIVVNGCIRDVDEINGCDVGVRALNSHPMKSNKKGVGEKHVPVTFAGTRICDGEWLYADSDGILISRSELSV

SEQ ID NO: 5599 - DNA, 507 bp, Zea mays; identical to SEQ ID NO: 5597
  CDS (1)..(507)

SEQ ID NO: 5600 - protein, 168 aa, Zea mays; identical to SEQ ID NO: 5598

SEQ ID NO: 5601 - DNA, 840 bp, Glycine max
  CDS (155)..(661)
ggattggatcccttccctccctctgattccattccatcggagcctggcgaggcgacggtggagtgaagatcttgacaggactgcctcgctccccacggcggcgaggcgagaccgaccggcgacgcgcggccagccctgaattgaatcagctaccatggcggccttgccattggctacagctgaagtctgcgacgccaactcgcacctcatcaccggcggcgagctgcgcgcgctgcagcccgtcttccagatctacgggaggcggcaggtcttcgcgggccccatcgtgacgctcaaggtgttcgaggacaacgtgctcgtccgcgagttcctggaggagaagggccagggcagggtgctggtggtggacggcggcggcagcctgcggtgcgccatcctgggcggcaaccccgtccagcaggcgcagaacaacgggtgggcggggatcgtggtgaacgggtgcatccgggacgtggacgagatcaacgggtgcgacatcggcgtgcgcgccctcgcctcgcaccccatgaaggccaacaagaaggggatgggcgagaagcacgtcccggtcaccatcgcgggcaccaggatctgcgacggcgagtggctctacgccgacaccgacggcatcctcgtctccaggaccgagctcatcgtgtaggagaggccgccgcctcgttgtccgtgttgttccactatgtggttgtagttgcttgaattgaatgatgttgtatctcaacttgagattcagaagctctgaacttgtaataactgtaagcttaaattgcctgatcaaatggaatgaggaatgggaataaaattatctgttgcatgcctgtc

SEQ ID NO: 5602 - protein, 168 aa, Glycine max
MAALPLATAEVCDANSHLITGGELRALQPVFQIYGRRQVFAGPIVTLKVFEDNVLVREFLEEKGQGRVLVVDGGGSLRCAILGGNPVQQAQNNGWAGIVVNGCIRDVDEINGCDIGVRALASHPMKANKKGMGEKHVPVTIAGTRICDGEWLYADTDGILVSRTELIV

SEQ ID NO: 5603 - DNA, 840 bp, Glycine max; identical to SEQ ID NO: 5601
  CDS (155)..(661)

SEQ ID NO: 5604 - protein, 168 aa, Glycine max; identical to SEQ ID NO: 5602

SEQ ID NO: 5605 - DNA, 501 bp, Glycine max
  CDS (1)..(501)
atggctgctctacctactgcggagcttagtgatgcaaatgcaacacatgtagcaagtggtgatgtgagggtgctgcatccagtgttcaaggtttatggccaggccacggcattctccggccccattgtcaccgtgaaggtgtttgaagacaacgtgttggtgagggagcttgttgagacgaaaggcgaaggaagagtattggttgttgatggaggaggaagcttgaggtgtgcattgatgggagggaatttggtacagattgcatataacatggggtgggctgggattgtggtgaatggttgcgttagagatgtggatgatatcaatgcgtgtaatattggcgtcagagccttggcttctcatccactcagatccaacaaaaagcgcactggtgaaaagaatgtccctgtttatgttggtggaacatttattcgtgaaggagaatggttgtatgcagataatgatggcatcctcgtatcaaaatttgagttgtcaaactaa

SEQ ID NO: 5606 - protein, 166 aa, Glycine max
MAALPTAELSDANATHVASGDVRVLHPVFKVYGQATAFSGPIVTVKVFEDNVLVRELVETKGEGRVLVVDGGGSLRCALMGGNLVQIAYNMGWAGIVVNGCVRDVDDINACNIGVRALASHPLRSNKKRTGEKNVPVYVGGTFIREGEWLYADNDGILVSKFELSN

SEQ ID NO: 5607 - DNA, 501 bp, Glycine max; identical to SEQ ID NO: 5605
  CDS (1)..(501)

SEQ ID NO: 5608 - protein, 166 aa, Glycine max; identical to SEQ ID NO: 5606

SEQ ID NO: 5609 - DNA, 768 bp, Arabidopsis thaliana
  CDS (157)..(657)
aaaaaagtaaaaaaatcaatcatttataatttattatggagaagtgagagcaagtgttagcttttgatctttcttatattcttctctgaaatagtaacacactgtgaagagtttttcctacatctgaattttgtctgatccaggaaaaagaagaaaatggcgtttgtgacaactgcggaagtttgtgacgcgaatcaagagctgattcggagtggtcagctacgagctttgcaacccattttccagatttatggccgtcgacaaatattctcaggaccagttgtcactgtcaaagtttttgaagacaatggcttaatccgtcaattcatcgaggagaaaggaaacggtagagttcttgtggtggatggtggagggagtcaacgatgtgcaatactcggaggtaaccccgttgttcaagctcagaacaacggatgggcaggaatcgttgtgaacggatgcatcaaagacgtcgatgagatcaacggttgtgatatcggagtgagagctttggcctctcatccgataaaagcgagtaagaaaggacttggagaacaacgagttccggtaaatatcgcagggactcggatttgtgatggtgaatggctttatgcagatactgatgggattcttgtctcccaaattgagttatccgtttaataaaaaaggctttgatcagttaccaaaaaaaaaaacagaacgtggtttgtgttcatcttcttgttacttaagagattgttgaattataatggaaaataaatttttgttttg

SEQ ID NO: 5610 - protein, 166 aa, Arabidopsis thaliana
MAFVTTAEVCDANQELIRSGQLRALQPIFQIYGRRQIFSGPVVTVKVFEDNGLIRQFIEEKGNGRVLVVDGGGSQRCAILGGNPVVQAQNNGWAGIVVNGCIKDVDEINGCDIGVRALASHPIKASKKGLGEQRVPVNIAGTRICDGEWLYADTDGILVSQIELSV

SEQ ID NO: 5611 - DNA, 768 bp, Arabidopsis thaliana; identical to SEQ ID NO: 5609
  CDS (157)..(657)

SEQ ID NO: 5612 - protein, 166 aa, Arabidopsis thaliana; identical to SEQ ID NO: 5610

SEQ ID NO: 5613 - DNA, 768 bp, Arabidopsis thaliana; identical to SEQ ID NO: 5609
  CDS (157)..(657)

SEQ ID NO: 5614 - protein, 166 aa, Arabidopsis thaliana; identical to SEQ ID NO: 5610

SEQ ID NO: 5615 - DNA, 736 bp, Arabidopsis thaliana
  CDS (144)..(644)
aaattacctagaacatcctaatcgaaaaaagtgttagcttttgatctttcttatattcttctctgaaatagtaacacactgtgaagagtttttcctacatctgaattttgtctgatccagctgagaacaggaaaaagaagaaaatggcgtttgtgacaactgcggaagtttgtgacgcgaatcaagagctgattcggagtggtcagctacgagctttgcaacccattttccagatttatggccgtcgacaaatattctcaggaccagttgtcactgtcaaagtttttgaagacaatggcttaatccgtcaattcatcgaggagaaaggaaacggtagagttcttgtggtgaatggtggagggagtcaacgatgtgcaatactcggaggtaaccccgttgttcaagctcagaacaacggatgggcaggaatcgttgtgaacggatgcatcagagacgtcgatgagatcaacggttgtgatatcggagtgagagctttggcctctcatccgataaaagcgagtaagaaaggacttggagaacaacgagttccggtaaatatcgcagggactcggatttgtgatggtgaatggctttatgcagatactgatgggattcttgtctcccaaattgagttatccgtttaataaaaaaggctttgatcagttaccaaaaaaaaaaacagaacgtggtttgtgttcatcttcttgttacttaagagattgttgaattataatgc

SEQ ID NO: 5616 - protein, 166 aa, Arabidopsis thaliana
MAFVTTAEVCDANQELIRSGQLRALQPIFQIYGRRQIFSGPVVTVKVFEDNGLIRQFIEEKGNGRVLVVNGGGSQRCAILGGNPVVQAQNNGWAGIVVNGCIRDVDEINGCDIGVRALASHPIKASKKGLGEQRVPVNIAGTRICDGEWLYADTDGILVSQIELSV

SEQ ID NO: 5617 - DNA, 648 bp, Arabidopsis thaliana
  CDS (38)..(538)
acatctgaattttgtctgatccaggaaaaagaagaaaatggcgtttgtgacaactgcggaagtttgtgacgcgaatcaagagctgattcggagtggtcagctacgagctttgcaacccattttccagatttatggccgtcgacaaatattctcaggaccagttgtcactgtcaaagtttttgaagacaatggcttaatccgtcaattcatcgaggagaaaggaaacggtagagttcttgtggtggatggtggagggagtcaacgatgtgcaatactcggaggtaaccccgttgttcaagctcagaacaacggatgggcaggaatcgttgtgaacggatgcatcagagacgtcgatgagatcaacggttgtgatatcggagtgagagctttggcctctcatccgataaaagcgagaaagaaaggacttggagaacaacgagttccggtaaatatcgcagggactcggatttgtgatggtgaatggctttatgcagatactgatgggattcttgtctcccaaattgagttatccgtttaataaaaaaggctttgatcagttaccaaaaaaaaaaacagaacgtggtttgtgttcatcttcttgtacttaagagattgttgaattataatggaaaataaatttttgttttg

SEQ ID NO: 5618 - protein, 166 aa, Arabidopsis thaliana
MAFVTTAEVCDANQELIRSGQLRALQPIFQIYGRRQIFSGPVVTVKVFEDNGLIRQFIEEKGNGRVLVVDGGGSQRCAILGGNPVVQAQNNGWAGIVVNGCIRDVDEINGCDIGVRALASHPIKARKKGLGEQRVPVNIAGTRICDGEWLYADTDGILVSQIELSV

SEQ ID NO: 5619 - DNA, 668 bp, Arabidopsis thaliana
  CDS (106)..(561)
acgcacacagagttttctcttcttcgtcctagtttcttctattccaggtgagaagaaaaaatggcgtttgtgaccactgcggaagtgtgtgacgcgaatcaagagatgattcgaagtggccagctccgagctctgcaacccgtttttcagatttatggtcgtcgtcaaatattttcaggtccagtagttactgttaaagtctttgaagacaatggcttaatccgtcacttcctcgaagagaaaggcaatggtagagttcttgtggtggatggtggagggagtttacgctgtgcgatactaggaggaaacccggtcgtacaagcgcagaacaacggatgggcagggatcatagtgaatggatgcatcagagacgttgatgagatcaatggttgcgacattggagtgagagctttagcttctcatccaataaaggctagtaagaaaggacttggtgaacaaagagtctctttgaacattgcaggcactcggatatgcgatggcgaatggctttatgcagatactgatggtatccttgtttctcagattgaattatccgtttaaaaggacacaagtgatgttgttgatttgttaaaatctgtaagctactacttttgtgctttgtgtttctgtaatggctatcagagtaaaagttggcttctttgaatatg

SEQ ID NO: 5620 - protein, 151 aa, Arabidopsis thaliana
MIRSGQLRALQPVFQIYGRRQIFSGPVVTVKVFEDNGLIRHFLEEKGNGRVLVVDGGGSLRCAILGGNPVVQAQNNGWAGIIVNGCIRDVDEINGCDIGVRALASHPIKASKKGLGEQRVSLNIAGTRICDGEWLYADTDGILVSQIELSV

SEQ ID NO: 5621 - DNA, 856 bp, Zea mays subsp. mays
  CDS (218)..(724)
aaccgaagcgcactgcccagtcccagctgcctaggtctgccgcctgtcttgaccccacccactggccacttcccctcctgtccgttcccaaatcccgtcccctccacccgcactccattggcgccgctcccctcccctcgccgccgccggagatctgatccgatccgatccgatccgtttgtgcttgtgctgcagcaggagtgagaagtaaaaaaatatggctgccctgccactggccaccgccgaagtatgcgacgctaaccctcacctgatcatgaacggcgagctccgcgcgctccagccaatcttccagatctacggacggcgccaggtcttcgccggccccatcgtcacgctcaaggtctacgaggacaacgtcctggtccgcgagttcctcgaggagaaaggccacggtagggtcctcgtggtcgacggcggcggcagcatgcgctgcgccatccttggcggcaaccccgtccagcaggcgcagaacaacgggtgggctggtatcctggtcaacggctgcatcagggacgtggatgagatcaacggctgcgacatcggtgtccgggctctcagctcgcaccctatgaaggccaacaagaaggggatgggcgagaagcacgtccccgtcaacatcgctggaaccaggatttgcgacggcgagtggctctacgccgatcccgatggcattcttgtctccaggacggaactcaccgtgtagacagacacctggttgtatgtgtgtgtgtataaggaatcgggcgctcttgctgttaagcccgagcttgcaataatggattcttgctggatcacacatttatacttagaataatcgaatgcttgcttccttggt

SEQ ID NO: 5622 - protein, 168 aa, Zea mays subsp. mays
MAALPLATAEVCDANPHLIMNGELRALQPIFQIYGRRQVFAGPIVTLKVYEDNVLVREFLEEKGHGRVLVVDGGGSMRCAILGGNPVQQAQNNGWAGILVNGCIRDVDEINGCDIGVRALSSHPMKANKKGMGEKHVPVNIAGTRICDGEWLYADPDGILVSRTELTV

SEQ ID NO: 5623 - DNA, 856 bp, Zea mays subsp. mays; identical to SEQ ID NO: 5621
  CDS (218)..(724)

SEQ ID NO: 5624 - protein, 168 aa, Zea mays subsp. mays; identical to SEQ ID NO: 5622

SEQ ID NO: 5625 - DNA, 856 bp, Zea mays subsp. mays; identical to SEQ ID NO: 5621
  CDS (275)..(724)

SEQ ID NO: 5626 - protein, 149 aa, Zea mays subsp. mays
MNGELRALQPIFQIYGRRQVFAGPIVTLKVYEDNVLVREFLEEKGHGRVLVVDGGGSMRCAILGGNPVQQAQNNGWAGILVNGCIRDVDEINGCDIGVRALSSHPMKANKKGMGEKHVPVNIAGTRICDGEWLYADPDGILVSRTELTV

SEQ ID NO: 5627 - DNA, 856 bp, Zea mays subsp. mays; identical to SEQ ID NO: 5621
  CDS (275)..(724)

SEQ ID NO: 5628 - protein, 149 aa, Zea mays subsp. mays; identical to SEQ ID NO: 5626

SEQ ID NO: 5629 - DNA, 657 bp, Oryza sativa
  CDS (1)..(657)
atgaggagacgtcaagctgacgctgctgcctggaatcacgtcttgcgaacgcccacgcccacgcccacgcggacgcagcgggtgatcgccgccgatccgaccccgcgcaaccctctcccgcggccgcgagcgagcagaaccgaatccaatatggctgccttgccattagccacagccgaattatgtgatgcaaatgcacatttgatcatgaatggcgagcttcgtgctctccagcccgtcttccaagtctacggaaggcggcaggttttcgccggccctatcgtgacgctgaaggtctacgaggacaatgttcttgttcgcgagttcctggaggagaagggccaaggcagggttctcgtggtcgatggtggtgggagcctgcggtgcgccattttgggtggcaaccctgtgcagcaggcgcagaacaatgggtgggctggcatcgtcgtcaatggttgcatcagggacgtggatgagatcaatggctgcgacattggtgtccgagctctgaactcgcaccctatgaaagcaaacaagaagggcatcggggagaagcatgtgcctgtgaccattgcagggaccaggatttgcgacggggagtggctctacgccgatactgatggtattctcatctcaaggactgaattgactgtgtga

SEQ ID NO: 5630 - protein, 218 aa, Oryza sativa
MRRRQADAAAWNHVLRTPTPTPTRTQRVIAADPTPRNPLPRPRASRTESNMAALPLATAELCDANAHLIMNGELRALQPVFQVYGRRQVFAGPIVTLKVYEDNVLVREFLEEKGQGRVLVVDGGGSLRCAILGGNPVQQAQNNGWAGIVVNGCIRDVDEINGCDIGVRALNSHPMKANKKGIGEKHVPVTIAGTRICDGEWLYADTDGILISRTELTV

SEQ ID NO: 5631 - DNA, 501 bp, Viridiplantae
  CDS (1)..(501)
atggcctttgtcaccactgctgaagtgtgtgatgcgaacccacagttaattttgagtggggagcttcgtgcccttcagccagtttttcagatttatggccgtcgacaggttttctctggacctatagttaccttgaaggtgtttgaagacaatgttttggttcgtgagttccttgaagagaaaggcaatggaagagttctagttgttgatggaggcgcgagtttacgctgtgctatattgggtggcaaccctgtggtacaagctcaaaacaatggatgggcaggtattgttgtgaatggatgtataagagatgtggatgagatcaatggttgtgatattggagtgagagccctagcttcccatcccatgaaagccaataaaaaaggcatgggagagaagcatgttcctgtaaatattgctgggacaaggatcagtgatggggattggctctatgcagacactgatggaattctgatctctcgaacagagctgtctgtttga

SEQ ID NO: 5632 - protein, 166 aa, Viridiplantae
MAFVTTAEVCDANPQLILSGELRALQPVFQIYGRRQVFSGPIVTLKVFEDNVLVREFLEEKGNGRVLVVDGGASLRCAILGGNPVVQAQNNGWAGIVVNGCIRDVDEINGCDIGVRALASHPMKANKKGMGEKHVPVNIAGTRISDGDWLYADTDGILISRTELSV

SEQ ID NO: 5633 - DNA, 991 bp, Viridiplantae
  CDS (200)..(706)
cccccgctcctcggattggatccctccccttccctcctctgattccattccgttggagccctcctttcttgatctcatctctcccctgattggttcagacaggactgccggcgcccctccctccgctgcctcgctccccacggcggcgaggcgagacccaccggcgacgcgcggccagccctgaattgaatcagctaccatggcggccttgccgttagccacggcggaagtctgcgacgccaactcgcacctcatcaccggcggcgagctgcgcgcgctgcagcccatcttccagatctacgggaggcggcaggtcttcgcgggccccgtcgtgacgctcaaggtgttcgaggacaacgtgctggtgcgcgagttcctggaggagaagggccagggcagggtgctggtggtggacggcggcggcagcctgcggtgcgccatcctgggcggcaaccccgtccagcaggcgcagaacaacgggtgggcgggcatcgtggtgaacgggtgcatccgggacgtggacgagatcaacgggtgcgacatcggcgtgcgcgccctcgcctcgcaccccatgaaggccaacaagaaggggatgggcgagaagcacgtcccggtcaccatcgcgggcaccaggatctgcgacggcgagtggctctacgccgacaccgacggcatcctcgtctccaggaccgagctgatcgtgtaggagaggccgcggccgccgcctcgttgtccgtgccgttccactctgtggttgtatttgcttgtctgtaacatgatggatgaactgggctctgtggcactgcataaatagaggaggagggctgctgtggttgctgctgctgctgccctccctgattgaatggtgttgtatctggacttcacattcagaagctccgaacttgtaataattgtaagcttatcttgcctgatcaaatggaatgaggaatcggaataaaattgtcaaaaaaaaaaaaaaaaaaggccccta

SEQ ID NO: 5634 - protein, 168 aa, Viridiplantae
MAALPLATAEVCDANSHLITGGELRALQPIFQIYGRRQVFAGPVVTLKVFEDNVLVREFLEEKGQGRVLVVDGGGSLRCAILGGNPVQQAQNNGWAGIVVNGCIRDVDEINGCDIGVRALASHPMKANKKGMGEKHVPVTIAGTRICDGEWLYADTDGILVSRTELIV

SEQ ID NO: 5635 - DNA, 501 bp, Pinus radiata
  CDS (1)..(501)
atggcagccttagcaacaactgaagtttgtgatacatatccacgccttgtggagaatggtgagcttcgtgtcttgcaaccaattttccagatatatggtcgacgtcgagctttctctggacctatagttacactgaaggtctttgaggacaatgtccttttgcgggaattccttgaggagagaggtaatggaagagttttggtagttgatggaggaggaagccttagatgtgccatactggggggcaatgtagttgtatctgcccaaaacaatggttggtctggaataattgtcactggctgcataagggacgttgatgaaataaacagatgtgacattggtataagagcactgacatctaacccactgaaggccaacaagaagggtgtgggtgaaaaacatgcgcctatttacattgctggtacccgcattcttccgggggaatggtgttatgctgacagtgatggtattcttgtttcacagcaagagttatcactgtga

SEQ ID NO: 5636 - protein, 166 aa, Pinus radiata
MAALATTEVCDTYPRLVENGELRVLQPIFQIYGRRRAFSGPIVTLKVFEDNVLLREFLEERGNGRVLVVDGGGSLRCAILGGNVVVSAQNNGWSGIIVTGCIRDVDEINRCDIGIRALTSNPLKANKKGVGEKHAPIYIAGTRILPGEWCYADSDGILVSQQELSL

SEQ ID NO: 5637 - DNA, 501 bp, Pinus radiata; identical to SEQ ID NO: 5635
  CDS (1)..(501)

SEQ ID NO: 5638 - protein, 166 aa, Pinus radiata; identical to SEQ ID NO: 5636

SEQ ID NO: 5639 - DNA, 489 bp, Vibrio cholerae O1 biovar eltor str. N16961
  CDS (1)..(489): transl_table=11
atgatgagagatataaccccagatctttgcgataagtacgaatcgcaagtcactttactcaatttaccgctgcaaaattttggtcaacgcagcgcattttggggcgaaatagtgacagttcgttgctatcacgacaactctaaagtacgtgatgtgctcagccaaaatggcaagggcaaagtattggttgtggatggtcacggttcatgccacaaagccttaatgggtgatcagttggcgattttagccatcaaaaatgattgggaaggcgtaattatttacggcgcagtgcgtgatgtggtcgcaatgtctgagatggatttaggcataaaagcattaggcacaagtccctttaaaaccgaaaagcgcggggcagggcaggtgaatgtcactttgacgatgcaaaatcagatcgttgaaccgggcgattatttgtatgccgattggaatggtattttgatgtcagaaacggcgcttgatgtagcttaa

SEQ ID NO: 5640 - protein, 162 aa, Vibrio cholerae O1 biovar eltor str. N16961
MMRDITPDLCDKYESQVTLLNLPLQNFGQRSAFWGEIVTVRCYHDNSKVRDVLSQNGKGKVLVVDGHGSCHKALMGDQLAILAIKNDWEGVIIYGAVRDVVAMSEMDLGIKALGTSPFKTEKRGAGQVNVTLTMQNQIVEPGDYLYADWNGILMSETALDVA

SEQ ID NO: 5641 - DNA, 507 bp, Ralstonia solanacearum GMI1000
  CDS (1)..(507): transl_table=11
atgacgacgatgatgattcccgtgaccgacctgtgcgacgcgcacgaagaccagctcgccagcggcgccgtgcgcgtgctcgcgccggtgttccgcagcttcggcgcgcgcgcggcctttgccgggccggccgccacgctcaaggtgttcgaggacaacggcctggtgcgcgccatgctggagcagccgggcgaggggcgcgtgctggtcgtcgacggcggcggctcgctgcgctgcgcgctggtgggcggcaacctcgccaagctggccgaggacaacggctgggagggtgtcctcgtcaacggctgtgtgcgcgatacccgcgagctggccgcctgcaacgtcggcgtgcatgccctggccgcgcatccgcgcaagagcttcaagaaaaaccagggcgagcgcgacatcggcgtgcagatgcccggcgcctacatccacccgggcgaatggatctacggcgacgaagatggcgtgctggtctcgcgggagcggttgcatgactga

SEQ ID NO: 5642 - protein, 168 aa, Ralstonia solanacearum GMI1000
MTTMMIPVTDLCDAHEDQLASGAVRVLAPVFRSFGARAAFAGPAATLKVFEDNGLVRAMLEQPGEGRVLVVDGGGSLRCALVGGNLAKLAEDNGWEGVLVNGCVRDTRELAACNVGVHALAAHPRKSFKKNQGERDIGVQMPGAYIHPGEWIYGDEDGVLVSRERLHD

SEQ ID NO: 5643 - DNA, 582 bp, Corynebacterium efficiens YS-314
  CDS (1)..(582): transl_table=11
atgggtgtggcggacagcatggtccgggaaaccaggacaggcgtactgaaatggttttatgctggtgtcatgactgacacacatggcaccttcattcccaccgccgacctcgtggacatcatcggcgatgacgtccgctcctgcgacacccagttccgtaacctcggcggccgcaccgacttccacggcaccatcaccaccgtgaaatgcttccaggacaatgccctgctcaagtccatcctcggggaggacaaccccggtggtgtgctcgtcatcgacggtgatgcctcgctgcacaccgccctcgtcggtgacatcatcgcgggcctgggtagggaccacgggtggtccggcgtggtggtcaatggtgccatccgtgactccgctgtcatcggcgagatggagttcggctgcaaggccctgggcaccaacccccgcaagtcctccaagaccggcgcgggggagcgggacgtggtggtctccttcggtggggtcgatttcacgccggggcattacctgtatgccgactccgacggtatcgtggttaccgaaaacccggtgaaggccccagcaagcaactag

SEQ ID NO: 5644 - protein, 193 aa, Corynebacterium efficiens YS-314
MGVADSMVRETRTGVLKWFYAGVMTDTHGTFIPTADLVDIIGDDVRSCDTQFRNLGGRTDFHGTITTVKCFQDNALLKSILGEDNPGGVLVIDGDASLHTALVGDIIAGLGRDHGWSGVVVNGAIRDSAVIGEMEFGCKALGTNPRKSSKTGAGERDVVVSFGGVDFTPGHYLYADSDGIVVTENPVKAPASN

SEQ ID NO: 5645 - DNA, 486 bp, Vibrio vulnificus CMCP6
  CDS (1)..(486): transl_table=11
atggaccaagtggatgtagtcgagcctatgttcagtaactttggtggccgcgcttcctttgccggacaaatcaccacagtcaagtgttttgaggacaatgccctcattcgagaaacgctggaacaagatggtgttggccgtgtacttttggttgatggtggtggttcattgcgccgagcattacttgacggcgaacttgccgcgatagcggaagagaacgaatgggaaggcatcgttgtctacggctgtgtgcgtgaagtggacgagctggaagatatgaatatcggcattcaagctttagcctctattccagtgggtgctgccatgcagggtgttggcgaagtggatgttcccgtcaattttggtggggtgaccttccttccagaagactacctctatgcagatacaacgggcatcattctctcccaagagcctctcagtgccgatcttgaagaagatgaagaagagccagagctgctcgattaa

SEQ ID NO: 5646 - protein, 161 aa, Vibrio vulnificus CMCP6
MDQVDVVEPMFSNFGGRASFAGQITTVKCFEDNALIRETLEQDGVGRVLLVDGGGSLRRALLDGELAAIAEENEWEGIVVYGCVREVDELEDMNIGIQALASIPVGAAMQGVGEVDVPVNFGGVTFLPEDYLYADTTGIILSQEPLSADLEEDEEEPELLD

SEQ ID NO: 5647 - DNA, 507 bp, Oryza sativa (japonica cultivar-group)
  CDS (1)..(507)
atggctgccttgccattagccaccgctgaagtatgtgatgcaaatgcagatttaatcatgaatggtgagcttcgtgctctccagcccatcttccaaatctatggaaggcggcaggtttttgctggccctattgtgacactgaaggtctatgaggacaatgttcttatccgtgagttccttgaggagaagggtcatggaagggttctcgtggttgatggtggtgggagcttgcgctgtgccattttgggtggcaaccctgtgcagcaggcacagaacaatgggtgggctggcatcgtcgtcaatggttgcatcagggacgtggatgaaatcaatggctgtgacattggtgtccgggctctgaactcacatcctatgaaggcaaacaagaagggaataggtgagaagcatgtgcctgtgaccatcgcagggaccaggatttgcgacggtgagtggctctatgcagataccgatggcattctcatctcgaggactgaattgactgtgtaa

SEQ ID NO: 5648 - protein, 168 aa, Oryza sativa (japonica cultivar-group)
MAALPLATAEVCDANADLIMNGELRALQPIFQIYGRRQVFAGPIVTLKVYEDNVLIREFLEEKGHGRVLVVDGGGSLRCAILGGNPVQQAQNNGWAGIVVNGCIRDVDEINGCDIGVRALNSHPMKANKKGIGEKHVPVTIAGTRICDGEWLYADTDGILISRTELTV

SEQ ID NO: 5649 - DNA, 507 bp, Oryza sativa (japonica cultivar-group)
  CDS (1)..(507)
atggctgccttgccattagccacagccgaattatgtgatgcaaatgcacatttgatcatgaatggcgagcttcgtgctctccagcccgtcttccaagtctacggaaggcggcaggttttcgccggccctatcgtgacgctgaaggtctacgaggacaatgttcttgttcgcgagttcctggaggagaagggccaaggcagggttctcgtggtcgatggtggtgggagcctgcggtgcgccattttgggtggcaaccctgtgcagcaggcgcagaacaatgggtgggctggcatcgtcgtcaatggttgcatcagggacgtggatgagatcaatggctgcgacattggtgtccgagctctgaactcgcaccctatgaaagcaaacaagaagggcatcggggagaagcatgtgcctgtgaccattgcagggaccaggatttgcgacggggagtggctctacgccgatactgatggtattctcatctcaaggactgaattgactgtgtga

SEQ ID NO: 5650 - protein, 168 aa, Oryza sativa (japonica cultivar-group)
MAALPLATAELCDANAHLIMNGELRALQPVFQVYGRRQVFAGPIVTLKVYEDNVLVREFLEEKGQGRVLVVDGGGSLRCAILGGNPVQQAQNNGWAGIVVNGCIRDVDEINGCDIGVRALNSHPMKANKKGIGEKHVPVTIAGTRICDGEWLYADTDGILISRTELTV

SEQ ID NO: 5651 - DNA, 507 bp, Oryza sativa (japonica cultivar-group)
  CDS (1)..(507)
atggccgcgctgccattagccaccgccgaagtgtgcgacgcaaactcaaatccaatcatcgccggcgagctccgcgccctccctcccatcttcaaaatctacgggaggcggcaggttttcgccggcccagtcgcgacggtgaaggtgttcgaggacaacgtgctggtccgcgagctcctccaggagaagggacatggccgggtgctcgtcgtcgacggcggtggtagcgtgcgctgcgccctcttgggcggcaacctcgcgcagctggcgcagatcaatggatgggtcggcatcgtcgtcaatggctgcatcagggatgtggatgagatcaatggctgtgacgttggtgtccgtgctctcaattcgcaccctatgaagtcggggaagaagggcgccggtgagaagcgtgtgcctgtgaccattgaagggaccaggatttgcgacggcgagtggctctacgctgatgctgatggcattctcatctcgaggactgaattgactgtgtga

SEQ ID NO: 5652 - protein, 168 aa, Oryza sativa (japonica cultivar-group)
MAALPLATAEVCDANSNPIIAGELRALPPIFKIYGRRQVFAGPVATVKVFEDNVLVRELLQEKGHGRVLVVDGGGSVRCALLGGNLAQLAQINGWVGIVVNGCIRDVDEINGCDVGVRALNSHPMKSGKKGAGEKRVPVTIEGTRICDGEWLYADADGILISRTELTV

SEQ ID NO: 5653 - DNA, 561 bp, Mannheimia succiniciproducens MBEL55E
  CDS (1)..(561): transl_table=11
ttgagttataccggaaacaggtttatactagaaaagtccaatttatataagggtaattttatgcgtatcgatacttcagaactctgtgacgtttatcttgatcaagtggatgttgtagagccgattttttccagcttcggcggtgtaaacgaatttttcggtaaagtaacaacgattaaatgttttgaaaataacgggctgattgccgaaattttagaagaacaaggtgaaggtcgggtacttttagtagatggcggcggtgccgtgcgccgtgcgttaatcgatgccgaacttgctcaacttgcggcggataacggctgggaaggtattatcgtatatggtgcggtgcggcaattaagccgattagagaatattaatatcggtattcacgcgcttgcgccgattcctgtcggtgcggatgaagatacgcagggcgaaagcgatattcccgttaatttcggtggtgtgacctttttcccggaagattatgtgtatgcggatttaaccggtatcatcctttctcaagagccgttagaacttgaagaactcggtgaagaataa

SEQ ID NO: 5654 - protein, 186 aa, Mannheimia succiniciproducens MBEL55E
MSYTGNRFILEKSNLYKGNFMRIDTSELCDVYLDQVDVVEPIFSSFGGVNEFFGKVTTIKCFENNGLIAEILEEQGEGRVLLVDGGGAVRRALIDAELAQLAADNGWEGIIVYGAVRQLSRLENINIGIHALAPIPVGADEDTQGESDIPVNFGGVTFFPEDYVYADLTGIILSQEPLELEELGEE

SEQ ID NO: 5655 - DNA, 480 bp, Azoarcus sp. EbN1
  CDS (1)..(480): transl_table=11
atggaattccagaccgccgatctgtgtgatgccaacgaaagccgcgtcaaaatcgtcagcccgatgttccggagctacggcgggcgcggtgccttttgcggccggatcacgacgctcaaagtattcgaggacaactcgctggtgcgcactgcgctcgaagggccggggcaaggcaaagtgctcgtcgtcgacggcggcggctcgatgcggtgcgcgctcgtcggcgaccagctcgcgctgctcggcgtgaagaatcaatgggccggggtcatcgtgtatggctgcatccgtgactcgaaggcgatcggcacgatggaactgggagtgttcgcgctcggctcccatccgctgaagagcatcaagaaaggcgctggagatgtggacatcgcggtgacgttcggcggcgtaactttcactcccgggcatttcatttacgccgacgaggatggcgtcgtcgtttcggaatcgtcgctgctctga

SEQ ID NO: 5656 - protein, 159 aa, Azoarcus sp. EbN1
MEFQTADLCDANESRVKIVSPMFRSYGGRGAFCGRITTLKVFEDNSLVRTALEGPGQGKVLVVDGGGSMRCALVGDQLALLGVKNQWAGVIVYGCIRDSKAIGTMELGVFALGSHPLKSIKKGAGDVDIAVTFGGVTFTPGHFIYADEDGVVVSESSLL

SEQ ID NO: 5657 - DNA, 489 bp, Pseudomonas syringae pv. syringae B728a
  CDS (1)..(489): transl_table=11
atgcattacctcacccccgatctgtgtgacgcctatccggacctgattcaggtcgtggagccgatgttcagcaattttggcggccgcgattcgtttggtggccagatcgtcacgctgaaatgtttcgaggacaactccagggtcagggagcaggtcgagctcgacggcaagggcaaggtgctggtcgtcgacggcggcggttcgctgcgttgcgcgctactgggtgacatgctggcagacaaggctgcaaagaacggctgggaaggcatgttgatctacggctgcatccgcgacgtggatgtcatcgcccagaccgacctgggtgtccaggcgctcgccagtcatccgaagaaaaccgagaagcgcggcataggcgagctgaatgtgccggtgacctttggcggcgtgacgttccgcccgggtgagtacctgtacgccgacaacaatggcgtcatcatttccccatcaaccctgaccatgccggaataa

SEQ ID NO: 5658 - protein, 162 aa, Pseudomonas syringae pv. syringae B728a
MHYLTPDLCDAYPDLIQVVEPMFSNFGGRDSFGGQIVTLKCFEDNSRVREQVELDGKGKVLVVDGGGSLRCALLGDMLADKAAKNGWEGMLIYGCIRDVDVIAQTDLGVQALASHPKKTEKRGIGELNVPVTFGGVTFRPGEYLYADNNGVIISPSTLTMPE

SEQ ID NO: 5659 - DNA, 489 bp, Haemophilus influenzae 86-028NP
  CDS (1)..(489): transl_table=11
atgtttattgatacttcagaactttgcgatctttatgcagaacaagtggatgtcgtggagccaattttttcaagctttggtggcgtaagtcatttttacggtaaagtcactacagtaaaatgctttgaaagtaatggattaattgctgaagtattagaagaaaacggcgaaggtcgagtgcttgtcattgatggcggtggtgcggtacgccgtggtttgattgatgcagaattggctcaacttgccgttgataatggttgggaaggcattattgtatatggtgcagtacgccaaattcagcaattagaaaacctcgatattggtattcatgcccttgcgccaattccagtcagtgcagatgaaagcagtgctggcgagagtgatattccagtgaattttggtggcgtaacctttttcccagaagattatatttacgcagatctgacaggaattatactttcgcaagagcctctagatttagaagattaa

SEQ ID NO: 5660 - protein, 162 aa, Haemophilus influenzae 86-028NP
MFIDTSELCDLYAEQVDVVEPIFSSFGGVSHFYGKVTTVKCFESNGLIAEVLEENGEGRVLVIDGGGAVRRGLIDAELAQLAVDNGWEGIIVYGAVRQIQQLENLDIGIHALAPIPVSADESSAGESDIPVNFGGVTFFPEDYIYADLTGIILSQEPLDLED

SEQ ID NO: 5661 - DNA, 492 bp, Pseudomonas fluorescens Pf-5
  CDS (1)..(492): transl_table=11
atgaaccattacctcactcccgacctgtgcgacgcctacccggacctggtgcaggtggtagagccgatgttcagcaatttcggtggtcgcgattcctttggcggtgaaatcgtcaccatcaagtgcttcgaggacaactcgctggtcaaggaacaagtggaactcaaggggcagggcaaggtgttggtggtggatggtggcggctcgctgcgccgcgccctgctgggcgacatgctggccgagaaagccgcaaaaaacggttgggaagggttggtgatctacggttgcatccgtgatgtggatgtcatcgcccagaccgatcttggcgtccaggccctggccagccacccgatgaagactgacaagcgcggcatcggcgacctcaatgtggcggtgacctttgccggtgtgacttttcgtcctggcgagtatgtctacgccgacaacaatggcgtgatcgtttcgccaagcccgctgaaaatgcctgaataa

SEQ ID NO: 5662 - protein, 163 aa, Pseudomonas fluorescens Pf-5
MNHYLTPDLCDAYPDLVQVVEPMFSNFGGRDSFGGEIVTIKCFEDNSLVKEQVELKGQGKVLVVDGGGSLRRALLGDMLAEKAAKNGWEGLVIYGCIRDVDVIAQTDLGVQALASHPMKTDKRGIGDLNVAVTFAGVTFRPGEYVYADNNGVIVSPSPLKMPE

SEQ ID NO: 5663 - DNA, 534 bp, Psychrobacter arcticus 273-4
  CDS (1)..(534): transl_table=11
atgccagaatcagcaacgatgactaaagaaaattttgtaacctgcgatttattggatgccaatcctgaatcacaggtatgtttgccaaatattgaaggtaagtctttttatagttttggcggcaaagacaagttttgcggtgaagttgtgacggtcaaatgctttgaggataatagccgagtcaaatcactgctaaacagtgacggcaaagataaagacggtaatggcaaagtgttggtcgttgatggtggtggctctatgcgctgtgcgctgttaggtgacatgattgcccagtcggcgatcgataatcattgggcaggggtcattatttatggctgtgttcgtgacgttgatgatatggcgcagatggagcttggagtaatggcacttggctgtatcccgcgcaagtcaaatcgtcgcgatgaaggtcaaactgatctcgaaatcagctttggtgatttgacactgaattctggtatgtttgtttatgcagacaataatgggattatcgcaagcgacaagccattaatttag

SEQ ID NO: 5664 - protein, 177 aa, Psychrobacter arcticus 273-4
MPESATMTKENFVTCDLLDANPESQVCLPNIEGKSFYSFGGKDKFCGEVVTVKCFEDNSRVKSLLNSDGKDKDGNGKVLVVDGGGSMRCALLGDMIAQSAIDNHWAGVIIYGCVRDVDDMAQMELGVMALGCIPRKSNRRDEGQTDLEISFGDLTLNSGMFVYADNNGIIASDKPLI

SEQ ID NO: 5665 - DNA, 498 bp, Colwellia psychrerythraea 34H
  CDS (1)..(498): transl_table=11
atgcaatataacacttctgaattatgtgacttttatgccgatttgattgatgttgttgatcccattttttgtaattacggtggtcgcagttcatttgctggcaaagttgttacgttaaagtgttttgagcatctaggtttgatcaatgaactcgttgctacatatggcacagggaaagtattggtcattgatggtggaggatccacgagacgcgctctgattgatttaggtatcgcgcaatgtgctgctaacaatggttgggaaggaattgtttgttatggcagtgtacgtgatgtagatgctttagatggagtagatattggtatacaggcgctcggagcaattccagttggggcaagtgagcaaaatattggagaaactgatatggcgattaattttgccggagtgaccttattacctgatgattatatctacgctgataataccggtattatactgtcgcctgaagcactcgagattgcatcaagtatggcttag

SEQ ID NO: 5666 - protein, 165 aa, Colwellia psychrerythraea 34H
MQYNTSELCDFYADLIDVVDPIFCNYGGRSSFAGKVVTLKCFEHLGLINELVATYGTGKVLVIDGGGSTRRALIDLGIAQCAANNGWEGIVCYGSVRDVDALDGVDIGIQALGAIPVGASEQNIGETDMAINFAGVTLLPDDYIYADNTGIILSPEALEIASSMA

SEQ ID NO: 5667 - DNA, 495 bp, Pseudomonas syringae pv. phaseolicola 1448A
  CDS (1)..(495): transl_table=11
atgcactacatcacccccgatctgtgtgacgcctatccggacctgattcaggtcgtggagccgatgttcagcaattttggcggtcgcgattcgtttggcggccagatcgtcaccgttaaatgtttcgaagacaactcgctggtcaaggagcaggtcgagctcgacggcaagggcaagggcaaggtgttggtggtcgacggtggtgggtcgctgcgttgtgccttactcggtgacatgctggcagagaaagcggccagaagcggctgggaaggcatgttgatttacggttgcatccgcgatgttgacgtcatcgcgcagaccgacctgggtgttcaggcgttggccagccatccgaaaaaaaccgagaaacgcggaatcggtgacctgaatgtgttggtcaccttcggtggcgtgaccttccgtccgggagagtatctgtatgccgacaacaatggcgtcatcatttccccttcacccctgaccatgccggaataa

SEQ ID NO: 5668 - protein, 164 aa, Pseudomonas syringae pv. phaseolicola 1448A
MHYITPDLCDAYPDLIQVVEPMFSNFGGRDSFGGQIVTVKCFEDNSLVKEQVELDGKGKGKVLVVDGGGSLRCALLGDMLAEKAARSGWEGMLIYGCIRDVDVIAQTDLGVQALASHPKKTEKRGIGDLNVLVTFGGVTFRPGEYLYADNNGVIISPSPLTMPE

SEQ ID NO: 5669 - DNA, 492 bp, Dechloromonas aromatica RCB
  CDS (1)..(492): transl_table=11
atgaccttcaagacccctgacctgtgcgatgaattcgaatccgaacttggcaaaaccgttcgtgtcgtcaccccgatgttccagcgctacggcggccgcaccagcttttcaggccagatcgtgacgctgaagatttttgaggacaactcgctggtccgcgaagttttcggcgaagacggcaaaggcaaggtcctggtcattgatggtggcggctcgctgcgctgcgcgctggtcggtgaccagctggccattctggccaacaagaacggctgggaaggcgtcgtcgtctatggctgcatccgcgactcgggcgatatcaatggcatcgacatcggcgtccgcgccctgaatacccatccgcagaaaacgctgaagaagggcgttggcgacaagaacgtggccgtcaccttcggcggggtcactttcaacccgggtgaatatctctacgccgacgaagatggcgtcctcgtttcaggcaaagcgctgacctaa

SEQ ID NO: 5670 - protein, 163 aa, Dechloromonas aromatica RCB
MTFKTPDLCDEFESELGKTVRVVTPMFQRYGGRTSFSGQIVTLKIFEDNSLVREVFGEDGKGKVLVIDGGGSLRCALVGDQLAILANKNGWEGVVVYGCIRDSGDINGIDIGVRALNTHPQKTLKKGVGDKNVAVTFGGVTFNPGEYLYADEDGVLVSGKALT

SEQ ID NO: 5671 - DNA, 492 bp, Thermobifida fusca YX
  CDS (1)..(492): transl_table=11
atgtccacacccttcgccactgccgacctcatcgacgcctacggtgacgaactcgccagttgcgagctccagttccgccagttcggcggggtacgggccttcttcggccccatccagaccatcaagtgccatgaagacaatgccctcgtcaaagaagtcctcaaccagcccggggacggccgggtgctcgtcgtcgacgggggcagctccctgcggtctgcgctgatgggcgacatgatcgcccgggctgccgaacgcaacggctgggcaggagtggtgatcaacggcgcggtccgcgacgtcgccgaactggccacgctgtccctcggcatcaaggcgctgggctccaacccccgcaagtccgctaaggcaggcgcgggccaagtaggcgtgaatgttgccttcggtcaagtagtattcactccgggtgcatggctgtacagcgacgaagacggaatcgtcgtcagcgccaaagagctgtctttgccctga

SEQ ID NO: 5672 - protein, 163 aa, Thermobifida fusca YX
MSTPFATADLIDAYGDELASCELQFRQFGGVRAFFGPIQTIKCHEDNALVKEVLNQPGDGRVLVVDGGSSLRSALMGDMIARAAERNGWAGVVINGAVRDVAELATLSLGIKALGSNPRKSAKAGAGQVGVNVAFGQVVFTPGAWLYSDEDGIVVSAKELSLP

SEQ ID NO: 5673 - DNA, 498 bp, Ralstonia eutropha JMP134
  CDS (1)..(498): transl_table=11
atgaagcatgtcaccaccgatctttgcgatgccaacgagccgcgtctggctgacggcacgctgcgcgtcatggcaccggtgtttcgcgcgttcggcaagcagcaggcctttgccggcccggctgcgacgctgaagatctttgaagacaactcgctcgtgcgcgaggcgctggaatcgccggggcagggccgtgtgctcgtagtcgatggcggcggctcgctgcgctgcgcgctggtcgggggcaacctcggtctgctggccgagaagaacggctgggtcggcatcatcgtcaatggctgcgtgcgcgacacgggcgagctggatgtctgcgacatcggcatccgcgcgctcgccgcgcatccgcagaagagccagaagcgcggtgctggcgagcgcgacgtggcagtgcagatgcccggtgccgtggtacgccccggcaactggatctacgtggatgccgatggcgtactggtgtccgaagaaaagcttggtgcctga

SEQ ID NO: 5674 - protein, 165 aa, Ralstonia eutropha JMP134
MKHVTTDLCDANEPRLADGTLRVMAPVFRAFGKQQAFAGPAATLKIFEDNSLVREALESPGQGRVLVVDGGGSLRCALVGGNLGLLAEKNGWVGIIVNGCVRDTGELDVCDIGIRALAAHPQKSQKRGAGERDVAVQMPGAVVRPGNWIYVDADGVLVSEEKLGA

SEQ ID NO: 5675 - DNA, 492 bp, Pseudomonas fluorescens PfO-1
  CDS (1)..(492): transl_table=11
atgaaccattaccttacgcctgacctgtgcgacgcctatccggagctggttcaggtgctggaaccgatgttcagcaatttcggcggccgtgattcgttcggtggcgaaatcgtgaccatcaaatgcttcgaagacaactcgctggtcaaggaacaagccgagctcaagggcaacggcaaggtgctggtggtcgatggcggtggctcgctgcgctgcgcactgctgggcgacatgatcgccgagaaagccgcgaaaaacggttgggaagggctggtcatctacggctgcatccgtgatgtggacgtcatcgcccagaccgatcttggcgtgcaggccctggccagccatccgaaaaagactgaaaaacgcggtctcggcgacctcaacgtgccggtgaccttcgcgggtgtgaccttccatcccggtcagtacatctatgcggacaacaatggcgtgatcatctcgccaagtccgttgaaaatgcctgaataa

SEQ ID NO: 5676 - protein, 163 aa, Pseudomonas fluorescens PfO-1
MNHYLTPDLCDAYPELVQVLEPMFSNFGGRDSFGGEIVTIKCFEDNSLVKEQAELKGNGKVLVVDGGGSLRCALLGDMIAEKAAKNGWEGLVIYGCIRDVDVIAQTDLGVQALASHPKKTEKRGLGDLNVPVTFAGVTFHPGQYIYADNNGVIISPSPLKMPE

SEQ ID NO: 5677 - DNA, 498 bp, Burkholderia thailandensis E264
  CDS (1)..(498): transl_table=11
atgatgttcgccaccaccgacctttgcgacgcgaacgaagagcgcctcgcagccggcacgctgcgcgtgatcgagcccgtgttccgctcgttcggcggcgtgaggcgcttcgcggggccggccgcgacgctcaagctgttcgaggacaacacgctcgtgcgcgcggcgctggagcaggacggcgcggggcgcgtgctcgtcgtcgacggcggcggcagcctgcgctgcgcgctcgttggcggcaacctcggcaagctcgccgagaagaacggctgggtcggcatcgtcgtgaacggctgcgtgcgcgattcggccgaactcgccgaatgtcgcgccggcgtgctcgcgctcgccgcgcatccgcgcaagagcgacaagcgcggcgccggcgtgagcgacgtgcccgtcgacgtgcgcggcacgcgcatcgcgccgggcgactggatctacgcggacgccgacggcatcctcgtcagcgacgctgcgctgctcgcgtga

SEQ ID NO: 5678 - protein, 165 aa, Burkholderia thailandensis E264
MMFATTDLCDANEERLAAGTLRVIEPVFRSFGGVRRFAGPAATLKLFEDNTLVRAALEQDGAGRVLVVDGGGSLRCALVGGNLGKLAEKNGWVGIVVNGCVRDSAELAECRAGVLALAAHPRKSDKRGAGVSDVPVDVRGTRIAPGDWIYADADGILVSDAALLA

SEQ ID NO: 5679 - DNA, 495 bp, Burkholderia xenovorans LB400
  CDS (1)..(495): transl_table=11
atgagctttgctaccgcggacttgtgcgacgcgcacgaggaccagctggcgctcggcacgttgcgcgtgctcgagccggtctttcacctgttcagccgtgccgggtgtttcagcggtgaagcggtgacgctgaaggtattcgaggacaatgcgctcgtgcgcgccacgctcgaagagaagggcgcgggccgtgtgctggtggtcgacggcggcggcagccagcgctgcgcgctggtgggcggcaaccttgcgcagatcgcgcaacagaacggttgggcgggcatcgtcctgaacggctgcgtgcgcgatacgctggagctcaacgaagtgaacgtcggcattgcggctttggcaacctgcccgcggcgcggccagaagctcggcactggcgagcgtggcgtggcggtgcaattgcccggcgcgctggtgcgccctggtgaatggatctacgcggacagcgacggcgtgctggtggcgagcgcggcgttgaagtga

SEQ ID NO: 5680 - protein, 164 aa, Burkholderia xenovorans LB400
MSFATADLCDAHEDQLALGTLRVLEPVFHLFSRAGCFSGEAVTLKVFEDNALVRATLEEKGAGRVLVVDGGGSQRCALVGGNLAQIAQQNGWAGIVLNGCVRDTLELNEVNVGIAALATCPRRGQKLGTGERGVAVQLPGALVRPGEWIYADSDGVLVASAALK

SEQ ID NO: 5681 - DNA, 513 bp, Ralstonia metallidurans CH34
  CDS (1)..(513): transl_table=11
atgaagcctgttatgaagcccgtaaccaccgatatttgcgacgccaatgaagaccgcctggccgatggctccctgcgcgttctgacgccggggttcctccatttcggcaagcgcatggccttttcggggcctgccgtgacgctcaaagtgttcgaggacaactcaatggtgcgcgccacgctggaaacgccgggtgcgggtcgggtgctggtagtggatgggggtggttcgatgcgttgcgcgctggttggcgggatgctcggcgtgctggccgagaagaatggctgggctgggatcatcgtgaacggctgcgtgcgggattcggaagagctcaaggtgtgcgacgtcggcatccgcgcgctgggcgtgcatccgcagaaaagccagaagcgcaatgtcggtcaggaggacgtgaccgtgcagatgccgggtgcggtcgtgcggccgggcaactggatctacgcggacgccgatggcgtgctggtctccgacgagaagctggacggggcctga

SEQ ID NO: 5682 - protein, 170 aa, Ralstonia metallidurans CH34
MKPVMKPVTTDICDANEDRLADGSLRVLTPGFLHFGKRMAFSGPAVTLKVFEDNSMVRATLETPGAGRVLVVDGGGSMRCALVGGMLGVLAEKNGWAGIIVNGCVRDSEELKVCDVGIRALGVHPQKSQKRNVGQEDVTVQMPGAVVRPGNWIYADADGVLVSDEKLDGA

SEQ ID NO: 5683 - DNA, 498 bp, Myxococcus xanthus DK 1622
  CDS (1)..(498): transl_table=11
atgagcacgttcaccgacttcaaaacggccgacctctgcgatgcccacgcgggcacgccgcggttccagattgccgagcccgggttccaggactacggcggcgtccggaccttcgcgggtcccatcagcacggtgcgggcacccgaggacaactccctcgtgcgcaaggccttggaggagcccggccagggccgggtgctggtagtggacggaggaggcagccgccgctgcgcgctcgtgggagaccagctcgcgttgctcgcccagcagaatggctgggcgggcgtggtggtgaatggctgcatccgagacgccgaggacgtgggccgcatgcgcatcggcgtcaaggcgctgggcacccacccgctcaagagcctcaaacgcaacgagggacaacgtgacgtggaggtccgcttcgccggagtcaccttccgccccggccactacgtctacgcggatctggacggcatcgtcacctccgagtcgcccctgggctga

SEQ ID NO: 5684 - protein, 165 aa, Myxococcus xanthus DK 1622
MSTFTDFKTADLCDAHAGTPRFQIAEPGFQDYGGVRTFAGPISTVRAPEDNSLVRKALEEPGQGRVLVVDGGGSRRCALVGDQLALLAQQNGWAGVVVNGCIRDAEDVGRMRIGVKALGTHPLKSLKRNEGQRDVEVRFAGVTFRPGHYVYADLDGIVTSESPLG

SEQ ID NO: 5685 - DNA, 480 bp, Mycobacterium sp. MCS
  CDS (1)..(480): transl_table=11
gtgaccatcgaaccgcgcgccaccgccgacctcgtcgacgacatcggacccgacgtccgcagttgtgatctgcagcttcgccagttcggcaggcgaccggaattcgccgggcgggtcaccacggtgcggtgcttccaggacaacgcgctactcaaatcggtgctgtcggaacccggcgacggcggcgtgctggtgatcgacggcgacggttcgctgcacaccgcgctggtcggcgatgtgatcgcagcgctgggccgcgacaacgggtggagcgggctgatcatcaacggcgccgtccgggatgcctcgacgctgcgcaccctcgacatcgggatcaaggccttgggcaccaacccgcgcaagagtacgaaaaccggtgcgggcgaacgggatgtccccgtcgatttcggcggcgtgacgttcacgccgggcgacgtcgcctacagcgacgacgacggaatcgtcgtcgtcacgccgtag

SEQ ID NO: 5686 - protein, 159 aa, Mycobacterium sp. MCS
MTIEPRATADLVDDIGPDVRSCDLQLRQFGRRPEFAGRVTTVRCFQDNALLKSVLSEPGDGGVLVIDGDGSLHTALVGDVIAALGRDNGWSGLIINGAVRDASTLRTLDIGIKALGTNPRKSTKTGAGERDVPVDFGGVTFTPGDVAYSDDDGIVVVTP

SEQ ID NO: 5687 - DNA, 501 bp, Haemophilus somnus 129PT
  CDS (1)..(501)
atgtatattgatactgctgaactttgtgatatttacctcgatcaaattgatgttgttgagcctattttttccagttttggcggcaaaagcacattctttgggaaaatcaccacaatcaaatgctttgaaaacaatggattaatcagtgaaattctcgaagaaaatggcgaaggtcgagtgctattaattgatggtggcggtgcggttcgccgtgcattaattgatgcaaacttagcacaattagcggcagataacggctgggaagggattatcgtatacggagcaattcgtcaattacaacaattagaaaacataaatatcggcattcaagcacttgcacctatccctgtcggttcagatgaacaaagcataggagaaacggacgttccggtaaattttggtggcgtaaccttctttcctgatgactatgtttatgcagatcttaccggcattattctttctcaagagcctttagatttagaagagtttgatagcttataa

SEQ ID NO: 5688 - protein, 166 aa, Haemophilus somnus 129PT
MYIDTAELCDIYLDQIDVVEPIFSSFGGKSTFFGKITTIKCFENNGLISEILEENGEGRVLLIDGGGAVRRALIDANLAQLAADNGWEGIIVYGAIRQLQQLENINIGIQALAPIPVGSDEQSIGETDVPVNFGGVTFFPDDYVYADLTGIILSQEPLDLEEFDSL

SEQ ID NO: 5689 - DNA, 498 bp, Actinobacillus pleuropneumoniae serovar 1 str. 4074
  CDS (1)..(498)
atgcgtattgatacctcagcactttgtgatatttattccgatcaggtcgatgtagtcgagccaatcttttcgagctttggcggagcctcttctttttacggtaaaattaccacggtaaaatgctttgaaagcaacggtttaattgccagcgtgttagaagaagaaggtcaaggaagagtattgctgattgacggcggcggtgcggttcgtcgtgcattaatcgatgcggaactggcgcaacttgcgcttgataacggttgggaaggaattatcgtttatggtgcggttcgtcagttggacgtattggaaactttggacatcggtattcacgcattagcgccgattccggtcggtgccgatgataacgaaatcggcgaagtcgatacgccggtgaatttcggcggcgtgactttcttcccggaagattatgtttatgcggatttaaccggcattattctttcgccggaattgctggatttagcagaattggaagagtaa

SEQ ID NO: 5690 - protein, 165 aa, Actinobacillus pleuropneumoniae serovar 1 str. 4074
MRIDTSALCDIYSDQVDVVEPIFSSFGGASSFYGKITTVKCFESNGLIASVLEEEGQGRVLLIDGGGAVRRALIDAELAQLALDNGWEGIIVYGAVRQLDVLETLDIGIHALAPIPVGADDNEIGEVDTPVNFGGVTFFPEDYVYADLTGIILSPELLDLAELEE

SEQ ID NO: 5691 - DNA, 507 bp, Rubrivivax gelatinosus PM1
  CDS (1)..(507)
atgagccgcccggccctcgaatttgcagtttgcgacctgtgcgacgagcacaagaacgacaccgacggcgccttccgcgtgctgccgccggtgttccacagctacggcggcgtcgccaagttcgccgggccggtgagcacggtgaagtgcttcgaggacaacagcctggtgaagctcgcgctcgacgaacccggccagggccgcgtgctggtggtcgacggcggcggctcgctgcgccgcgcgctggtcggcggcaacatcggcgcggccgccgcgaagaacggctgggccggcgtgctggtgaacggctgcgtgcgcgacgcggcggaactggcggccagcgcggtgggcatccgcgcgctggcgctgatgccgctgccgaccgagaagcgcaacgagggccagcgcgacgtggcggtgcaggtgcagggcgtgtgggtgcgggtgggagactggctgtatgccgatgaagacggcgtcgtcgtgatgccgtcgccggccggttga

SEQ ID NO: 5692 - protein, 168 aa, Rubrivivax gelatinosus PM1
MSRPALEFAVCDLCDEHKNDTDGAFRVLPPVFHSYGGVAKFAGPVSTVKCFEDNSLVKLALDEPGQGRVLVVDGGGSLRRALVGGNIGAAAAKNGWAGVLVNGCVRDAAELAASAVGIRALALMPLPTEKRNEGQRDVAVQVQGVWVRVGDWLYADEDGVVVMPSPAG

SEQ ID NO: 5693 - DNA, 510 bp, Vibrio sp. Ex25
  CDS (1)..(510)
atggaatacaatacctcagcactctgtgatatctacctcgatcaggtagatgtggttgaaccaatgttcagtaattttggcggtcgcgcttcatttgccgggcaaatcaccaccatcaagtgttttgaagataattcgttgatccgcgagacattagagcaagatggacttggtcgtgttttgttaattgacggtggcggttccctacgtaaagcccttatcgatgcagaaatcgcaactattgcggaagaaagcgagtgggaaggcattgtcgtttacggctgtgttcgtgaagtagatgaacttgaagatatgaatttaggcattcaagccctcgcttctattcctgttggagcgaccagtcagggtattggcgaattggatgtaccagtcaactttggcggcgtcagcttcttacctgaagattatatttatgctgatagcactgggatcatcctgtcgcctgagccattgaatattgatttagagttggatgaagaagaagaataa

SEQ ID NO: 5694 - protein, 169 aa, Vibrio sp. Ex25
MEYNTSALCDIYLDQVDVVEPMFSNFGGRASFAGQITTIKCFEDNSLIRETLEQDGLGRVLLIDGGGSLRKALIDAEIATIAEESEWEGIVVYGCVREVDELEDMNLGIQALASIPVGATSQGIGELDVPVNFGGVSFLPEDYIYADSTGIILSPEPLNIDLELDEEEE

SEQ ID NO: 5695 - DNA, 486 bp, Shewanella sp. ANA-3
  CDS (1)..(486): transl_table=11
atggaatacaacacctcagaactatgtgacatgtacttagatgtcgtagatgtagtcgagcccatgttcagtaactacggtggttgtagctcttttggcggttctatcagcacaattaagtgctttgaagacaacggcctaatcaccgaggtcttacaagaagatggccaaggtaaagtcttactggttgacggtggtggctcattacgccgcgccctgatcgatgcttctatcgctgaaatcgcagtcaacaacaactgggaaggcattatcgtttacggttcagtacgcgatgtggatgcactggaagagttagacatcggcattcaagcccttgcctcaattccagtgggtgccgatggcaattcagtgggcgaagtggaaattccggtcaactttggcggcgtaaccttcctcccaggcgatcatatctatgccgataacaccggcattatcctgtcgccagaaccactcgacattgagtaa

SEQ ID NO: 5696 - protein, 161 aa, Shewanella sp. ANA-3
MEYNTSELCDMYLDVVDVVEPMFSNYGGCSSFGGSISTIKCFEDNGLITEVLQEDGQGKVLLVDGGGSLRRALIDASIAEIAVNNNWEGIIVYGSVRDVDALEELDIGIQALASIPVGADGNSVGEVEIPVNFGGVTFLPGDHIYADNTGIILSPEPLDIE

SEQ ID NO: 5697 - DNA, 495 bp, Shewanella sp. ANA-3
  CDS (1)..(495): transl_table=11
atgcttgatctattgcctgatttgttcgatcactaccctacaaaactgtcgctgttaccgctcgattttcgcagttttggtggtaagcgtctgttttggggtgaagttgtgacggtcaaatgttttgaagataactccaaagtgaaagaagtgctggcccagcccggtcatggaaaagtattggtcgtcgatggtggcggttcaccccggcgggcgttacttggggatttgatcgcgcaaagtgccctcgataacggttggcaaggtgtggtgattaatggctatgtccgtgatgtggcaaggctttccacttttaatctcggcgtctatgccctaggggctatgccgatcaagaccgaaaaattaaaccaaggtcacatcgatgtgccgattgagtttggcgctgtgacagtaaaacccggcatgatgctttatgccgatgagaatggtattgccgtgagcgaggcatcattaaactttgcctttctaagttaa

SEQ ID NO: 5698 - protein, 164 aa, Shewanella sp. ANA-3
MLDLLPDLFDHYPTKLSLLPLDFRSFGGKRLFWGEVVTVKCFEDNSKVKEVLAQPGHGKVLVVDGGGSPRRALLGDLIAQSALDNGWQGVVINGYVRDVARLSTFNLGVYALGAMPIKTEKLNQGHIDVPIEFGAVTVKPGMMLYADENGIAVSEASLNFAFLS

SEQ ID NO: 5699 - DNA, 633 bp, Alkalilimnicola ehrlichei MLHE-1
  CDS (1)..(633): transl_table=11
atgagggcgggcaatgtgcgcatgacggctccgcgggctgtcgggacccggtcggctgcgacccgggggtcgggccgggtttcgttccgggtttccttacggtgcataataggcagattggatgataacaacagcgaggagacccgaatgagtgttccgacgaccgacctctgcgatgatttcgccgacgagctgcgggtgatgaacccgatgtttcgggattttggcggacgggtgcgcttccacggtccggtgaccaccgtgaaactgttcgaggataactcggcggtgcgggaggcgttgagcgagcccggcgaggggcgggtgctggtggtcgacggcggaggctccatgcggtgtgccctgttgggcgacaacctggcggccctggggcagaagaacggctgggccggggtagtggtctatgggtgcgtgcgcgacagcgcggagctggccacgatcgatctgggtgtgaaggcgctcaacgtgcacccgctgaagagtgtcaaaaagggcatcggcgagcgcgatgtcaccgtcaccttcgccgggatcacgattcaggccggcgactggctgtacgccgacgaggacggcattgtcgtggcccgcaacagcctggtgcaggcctga

SEQ ID NO: 5700 - protein, 210 aa, Alkalilimnicola ehrlichei MLHE-1
MRAGNVRMTAPRAVGTRSAATRGSGRVSFRVSLRCIIGRLDDNNSEETRMSVPTTDLCDDFADELRVMNPMFRDFGGRVRFHGPVTTVKLFEDNSAVREALSEPGEGRVLVVDGGGSMRCALLGDNLAALGQKNGWAGVVVYGCVRDSAELATIDLGVKALNVHPLKSVKKGIGERDVTVTFAGITIQAGDWLYADEDGIVVARNSLVQA

SEQ ID NO: 5701 - DNA, 534 bp, Pseudoalteromonas tunicata D2
  CDS (1)..(534): transl_table=11
atgcaatacaatacttcagagttatgtgaccaatttgccgatttaatcgatgtactcgaacctatgttcgttaactttggtggcagaacatcatttggcggccaaatcaaaaccataaagtgtttcgaaagtaatcaacttattcgcaccaccctagaaaaagatggcactgggcttgtactgttaattgatggtggtggttctacacgtcgcgcattaattgatattgaactggcagagttagcgcttgaaaataactgggaaggaatcgtggtttatggtgcggtgcgtcatgttgatgaactagacgaacttgaccttggtattcaagcaatcgcatcaattcctgttgctgctgatgacaataacaacggcgaagcgggtgtaccagttaatttcgctggtgtttcattttatgatgacgattttttatatgccgatagtacaggtatcatcattgctcctgaagatttagaaggcaatgatagcgaagaactagtagaagatgactttgaggattctgaagtacaatga

SEQ ID NO: 5702 - protein, 177 aa, Pseudoalteromonas tunicata D2
MQYNTSELCDQFADLIDVLEPMFVNFGGRTSFGGQIKTIKCFESNQLIRTTLEKDGTGLVLLIDGGGSTRRALIDIELAELALENNWEGIVVYGAVRHVDELDELDLGIQAIASIPVAADDNNNGEAGVPVNFAGVSFYDDDFLYADSTGIIIAPEDLEGNDSEELVEDDFEDSEVQ

SEQ ID NO: 5703 - DNA, 498 bp, Photobacterium sp. SKA34
  CDS (1)..(498): transl_table=11
atgaaagatttactaccggatttatgcgatcactatgaacaagatatctactttttgcctatcgggtgccatgattatggtgggagaaacattttttacgggcagtgtgtcacgctccgatgctttgaagacaatagcttagttcgtgatatactgtctcaagatggcacaggtaaagtgttatttattgatggtcatggtagttgtcgacgcgcgttacttggtgatcaattagccttgttggcgattaagaataattggcaagggatcattgttaatggtgccgttcgtgatatagcaacattatcgacattggatttaggcgtaaaagcattaggagggtgtccgattaagactgtgaagcgtcaaatgggagagcttaatgtgacattaaatatcagtgaaaaattagtttatcctggtgattatatttatgcagatttaaatggaattatcttgtctaagcaagcgttagatttatctgtcttaaatggctaa

SEQ ID NO: 5704 - protein, 165 aa, Photobacterium sp. SKA34
MKDLLPDLCDHYEQDIYFLPIGCHDYGGRNIFYGQCVTLRCFEDNSLVRDILSQDGTGKVLFIDGHGSCRRALLGDQLALLAIKNNWQGIIVNGAVRDIATLSTLDLGVKALGGCPIKTVKRQMGELNVTLNISEKLVYPGDYIYADLNGIILSKQALDLSVLNG

SEQ ID NO: 5705 - DNA, 486 bp, Photobacterium sp. SKA34
  CDS (1)..(486): transl_table=11
atggaatacaatacctctgaactgtgtgatatttatctcgaacacgttgatgttgttgagcctatgttcagctcttacggtggacgcagctcttttggcggtcaaataactaccataaaatgttttgaagataaaggtgttattcgccaagtattagaacaatcaggcataggacgagtgttattaattgacggtggtggttcactaagacgtgcattaattgatatcgatttggctcatttagcgcaagaaaatgaatgggaagggctgattatttatggctgtgttcgccatgttgatgagttagatgaattagatcttggtattcaggcactcgcttcaatcccagtgggcgctgatcaacgtgatatcggtgagattgatgtcgcggtcaattttggcggggtaaccttcttaccagaagatcatatctatgcagataatacaggggttattttatcgcctgagcctcttgatatcgattag

SEQ ID NO: 5706 - protein, 161 aa, Photobacterium sp. SKA34
MEYNTSELCDIYLEHVDVVEPMFSSYGGRSSFGGQITTIKCFEDKGVIRQVLEQSGIGRVLLIDGGGSLRRALIDIDLAHLAQENEWEGLIIYGCVRHVDELDELDLGIQALASIPVGADQRDIGEIDVAVNFGGVTFLPEDHIYADNTGVILSPEPLDID

SEQ ID NO: 5707 - DNA, 489 bp, Oceanospirillum sp. MED92
  CDS (1)..(489): transl_table=11
gtggaagatcttctacctgaactgtgtgaccaatttcctgaacttgtgcaggtcgtcgagccgatgtttggtaactttggcggtaaagagcgctttggcggtgaaattgttactttgaaggcttttgaagataactctctggttcgagagcaagttgcgcttccgggtgagggcaaagtgctggtggttgatggtggtggctccatgcgcaaggcgatgctgggtgacatgctggcagagaaggcaacaaagaacggttgggaagggatcatcatttacggatgcattcgcgatgttaatgcaatcagtgatctggacatcggtgtgcaggcgctaggctgccacccaatgaagacagaaaagaaaggcttgggtgagctgaatgtcgatattacctttggtggtgttaccttcaaaccaggtcagtacgtctatgctgataataatggcgttctgatctcaccagagaagctagaggtatctgagtaa

SEQ ID NO: 5708 - protein, 162 aa, Oceanospirillum sp. MED92
MEDLLPELCDQFPELVQVVEPMFGNFGGKERFGGEIVTLKAFEDNSLVREQVALPGEGKVLVVDGGGSMRKAMLGDMLAEKATKNGWEGIIIYGCIRDVNAISDLDIGVQALGCHPMKTEKKGLGELNVDITFGGVTFKPGQYVYADNNGVLISPEKLEVSE

SEQ ID NO: 5709 - DNA, 477 bp, marine gamma proteobacterium HTCC2207
  CDS (1)..(477): transl_table=11
atgaaatccactcccgacctctgtgatcagtaccctgatttagttcaagtggttgagcccatgttcagcaactttggcggtcgtgagtgtttttcgggcgaaattgtcacggttaaatgttttgaagataacagctgcgtgaaacagttggtcgatactcaggggcaagggcgtgtcatggtagtagatggcggcggcagcatgcgccgcgcctgtctcggcgatatgttggcggaaaaggcatcagtaaacggctggagtggtttgattatctatggctgcattcgcgatgtggatgagattatggccacggatatcggcgttcaggctctcgggacccacccaatgaaaaccgataaaaaaggcattggcgaaactcaggtaagcattacttttggcggcgtcacctttaaccctggcaactatatttacgccgataacaacggcattgttgtggccacgcagcaactggtttaa

SEQ ID NO: 5710 - protein, 158 aa, marine gamma proteobacterium HTCC2207
MKSTPDLCDQYPDLVQVVEPMFSNFGGRECFSGEIVTVKCFEDNSCVKQLVDTQGQGRVMVVDGGGSMRRACLGDMLAEKASVNGWSGLIIYGCIRDVDEIMATDIGVQALGTHPMKTDKKGIGETQVSITFGGVTFNPGNYIYADNNGIVVATQQLV

SEQ ID NO: 5711 - DNA, 480 bp, Mycobacterium sp. JLS
  CDS (1)..(480): transl_table=11
gtgaccatcgaaccgcgcgccaccgccgacctcgtcgacgacatcggacccgacgtccgcagttgtgatctgcagcttcgccaattcggcgggcgaccggaattcgccgggcgggtcaccacggtgcggtgcttccaggacaacgcgctgctcaaatcggtgctgtcggaacccggcgacggcggcgtgctggtgatcgacggcgacggttcgttgcacaccgcgctggtcggcgatgtgatcgccgcgctgggccgcgacaacgggtggagcgggctgatcatcaacggcgccgtccgggacgcctcgacgctgcgtaccctcgacatcgggatcaaggccttgggcaccaacccgcgcaagagtacgaaaaccggtgcgggcgaacgggatgtccccgtcgagttcggcggcgtgacgttcacgccgggcgacgtcgcctacagcgacgacgacggaatcgtcatcgtcacgccgtag

SEQ ID NO: 5712 - protein, 159 aa, Mycobacterium sp. JLS
MTIEPRATADLVDDIGPDVRSCDLQLRQFGGRPEFAGRVTTVRCFQDNALLKSVLSEPGDGGVLVIDGDGSLHTALVGDVIAALGRDNGWSGLIINGAVRDASTLRTLDIGIKALGTNPRKSTKTGAGERDVPVEFGGVTFTPGDVAYSDDDGIVIVTP

SEQ ID NO: 5713 - DNA, 489 bp, Oceanobacter sp. RED65
  CDS (1)..(489): transl_table=11
atgactaattacgtaacaccggatttatgcgatgagtatccagaagttgaagttcttgagccaatgttcaataactatggtggcagagaatcctttgggggcgaagttgtcaccattaaatgtcacgaagacaactcgctggtaaaggagaatgttgataagccaggccaaggtaaagtcatggtagtcgacggcggtggctctttgcgcaatgctatgctgggtgacatgctggccgaaaaagcagctaagaatggttgggaaggtattatcattaatggttgtatccgtgatgttgatgtcatcatggaaaccaatctcggagttcaggcgcttgcgacaaacccgcgtaaaacagagaagaagggcattggcgaaatgaacattcctgtaaaattcgcaggcgttcacattaagccaggtcaattcatttacgcagacaacaacggcattattgtttcagataaaaagctagaaatgccagcataa

SEQ ID NO: 5714 - protein, 162 aa, Oceanobacter sp. RED65
MTNYVTPDLCDEYPEVEVLEPMFNNYGGRESFGGEVVTIKCHEDNSLVKENVDKPGQGKVMVVDGGGSLRNAMLGDMLAEKAAKNGWEGIIINGCIRDVDVIMETNLGVQALATNPRKTEKKGIGEMNIPVKFAGVHIKPGQFIYADNNGIIVSDKKLEMPA

SEQ ID NO: 5715 - DNA, 921 bp, Xanthomonas oryzae pv
  CDS (1)..(921): transl_table=11
atgggcatcgttgcgtggcggcgtcgctatcgttgtgggaaggcgaacgacgacagcgctgacatggcgcatgggcattgcagcctgtcggagacgatctgggtaagacgtcaacagcgcagttgtcggcaaccgcagcggccgcgtcatgcgcgtcgatgcgccagagctgcgcattcgcagtgcgcgttctgggctgtcgcgccgggggctgttcgcgtatgcgccactgaaaacggccagcacgcagcacacgacgcgcggcgcgcccaccgcagcggcaaccaagaaaccgcagggctacgtactgcccacatccgcgcaccgccgctgcctgggtgcttacgcggcgcctcacaggtcgcccgcacaccgccgcggccggctaccatgccagctctgccgcgcgagactgccccgatgacctggaccacgcctgatctgtgtgaccgctaccccgaggtgacgattgccgagccgccgtttcgccatttcggcgggcgcaccgtgttctgcgggccgatggtcacggtgcgttgtttcgaagataactcgcggatgcgcgagctggccgccacgccgggcgatgcccgggtgctggtggtggacggccagggctcgctgaagcatgcgctgctgggcgaccagatcgcggccaacgcggtggcgaacggctgggccggcgtgctgatccatggcggcgtgcgcgatgtcgagatgcttgcctcgctgccgttgggggtgctggcgctggccgcctgtccgcgccgcaccgagcgacgcgatctgggcgatgtggatgtgccggtgagttttgcgggcgtgcccttcgttccaggccattggctgtatgccgatgccaatggcgtgctggtgtcgccgcagccgttgtcgttggatggcgccagcggatcgatctga

SEQ ID NO: 5716 - protein, 306 aa, Xanthomonas oryzae pv
MGIVAWRRRYRCGKANDDSADMAHGHCSLSETIWVRRQQRSCRQPQRPRHARRCARAAHSQCAFWAVAPGAVRVCATENGQHAAHDARRAHRSGNQETAGLRTAHIRAPPLPGCLRGASQVARTPPRPATMPALPRETAPMTWTTPDLCDRYPEVTIAEPPFRHFGGRTVFCGPMVTVRCFEDNSRMRELAATPGDARVLVVDGQGSLKHALLGDQIAANAVANGWAGVLIHGGVRDVEMLASLPLGVLALAACPRRTERRDLGDVDVPVSFAGVPFVPGHWLYADANGVLVSPQPLSLDGASGSI

SEQ ID NO: 5717 - DNA, 501 bp, Arabidopsis thaliana
  CDS (1)..(501)
atggcgtttgtgaccactgcggaagtgtgtgacgcgaatcaagagatgattcgaagtggccagctccgagctctgcaacccgtttttcagatttatggtcgtcgtcaaatattttcaggtccagtagttactgttaaagtctttgaagacaatggcttaatccgtcacttcctcgaagagaaaggcaatggtagagttcttgtggtggatggtggagggagtttacgctgtgcgatactaggaggaaacccggtcgtacaagcgcagaacaacggatgggcagggatcatagtgaatggatgcatcagagacgttgatgagatcaatggttgcgacattggagtgagagctttagcttctcatccaataaaggctagtaagaaaggacttggtgaacaaagagtctctttgaacattgcaggcactcggatatgcgatggcgaatggctttatgcagatactgatggtatccttgtttctcagattgaattatccgtttaa

SEQ ID NO: 5718 - protein, 166 aa, Arabidopsis thaliana
MAFVTTAEVCDANQEMIRSGQLRALQPVFQIYGRRQIFSGPVVTVKVFEDNGLIRHFLEEKGNGRVLVVDGGGSLRCAILGGNPVVQAQNNGWAGIIVNGCIRDVDEINGCDIGVRALASHPIKASKKGLGEQRVSLNIAGTRICDGEWLYADTDGILVSQIELSV

SEQ ID NO: 5719 - DNA, 486 bp, Photobacterium profundum
  CDS (1)..(486): transl_table=11
atggaatataacacgtccgaactatgtgacatttatctggatcaggttgatgttattgagccaatgttcaattcttatggtggtcgcagttccttcggtggacaaattactacggtaaaatgtttcgaagataatgcgctacttcgaacggtattacagcagcccggtgtcggtcgcgtattgcttgttgatggtggcggctcactacgtcgagcgctcattgatgctgacattgctctgctggcaacagagaatgagtgggaaggtttaatcgtctacggtagtgtgcgcaatgtcgatgacttagatgaactcgagattggtattcaagcgatagcgtcaatacctgtaggagcggatcagcaaggtgtaggcgatgttgatattgccgtaaactttggtggcgtgacgtttttaccagaagatcatatttacgctgacaacacaggggttattctgtcgccagaaccactcgatatcgaataa

SEQ ID NO: 5720 - protein, 161 aa, Photobacterium profundum
MEYNTSELCDIYLDQVDVIEPMFNSYGGRSSFGGQITTVKCFEDNALLRTVLQQPGVGRVLLVDGGGSLRRALIDADIALLATENEWEGLIVYGSVRNVDDLDELEIGIQAIASIPVGADQQGVGDVDIAVNFGGVTFLPEDHIYADNTGVILSPEPLDIE

SEQ ID NO: 5721 - DNA, 501 bp, Arabidopsis thaliana
  CDS (1)..(501)
atggcgtttgtgacaactgcggaagtttgtgacgcgaatcaagagctgattcggagtggtcagctacgagctttgcaacccattttccagatttatggccgtcgacaaatattctcaggaccagttgtcactgtcaaagtttttgaagacaatggcttaatccgtcaattcatcgaggagaaaggaaacggtagagttcttgtggtggatggtggagggagtcaacgatgtgcaatactcggaggtaaccccgttgttcaagctcagaacaacggatgggcaggaatcgttgtgaacggatgcatcagagacgtcgatgagatcaacggttgtgatatcggagtgagagctttggcctctcatccgataaaagcgagtaagaaaggacttggagaacaacgagttccggtaaatatcgcagggactcggatttgtgatggtgaatggctttatgcagatactgatgggattcttgtctcccaaattgagttatccgtttaa

SEQ ID NO: 5722 - protein, 166 aa, Arabidopsis thaliana
MAFVTTAEVCDANQELIRSGQLRALQPIFQIYGRRQIFSGPVVTVKVFEDNGLIRQFIEEKGNGRVLVVDGGGSQRCAILGGNPVVQAQNNGWAGIVVNGCIRDVDEINGCDIGVRALASHPIKASKKGLGEQRVPVNIAGTRICDGEWLYADTDGILVSQIELSV

SEQ ID NO: 5723 - DNA, 486 bp, Shewanella oneidensis
  CDS (1)..(486): transl_table=11
atggaatacaacacctcagaactatgtgacatgtacttagatgtcgtagatgtagtcgagcccatgttcagtaactacggtggttgtagctcttttggcggttcaatcagcaccattaagtgctttgaagacaacggcctaattaccgatgtcttacaagaagacggccaaggtaaagtcctactcgtcgatgggggtggctcattacgccgtgctcttatcgatggcactatcgcagagcttgcggttagcaacaactgggaaggcattatcgtttacggttcagtacgcgatgtggatgcactggaagaattagatatcggcattcaagcccttgcctctattcctgtgggcgctgatggcaattcagtgggtgaagtcgatattcccgtcaactttggcggcgtgaccttcctccccggtgatcatatctatgccgacaacacgggcatcattttatcgcctgaaccactcgacattgagtaa

SEQ ID NO: 5724 - protein, 161 aa, Shewanella oneidensis
MEYNTSELCDMYLDVVDVVEPMFSNYGGCSSFGGSISTIKCFEDNGLITDVLQEDGQGKVLLVDGGGSLRRALIDGTIAELAVSNNWEGIIVYGSVRDVDALEELDIGIQALASIPVGADGNSVGEVDIPVNFGGVTFLPGDHIYADNTGIILSPEPLDIE

SEQ ID NO: 5725 - DNA, 516 bp, Vibrio cholerae
  CDS (1)..(516): transl_table=11
atggaatacaatacttctgcgctgtgtgatatctatctcgaccaagtcgatgtcgtggagcctatgttcagcaactttggtggctgtgcttcgtttgccggtcaaatcaccacgattaagtgctatgaagataatggcttgatccgtgaaacccttgagcaagatggtcttggccgtattttgctgattgacggtggcggctcgctgcgccgtgcattaattgatgcagaattggcggctctagcggaagaaaatgagtgggaaggcattgtggtgtatggcagtgtccgtgaagtggatgaattggaagagatgagcatcggtattcaggcgattgcttctattcctgtcggcgcaacctcgcaaggcatcggtgaagtggacattccagtcaactttggcggcgtcaccttcctaccagaagattatctgtatgccgacaatactggcatcatcatctcgcaagagccgctgagcgcggatctgggcgaagaagaggaagatgagttgctgtaa

SEQ ID NO: 5726 - protein, 171 aa, Vibrio cholerae
MEYNTSALCDIYLDQVDVVEPMFSNFGGCASFAGQITTIKCYEDNGLIRETLEQDGLGRILLIDGGGSLRRALIDAELAALAEENEWEGIVVYGSVREVDELEEMSIGIQAIASIPVGATSQGIGEVDIPVNFGGVTFLPEDYLYADNTGIIISQEPLSADLGEEEEDELL

SEQ ID NO: 5727 - DNA, 513 bp, Vibrio parahaemolyticus
  CDS (1)..(513): transl_table=11
atggaatacaatacctcagcactctgcgatatctaccttgatcaggtcgatgtggttgaaccaatgttcagtaattttggcgggcgcgcgtcatttgccgggcaaatcaccaccattaagtgttttgaagacaactcactgatccgcgaaaccttagagcaagatggtcttgggcgtgtgttgttgattgacggtggcggttccttacgtaaagcgctcatcgatgcagaaattgctgcgattgcagaagaaaacgagtgggaaggcattgtcgtttacggttgtgtccgtgaagtcgatgaactagaagacatgaacctcggcattcaagctttggcatcgattcctgttggcgcggcaaaccagggcattggtgagctagatgtgcccgtaaacttcggcggcgttagcttccttccagaagattacatctacgccgacaacactggcatcatcctatctccagagccacttaatattgaccttgagttagatgatacggtcgaagagtag

SEQ ID NO: 5728 - protein, 170 aa, Vibrio parahaemolyticus
MEYNTSALCDIYLDQVDVVEPMFSNFGGRASFAGQITTIKCFEDNSLIRETLEQDGLGRVLLIDGGGSLRKALIDAEIAAIAEENEWEGIVVYGCVREVDELEDMNLGIQALASIPVGAANQGIGELDVPVNFGGVSFLPEDYIYADNTGIILSPEPLNIDLELDDTVEE

SEQ ID NO: 5729 - DNA, 522 bp, Vibrio vulnificus
  CDS (1)..(522): transl_table=11
atggaatacaacacttcagccctttgcgatatctatatggaccaagtggatgtagtcgagcctatgttcagtaactttggtggccgcgcttcctttgccggacaaatcaccacagtcaagtgttttgaggacaatgccctcattcgagaaacgctggaacaagatggtgttggccgtgtacttttggttgatggtggtggttcattacgtcgagcattacttgacggcgaacttgccgcgatagcggaagagaacgaatgggaaggcatcgttgtctacggctgtgtgcgtgaagtggacgagctggaagatatgaatatcggcattcaagctttagcctctattccagtgagtgctgccatgcagggtgttggcgaagtggatgttcccgtcaattttggtggggtgaccttccttccagaagactacctctatgcagatacaacgggcatcattctctcccaagagcctctcagtgccgatcttgaagaagatgaagaagagccagagctgctcgattaa

SEQ ID NO: 5730 - protein, 173 aa, Vibrio vulnificus
MEYNTSALCDIYMDQVDVVEPMFSNFGGRASFAGQITTVKCFEDNALIRETLEQDGVGRVLLVDGGGSLRRALLDGELAAIAEENEWEGIVVYGCVREVDELEDMNIGIQALASIPVSAAMQGVGEVDVPVNFGGVTFLPEDYLYADTTGIILSQEPLSADLEEDEEEPELLD

SEQ ID NO: 5731 - DNA, 501 bp, Arabidopsis thaliana
  CDS (1)..(501)
atggctgcatttgcaacggcagaagcgtgtgacagcaacgcagaactaatatcaaatggagacttacgcgctcttcacccaatcttcaagatctatggccaaagaagatgcttctcaggaccaatcgtgactctcaaggtctttgaagacaatgtcctcgtcagaaaccaactagaaacgaaaggagaaggcggagtcttagttatagacggtggtggaagcatgagatgcgcgcttgttggaggaaacctcggacagttagctcagaacaacgggtggtcggggattgttgtgaatggatgcgttagagatgtggatgagatcaatgactgcgatgttggggtcagggcattgggatctaacccgttgaaatctactaagaaaggtcatggtgagaagaatgtgccggttcatattggaggaactttgattagagatggagagtggctatatgctgatagtgatggtatcttgatctccaagaccgaactctctgtttga

SEQ ID NO: 5732 - protein, 166 aa, Arabidopsis thaliana
MAAFATAEACDSNAELISNGDLRALHPIFKIYGQRRCFSGPIVTLKVFEDNVLVRNQLETKGEGGVLVIDGGGSMRCALVGGNLGQLAQNNGWSGIVVNGCVRDVDEINDCDVGVRALGSNPLKSTKKGHGEKNVPVHIGGTLIRDGEWLYADSDGILISKTELSV

SEQ ID NO: 5733 - DNA, 513 bp, Acinetobacter sp
  CDS (1)..(513): transl_table=11
atgacaacgactgtaccttttgtgacttgtgatttacttgatgatcatactgataaagatattcaagtgcttacgccatcactagatggacgtttttttaaaagttatggcgctcgaaaaatattttcaggccaaatcgtaacagtaaagtgttttgaggataattcacgcgttaaagagctattggcaacagatggcacaggtaaggtcttggtagtggatggtggtgcatccatgcgctgtgcgctcatgggagatatgatcgccgagtctgctgttaagtatcattgggatggtgttgtaatctatggctgcatacgagatgtggacgctttggctgagctagatctgggtatacatgcattggcagccattccacaaaaaagtaatcgtcagggcataggagaagtgggtgtaaatctgtattttggtggtgttacattccaggcaggttgttatatttacgctgataacaacgggataatcgtatcaaaacaaaaattgattgattaa

SEQ ID NO: 5734 - protein, 170 aa, Acinetobacter sp
MTTTVPFVTCDLLDDHTDKDIQVLTPSLDGRFFKSYGARKIFSGQIVTVKCFEDNSRVKELLATDGTGKVLVVDGGASMRCALMGDMIAESAVKYHWDGVVIYGCIRDVDALAELDLGIHALAAIPQKSNRQGIGEVGVNLYFGGVTFQAGCYIYADNNGIIVSKQKLID

SEQ ID NO: 5735 - DNA, 498 bp, Burkholderia mallei
  CDS (1)..(498): transl_table=11
atgatgttcgccaccaccgacctttgcgacgcgcacgaagaccgcctcgcggccggcacgctgcgcgtgctcgagcccgtgttccgcccgttcggcggcgtgcggcgtttcgcggggccggctgcgacgctcaagctgttcgaggacaactcgctcgtgcgcacggcgctcgagcaggacggcgcggggcgcgtgctcgtcgtcgacggcggcggcagcctgcgttgcgcgctcgtcggcggcaacctcggcaagctcgccgagaagaatggctgggccggcatcgtcgtgaacggctgcgtgcgcgattcggacgaacttgccgaatgccgcgtcggcgtgctcgcgctcgccgcgcatccgcgcaagagcgacaagcgcggcgccggcgtgagcgacgcgcctgtcgacgtacgcggtacgcgcatcgtgccgggcgactggatctacgcggatgccgacggcgtcctcgtcagcgacgacgcgctgctcgagtga

SEQ ID NO: 5736 - protein, 165 aa, Burkholderia mallei
MMFATTDLCDAHEDRLAAGTLRVLEPVFRPFGGVRRFAGPAATLKLFEDNSLVRTALEQDGAGRVLVVDGGGSLRCALVGGNLGKLAEKNGWAGIVVNGCVRDSDELAECRVGVLALAAHPRKSDKRGAGVSDAPVDVRGTRIVPGDWIYADADGVLVSDDALLE

SEQ ID NO: 5737 - DNA, 480 bp, Chromobacterium violaceum
  CDS (1)..(480): transl_table=11
atgagcttggcgaccaccgatctgtgcgacgcgttcgatgccgaaatccaagtgctggacccggtgtttcaatcattcggcggccatgcccgcttccacggccccatcgccacgctgaagctgttcgaggacaacagcctggtgcgccaaatgctgggcgagcccgggaacggccgggtgctggtggtggatgggggcggttcgcgccgctgcgcgctgctgggggaccagttgggcgagctggcggtgaaaaacggctgggccggactggtgatagacggctgcgtgcgcgacagcgcggcgctgggcaagctgccgctcggcgtcaaggcgctggccgcgcatccgcgcaagtcggtgaagcgggacagcggccagcgggatctgccgctgcgcgtcgccggttgcgacatcctgccgggacaatggctttacgccgacgaggacggcgtgatcgtcagcggacgcccgctgggctag

SEQ ID NO: 5738 - protein, 159 aa, Chromobacterium violaceum
MSLATTDLCDAFDAEIQVLDPVFQSFGGHARFHGPIATLKLFEDNSLVRQMLGEPGNGRVLVVDGGGSRRCALLGDQLGELAVKNGWAGLVIDGCVRDSAALGKLPLGVKALAAHPRKSVKRDSGQRDLPLRVAGCDILPGQWLYADEDGVIVSGRPLG

SEQ ID NO: 5739 - DNA, 483 bp, Deinococcus radiodurans
  CDS (1)..(483): transl_table=11
atgaccgacttcataccgaccaccgacctgagtgacgcccagccacaagcgcaggtggctgcgccggtcttgcgcgacttcgggggccgaacgcgctttcagggcgccgccgtgaccctgcgaatcagcgaaaacaacccgctggtgcgccagacgctgcaaacgccgggcgcgggccgcgtgcttgtggtggacggcggcgggagcctcaactgcgcgctgctgggcggcaacctgggggtcttcggggtggagaacggctgggaaggcgtcatcatccacggctgcgtgcgcgacaccgccgagctgcgcgagctcgacctcggcatccgggcgctggcagcgcatccccggcgcagcggcaaactcgaggaaggcgagcgcgacgtgccggtcaccttcgcgggcgtgaccattcgccccggtgaccacgtggtggccgacgaggacggctggctggtcctcggcgcggagtcgccgtga

SEQ ID NO: 5740 - protein, 160 aa, Deinococcus radiodurans
MTDFIPTTDLSDAQPQAQVAAPVLRDFGGRTRFQGAAVTLRISENNPLVRQTLQTPGAGRVLVVDGGGSLNCALLGGNLGVFGVENGWEGVIIHGCVRDTAELRELDLGIRALAAHPRRSGKLEEGERDVPVTFAGVTIRPGDHVVADEDGWLVLGAESP

SEQ ID NO: 5741 - DNA, 486 bp, Erwinia carotovora subsp
  CDS (1)..(486): transl_table=11
atgaaatacgatacttctgaactgtgcgatatctatcacgaagaggtgaatgttgttgagcctctgttctccaactttggtgggcgtacttcatttggtggcaaaatcaccacggtgaaatgttttgaggataacggcctacttttcgatctttttgaagaaaacggcctcgggcgcgtgcttctgatcgatggcgggggctcagtgcgccgcgcgttgatcaacgcggagctcgctcggctggcgacccaaaacgagtgggaaggtattgtcgtgtacggtgccgtgcgtcaggttgacgatttggcggagctggatatcggcattcaagcgatggcagccattccggtcggcgcgggtagcgaaggcattggcgaaagcgatattcgcgtcaacttcggcggcgtaaccttcttttccggtgaccatctgtatgccgacaacacgggcattattctgtcggaagatccgctggatattgaataa

SEQ ID NO: 5742 - protein, 161 aa, Erwinia carotovora subsp
MKYDTSELCDIYHEEVNVVEPLFSNFGGRTSFGGKITTVKCFEDNGLLFDLFEENGLGRVLLIDGGGSVRRALINAELARLATQNEWEGIVVYGAVRQVDDLAELDIGIQAMAAIPVGAGSEGIGESDIRVNFGGVTFFSGDHLYADNTGIILSEDPLDIE

SEQ ID NO: 5743 - DNA, 498 bp, Haemophilus ducreyi
  CDS (1)..(498): transl_table=11
atgcgtattgatacttcagcactttgtgatatttattctgatcaagtagatgtagttgaacctattttttctagctttggcggagcttcgtcgttttatggcaaaattacgacagttaaatgttttgaaaacaatggcttaattgcagaagtattggaagaagaaggtgaagggcgagtattgctgattgatggtggtggagcagtgcgccgtgcattaattgatgcggaattggcaaaattagcggtagataatggctggcagggtattattgtttatggtgcggtgcgtcaattagatgtattagaaacattagatattggtattcacgctttagcaccgataccggttggtgcagaagatgcagatataggagaggtagatacgcctgttaattttgggggagtgacgttcttccctgaagattatgtgtatgcagatttaaccgggattattctttcaccggagttattagatttaaacgaattagctgaataa

SEQ ID NO: 5744 - protein, 165 aa, Haemophilus ducreyi
MRIDTSALCDIYSDQVDVVEPIFSSFGGASSFYGKITTVKCFENNGLIAEVLEEEGEGRVLLIDGGGAVRRALIDAELAKLAVDNGWQGIIVYGAVRQLDVLETLDIGIHALAPIPVGAEDADIGEVDTPVNFGGVTFFPEDYVYADLTGIILSPELLDLNELAE

SEQ ID NO: 5745 - DNA, 489 bp, Haemophilus influenzae
  CDS (1)..(489): transl_table=11
atgtttattgatacttcagaactttgcgatctttatgcagaacaagtggatgtcgtggagccaattttttcaagctttggtggcgtaagtaatttttacggtaaagtcactacagtaaaatgctttgaaagtaatggattaattgctgaagtattagaagaaaacggcgaaggtcgagtgcttgtcattgatggcggtggtgcggtacgccgtggtttgattgatgcagaattggctcaacttgccgttgataatggttgggaaggcattattgtatatggtgcagtacgccaaattcagcaattagaaaacctcgatattggtattcatgcccttgcgccaattccagttagtgcagatgaaagcagtgctggcgagagtgatattccagtgaattttggtggcgtaacctttttcccagaagattatatttacgcagatctgacaggaattatactttcgcaagagcctctagatttagaagattaa

SEQ ID NO: 5746 - protein, 162 aa, Haemophilus influenzae
MFIDTSELCDLYAEQVDVVEPIFSSFGGVSNFYGKVTTVKCFESNGLIAEVLEENGEGRVLVIDGGGAVRRGLIDAELAQLAVDNGWEGIIVYGAVRQIQQLENLDIGIHALAPIPVSADESSAGESDIPVNFGGVTFFPEDYIYADLTGIILSQEPLDLED

SEQ ID NO: 5747 - DNA, 486 bp, Idiomarina loihiensis
  CDS (1)..(486): transl_table=11
atggaatacaacacttcagaactttgcgatttataccccgatatggtcgatgtggttgaacccatgtttgagtcttacggaggccgcagctcttttggcggaagtttggttattatcaagtgccacgaagataaagggcttattgaggaaaccattgctgccgacggtggtggtaagattctattgattgatggtggtggttcatcgcgccgcgctctggttgatgcagccattgctgagcaagccatggataacgactgggaaggcattgtctgttatggcgccgtgcgcgaagttgacgcgctggaagagctggatattgggattctgggcgttgcttctattccggttggcgctattagcgaaggcgtaggtgaactgaatgtgccggtaaactttggtggcgtaacctttttgccggaagaccacctttatatcgatactactggcgttatcttgtctccggaaccattagatattgaatga

SEQ ID NO: 5748 - protein, 161 aa, Idiomarina loihiensis
MEYNTSELCDLYPDMVDVVEPMFESYGGRSSFGGSLVIIKCHEDKGLIEETIAADGGGKILLIDGGGSSRRALVDAAIAEQAMDNDWEGIVCYGAVREVDALEELDIGILGVASIPVGAISEGVGELNVPVNFGGVTFLPEDHLYIDTTGVILSPEPLDIE

SEQ ID NO: 5749 - DNA, 486 bp, Methylococcus capsulatus
  CDS (1)..(486): transl_table=11
atggagttcaccaccgccggcctctgcgaccagttccacggcacccatccgctccagatcgtggagccgctgttccgcccgttcggggcggtgtcccggtttcacggacggatcacgaccctcaaggtcttcgaagacagcgtgctgatccgtgaaaccctggcacaggaggtcgatggccgtgtcctggtcatcgacggcggcgcttcccatcgctgcgcgctgctgggcggaaatctggcgcggctggccgccgacaacggctggcagggcatcatcgtctacggctgtgtgcgggactccgtggaactcggtacggtccccatcggcatccgggcgctccacacccaccctctcgatagccacaagcggggcggcggcgaccgggactgcctgatcaccttcgccagcgtgaacttccgcaccgaccattatctctacgcggacgaagacggcatcgtcgtctccgaggagaagctaatctga

SEQ ID NO: 5750 - protein, 161 aa, Methylococcus capsulatus
MEFTTAGLCDQFHGTHPLQIVEPLFRPFGAVSRFHGRITTLKVFEDSVLIRETLAQEVDGRVLVIDGGASHRCALLGGNLARLAADNGWQGIIVYGCVRDSVELGTVPIGIRALHTHPLDSHKRGGGDRDCLITFASVNFRTDHYLYADEDGIVVSEEKLI

SEQ ID NO: 5751 - DNA, 474 bp, Mycobacterium bovis
  CDS (1)..(474): transl_table=11
gtggccatctcatttcgcccaaccgctgacctcgtcgacgacatcgggcccgacgtgcgcagctgtgacctacagttccgccaattcggcggccgatcgcagttcgccggaccgatcagcaccgtgcggtgttttcaggacaatgcgttgctgaagtcggtgctctcgcagccaagtgcgggcggtgtgctggtcatcgacggcgccgggtccctgcacaccgcgttggtcggtgatgtcatcgccgagttggcccgctctaccggctggaccgggttgatcgtccacggcgcggtgcgagatgccgccgcgctgcgcggcatcgacatcggcatcaaagcgctgggcaccaatccccgcaagagcaccaagaccggtgccggagaacgcgacgttgaaatcacgctgggcggggtgacattcgttccgggcgatatcgcctacagcgacgacgacggcatcatcgtcgtctga

SEQ ID NO: 5752 - protein, 157 aa, Mycobacterium bovis
MAISFRPTADLVDDIGPDVRSCDLQFRQFGGRSQFAGPISTVRCFQDNALLKSVLSQPSAGGVLVIDGAGSLHTALVGDVIAELARSTGWTGLIVHGAVRDAAALRGIDIGIKALGTNPRKSTKTGAGERDVEITLGGVTFVPGDIAYSDDDGIIVV

SEQ ID NO: 5753 - DNA, 474 bp, Mycobacterium leprae
  CDS (1)..(474): transl_table=11
gtgatcgtgtcatttcggccaaccgccgacctcgtcgacagcatcggggtcgacgtacgcagctgcgatcttcagtttcgccagttcggcggctgctcggagttcgccggcccgatcagtaccgtccgttgtttccaggacaatgcgctactcaaatcggtactctcccagacgagtgcgggtggagtgctggtggtcgacggcgccggttccctgcacaccgccttggtcggtgacgtgatcgccgaattggcccactccaacggctgggccggcctaatcgtcaatggtgcagtgcgagacgcagccgcactgcgcggtatcgacattggcatcaaggcgctaggcaccaatccacgcaaaagtactaagatcggcaccggggaacgccacgtcgaggtcaacctgggtggtgtgacattcgttccgggagaagtcgtctacagtgacgacgacggcattgtcgtcgtctaa

SEQ ID NO: 5754 - protein, 157 aa, Mycobacterium leprae
MIVSFRPTADLVDSIGVDVRSCDLQFRQFGGCSEFAGPISTVRCFQDNALLKSVLSQTSAGGVLVVDGAGSLHTALVGDVIAELAHSNGWAGLIVNGAVRDAAALRGIDIGIKALGTNPRKSTKIGTGERHVEVNLGGVTFVPGEVVYSDDDGIVVV

SEQ ID NO: 5755 - DNA, 483 bp, Mycobacterium paratuberculosis
  CDS (1)..(483): transl_table=11
gtgaccgtttcctttcggcccaccgccgacctggtcgacgacatcgggcccgacgtgcgcagctgcgacctgcaattccgtcagctcggcgggcgcaccgaattcgccgggccgatcagcacggtgcgctgcttccaggacaacgcgctgctcaaatcggtgctctccgagccgggtggcggcggagtcctggtggtcgacggcggcggctcgctgcacacggcgctggtcggcgacgtcatcgccgagctggcccgcgccaacggctgggccgggctgatcgtcaacggcgcggtgcgcgacagcgccgccctgcgcggcatggacatcggcgtcaaggcgctgggcaccaatccgcgcaagagcaccaagaccggcgccggcgagcgcgacgtcgacatcaccctcggcggtgtgacgttcacgcccggcgacatcgcctacagcgacgacgacgggatcgtcgtcgctgtaggagactaa

SEQ ID NO: 5756 - protein, 160 aa, Mycobacterium paratuberculosis
MTVSFRPTADLVDDIGPDVRSCDLQFRQLGGRTEFAGPISTVRCFQDNALLKSVLSEPGGGGVLVVDGGGSLHTALVGDVIAELARANGWAGLIVNGAVRDSAALRGMDIGVKALGTNPRKSTKTGAGERDVDITLGGVTFTPGDIAYSDDDGIVVAVGD

SEQ ID NO: 5757 - DNA, 498 bp, Nocardia farcinica
  CDS (1)..(498): transl_table=11
atgcccgaaccagcgaacaccgagtcaaccgtcgtcgccaccgccgatctcgccgacgagatcggccccgagatccgcagctgcgacacccagttcatccaattcggcggacgcgccgcgttctccggccgcatcaccaccatccgctgcttccaggacaacctgctggtgaagcagaccctcggcgagccgggggagggcaaggtgctcgtcgtcgacggcggcgcgagcgtgcacaccgccctcgtgggcgacatcatcgccggccgcggcgtggacaacggctgggcgggcgtgatcgtcaacggtgccgtgcgcgactcggcgatcctgcgcaccctcgacatcggcatcaaggcgctgggcaccaacccgcgcaagagcacccagaccggcagcggcgagcgcgacgtgccggtggagttcggcggcgtgaccttcgtgcccggcgagatgctctacagcgaccacgacgggatcgtggtgcgggccgagtga

SEQ ID NO: 5758 - protein, 165 aa, Nocardia farcinica
MPEPANTESTVVATADLADEIGPEIRSCDTQFIQFGGRAAFSGRITTIRCFQDNLLVKQTLGEPGEGKVLVVDGGASVHTALVGDIIAGRGVDNGWAGVIVNGAVRDSAILRTLDIGIKALGTNPRKSTQTGSGERDVPVEFGGVTFVPGEMLYSDHDGIVVRAE

SEQ ID NO: 5759 - DNA, 501 bp, Pasteurella multocida
  CDS (1)..(501): transl_table=11
atgtacattgatacttctgagctttgtgatatttatcttgatcaagtggatgtagttgaacctattttttcaagttttggtggcgtaaatcgtttttatggcaaagtcactaccgtaaaatgctttgaaaataatggcttaattacagatattttagaagagaacggcgaaggtcgtgttttattgattgatggtggtggtgcagtacgtcgtgctttagtcgatgcagagctcgcacaattagcagtcgataatggttgggaaggcattattgtttatggtgcggttcgtcaaattcaacaactcgaagagatggacattggtatacacgccttagcccctattcctgtgggcgcagataaacagaacatcggtgaaattgatgtaccagtcaattttggtggtgtgacatttttccctgaagattatgtgtacgccgatttaacaggtattattttatcgcaagagcctttagagctagatgagtttaatgacgcgtaa

SEQ ID NO: 5760 - protein, 166 aa, Pasteurella multocida
MYIDTSELCDIYLDQVDVVEPIFSSFGGVNRFYGKVTTVKCFENNGLITDILEENGEGRVLLIDGGGAVRRALVDAELAQLAVDNGWEGIIVYGAVRQIQQLEEMDIGIHALAPIPVGADKQNIGEIDVPVNFGGVTFFPEDYVYADLTGIILSQEPLELDEFNDA

SEQ ID NO: 5761 - DNA, 510 bp, Photorhabdus luminescens subsp
  CDS (1)..(510): transl_table=11
atgaaatatgatacttccgagctttgtgacatctatcaagaagaagtaaatgtggtagagcctatgttctccaattttggcgggcgtacttcatttggtggtcaaatcatcacggttaaatgctttgaagacaacgggctactttacgacctgcttgaagacaacggtcatggacgcattttactggtagatggtggtggttctgtacgccaagcattaattaacgctgagctggcacaactcgctgtgcaaaatggatgggagggcattgttgtttacggtgctgtacgtcaggttgaccaattagcagagttcgacctcggcattcaagctatagccgctattccggctggctgtcgtgatgaaggaaccggcgcaagcgatatccgggtgaattttggtggtgtcaccttcttctctggcgattatttgtatgccgataacaccggtatcattttgtctgaagaaccgttggaacttgatgacaacgaagaagatgagatcatctga

SEQ ID NO: 5762 - protein, 169 aa, Photorhabdus luminescens subsp
MKYDTSELCDIYQEEVNVVEPMFSNFGGRTSFGGQIITVKCFEDNGLLYDLLEDNGHGRILLVDGGGSVRQALINAELAQLAVQNGWEGIVVYGAVRQVDQLAEFDLGIQAIAAIPAGCRDEGTGASDIRVNFGGVTFFSGDYLYADNTGIILSEEPLELDDNEEDEII

SEQ ID NO: 5763 - DNA, 492 bp, Pseudomonas fluorescens
  CDS (1)..(492): transl_table=11
atgattcattacgtgacgcccgatctgtgcgacgcctacccggagctggtgcaggtagttgagccgatgttcagtaatttcggtggccgagactcctttggcggtgaaatcgtcaccatcaagtgcttcgaagacaattcgctggtcaaggaacaggccgaccaaccaggcgccggcaaagtgctggtggtcgacggcggcggttccctgcgtcgcgcgctgctgggcgacatgatcgccgagaaagctgcaaaaaatggttgggaagggttggtgatctacggttgtgtgcgtgatgtcgacgtcctcgcccagacagacctgggggtgcaggcgctggcgcctcaccccatgaagaccgacaagcgcggcattggcgacctgaacgtggtggtgacgtttgccagcgtgacattccgccctggtgagtacgtctacgccgacaataatggcgtgatcgtttcgccaagcccgctgaaaatgcctgaataa

SEQ ID NO: 5764 - protein, 163 aa, Pseudomonas fluorescens
MIHYVTPDLCDAYPELVQVVEPMFSNFGGRDSFGGEIVTIKCFEDNSLVKEQADQPGAGKVLVVDGGGSLRRALLGDMIAEKAAKNGWEGLVIYGCVRDVDVLAQTDLGVQALAPHPMKTDKRGIGDLNVVVTFASVTFRPGEYVYADNNGVIVSPSPLKMPE

SEQ ID NO: 5765 - DNA, 492 bp, Pseudomonas putida
  CDS (1)..(492): transl_table=11
atgcagcattacgtaacgcccgacctgtgtgacgcctacccggacctggtacaagtgctggagccgatgttcagcaattttggtggccgcgattcgttcggtggccagatcgttaccatcaagtgtttcgaggacaattcgctggtcaaggagcaggtcgaactcgacggcaagggcaaagtgctggtggtcgatggcggtgggtcgctgcgccgtgcgctgctcggcgacatgctcgccgaaaaagccgcaaaaaacggttgggaaggcttggtgatctacggctgcgtgcgtgatgtcgacgtgctgatccagaccgacgttggcgtgcaggccctggccagccacccgatgaagaccgacaagcggggtattggcgatctcaacgtggtggtgaccttcgccggggtaactttccgcccgggtgagtatgtgtatgccgacaacaatggcgtgctggtctcgccgaaaccgctgaaaatgccggagtaa

SEQ ID NO: 5766 - protein, 163 aa, Pseudomonas putida
MQHYVTPDLCDAYPDLVQVLEPMFSNFGGRDSFGGQIVTIKCFEDNSLVKEQVELDGKGKVLVVDGGGSLRRALLGDMLAEKAAKNGWEGLVIYGCVRDVDVLIQTDVGVQALASHPMKTDKRGIGDLNVVVTFAGVTFRPGEYVYADNNGVLVSPKPLKMPE

SEQ ID NO: 5767 - DNA, 489 bp, Pseudomonas syringae pv
  CDS (1)..(489): transl_table=11
atgcactacatcacccccgatctgtgcgacgcctacccggaactggtgcaagtcgtcgagccgatgctcagcaacttcggcggacgcgattcgtttggcggccagattgtcaccctcaaatgtttcgaggataactcgctggtcaaggagcaggttgaactcgacggcaagggcaaagtgctggtggtcgatggtggcggttcgctgcgctgcgccttgctgggtgacatgctggctgaaaaagccgccaaacatggctgggaaggcttggtgatttacggctgcgtgcgcgatgtggacatgctggcccagaccgatctgggcgtccaggcgctggccagttacccaaagcgctcggaaaaacgcggcgtagggcagctggatttgccggttacctttggcggcgtgacctttcgtccgggtgagtacctgtatgccgacaacaatggcgtcatcatttccccatcacctctgacaatgccggaataa

SEQ ID NO: 5768 - protein, 162 aa, Pseudomonas syringae pv
MHYITPDLCDAYPELVQVVEPMLSNFGGRDSFGGQIVTLKCFEDNSLVKEQVELDGKGKVLVVDGGGSLRCALLGDMLAEKAAKHGWEGLVIYGCVRDVDMLAQTDLGVQALASYPKRSEKRGVGQLDLPVTFGGVTFRPGEYLYADNNGVIISPSPLTMPE

SEQ ID NO: 5769 - DNA, 495 bp, Thermus thermophilus
  CDS (1)..(495): transl_table=11
atggaggcgcgcaccacagacctctccgacctctacccggagggcgaggccctccccatggtcttcaaaagcttcggcggaagagcccgtttcgccgggcgggtgaggaccctcagggtctttgaggacaacgccctggtgcggaaggtcctggaggaagagggcgcaggccaggtcctcttcgtggacgggggcggctccttgcgcaccgccctcctcgggggcaacctggcccgcctggcctgggaaagggggtgggctggggtggtggtccacggggcggtgcgggacacggaggagcttaggggggtgcccatcggcctcctcgccctcgccgccacccccaaaaagagcgccaaggagggcaagggggaggtggacgtgccccttaaggttctcggggtagaggtgcttccgggaagctttcttcttgcggacgaggacgggcttctcctcctccccgagcccccgagcggcgtccgaagcggcggataa

SEQ ID NO: 5770 - protein, 164 aa, Thermus thermophilus
MEARTTDLSDLYPEGEALPMVFKSFGGRARFAGRVRTLRVFEDNALVRKVLEEEGAGQVLFVDGGGSLRTALLGGNLARLAWERGWAGVVVHGAVRDTEELRGVPIGLLALAATPKKSAKEGKGEVDVPLKVLGVEVLPGSFLLADEDGLLLLPEPPSGVRSGG

SEQ ID NO: 5771 - DNA, 501 bp, Xanthomonas axonopodis pv
  CDS (1)..(501): transl_table=11
atgacctggaccacgcctgatctgtgtgaccgctaccccgacgcgatgatcgccgagccgctgttccgccacttcggcgggcgcacggcattcgccggaccgttggccacggtgcgctgtttcgaagacaactcgcgggtgcgcgagctggccgcaacgccgggcgacggccgcgtgctggtggtggacgggcagggctcgctgaagcatgcgctgctgggcgaccagatcgcggccaacgcggtcgcgaacggctgggccggcgtgctgattcacggctgcgtgcgcgatgtcgagattcttgccacgttgccgctgggggtgctggcgctggcggcttgtccgcgccgcaccgagcgacgcgatctgggcgatgtggatgtgccggtgaattttgccggcgtgcccttcgttccgggccattggctgtacgccgatgccaatggcgtgctggtggcgccgcaaccgttggcgctggatggcgccggcggatcgatctga

SEQ ID NO: 5772 - protein, 166 aa, Xanthomonas axonopodis pv
MTWTTPDLCDRYPDAMIAEPLFRHFGGRTAFAGPLATVRCFEDNSRVRELAATPGDGRVLVVDGQGSLKHALLGDQIAANAVANGWAGVLIHGCVRDVEILATLPLGVLALAACPRRTERRDLGDVDVPVNFAGVPFVPGHWLYADANGVLVAPQPLALDGAGGSI

SEQ ID NO: 5773 - DNA, 501 bp, Xanthomonas campestris pv
  CDS (1)..(501): transl_table=11
atgacctggaccacccccgatctttgcgaccgctttcccgaggtggcggtcgccgaaccgctgtttcggcactttggtgggcgcaccaccttttccgggccgatcgccacggtgcgctgtgtcgaggacaactcgcgcatacgcgagctggcctccacgcctggcgacgggcgcgtgctggtggtcgatgggcagggctccttgcggcaggctttgttcggtgaccagatcggcgcacaggcggtggccaatggctgggccggcgtgctgatccacgggtgcgtgcgcgacgtggagatcctggccggcttgccgttgggggtgctggcgttggcggcgtgcccacgccgcaccgagcgccgcgacctgggcgatgtggacgtgccggtgaattttgccggcgtggcgttcgtccccgggcactggctgtatgccgatgcgaacggtgtcgtggtggccgcgacgccgttgtcgttggaaatcgccggcgtggagcattga

SEQ ID NO: 5774 - protein, 166 aa, Xanthomonas campestris pv
MTWTTPDLCDRFPEVAVAEPLFRHFGGRTTFSGPIATVRCVEDNSRIRELASTPGDGRVLVVDGQGSLRQALFGDQIGAQAVANGWAGVLIHGCVRDVEILAGLPLGVLALAACPRRTERRDLGDVDVPVNFAGVAFVPGHWLYADANGVVVAATPLSLEIAGVEH

SEQ ID NO: 5775 - DNA, 486 bp, Yersinia pestis
  CDS (1)..(486): transl_table=11
atgaaatatgatacttccgatctctgtgacatctatcatgaagaggtaaacgtggtagaaccactgttctccaattttggtgggcgcacttcatttggtggcaagattactaccgtaaaatgtttcgaagataacggcttgttgtttgacctgcttgaagagaatggtcttggccgtgtcttggtcgttgatggcggtggttcagtgcgccgtgcattaatcaatgctgagctagccgaattagccttgaaaaacgagtgggaaggcattgttgtttacggtgccgtgcgtcaggtcgatgacttggccgagttggacattggcattcaggcaatggccgcaatacccgtcggggctgctgatgagggtgtgggtgagagcgatatccgtgttaattttggcggtgtaacgttcttctcaggtgaccatctttatgccgataacaccggtattatcttatcggaagatcccctggatattgaataa

SEQ ID NO: 5776 - protein, 161 aa, Yersinia pestis
MKYDTSDLCDIYHEEVNVVEPLFSNFGGRTSFGGKITTVKCFEDNGLLFDLLEENGLGRVLVVDGGGSVRRALINAELAELALKNEWEGIVVYGAVRQVDDLAELDIGIQAMAAIPVGAADEGVGESDIRVNFGGVTFFSGDHLYADNTGIILSEDPLDIE

SEQ ID NO: 5777 - DNA, 501 bp, Brassica napus
  CDS (1)..(501)
atggctgcatttccaacagcagaagcgtgtgacagtaacgcagaactaatagcaaacggagacctacgagctctccacccaatcttcaacatctatggccaaagaagatgcttctcaggaccaatcgtgacactcaaggtatttgaagacaacgtcctggtcagaaaccaactagagacaaaaggagaaggcacagtcttagtaatagacggtggtggaagcaagagatgcgcgcttgttggaggaaacctcggacagttagctcagaacaacggctgggcagggattgtggtgaatggatgcgttagagatgtggatgagatcaatgactgcgatgtcggggttagggcattgggttctaacccactgaagtctactaagaaaggtcatggtgagaagaatgtgccggtttatattggaggaactttgattagagatggagagtggctttatgctgatagtgatggtatcttgatctccaagaccgaactctccgtttga

SEQ ID NO: 5778 - protein, 166 aa, Brassica napus
MAAFPTAEACDSNAELIANGDLRALHPIFNIYGQRRCFSGPIVTLKVFEDNVLVRNQLETKGEGTVLVIDGGGSKRCALVGGNLGQLAQNNGWAGIVVNGCVRDVDEINDCDVGVRALGSNPLKSTKKGHGEKNVPVYIGGTLIRDGEWLYADSDGILISKTELSV

SEQ ID NO: 5779 - DNA, 501 bp, Brassica napus
  CDS (1)..(501)
atggcgtttgtgaccactgcggaagtctgtgacgcgaaccaagacctgattcggagtggtgagctcaaagctttgcaacccattttccagatttacggccgtcgacagatattctcaggtcctgttgttactgtcaaagtgtttgaagacaacggcttgatccgtcagttcctcgaggagaaaggaaacgggagagttcttgtggtggatggtggagggagccaacggtgtgcgatactcggaggcaaccccgtggttcaagctcagaacaacggatgggcgggaatcattgtcaacgggtgcatcagagacgttgatgagatcaacggttgcgatattggagtgagggctttggcctctcatccaataaaggcgagtaagaaaggacttggagagcaaagagttccggttaatattgcagggactcggatttgtgatggtgaatgggtttatgcggacactgatggcgttcttgtctctcagactgagttgtccgtttaa

SEQ ID NO: 5780 - protein, 166 aa, Brassica napus
MAFVTTAEVCDANQDLIRSGELKALQPIFQIYGRRQIFSGPVVTVKVFEDNGLIRQFLEEKGNGRVLVVDGGGSQRCAILGGNPVVQAQNNGWAGIIVNGCIRDVDEINGCDIGVRALASHPIKASKKGLGEQRVPVNIAGTRICDGEWVYADTDGVLVSQTELSV

SEQ ID NO: 5781 - DNA, 501 bp, Brassica napus
  CDS (1)..(501)
atggcgtttgtgaccactgcagaagtatgtgacgcgaatcaagatctgatccgtagcggccagctccgagctctgcaaccctctttccagatttacggtcgccgtcaaatattctcaggccctgtggttactgtcaaagtgtttgaagacaatggtttgatccgtcagtttctcgaagagaaaggcaatggaagagttcttgtggtagatggtggaggaagcttacgttgtgccatactcggaggaaacccagtagtacaagctcagaacaacggatgggcggggatcatagtgaacggttgcataagagacgttgatgagatcaacggttgcgacattggagtgagagcattagcttctcatcctataaaggctagtaaaaaaggacttggtgaacagagagtcccactcaacatagctggcactaggatctgcgatggcgaatggctttacgcagatactgatggtatccttgtttctcaggtcgaattatcggtttag

SEQ ID NO: 5782 - protein, 166 aa, Brassica napus
MAFVTTAEVCDANQDLIRSGQLRALQPSFQIYGRRQIFSGPVVTVKVFEDNGLIRQFLEEKGNGRVLVVDGGGSLRCAILGGNPVVQAQNNGWAGIIVNGCIRDVDEINGCDIGVRALASHPIKASKKGLGEQRVPLNIAGTRICDGEWLYADTDGILVSQVELSV

SEQ ID NO: 5783 - DNA, 501 bp, Brassica napus
  CDS (1)..(501)
atggctgcatttccaacagcagaagcgtgtgacagtaacgcagaactaatagcaaacggagacctacgcgctctccacccaatcttcaacatctatggccaaagaagatgcttctcaggaccaatcgtgacactcaaggtatttgaagacaatgtccttgtcagaaaccaactagagaccaaaggagaaggtagagtcttagttatagacggtggtggaagcaagagatgcgcgcttgttggaggaaacctcggacagttagctcagaacaacggctgggcagggattgtggtgaatggatgcgttagagatgtggatgagatcaatgactgcgatgtcggggttagggcattgggttctaacccactgaagtctactaagaaaggtcatggtgagaagaatgtgccggtttatattggaggaactttgattagagatggagagtggctttatgctgatagtgatggtatcttgatctccaagaccgaactctccgtttga

SEQ ID NO: 5784 - protein, 166 aa, Brassica napus
MAAFPTAEACDSNAELIANGDLRALHPIFNIYGQRRCFSGPIVTLKVFEDNVLVRNQLETKGEGRVLVIDGGGSKRCALVGGNLGQLAQNNGWAGIVVNGCVRDVDEINDCDVGVRALGSNPLKSTKKGHGEKNVPVYIGGTLIRDGEWLYADSDGILISKTELSV

SEQ ID NO: 5785 - DNA, 501 bp, Glycine max
  CDS (1)..(501)
atggctgctctaccaacggcggagcttagtgacgcaaatgcaacacatgtagcaagttgtgatgtgagggtgttgcatccagtgttcaaggtttacggtcgggccaccgcgttctccggccccgttgtcaccgtgaaggtgtttgaagacaacgtgttggtgagggagcttcttgagacgaaaggcgaaggaagagtattggttgttgatggaggaggaagcttgaggtgtgcattgatgggagggaatttggtacagattgcatataacatggggtgggctgggattgtggtgaatggttgcgttagagatgtggatgatatcaatgcgtgtaatattggcgtcagagccttggcttctcatccactcagatccaacaaaaagcgcactggtgaaaagaatgtccctgtttatgttggtggaacatttattcgagaaggagaatggttgtatgcagataatgatggcatcctcgtatcaaaatttgagttgtcaaactaa

SEQ ID NO: 5786 - protein, 166 aa, Glycine max
MAALPTAELSDANATHVASCDVRVLHPVFKVYGRATAFSGPVVTVKVFEDNVLVRELLETKGEGRVLVVDGGGSLRCALMGGNLVQIAYNMGWAGIVVNGCVRDVDDINACNIGVRALASHPLRSNKKRTGEKNVPVYVGGTFIREGEWLYADNDGILVSKFELSN

SEQ ID NO: 5787 - DNA, 501 bp, Glycine max
  CDS (1)..(501)
atggccttcgtcaccactgctgaagtgtgtgatgcgaacccccagttaattttgagtggggagcttcgtgcccttcagccagtttttcagatttacggtcgtcgacaggtcttctctggacctatagttaccttgaaggtgtttgaagacaatgttttggttcgtgagttccttgaagagaaaggcaatggaagagtgcttgttgttgatggaggcgcgagtttacgctgtgctatattgggtggcaaccctgtggtacaagctcaaaacaatggatgggcaggtattgttgtgaatggatgtataagagatgtggatgagatcaatggttgtgatattggagtgagagccctagcttcccatcccatgaaagccaataaaaaaggcatgggagagaagcatgttcctgtaaatattgctgggacaaggatcagtgatggggattggctctatgcagacactgatggaattctgatctctcgaacagagctgtctgtttga

SEQ ID NO: 5788 - protein, 166 aa, Glycine max; identical to SEQ ID NO: 5632

SEQ ID NO: 5789 - DNA, 501 bp, Linum usitatissimum
  CDS (1)..(501)
atggcaagcatagcaacagctgaagcatgcgactcgaacgcagcccttctggcgagcggcgacctacgagtgctgcagccgatcttcaagatctatgggcagagcaatgcattctcggggccgatcgtgaccctgaaactgtttgaggacaacgttctcgtcagggagatgctcgagaccagaggagaaggcagggtgctagttgtggacggggcagggagcatgagatgcgcattggtgggagggaatctgggtcagctggcccagaacatggggtgggccgggatcgtggtgaatggatgtattcgagatgtcgatgagataaacgcctgcgatatcggtgtccgagcgctggcttcgcatccgatgaagtcgagcaagagagggcttggggagaagcatgtgacggttcagattggtgggactttgatccgcgatggggagtggttgtacgctgatagtgatggtattctcatttctaaaactgagctttctgtttga

SEQ ID NO: 5790 - protein, 166 aa, Linum usitatissimum
MASIATAEACDSNAALLASGDLRVLQPIFKIYGQSNAFSGPIVTLKLFEDNVLVREMLETRGEGRVLVVDGAGSMRCALVGGNLGQLAQNMGWAGIVVNGCIRDVDEINACDIGVRALASHPMKSSKRGLGEKHVTVQIGGTLIRDGEWLYADSDGILISKTELSV

SEQ ID NO: 5791 - DNA, 507 bp, Zea mays
  CDS (1)..(507)
atggctgccctgccactggccaccgccgaagtatgcgacgctaaccctcacctgatcatgaacggcgagctccgcgcgctccagccaatcttccagatctacggacggcgccaggtcttcgccggccccatcgtcacgctcaaggtctacgaggacaacgtcctggtccgcgagttcctcgaggagaaaggccacggtagggtcctcgtggtcgacggcggcggcagcatgcgctgcgccatccttggcggcaaccccgtccagcaggcgcagaacaacgggtgggctggtatcctggtcaacggctgcatcagggacgtggatgagatcaacggctgcgacatcggtgtccgggctctcagctcgcaccctatgaaggccaacaagaaggggatgggcgagaagcacgtccccgtcaacatcgctggaaccaggatttgcgacggcgagtggctctacgccgatcccgatggcattcttgtctccaggacggaactcaccgtgtag

SEQ ID NO: 5792 - protein, 168 aa, Zea mays; identical to SEQ ID NO: 5622

SEQ ID NO: 5793 - DNA, 507 bp, Zea mays
  CDS (1)..(507)
atggctgccttaccattggccaccgcagaagcatgtgatgctaatgctgctttaattatgaatggtgatcttcgttctctccaacctatcttccaaatctatggaggccggcagatttttgctggccctgttgtgacactgaagatctttgaggataacgttctgctccgcgagttccttgaggagaaaggtcacggcagggtcctggtggttgatgccggtgggagcatgcgttgtgcagttttgggtggcaaccttgcccagctgatgcagaacaatgggtgggctggaatcgttgtaaatggctgcatcagagatgtcgacgagataaatggctgcgacgttggtgtccgggctctgaattcacaccctatgaagtctaacaagaagggcgtcggtgagaagcatgtccctgtgacctttgcagggacaagaatctgcgatggagaatggctctatgccgattccgatggcattctcatctcaagatcagaattgagtgtgtag

SEQ ID NO: 5794 - protein, 168 aa, Zea mays; identical to SEQ ID NO: 5598

SEQ ID NO: 5795 - DNA, 25 bp, Artificial sequence
  primer
atgaaatacgatacttccgagcttt

SEQ ID NO: 5796 - DNA, 26 bp, Artificial sequence
  primer
ttattcaatatccagcggatcttctg

SEQ ID NO: 5797 - protein, 203 aa, Artificial sequence
  consensus sequence
  Variant (2)..(5): Xaa in position 2 to 5 is any amino acid
  Variant (7)..(14): Xaa in position 7 to 14 is any amino acid
  Variant (15)..(22): Xaa in position 15 to 22 is any or no amino acid
  Variant (24)..(24): Xaa in position 24 is any amino acid
  Variant (26)..(28): Xaa in position 26 to 28 is any amino acid
  Variant (30)..(33): Xaa in position 30 to 33 is any amino acid
  Variant (35)..(35): Xaa in position 35 is any amino acid
  Variant (37)..(39): Xaa in position 37 to 39 is any amino acid
  Variant (41)..(41): Xaa in position 41 is any amino acid
  Variant (43)..(43): Xaa in position 43 is any amino acid
  Variant (48)..(48): Xaa in position 48 is any amino acid
  Variant (50)..(57): Xaa in position 50 to 57 is any amino acid
  Variant (59)..(59): Xaa in position 59 is any amino acid
  Variant (60)..(64): Xaa in position 60 to 64 is any or no amino acid
  Variant (66)..(66): Xaa in position 66 is any amino acid
  Variant (67)..(68): Xaa in position 67 to 68 is any or no amino acid
  Variant (72)..(72): Xaa in position 72 is any amino acid
  Variant (78)..(78): Xaa in position 78 is any amino acid
  Variant (80)..(80): Xaa in position 80 is any amino acid
  Variant (82)..(90): Xaa in position 82 to 90 is any amino acid
  Variant (92)..(93): Xaa in position 92 to 93 is any amino acid
  Variant (97)..(97): Xaa in position 97 is any amino acid
  Variant (99)..(102): Xaa in position 99 to 102 is any amino acid
  Variant (104)..(105): Xaa in position 104 to 105 is any amino acid
  Variant (108)..(116): Xaa in position 108 to 116 is any amino acid
  Variant (118)..(119): Xaa in position 118 to 119 is any amino acid
  Variant (122)..(124): Xaa in position 122 to 124 is any amino acid
  Variant (126)..(133): Xaa in position 126 to 133 is any amino acid
  Variant (135)..(139): Xaa in position 135 to 139 is any amino acid
  Variant (141)..(143): Xaa in position 141 to 143 is any amino acid
  Variant (145)..(149): Xaa in position 145 to 149 is any amino acid
  Variant (151)..(153): Xaa in position 151 to 153 is any amino acid
  Variant (157)..(158): Xaa in position 157 to 158 is any amino acid
  Variant (160)..(162): Xaa in position 160 to 162 is any amino acid
  Variant (163)..(198): Xaa in position 163 to 198 is any or no amino acid
  Variant (200)..(202): Xaa in position 200 to 202 is any amino acid
TXXXXDXXXXXXXXXXXXXXXXPXFXXXGXXXXFXGXXXTXKXFEDNXLXXXXXXXXGXXXXXXGXXXVLVXDGGGSXRXAXXXXXXXXXAXXNGWXGXXXXGXXRDXXXXXXXXXGXXALXXXPXXXXXXXXGXXXXXVXXXGXXXXXGXXXYADXXGXXXXXXXXXXXXXXXXXXXXXXXXXXXXXXXXXXXXXXXSXXXL

SEQ ID NO: 5798 - protein, 43 aa, Artificial sequence
  protein pattern
  Variant (2)..(2): Xaa in position 2 is any amino acid
  Variant (3)..(3): Xaa in position 3 is any or no amino acid
  Variant (6)..(6): Xaa in position 6 is any or no amino acid
  Variant (8)..(8): Xaa in position 8 is any or no amino acid
  Variant (11)..(11): Xaa in position 11 is Ala, Asp, Gly or Gln
  Variant (12)..(12): Xaa in position 12 is Ala, Gly or Ser
  Variant (13)..(13): Xaa in position 13 is Ala or Ser
  Variant (14)..(16): Xaa in position 14 to 16 is any amino acid
  Variant (17)..(17): Xaa in position 17 is Ala or Gly
  Variant (18)..(18): Xaa in position 18 is Ile, Leu or Met
  Variant (19)..(19): Xaa in position 19 is Phe, Ile, Leu, Met or Val
  Variant (20)..(20): Xaa in position 20 is Asp, Gly or Asn
  Variant (21)..(22): Xaa in position 21 to 22 is any amino acid
  Variant (23)..(23): Xaa in position 23 is Ile, Leu, Pro or Val
  Variant (24)..(24): Xaa in position 24 is Ala, Gly or Val
  Variant (25)..(26): Xaa in position 25 to 26 is any amino acid
  Variant (27)..(27): Xaa in position 27 is Ala or Gly
  Variant (28)..(31): Xaa in position 28 to 31 is any amino acid
  Variant (33)..(33): Xaa in position 33 is any amino acid
  Variant (35)..(35): Xaa in position 35 is Ile, Leu, Met or Val
  Variant (36)..(36): Xaa in position 36 is Ile, Leu or Val
  Variant (37)..(38): Xaa in position 37 to 38 is any amino acid
  Variant (40)..(40): Xaa in position 40 is any amino acid
  Variant (41)..(41): Xaa in position 41 is Ile or Val
  Variant (42)..(42): Xaa in position 42 is Lys or Arg
  Variant (43)..(43): Xaa in position 43 is Asp, Glu, Asn or Gln
GXXVLXVXDGXXXXXXXXXXXXXXXXXXXXXWXGXXXXGXXXX

SEQ ID NO: 5799 - protein, 28 aa, Artificial sequence
  protein pattern
  Variant (2)..(2): Xaa in position 2 is any amino acid
  Variant (4)..(5): Xaa in position 4 to 5 is any amino acid
  Variant (6)..(6): Xaa in position 6 is Phe or Tyr
  Variant (8)..(11): Xaa in position 8 to 11 is any amino acid
  Variant (13)..(13): Xaa in position 13 is any amino acid
  Variant (15)..(17): Xaa in position 15 to 17 is any amino acid
  Variant (19)..(19): Xaa in position 19 is Ile, Leu or Val
  Variant (20)..(20): Xaa in position 20 is Lys or Arg
  Variant (21)..(22): Xaa in position 21 to 22 is any amino acid
  Variant (24)..(24): Xaa in position 24 is Asp, Asn or Ser
  Variant (26)..(27): Xaa in position 26 to 27 is any amino acid
  Variant (28)..(28): Xaa in position 28 is Ile, Leu, Met or Val
PXFXXXGXXXXFXGXXXTXXXXEXNXXX

SEQ ID NO: 5800 - DNA, 318 bp, Escherichia coli K12
  CDS (1)..(318): transl_table=11
atggctgaatggagcggcgaatatatcagcccatacgctgagcacggcaagaagagtgaacaagtcaaaaagattacggtttccattcctcttaaggtgttaaaaatcctcaccgatgaacgcacgcgtcgtcaggtgaacaacctgcgtcacgctaccaacagcgagctgctgtgcgaagcgtttctgcatgcctttaccgggcaacctttgccggatgatgccgatctgcgtaaagagcgcagcgacgaaatcccggaagcggcaaaagagatcatgcgtgagatggggattaacccggagacgtgggaatactaa

SEQ ID NO: 5801 - protein, 105 aa, Escherichia coli K12
MAEWSGEYISPYAEHGKKSEQVKKITVSIPLKVLKILTDERTRRQVNNLRHATNSELLCEAFLHAFTGQPLPDDADLRKERSDEIPEAAKEIMREMGINPETWEY

SEQ ID NO: 5802 - DNA, 318 bp, Photobacterium profundum
  CDS (1)..(318)
atggcagagtggaatggcgagtacatcagcccatacgcggaacatggtaagaaaaacgaacaagttaagaaaattactgtttcgattccattaaaggttttaaaaatcttgactgatgaacgcactcgtcgccaggtaaataacctgcgtcatgcaacaaacagtgaattactgtgtgaagcattcctacatgcttatacaggtcagccgttaccaactgatgacgatattcgtaaagattgcccagatgcgcttcctgctgaagcgaaagcaatcatggatgaaatgggtatcacctacgaagacatcaacgaataa

SEQ ID NO: 5803 - protein, 105 aa, Photobacterium profundum
MAEWNGEYISPYAEHGKKNEQVKKITVSIPLKVLKILTDERTRRQVNNLRHATNSELLCEAFLHAYTGQPLPTDDDIRKDCPDALPAEAKAIMDEMGITYEDINE

SEQ ID NO: 5804 - DNA, 318 bp, Erwinia carotovora subsp. atroseptica SCRI1043
  CDS (1)..(318): transl_table=11
atggctgagtggaacggcgagtatgtcagcccttacgctgaacacggtaaaaaaagcgagcaagtcaagaagataacagtatctatcccgctgaaagtattgaagatactgaccgacgaacgcacacgtcgtcaggtgaacaacctgcgccacgccaccaacagcgaactgctgtgcgaagcgtttctgcatgcgttcacaggtcaaccgttaccgaatgatgaagacctgcgtaaagaacgtagcgatgaaattcctgaagcagcgaaaatcatcatgcgtgaaatgggtatcgacccggatacgtgggaatactga

SEQ ID NO: 5805 - protein, 105 aa, Erwinia carotovora subsp. atroseptica SCRI1043
MAEWNGEYVSPYAEHGKKSEQVKKITVSIPLKVLKILTDERTRRQVNNLRHATNSELLCEAFLHAFTGQPLPNDEDLRKERSDEIPEAAKIIMREMGIDPDTWEY

SEQ ID NO: 5806 - DNA, 318 bp, Yersinia pseudotuberculosis IP 32953
  CDS (1)..(318): transl_table=11
atggctgagtggaacggcgagtatgtcagcccttacgctgaacacggcaagaaaagcgagcaggtcaaaaaaatcacggtatccattccgttgaaagtgttaaaaatcctcaccgatgagcggacccgccgtcaggtgaataacctgcgccatgctaccaacagtgaattgttgtgtgaggcctttttgcatgcatttactggccagccgctaccgaatgacgaagacctgcgtaaagaacgcagtgatgagatcccggaagccgcgaaaattttaatgcgtgaattgggtgttgaccctgacacctgggaatattga

SEQ ID NO: 5807 - protein, 105 aa, Yersinia pseudotuberculosis IP 32953
MAEWNGEYVSPYAEHGKKSEQVKKITVSIPLKVLKILTDERTRRQVNNLRHATNSELLCEAFLHAFTGQPLPNDEDLRKERSDEIPEAAKILMRELGVDPDTWEY

SEQ ID NO: 5808 - DNA, 375 bp, Mannheimia succiniciproducens MBEL55E
  CDS (1)..(375): transl_table=11
ttgggctttttttcattaaaatacagacaaattttaaggttattgataggaaattttatggcagattgggatggcaaatacattagcccttatgcagaacatgggaaaaaaagcgaacaggtaaaaaaaatcaccgtttcaattccgattaaagtattagaaattttgactaatgagcgcactcgccgtcagcttaaaaatttacgccatgcaacaaacagcgaattgctttgcgaagcttttcttcatgctttcaccgggcagccgctgccgactgacgaagatctgttaaaagaacggcatgatgaaatcccggaacaggcaaaactgatcatgcgagaattgggaattaatcctgatgaatgggaatattaa

SEQ ID NO: 5809 - protein, 124 aa, Mannheimia succiniciproducens MBEL55E
MGFFSLKYRQILRLLIGNFMADWDGKYISPYAEHGKKSEQVKKITVSIPIKVLEILTNERTRRQLKNLRHATNSELLCEAFLHAFTGQPLPTDEDLLKERHDEIPEQAKLIMRELGINPDEWEY

SEQ ID NO: 5810 - DNA, 318 bp, Haemophilus influenzae 86-028NP
  CDS (1)..(318): transl_table=11
atggcggattgggacggaaaatatatcagcccttatgcagaacatggcaaaaaaagtgagcaagtcaaaaaaattacagtatccattcccattaaagtactggaaattttgacgaatgaacgcactcgccgccaattgaaaagtttacgtcacgcaactaacagtgaattgctttgtgaagcgttcttacacgcattcacagggcagcctttgcccactgatgcagatttaatgaaagagcgtaatgatgaaattcccgaagatgccaaagtgcttatgcgtgaattaggcgtcgatccagaaagttgggaatattaa

SEQ ID NO: 5811 - protein, 105 aa, Haemophilus influenzae 86-028NP
MADWDGKYISPYAEHGKKSEQVKKITVSIPIKVLEILTNERTRRQLKSLRHATNSELLCEAFLHAFTGQPLPTDADLMKERNDEIPEDAKVLMRELGVDPESWEY

SEQ ID NO: 5812 - DNA, 330 bp, Colwellia psychrerythraea 34H
  CDS (1)..(330): transl_table=11
atggctcagtggaatgaagagtatataaatccctatgccgaacacggtaaaaagagcgagcaagtaaagaaaattaccgtttctattcctttgcgcgtcttaaaagtgttgacagatgaacgtactagacgccaagtaaataaccttcgccatgctacaaatagtgaattgttatgtgaagcgttcttacatgcatttactgggcaacccctgcctgatgatgaagatttagcaaaagataataatgagaagttacctgcaagtgtcagacgcttgcttgaagcaaagggaattactgactttagtgcttacgaagttgaggatgaataa

SEQ ID NO: 5813 - protein, 109 aa, Colwellia psychrerythraea 34H
MAQWNEEYINPYAEHGKKSEQVKKITVSIPLRVLKVLTDERTRRQVNNLRHATNSELLCEAFLHAFTGQPLPDDEDLAKDNNEKLPASVRRLLEAKGITDFSAYEVEDE

SEQ ID NO: 5814 - DNA, 318 bp, Haemophilus somnus 129PT
  CDS (1)..(318)
atggcagattgggacggaaaatatattagcccttatgcagaacatggtaaaaagagtgaacaagtcaagaaaattaccgtttctattccaattaaagtattagaaattttaactaatgaacgcactcgtcgccaactccgtaatttacgtcatgcaacaaatagtgaattattgtgtgaggcgttcctgcatgcttttaccggtcaacctttgcccacagacgaagatctattaaaagaacgtcatgatgagattcctgaaagtgcaaaacaaattatgagagaattaggaataaatcccgatgactgggaatattaa

SEQ ID NO: 5815 - protein, 105 aa, Haemophilus somnus 129PT
MADWDGKYISPYAEHGKKSEQVKKITVSIPIKVLEILTNERTRRQLRNLRHATNSELLCEAFLHAFTGQPLPTDEDLLKERHDEIPESAKQIMRELGINPDDWEY

SEQ ID NO: 5816 - DNA, 318 bp, Actinobacillus pleuropneumoniae serovar 1 str. 4074
  CDS (1)..(318)
atggcagattggagtggggaatacattagcccgtatgccgaacacggcaaaaaaagtgaacaagtgaaaaagatcacggtatcgatcccgattaaagtattagaaattttaaccaacgaacgtactcgacgtcagatcaaaaacttgcgtcatgcaaccaatagcgaattactatgcgaagcctttttgcatgcctttaccggacagccgttgccgacggatgacgatctgatgaaagaacgcagcgatgagattccggaagaggctaaagcgaaaatgcgcgaattgggtatcgaccctgataactggcaatattga

SEQ ID NO: 5817 - protein, 105 aa, Actinobacillus pleuropneumoniae serovar 1 str. 4074
MADWSGEYISPYAEHGKKSEQVKKITVSIPIKVLEILTNERTRRQIKNLRHATNSELLCEAFLHAFTGQPLPTDDDLMKERSDEIPEEAKAKMRELGIDPDNWQY

SEQ ID NO: 5818 - DNA, 315 bp, Shewanella sp. ANA-3
  CDS (1)..(315): transl_table=11
atgactgaatggaatggggaatacatcagcccctatgctgaacatggcaagaagaatgaacaagtaaagaaaattactgtgtctattccgctcaaagtgctaaaagtcctcacggatgaacgtacccgtcgtcaggtgaacaacctgcgccacgccaccaatagcgaactcttgtgtgaagcatttttgcatgcctacaccggccagcctctgcctaatgatgccgatctgtcgaaagatagcccagacagcattcccgccgaagcgaaacggttgatggacgaaatggggatcgagtgggaagatatggaataa

SEQ ID NO: 5819 - protein, 104 aa, Shewanella sp. ANA-3
MTEWNGEYISPYAEHGKKNEQVKKITVSIPLKVLKVLTDERTRRQVNNLRHATNSELLCEAFLHAYTGQPLPNDADLSKDSPDSIPAEAKRLMDEMGIEWEDME

SEQ ID NO: 5820 - DNA, 315 bp, Shewanella sp. MR-7
  CDS (1)..(315): transl_table=11
atgactgaatggaatggggaatacatcagcccctatgctgaacatggcaagaagaatgaacaagtaaagaaaattactgtgtctattccgctcaaagtgctaaaagtcctcacggatgaacgtacccgtcgtcaggtcaacaacctgcgccacgcgacgaatagcgaacttttgtgtgaagcgtttttgcatgcctacaccggccagcctctgcctaatgatgccgatctatcgaaggattgcccagacagcattcccgccgaagcgaaacggttgatggacgagatggggatcgagtgggaagatatggaataa

SEQ ID NO: 5821 - protein, 104 aa, Shewanella sp. MR-7
MTEWNGEYISPYAEHGKKNEQVKKITVSIPLKVLKVLTDERTRRQVNNLRHATNSELLCEAFLHAYTGQPLPNDADLSKDCPDSIPAEAKRLMDEMGIEWEDME

SEQ ID NO: 5822 - DNA, 324 bp, Pseudoalteromonas tunicata D2
  CDS (1)..(324): transl_table=11
atggcaacaaaatggaatggtgaatatattcacccatatgcagaacacggtaaaaaatctgagcaagtaaaaaaaattaccgtttctatcccactaaatgtattaaaagttttaaccgatgaacgcactcgtcgccaagttaataacttacgccacgccaccaacagtgaattgttatgtgaagcatttcttcatgcttttactggtcagccactgcctaatgatgaagatttacgcaaagataaccctgagcacgttccagccgaagtgcgcgacataatgctcagaatgggcttagaattacccgttttagaagacgaataa

SEQ ID NO: 5823 - protein, 107 aa, Pseudoalteromonas tunicata D2
MATKWNGEYIHPYAEHGKKSEQVKKITVSIPLNVLKVLTDERTRRQVNNLRHATNSELLCEAFLHAFTGQPLPNDEDLRKDNPEHVPAEVRDIMLRMGLELPVLEDE

SEQ ID NO: 5824 - DNA, 318 bp, Klebsiella pneumoniae
  CDS (1)..(318): transl_table=11
atggctgaatggagcggcgaatatatcagcccatacgctgagcacggtaagaagagtgaacaagtaaagaaaattacggtttccattcctctgaaggtgttaaaaatcctcaccgatgaacgcacgcgtcgtcaggtgaataacctgcgtcacgcgaccaacagcgagctgctgtgcgaagcgtttctgcatgcctttaccggacaaccgttgcctaacgatgaagacctgcgtaaagagcgcagcgatgagatcccggaagcggcgaaagcgattatgcgtgaactgggaatcgacccggatacgtgggaatactga

SEQ ID NO: 5825 - protein, 105 aa, Klebsiella pneumoniae
MAEWSGEYISPYAEHGKKSEQVKKITVSIPLKVLKILTDERTRRQVNNLRHATNSELLCEAFLHAFTGQPLPNDEDLRKERSDEIPEAAKAIMRELGIDPDTWEY

SEQ ID NO: 5826 - DNA, 318 bp, Haemophilus ducreyi
  CDS (1)..(318): transl_table=11
atgataaattggagtggcaaatacattagcccatatgcagaacacggaaaaaaaagtaaacaagtcaaaaaaatcactgtttctattccaataaaagtattggaaatcctcactaatgaaagaactcgccgccaaatcaataacctacgccacgccaccaacagtgaactattatgtgaggcgtttttacatgcttttaccggtcagccgttacccgcagatgaagatttaatgaaagaacgctatgacgaaatccccgaaaaagcaaaaagcagaatgcgcgatcttggtattgatccagacgaatggcaatactaa

SEQ ID NO: 5827 - protein, 105 aa, Haemophilus ducreyi
MINWSGKYISPYAEHGKKSKQVKKITVSIPIKVLEILTNERTRRQINNLRHATNSELLCEAFLHAFTGQPLPADEDLMKERYDEIPEKAKSRMRDLGIDPDEWQY

SEQ ID NO: 5828 - DNA, 318 bp, Haemophilus influenzae
  CDS (1)..(318): transl_table=11
atggcgaattgggacggaaaatatatcagcccttatgcagaacatggcaaaaaaagtgagcaagtaaaaaaaattacagtatccattcccattaaagtactggaaattttgacgaatgaacgcactcgccgccaattaaaaagtttacgtcacgcaactaacagtgaattgctttgtgaagcgttcttgcatgcattcacaggacaacctttacccaccgatgcagatttaatgaaagagcgtaatgatgaaatccctgaagatgccaaagtgcttatgcgtgaattaggtgtcgatccagaaagctgggaatattaa

SEQ ID NO: 5829 - protein, 105 aa, Haemophilus influenzae
MANWDGKYISPYAEHGKKSEQVKKITVSIPIKVLEILTNERTRRQLKSLRHATNSELLCEAFLHAFTGQPLPTDADLMKERNDEIPEDAKVLMRELGVDPESWEY

SEQ ID NO: 5830 - DNA, 318 bp, Pasteurella multocida
  CDS (1)..(318): transl_table=11
atggcaaattgggacggtaaatatattagcccttacgcagagcatggcaagaagagtgagcaagtcaaaaaaattacagtatcgattccgattaaagtattggaaattttaaccaatgaacggacacgcagacaaattcgtaatttacgtcatgcaacgaacagtgaattgctctgtgaagcctttttgcatgcctttaccggtcaaccgttgccaacggatgaagacttattaaaagagcgccatgacgaaattcctgagcaagcaaagcaagtgatgcgcgaattgggtatcgatccagaaaaatgggaatactaa

SEQ ID NO: 5831 - protein, 105 aa, Pasteurella multocida
MANWDGKYISPYAEHGKKSEQVKKITVSIPIKVLEILTNERTRRQIRNLRHATNSELLCEAFLHAFTGQPLPTDEDLLKERHDEIPEQAKQVMRELGIDPEKWEY

SEQ ID NO: 5832 - DNA, 318 bp, Photorhabdus luminescens subsp
  CDS (1)..(318): transl_table=11
atggctgagtggaacggtgaatatgtcagcccttatgctgaacatggcaaaaaaagcgaacaagtgaagaaaatcacagtctcaattccgttgaaagtgttgagaatcctcactgatgaacgcactcgtcgccaggtcaataacctgcgtcatgcaactaatagtgaattgttgtgtgaagcattcctgcatgcatttactgggcagccgctgcccgatgatgctgatttacgtaaagagcgtaatgatgaaatcccagaggaagccaaaaaaatcatgcgggaattaggtattgatcctgatacttgggaatattga

SEQ ID NO: 5833 - protein, 105 aa, Photorhabdus luminescens subsp
MAEWNGEYVSPYAEHGKKSEQVKKITVSIPLKVLRILTDERTRRQVNNLRHATNSELLCEAFLHAFTGQPLPDDADLRKERNDEIPEEAKKIMRELGIDPDTWEY

SEQ ID NO: 5834 - DNA, 315 bp, Shewanella oneidensis
  CDS (1)..(315): transl_table=11
atgactgaatggaatggggaatacatcagcccctatgctgaacatggcaagaagaatgaacaagtaaagaaaattactgtgtctattccgctcaaagtgctaaaagtcctcacggatgaacgtacgcgtcgtcaggtcaacaacctgcgccatgcgaccaatagcgaactgttgtgcgaagcatttttgcatgcctacaccggccagcctctgcctgatgatgccgatctgtcgaaagagtgcccagacagcatccccgccgaagcgaagcggttgatggacgaaatggggatcgagtgggaagacatggaataa

SEQ ID NO: 5835 - protein, 104 aa, Shewanella oneidensis
MTEWNGEYISPYAEHGKKNEQVKKITVSIPLKVLKVLTDERTRRQVNNLRHATNSELLCEAFLHAYTGQPLPDDADLSKECPDSIPAEAKRLMDEMGIEWEDME

SEQ ID NO: 5836 - DNA, 318 bp, Vibrio cholerae
  CDS (1)..(318): transl_table=11
atggcagactggaatggcgaatacatcagcccctatgcagagcatgggaaaaagagcgagttggtaaaaaaaatcacggtatccattccgctgaaagttctcaaagtgctaacggatgagagaacacgccgtcaagtcaataacttacgtcacgcaaccaacagtgaattgctgtgcgaagccttcttgcatgcttatactggccagccgctgccgacggacgaagacctacgtaaagatcgccctgatgatattcctgccgaagccaaacgtttgatgaccgaaatggggattgagttcgaatcttacgatgagtaa

SEQ ID NO: 5837 - protein, 105 aa, Vibrio cholerae
MADWNGEYISPYAEHGKKSELVKKITVSIPLKVLKVLTDERTRRQVNNLRHATNSELLCEAFLHAYTGQPLPTDEDLRKDRPDDIPAEAKRLMTEMGIEFESYDE

SEQ ID NO: 5838 - DNA, 321 bp, Vibrio parahaemolyticus
  CDS (1)..(321): transl_table=11
atggctgactggaatggcgaatacattagcccatatgctgagcacggtaaaaaaagcgaacaagtaaaaaaaattaccgtttctatcccgctaaaagttttaaaagtgctgactgatgagcgtactcgtcgtcagatcaataacttacgccatgcaaccaacagcgaactactatgtgaagcattcctgcacgcatatacaggtcagccattaccaacggatgaagaccttcgtaaagacagaccggatgacattccaactgaagcaaaagcgttaatgacggcgatgggtatcgaattcgaagcatttgacgaagaataa

SEQ ID NO: 5839 - protein, 106 aa, Vibrio parahaemolyticus
MADWNGEYISPYAEHGKKSEQVKKITVSIPLKVLKVLTDERTRRQINNLRHATNSELLCEAFLHAYTGQPLPTDEDLRKDRPDDIPTEAKALMTAMGIEFEAFDEE

SEQ ID NO: 5840 - DNA, 318 bp, Vibrio vulnificus
  CDS (1)..(318): transl_table=11
atggctgactggaatggcgaatacataagtccatacgcagagcatggaaagaaaagcgagcaagtaaaaaaaattaccgtttctatcccgcttaaagtactaaaagttctgacggatgaacgtactcgtcgtcaaattaataacctacgccacgcaacaaacagtgagttgttgtgtgaggcatttctgcatgcgtacactggccagccactgccgacggatgaagatctcagaaaagatcgcccggatgatatcccaacagaagccaaagaattgatgacggcgatgggtatcgaatttgaagcgtatgacgactaa

SEQ ID NO: 5841 - protein, 105 aa, Vibrio vulnificus
MADWNGEYISPYAEHGKKSEQVKKITVSIPLKVLKVLTDERTRRQINNLRHATNSELLCEAFLHAYTGQPLPTDEDLRKDRPDDIPTEAKELMTAMGIEFEAYDD

SEQ ID NO: 5842 - DNA, 318 bp, Yersinia pestis
  CDS (1)..(318): transl_table=11
atggctgagtggaacggcgagtatgtcagcccttacgctgaacacggcaagaaaagcaagcaggtcaaaaaaatcacggtatccattccgttgaaagtgttaaaaatcctcaccgatgagcggacccgccgtcaggtgaataacctgcgccatgctaccaacagtgaattgttgtgtgaggcctttttgcatgcatttactggccagccgctaccgaatgacgaagacctgcgtaaagaacgcagtgatgagatcccggaagccgcgaaaattttaatgcgtgaattgggtgttgaccctgacacctgggaatattga

SEQ ID NO: 5843 - protein, 105 aa, Yersinia pestis
MAEWNGEYVSPYAEHGKKSKQVKKITVSIPLKVLKILTDERTRRQVNNLRHATNSELLCEAFLHAFTGQPLPNDEDLRKERSDEIPEAAKILMRELGVDPDTWEY

SEQ ID NO: 5844 - DNA, 20 bp, Artificial sequence
  primer
atggctgaatggagcggcga

SEQ ID NO: 5845 - DNA, 22 bp, Artificial sequence
  primer
ttagtattcccacgtctccggg

SEQ ID NO: 5846 - protein, 98 aa, Artificial sequence
  consensus sequence
  Variant (3)..(3): Xaa in position 3 is any amino acid
  Variant (4)..(4): Xaa in position 4 is any or no amino acid
  Variant (6)..(6): Xaa in position 6 is any amino acid
  Variant (8)..(8): Xaa in position 8 is any amino acid
  Variant (32)..(32): Xaa in position 32 is any amino acid
  Variant (36)..(37): Xaa in position 36 to 37 is any amino acid
  Variant (40)..(40): Xaa in position 40 is any amino acid
  Variant (47)..(48): Xaa in position 47 to 48 is any amino acid
  Variant (67)..(67): Xaa in position 67 is any amino acid
  Variant (74)..(74): Xaa in position 74 is any amino acid
  Variant (76)..(76): Xaa in position 76 is any amino acid
  Variant (79)..(79): Xaa in position 79 is any amino acid
  Variant (81)..(83): Xaa in position 81 to 83 is any amino acid
  Variant (85)..(85): Xaa in position 85 is any amino acid
  Variant (88)..(89): Xaa in position 88 to 89 is any amino acid
  Variant (92)..(93): Xaa in position 92 to 93 is any amino acid
  Variant (95)..(97): Xaa in position 95 to 97 is any amino acid
MAXXWXGXYISPYAEHGKKSEQVKKITVSIPXKVLXXLTXERTRRQXXNLRHATNSELLCEAFLHAXTGQPLPXDXDLXKXXXDXIPXXAKXXMXXXG

SEQ ID NO: 5847 - protein, 60 aa, Artificial sequence
  protein pattern
  Variant (8)..(8): Xaa in position 8 is Asn or Ser
  Variant (9)..(9): Xaa in position 9 is Glu or Lys
  Variant (10)..(10): Xaa in position 10 is any amino acid
  Variant (20)..(20): Xaa in position 20 is Ile or Leu
  Variant (24)..(24): Xaa in position 24 is Glu, Lys or Arg
  Variant (25)..(25): Xaa in position 25 is Ile or Val
  Variant (28)..(28): Xaa in position 28 is Asp or Asn
  Variant (35)..(35): Xaa in position 35 is any amino acid
  Variant (36)..(36): Xaa in position 36 is any or no amino acid
  Variant (38)..(38): Xaa in position 38 is any or no amino acid
  Variant (56)..(56): Xaa in position 56 is Phe or Tyr
YAEHGKKXXXVKKITVSIPXKVLXXLTXERTRRQXXNXLRHATNSELLCEAFLHAXTGQP

SEQ ID NO: 5848 - protein, 31 aa, Artificial sequence
  protein pattern
  Variant (3)..(3): Xaa in position 3 is Asp, Asn or Thr
  Variant (5)..(5): Xaa in position 5 is Ala, Asp or Glu
  Variant (8)..(8): Xaa in position 8 is any amino acid
  Variant (10)..(10): Xaa in position 10 is Asp or Glu
  Variant (11)..(12): Xaa in position 11 to 12 is any amino acid
  Variant (14)..(14): Xaa in position 14 is Asp, Glu or Ser
  Variant (17)..(17): Xaa in position 17 is any or no amino acid
  Variant (19)..(19): Xaa in position 19 is any or no amino acid
  Variant (21)..(21): Xaa in position 21 is any or no amino acid
  Variant (23)..(24): Xaa in position 23 to 24 is any amino acid
  Variant (26)..(26): Xaa in position 26 is any amino acid
  Variant (27)..(27): Xaa in position 27 is Ala or Glu
  Variant (28)..(28): Xaa in position 28 is Leu or Met
  Variant (30)..(30): Xaa in position 30 is Ile or Val
  Variant (31)..(31): Xaa in position 31 is Asp, Glu or Asn
LPXDXDLXKXXXDXIPXEXAXKXXMXXXGXX

SEQ ID NO: 5849 - protein, 8 aa, Artificial sequence
  protein pattern
  Variant (2)..(2): Xaa in position 2 is Ala or Thr
  Variant (3)..(3): Xaa in position 3 is Asp, Glu or Asn
  Variant (5)..(5): Xaa in position 5 is Asp, Asn or Ser
  Variant (7)..(7): Xaa in position 7 is Glu or Lys
MXXWXGXY

SEQ ID NO: 5850 - DNA, 951 bp, Escherichia coli K12
  CDS (1)..(951): transl_table=11
atgagtataaaagagcaaacgttaatgacgccttacctacagtttgaccgcaaccagtgggcagctctgcgtgattccgtacctatgacgttatcggaagatgagatcgcccgtctcaaaggtattaatgaagatctctcgttagaagaagttgccgagatctatttacctttgtcacgtttgctgaacttctatataagctcgaatctgcgccgtcaggcagttctggaacagtttcttggtaccaacgggcaacgcattccttacattatcagtattgctggcagtgtcgcggtggggaaaagtacaaccgcccgtgtattgcaggcgctattaagccgttggccggaacatcgtcgtgttgaactgatcactacagatggcttccttcaccctaatcaggttctgaaagaacgtggtctgatgaagaagaaaggcttcccggaatcgtatgatatgcatcgcctggtgaagtttgtttccgatctcaaatccggcgtgccaaacgttacagcacctgtttactcacatcttatttatgatgtgatcccggatggagataaaacggttgttcagcctgatattttaattcttgaagggttaaatgtcttacagagcgggatggattatccacacgatccacatcatgtatttgtttctgattttgtcgatttttcgatatatgttgatgcaccggaagacttacttcagacatggtatatcaaccgttttctgaaattccgcgaaggggcttttaccgacccggattcctattttcataactacgcgaaattaactaaagaagaagcgattaagactgccatgacattgtggaaagagatcaactggctgaacttaaagcaaaatattctacctactcgtgagcgcgccagtttaatcctgacgaaaagtgctaatcatgcggtagaagaggtcagactacgcaaataa

SEQ ID NO: 5851 - protein, 316 aa, Escherichia coli K12
MSIKEQTLMTPYLQFDRNQWAALRDSVPMTLSEDEIARLKGINEDLSLEEVAEIYLPLSRLLNFYISSNLRRQAVLEQFLGTNGQRIPYIISIAGSVAVGKSTTARVLQALLSRWPEHRRVELITTDGFLHPNQVLKERGLMKKKGFPESYDMHRLVKFVSDLKSGVPNVTAPVYSHLIYDVIPDGDKTVVQPDILILEGLNVLQSGMDYPHDPHHVFVSDFVDFSIYVDAPEDLLQTWYINRFLKFREGAFTDPDSYFHNYAKLTKEEAIKTAMTLWKEINWLNLKQNILPTRERASLILTKSANHAVEEVRLRK

SEQ ID NO: 5852 - DNA, 951 bp, Streptococcus pneumoniae
  CDS (1)..(951)
atgatagacaaaatatctaggggaaaacaaatgaccaacgaatttttacattttgaaaaaatcagccgccagacttggcaatctttacatcgaaagacaacacctcctttgacagaagaagaattggaatctatcaagagttttaatgaccaaatcagtctccaagacgttacagatatctatctccccttggctcatctgattcagatttacaagcgaactaaggaagatttagccttttcaaaaggaattttcctccaacgtgaaagtaaatctcaaccttttattattggggtttctgggagtgttgccgttggaaaatccacaaccagtcgcctacttcaaatcctactgtcccgtacgtttacagatgctacggttgagttggttacaactgatggttttctctatcccaatcaaaccttgattgagcaggggattttaaatcgtaaaggatttcctgaaagctatgatatggaagctcttctcaacttcttggaccgcatcaaaaatggacaagatgtagatattcctgtctattctcatgaagtttacgacatcgtacccgaaaagaaacaaagtgtcaaagctgctgattttgtaattgttgagggaattaatgtctttcaaaatccacaaaacgatcgtctctatatcactgacttctttgacttttccatctatgtagatgctggagtggatgatattgaaagttggtatctggaccgtttcttgaaaatgctgagcctagcccaaaacgaccctgatagctactattatcgttttactcagatgccgattggggaagtggagtcctttgcccatcaggtctggaccagtatcaatctcacaaatctgcaaaattatattgaaccaaccagaaatcgtgcagaagtgattcttcataaaagcaagaaccatgaaatcgatgaaatttacttaaaaaagtaa

SEQ ID NO: 5853 - protein, 316 aa, Streptococcus pneumoniae
MIDKISRGKQMTNEFLHFEKISRQTWQSLHRKTTPPLTEEELESIKSFNDQISLQDVTDIYLPLAHLIQIYKRTKEDLAFSKGIFLQRESKSQPFIIGVSGSVAVGKSTTSRLLQILLSRTFTDATVELVTTDGFLYPNQTLIEQGILNRKGFPESYDMEALLNFLDRIKNGQDVDIPVYSHEVYDIVPEKKQSVKAADFVIVEGINVFQNPQNDRLYITDFFDFSIYVDAGVDDIESWYLDRFLKMLSLAQNDPDSYYYRFTQMPIGEVESFAHQVWTSINLTNLQNYIEPTRNRAEVILHKSKNHEIDEIYLKK

SEQ ID NO: 5854 - DNA, 921 bp, Streptococcus pneumoniae
  CDS (1)..(921)
atgaccaacgaatttttacattttgaaaaaatcagccgccagacttggcaatctttacatcgaaagacaacacctcctttgacagaagaagaattggaatctatcaagagttttaatgaccaaatcagtctccaagacgttacagatatctatctccccttggctcatctgattcagatttacaagcgaactaaggaagatttagccttttcaaaaggaattttcctccaacgtgaaagtaaatctcaaccttttattattggggtttctgggagtgttgccgttggaaaatccacaaccagtcgcctacttcaaatcctactgtcccgtacgtttacagatgctacggttgagttggttacaactgatggttttctctatcccaatcaaaccttgattgagcagggaattttaaatcgtaaaggatttcctgaaagctatgatatggaagctcttctcaacttcttggaccgcatcaaaaatggacaagatgtagatattcctgtctattctcatgaagtttacgacatcgtacccaaaaagaaacaaagtgtcaaagctgctgattttgtaatcgttgagggaattaatgtctttcaaaatccacaaaacgatcgtctctatatcactgacttctttgacttttccatctatgtagatgctggagtggatgatattgaaagttggtatctggaccgtttcttgaaaatgctgagtctagcccaaaacgaccctgatagctactattatcgttttactcagatgccgattggggaagtggagtcctttgcccatcaggtctggaccagtatcaatctcacaaatctgcaaaattatattgaaccaaccagaaatcgtgcagaagtgattcttcataaaagcaagaaccatgaaatcgatgaaatttacttaaaaaagtaa

SEQ ID NO: 5855 - protein, 306 aa, Streptococcus pneumoniae
MTNEFLHFEKISRQTWQSLHRKTTPPLTEEELESIKSFNDQISLQDVTDIYLPLAHLIQIYKRTKEDLAFSKGIFLQRESKSQPFIIGVSGSVAVGKSTTSRLLQILLSRTFTDATVELVTTDGFLYPNQTLIEQGILNRKGFPESYDMEALLNFLDRIKNGQDVDIPVYSHEVYDIVPKKKQSVKAADFVIVEGINVFQNPQNDRLYITDFFDFSIYVDAGVDDIESWYLDRFLKMLSLAQNDPDSYYYRFTQMPIGEVESFAHQVWTSINLTNLQNYIEPTRNRAEVILHKSKNHEIDEIYLKK

SEQ ID NO: 5856 - DNA, 924 bp, Myxococcus xanthus
  CDS (1)..(924)
atgttcatcgacctggaacgggatgcctggcgggcgctgcgtgccgcaacgcctctgccgctgaagtccgaggacattgacggcctgcggggcctgggagagcacctcgacctggacgaggtggtggacgtctacctgcccttgtcccggttgctgaacctgcaggtggccgcggcgcagcggctgtgggcggagcagcaagccttcctgggaggttcgacgcagaaggtgccgtacatcatcgccatcgccgggagcgtggcggtgggcaagagcacgacggcgcgcatcctccaggcgctgctgaagcggtggccggaccacccgcgcgtggagttggtgacgacggacgggttccttttccccaacgacgtcctcaccgagcgcgacttgatgaagcgcaagggcttcccggagagctacgaccggcgcgccctggtgcgcttcctggcggagctgaaggccggacgcgcggaggtggcggcgccggtgtattcgcacctcgtctacgacgtggtgcccggtgaggcgcaggtcgtccgccagcccgacatcctcatcctggaagggctcaacgtcctccaggccggggcacaggaggggaagcagatgccggcgacgttcctctccgacttcttcgacttctccatctacgtggacgcgcacgagcacgacatccgccgctggtacgtcaaccgtttcctcaagctccagcagacggcgtttcgcgacgagcgcagctacttccgccggttctccgagctgaaccacgagcaggcgattcagctcgccgagtcggtgtggggcgaaatcaacgggcccaacctggcccagaacatcgcgcccacccgttcgcgcgcgcgcctcatcctcctcaagggccccgaccacaaggtgaagcgggtgaggctgcgcaagctgtag

SEQ ID NO: 5857 - protein, 307 aa, Myxococcus xanthus
MFIDLERDAWRALRAATPLPLKSEDIDGLRGLGEHLDLDEVVDVYLPLSRLLNLQVAAAQRLWAEQQAFLGGSTQKVPYIIAIAGSVAVGKSTTARILQALLKRWPDHPRVELVTTDGFLFPNDVLTERDLMKRKGFPESYDRRALVRFLAELKAGRAEVAAPVYSHLVYDVVPGEAQVVRQPDILILEGLNVLQAGAQEGKQMPATFLSDFFDFSIYVDAHEHDIRRWYVNRFLKLQQTAFRDERSYFRRFSELNHEQAIQLAESVWGEINGPNLAQNIAPTRSRARLILLKGPDHKVKRVRLRKL

SEQ ID NO: 5858 - DNA, 975 bp, Alloiococcus otitis
  CDS (46)..(975)
agaatcaaatttgttttaaaattatcagcttttggaggtcagaacatgaacaattcccgtatttttttagtctatgaccgtaaagactggcagtctcttagagaaaatgccagcctttctttaacggaaaaaaacctaaataacttgcgtgcagtgaatgacgtcatatcgatggaagatgtccgagaagtttacgtccccattatccaattactggatgtctacataaaaagttactaccgccaccaggcttccttgatcaattacttgaacctggaccagcctaaaaagtaccaaccctatgtgattgggattgcagggagcgtggctgtgggcaagtctacggttgccaggcttcttaagtccctcttgagcgactactatccggaaaaaaaggtagacctcctcacaacagatggcttcctttatccgaataagattttaaaagagcgagatatcatggaccgcaagggttttcccgaaagctatgatatgaaacgtttgattaactttatgaccgatgtcaaaaataatgttcccaacatccaggtgcccaagtattcccaccaagtttacgacatagtagaaggggaaaggttgaccattaaccagccagacatcttgattgtcgaagggatcaatgtgctccaacttccttctaatgagaagatttttgttagcgattttttcgacttctccttttatgtggatgcctcagaaaatctgattgaaaaatggtacatgcaacgctttggcacctttatggataccgccttccaagaccccaacaactattactacaagtttaatgactgggaccgcaaggaagcttttgcctatgccaaccaagtttgggaaacggttaacctagaaaacctcagggaatatattctacccacccgactccgggctaacctcatcctccataaaacccataaccactacatcgacaagattttactcaaaaaacactga

SEQ ID NO: 5859 - protein, 309 aa, Alloiococcus otitis
MNNSRIFLVYDRKDWQSLRENASLSLTEKNLNNLRAVNDVISMEDVREVYVPIIQLLDVYIKSYYRHQASLINYLNLDQPKKYQPYVIGIAGSVAVGKSTVARLLKSLLSDYYPEKKVDLLTTDGFLYPNKILKERDIMDRKGFPESYDMKRLINFMTDVKNNVPNIQVPKYSHQVYDIVEGERLTINQPDILIVEGINVLQLPSNEKIFVSDFFDFSFYVDASENLIEKWYMQRFGTFMDTAFQDPNNYYYKFNDWDRKEAFAYANQVWETVNLENLREYILPTRLRANLILHKTHNHYIDKILLKKH

SEQ ID NO: 5860 - DNA, 951 bp, Streptococcus pneumoniae
  CDS (1)..(951)
atgatagataaaatacctaggggaaaacaaatgaccaacgaatttttacattttgaaaaaatcagccgccagacttggcaatctttacatcgaaagacaacacctcctttgacagaagaagaattggaatctatcaagagttttaatgaccaaatcagtctccaagacgttacagatatctatctccccttggctcatctgattcagatttacaagcgaactaaggaagatttagccttttcaaaaggaattttcctccaacgtgaaagtaaatctcaaccttttattattggggtttctgggagtgttgccgttggaaaatccacaaccagtcgcctacttcaaatcctactgtcccgtacgtttacagatgctacggttgagttggttacaactgatggttttctctatcccaatcaaaccttgattgagcagggaattttaaatcgtaaaggatttcctgaaagctatgatatggaagctcttctcaacttcttggaccgcatcaaaaatggacaagatgtagatattcctgtctattctcatgaagtttacgacatcgtacccaaaaagaaacaaagtgtcaaagctgctgattttgtaatcgttgagggaattaatgtctttcaaaatccacaaaacgatcgtctctatatcactgacttctttgacttttccatctatgtagatgctggagtggatgatattgaaagttggtatctggaccgtttcttgaaaatgctgagtctagcccaaaacgaccctgatagctactattatcgttttactcagatgccgattggggaagtggagtcctttgcccatcaggtctggaccagtatcaatctcacaaatctgcaaaattatattgaaccaaccagaaatcgtgcagaagtgattcttcataaaagcaagaaccatgaaatcgatgaaatttacttaaaaaagtaa

SEQ ID NO: 5861 - protein, 316 aa, Streptococcus pneumoniae
MIDKIPRGKQMTNEFLHFEKISRQTWQSLHRKTTPPLTEEELESIKSFNDQISLQDVTDIYLPLAHLIQIYKRTKEDLAFSKGIFLQRESKSQPFIIGVSGSVAVGKSTTSRLLQILLSRTFTDATVELVTTDGFLYPNQTLIEQGILNRKGFPESYDMEALLNFLDRIKNGQDVDIPVYSHEVYDIVPKKKQSVKAADFVIVEGINVFQNPQNDRLYITDFFDFSIYVDAGVDDIESWYLDRFLKMLSLAQNDPDSYYYRFTQMPIGEVESFAHQVWTSINLTNLQNYIEPTRNRAEVILHKSKNHEIDEIYLKK

SEQ ID NO: 5862 - DNA, 1128 bp, Vibrio cholerae O1 biovar eltor str. N16961
  CDS (1)..(1128): transl_table=11
gtggtgcgcattctagtgaatgatcttgggggttgcaacccttatcttgaaaaaaaactcaattttcaaaggattttgcttgttcgttgttttttcagtcaaattagagcgcaatcgctaattctcgcatctttctattttgttttatcttgtgcttattgtattttcgctttccttattctcaaccgcatgattgaaccgattatgagcccttatttaacctttgatcgccaacactgggcccaattgcgcaattcagtacctatgacgctctctgaaagcgatctaaaagagttacagggcatcaatgaccatttatcgatgaccgaagcggttgaaatctatcttcccctcgctcgtctactgaatttgtatgtggctgcgcgtcaaagtcgtaatggtgtgttgcatcagtttttgggtaataccgaatcagcacccccttttgtgattggcatagcgggcagcgttgccgtcggtaaaagtacaacggctcgcttactgaaagctctcttatcacgttgggagaatcatccgaaggtcgaactgatcaccacagacggctttttataccccaataaggtactgactgaacgtggcattatgcataagaagggctttcctgaatcttatgatattcgccgtttggtggaatttgtttctgaggttaaagctggccagcccaatgtaaccgcccccgtttattcacatctcacttatgatattaccgatgaaatgaaagtggtcgaccgcccggatgtgctgatcattgaaggcttaaatgtactgcaaagtggtatggactaccctcatgacccacaccgcgtatttatctctgatttcctggatttttcgatttatgtcgatgccgatagtcaactgatagaaaagtggtatatcgagcgctttatgaaatttcgccagggtgcatttaaaaagcccggctcctatttcagccactacactgcactcactgaagcccaagctgaacagaaagcgcgttccatttgggaaaccatcaacggtaaaaatctggttgagaatatcttgccgaccaaaggtcgtgcacatttgattttacgcaaagggcttaaccatacggtagaagaagtcctgctccgtaaatag

SEQ ID NO: 5863 - protein, 375 aa, Vibrio cholerae O1 biovar eltor str. N16961
MVRILVNDLGGCNPYLEKKLNFQRILLVRCFFSQIRAQSLILASFYFVLSCAYCIFAFLILNRMIEPIMSPYLTFDRQHWAQLRNSVPMTLSESDLKELQGINDHLSMTEAVEIYLPLARLLNLYVAARQSRNGVLHQFLGNTESAPPFVIGIAGSVAVGKSTTARLLKALLSRWENHPKVELITTDGFLYPNKVLTERGIMHKKGFPESYDIRRLVEFVSEVKAGQPNVTAPVYSHLTYDITDEMKVVDRPDVLIIEGLNVLQSGMDYPHDPHRVFISDFLDFSIYVDADSQLIEKWYIERFMKFRQGAFKKPGSYFSHYTALTEAQAEQKARSIWETINGKNLVENILPTKGRAHLILRKGLNHTVEEVLLRK

SEQ ID NO: 5864 - DNA, 1002 bp, Agrobacterium tumefaciens str. C58
  CDS (1)..(1002): transl_table=11
atgaagattgaggcgggcagcggggagagaggcatgccaggcacactcgatcattttcgtgcggacgaatattcgccctatcacttcttcagttccgaagaatgggccaaattccgcgctgacacgccactgacgctttccgccgatgaggtgaagcggctgcgatcgctggatgaccccatcgatctggatgaagtgcggcgcatttacctgtcgctgtcgcgcctcctttcatcgcatgttgaagcgtcgcagctgcttttcgaacagcgcaaccgctttctgaatatgggggatgtcaacaagacgcccttcgtcatcggcattgccggatcggtggccgttggcaaatcgacgacagcgcgtatcctgaaagagcttctggcgcggtggccttccagcccgaaggtcgatctcatcaccactgacgggtttctttacccgaacgaggtgctgcggcgcgaaaacctgatggagcgcaagggctttccggaaagctacgatatcggcgcgctgctgcgttttctttcggcgatcaaggcgggccagccgaatgtgaaggccccgcgttattcgcacctgacctacgacgtgttgccgaacgaattcaccgtcatcgaccagccggatatcctgatcttcgaaggcatcaacgtgctgcaatcccgtgaccttccggcgggcggtcgtatcgtgccgatcgtttccgacttcttcgatttctcgatctatatcgatgccgatgaggatttcattcacaactggtatgtgaaccggttcatgaacctgagacagaccgccttccgcgacccgaactcattcttcaaccggtatgcgtcgatcagcgaagaggcggcactcagcattgccgaagggctctggcagaacatcaacctgaagaacctgcgccagaacatcgtgccgacgcgcccgcgcgccgatcttattctgcgcaagggagagaaccacctgatagatacggtggcgctgcgaaagctctga

SEQ ID NO: 5865 - protein, 333 aa, Agrobacterium tumefaciens str. C58
MKIEAGSGERGMPGTLDHFRADEYSPYHFFSSEEWAKFRADTPLTLSADEVKRLRSLDDPIDLDEVRRIYLSLSRLLSSHVEASQLLFEQRNRFLNMGDVNKTPFVIGIAGSVAVGKSTTARILKELLARWPSSPKVDLITTDGFLYPNEVLRRENLMERKGFPESYDIGALLRFLSAIKAGQPNVKAPRYSHLTYDVLPNEFTVIDQPDILIFEGINVLQSRDLPAGGRIVPIVSDFFDFSIYIDADEDFIHNWYVNRFMNLRQTAFRDPNSFFNRYASISEEAALSIAEGLWQNINLKNLRQNIVPTRPRADLILRKGENHLIDTVALRKL

SEQ ID NO: 5866 - DNA, 951 bp, Streptococcus pneumoniae R6
  CDS (1)..(951): transl_table=11
atgatagacaaaatatctaggggaaaacaaatgaccaacgaatttttacattttgaaaaaatcagccgccagacttggcaatctttacatcgaaagacaacacctcctttgacagaagaagaattggaatctatcaagagttttaatgaccaaatcagtctccaagacgttacagatatctatctccccttggctcatctgattcagatttacaagcgaactaaggaagatttagccttttcaaaaggaattttcctccaacgtgaaagtaaatctcaaccttttattattggggtttctgggagtgttgccgttggaaaatccacaaccagtcgcctacttcaaatcctactgtcccgtacgtttacagatgctacggttgagttggttacaactgatggttttctctatcccaatcaaaccttgattgagcaggggattttaaatcgtaaaggatttcctgaaagctatgatatggaagctcttctcaacttcttggaccgcatcaaaaatggacaagatgtagatattcctgtctattctcatgaagtttacgacatcgtacccgaagagaaacaaagtgtcaaagctgctgattttgtaattgttgagggaatcaatgtctttcaaaatccacaaaacgatcgtctctatatcactgacttctttgacttttccatctatgtagatgctggagtggatgatattgaaagttggtatctggaccgtttcttgaaaatgctgagtctagcccaaaacgaccctgatagctactattatcgttttactcagatgccgattggggaagtggaagcctttgcccatcaggtctggaccagtatcaatctcacaaatctacaaaattatattgaaccaaccagaaatcgtgcagaagtgattcttcataaaagcaagaaccatgaaatcgatgaaatttacttaaaaaaataa

SEQ ID NO: 5867 - protein, 316 aa, Streptococcus pneumoniae R6
MIDKISRGKQMTNEFLHFEKISRQTWQSLHRKTTPPLTEEELESIKSFNDQISLQDVTDIYLPLAHLIQIYKRTKEDLAFSKGIFLQRESKSQPFIIGVSGSVAVGKSTTSRLLQILLSRTFTDATVELVTTDGFLYPNQTLIEQGILNRKGFPESYDMEALLNFLDRIKNGQDVDIPVYSHEVYDIVPEEKQSVKAADFVIVEGINVFQNPQNDRLYITDFFDFSIYVDAGVDDIESWYLDRFLKMLSLAQNDPDSYYYRFTQMPIGEVEAFAHQVWTSINLTNLQNYIEPTRNRAEVILHKSKNHEIDEIYLKK

SEQ ID NO: 5868 - DNA, 972 bp, Corynebacterium glutamicum ATCC 13032
  CDS (1)..(972): transl_table=11
atggcagagcaaaacgctgcaagcacaactggtgtgaaaccttccccacgcacaccagatttcagcccctaccttgatttcgaccgcgcacaatggcgcgagctgagaaactcaatgcctcaggtgctgacccaaaaagaagtcattgaacttcgaggcatcggagaaaacattgacctcgctgaagtggcagaagtctaccttccgctgtcccgtctgattcacctccaggtagcggcccgacagcaacttactgcagccaccgaaaccttcctcggaacttccccctctatctctgtgccgtttgtcattggtgtcgcgggatccgtcgccgtcggtaaatcaaccaccgcccgactcctccaagttctgcttcagcgctggaattcccacccccgcgtggacctcgtcaccaccgacggattcctctatcccggcgcggaactaatccgccgcggattaatgtcccgaaaaggattccccgaaagctacgaccaacgtgcactcctccgctttgtcaccgacgtaaaatccggaaaactcgaagtcaacgcacctgtctactcccacaccgcgtacgaccgagttccaggcgaattcaccacagtccgccaacccgacattttgatcgtcgaaggcttaaacgtcctccaaactggcccaacattgatggtcagtgaccttttcgacttcagcgtctacgtagatgcccgcaccgaagatatcgaaaaatggtacatcgaccgcttcctcaaactccgcgacactgcattccgtcgccccggtgcccacttctcccattacgccgacatggctgatccagagtccatcgccgtcgctcgagaactgtggcaatcgatcaacctgcccaacttggtggagaatattcttcccacccgagttcgcgcgtcgttggtactgaaaaaaggtagcgatcacttggtggaacgggtgaggatgcgcaagatctag

SEQ ID NO: 5869 - protein, 323 aa, Corynebacterium glutamicum ATCC 13032
MAEQNAASTTGVKPSPRTPDFSPYLDFDRAQWRELRNSMPQVLTQKEVIELRGIGENIDLAEVAEVYLPLSRLIHLQVAARQQLTAATETFLGTSPSISVPFVIGVAGSVAVGKSTTARLLQVLLQRWNSHPRVDLVTTDGFLYPGAELIRRGLMSRKGFPESYDQRALLRFVTDVKSGKLEVNAPVYSHTAYDRVPGEFTTVRQPDILIVEGLNVLQTGPTLMVSDLFDFSVYVDARTEDIEKWYIDRFLKLRDTAFRRPGAHFSHYADMADPESIAVARELWQSINLPNLVENILPTRVRASLVLKKGSDHLVERVRMRKI

SEQ ID NO: 5870 - DNA, 987 bp, Bradyrhizobium japonicum USDA 110
  CDS (1)..(987): transl_table=11
gtgagcaagtcgcaacggaaaggcggcgtcatggatatccgcgcacccgagcagcagtataatccgtaccgggtctatacccgcgagcaatgggcgcggttgcgcgacgacacgccgatgacgctggagccgggcgagttcgaccggctgcgctcgctgcacgatcgtctcgacttgcaggaggtcgaggacatctacctgccgctgtcgcgcctgctgtcgatctatgtcgacgcgatgcagcgcctgtattacgcggagcgccaattcctcaacatccgcgaccgcaagatgccctacatcatcggcgtcgccggctcggtcgcggtcggaaaatccaccacggcccgcgtgctccaggcgctgctggcgcgctggtcgccgcgcccgaaagtggacctgatcacgaccgacggttttctgtacccgaatgccgtgctcgaccggcagggcatcatgcagaagaagggttttccggagagctacgacctgccgctgctgcttggcttcctctccgacatcaaggctggccgccgccacgtccgcgccccggtctattcgcatctgacctacgacatcgtgccgaaccaatgggtggagatcgaccagcccgacatcctgatcgtcgagggcgtcaacgtgctgcaaaccggcaagttgccgcgcgacggcaaggcggtgcccgtggtctccgacttcttcgatttctcggtctatatcgatgccgacgaagcggcgctgcggcgctggtacatcaagcgcttcctggcgctgcgcgacaccgcgttcaccaatcccaaatcctacttcaaccgctacgcgctgttgtccgacgaagaagccaccgccaccgcgatcgcgatctgggaacgcaccaacctcgccaatctcgaggacaacatcctgccgacccgtccccgcgcgacgctcatcctgaagaagggccccgaccacgtggtcgagagcgtggcgctgcggcggctgtaa

SEQ ID NO: 5871 - protein, 328 aa, Bradyrhizobium japonicum USDA 110
MSKSQRKGGVMDIRAPEQQYNPYRVYTREQWARLRDDTPMTLEPGEFDRLRSLHDRLDLQEVEDIYLPLSRLLSIYVDAMQRLYYAERQFLNIRDRKMPYIIGVAGSVAVGKSTTARVLQALLARWSPRPKVDLITTDGFLYPNAVLDRQGIMQKKGFPESYDLPLLLGFLSDIKAGRRHVRAPVYSHLTYDIVPNQWVEIDQPDILIVEGVNVLQTGKLPRDGKAVPVVSDFFDFSVYIDADEAALRRWYIKRFLALRDTAFTNPKSYFNRYALLSDEEATATAIAIWERTNLANLEDNILPTRPRATLILKKGPDHVVESVALRRL

SEQ ID NO: 5872 - DNA, 927 bp, Corynebacterium diphtheriae NCTC 13129
  CDS (1)..(927): transl_table=11
atggctcgcgacaaagacctcagcccatatctcgactttgatcgtgagacgtggcgtcatttgcgcatgtcgatgccccaggtactcacagagcaagaggtcgtggaactacgtggtattggcgaaaacatcgatctcgacgaagtcgccgaggtttatctaccgctgtcgcgtctcattcatctccaagtccacgcgcgccaagaactcacgcaggcaaccgaaaccttcttaggtgaaaaagcaccccacatcccgtttgttatcggcgttgctggatctgtggcagtaggaaaatccaccacagcacgtttgctccaagtccttttacagcggtgggacgaacatcctcgcgtagatttggtcaccaccgatggattcctccaccccaccgagattctgaaaaaacgcggcattttggaccgcaaaggattcccagaaagctacgatcaacgcgcgctattgcgctttgtcactgatgtaaaagccggaaaagcgcacgttaaagccccagtgtattcgcacactctatacgaccgtgtagaaaacgaatgtgtcacggtcagccgccccgacattttgatcgttgagggtcttaatgtgttgcagaccggccccaccttgtcggtcagtgacctttttgacttcagtgtctatgtcgacgctgccctcgaagacatcgaacgctggtatatcgatcgcttcctgaaactccggcagctagcattccgcgcccccaatgcccacttctcccactacgcggacatgggcgatcgcgcagcgactgacgaagcacgacgaatctggcaaacgatcaatctccccaaccttgtagaacacatcctgcccactcgggttcgagcgtctctagtgctgtgcaaaggcgcagaccataaagtcgctcgcgtgcgcatgcgcaaaatttaa

SEQ ID NO: 5873 - protein, 308 aa, Corynebacterium diphtheriae NCTC 13129
MARDKDLSPYLDFDRETWRHLRMSMPQVLTEQEVVELRGIGENIDLDEVAEVYLPLSRLIHLQVHARQELTQATETFLGEKAPHIPFVIGVAGSVAVGKSTTARLLQVLLQRWDEHPRVDLVTTDGFLHPTEILKKRGILDRKGFPESYDQRALLRFVTDVKAGKAHVKAPVYSHTLYDRVENECVTVSRPDILIVEGLNVLQTGPTLSVSDLFDFSVYVDAALEDIERWYIDRFLKLRQLAFRAPNAHFSHYADMGDRAATDEARRIWQTINLPNLVEHILPTRVRASLVLCKGADHKVARVRMRKI

SEQ ID NO: 5874 - DNA, 957 bp, Rhodopseudomonas palustris CGA009
  CDS (1)..(957): transl_table=11
atggacgcaaggtcggatctgcatcactacaacccgtaccgggtgttctcgcgggcggaatgggcgagcatgcgtgaagacacgccgatgacgctcgatgccgctgaggttgcggcgctgcgctcgatgcacgaccggctcgacctgagcgaggtcgaagaaatctatctgccgatgtcgcggctgttgtcgatccatgtcgcggcgatgcagcagctgtactacgcgcagcgccgcttcctcggcgtggtcgagcgcaagatgccgttcatcatcggcgtcgccggctcggtggcggtcggcaaatccaccaccgcgcgcgtgctgcaggcgctgctggcgcgctggtcgccgcgcccgacggtcgatctcgtcaccaccgacggcttcctgcatccgaacgcggtgctggagcgagccgggctgatgcagaagaagggctttccggagagctacgacctgccggcgctgctcggcttcctgtctgacatcaagtcgggccgccgcaaggtcaaggcgccgatctactcgcacctcacctacgacatcgtgccgaacaagttcacggtgatcgaccgccccgacatcctgatcgtcgagggcgtcaacgtgttgcagaccggccgtctgccgcgcgatggcaaggcggtgccggtggtctccgacttcttcgatttctcggtgtatctcgacgctgacgagccggtgctgcgcgactggtacgtccggcgcttcctggcgctgcgcgacaccgcattccacgatccacgatcgtacttccatcgctacgctgtactgtccgacgaagaggcgaccgcgaccgcgatcgcgatctgggagcggaccaacctcgccaatctcgaagataacatcctgccgacccgcccgcgcgcgacgctgatcctgaagaagggcgccgaccacgtggtggactcggtggcgctgcgaaggttgtaa

SEQ ID NO: 5875 - protein, 318 aa, Rhodopseudomonas palustris CGA009
MDARSDLHHYNPYRVFSRAEWASMREDTPMTLDAAEVAALRSMHDRLDLSEVEEIYLPMSRLLSIHVAAMQQLYYAQRRFLGVVERKMPFIIGVAGSVAVGKSTTARVLQALLARWSPRPTVDLVTTDGFLHPNAVLERAGLMQKKGFPESYDLPALLGFLSDIKSGRRKVKAPIYSHLTYDIVPNKFTVIDRPDILIVEGVNVLQTGRLPRDGKAVPVVSDFFDFSVYLDADEPVLRDWYVRRFLALRDTAFHDPRSYFHRYAVLSDEEATATAIAIWERTNLANLEDNILPTRPRATLILKKGADHVVDSVALRRL

SEQ ID NO: 5876 - DNA, 939 bp, Mycobacterium avium subsp. paratuberculosis K-10
  CDS (1)..(939): transl_table=11
atgccgcggcttagcgagccgagcccgtatgtggagttcgaccgaaagcaatggcgtgcgctgcgtatgtccacgccgctggccctcaccgaggaggaactggtcggcctgcgcggcctgggcgaacaaatcgacctgctggaagtggaagaggtctacctgccgctggcccggctcatccaccttcaggtggccgcccggcagcggttgttcgccgccaccgccgagttcctcggcgaacctcagcaaaacccggaccggccggtgccgttcgtcatcggggtggccggcagcgtggccgtcggcaagtcgaccaccgcgcgcgtgctgcaggcgctgctggcccgctgggaccaccacccgcgggtggacctggtgaccaccgacgggttcctatacccgaacgccgagctggaccggcgaaacctgatgcaccgcaagggatttccggaaagctacaaccgccgggcgctgatgcggttcgtgacgtcggtcaagtccggttcggactacgcctgcgcgccggtgtattcgcacctgaaatacgacatcatcccgggggccaagcacgtggtccgccatcccgacatcctgatcctggagggcctcaacgtcctgcagaccgggcccaccctgatggtgtcggacctgttcgacttcggcatctacgtcgacgcgcggatcgaagacatcgagcagtggtacatctcgcggttcctggcgatgcgcagcaccgccttcgccgatcccgagtcgcacttccaccactacgcggcgctcaacgacaccaaggcggtggccgcggcccgggagatctggcgctcgatcaaccggcccaacctggtggagaacatcctgcccacccggccgcgggccaccctggtgctgcgcaaggacgccgaccactcgatcaaccggctgcggctgcgcaagctgtga

SEQ ID NO: 5877 - protein, 312 aa, Mycobacterium avium subsp. paratuberculosis K-10
MPRLSEPSPYVEFDRKQWRALRMSTPLALTEEELVGLRGLGEQIDLLEVEEVYLPLARLIHLQVAARQRLFAATAEFLGEPQQNPDRPVPFVIGVAGSVAVGKSTTARVLQALLARWDHHPRVDLVTTDGFLYPNAELDRRNLMHRKGFPESYNRRALMRFVTSVKSGSDYACAPVYSHLKYDIIPGAKHVVRHPDILILEGLNVLQTGPTLMVSDLFDFGIYVDARIEDIEQWYISRFLAMRSTAFADPESHFHHYAALNDTKAVAAAREIWRSINRPNLVENILPTRPRATLVLRKDADHSINRLRLRKL

SEQ ID NO: 5878 - DNA, 999 bp, Bartonella quintana str. Toulouse
  CDS (1)..(999): transl_table=11
atgactgatacaacgctctcaaaaattgatcaagaagataagatagtcaagtccatttctgatcggtattcaccctatagtgtctttactgcacgggaatggtctcaatttcgtgcggatacaccactcactttaacctttgatgaaattaaacgtttacgctcaattaatgatccaattgatcttgaagaagtgcaacgcatttatctgtccttatcgcgtcttttatcatgtcatgttgaagcagtacagaaactctttcaaaaacgtcagcagtttttgcatcaagaaggtaccagaaaaaccccctttatcattggaattgccggctctgtcgcggtaggaaaatcaaccaccgctcgtattcttcaagaacttttgaaacgtcggacatctagtcttaaagttgatctaattacaactgatggttttctctatcctaacgctgtcttacggcaaaaaaatcgcatgaatcgtaaaggatttcctgactcttatgacattaaaaaattgctgtgctttctttctgctatcaaagctggcattggtaatatcagtgccccgctttattcgcatacagcctatgatgttttagaaaatcaaactattaccatcgaccgtccagatatcttaattgttgaaggtattaatgtgctacaagtcagtaatcttcctaaggatggaaaaattattcctttcgtttcggacttttttgatttttcaatctatgtagatgctgaaacagaagtgattcgtcactggtatttggaacgcttcgaacgtttgcgtaaaacagcttttcaaaatcctgaatcttattttcatcgttatacactactcaatgaaaaggaagctttaaaaattgctgagaaactttggcaaacgattaatttgaaaaatttacaagagaatatattgccaacacgaccacggtctaatctcattctacgaaagggaaaaaaccatttggtcgaatatgtcgcacttcgacagctataa

SEQ ID NO: 5879 - protein, 332 aa, Bartonella quintana str. Toulouse
MTDTTLSKIDQEDKIVKSISDRYSPYSVFTAREWSQFRADTPLTLTFDEIKRLRSINDPIDLEEVQRIYLSLSRLLSCHVEAVQKLFQKRQQFLHQEGTRKTPFIIGIAGSVAVGKSTTARILQELLKRRTSSLKVDLITTDGFLYPNAVLRQKNRMNRKGFPDSYDIKKLLCFLSAIKAGIGNISAPLYSHTAYDVLENQTITIDRPDILIVEGINVLQVSNLPKDGKIIPFVSDFFDFSIYVDAETEVIRHWYLERFERLRKTAFQNPESYFHRYTLLNEKEALKIAEKLWQTINLKNLQENILPTRPRSNLILRKGKNHLVEYVALRQL

SEQ ID NO: 5880 - DNA, 999 bp, Bartonella henselae str. Houston-1
  CDS (1)..(999): transl_table=11
atgattgatacaattctcccaaaaattaatcaggaagataatttagtcaaatcgatttccgatcgatattcgccctatcgtgtctttactgcacaagaatggtctcaatttcgtgcagatacaccgcttactttgacctttgatgaaatcaaacgtttacgctcaattgatgatccaattgatcttgaagaagtgcaacgtatttatctttctttatcacgtttgttatcatgccatgttgaagctgtacaagaactttttcacaagcgtcaacaatttttatatcaagaaggaacgagaaaaactccttttatcattggaattgctggctctgttgcagtaggaaaatcaactaccgctcgtattctacaagaacttttgaaacgttggacttccagtcttaaagttgatttgattacaacggatggttttctctatcctaacgctgttttacagcaaaaaaatcgtatgaatcgtaaaggatttccagattcctatgatattaagaaattactgtgctttctttctgctataaaagccggtattggtaatgtacgtgccccactttattcgcatatgatttatgatgttttagaaaatcaaacagttaccattgatcgtcccgatatcttaattgttgaagggattaacgtgttacaagtcaatgacctccctaaagacggtaaaattattccttttgtttcagatttttttgatttttcaatctatgtagatgctgaaacagaagtcattcgacactggtatttggaacgttttaaacgtttgcgtaaaacagcttttcaaaatcctaagtcctattttcatcgttatgcactcatgcatgaagaagagtccttaaaaatcgctgaaaatatctggcaaacaattaatttgaaaaatttacaagaaaatatattgccaacacgaccacggtctaatctcattctacgcaagggaaaaaaacatttggttgaatatgtggcacttcgacgactatag

SEQ ID NO: 5881 - protein, 332 aa, Bartonella henselae str. Houston-1
MIDTILPKINQEDNLVKSISDRYSPYRVFTAQEWSQFRADTPLTLTFDEIKRLRSIDDPIDLEEVQRIYLSLSRLLSCHVEAVQELFHKRQQFLYQEGTRKTPFIIGIAGSVAVGKSTTARILQELLKRWTSSLKVDLITTDGFLYPNAVLQQKNRMNRKGFPDSYDIKKLLCFLSAIKAGIGNVRAPLYSHMIYDVLENQTVTIDRPDILIVEGINVLQVNDLPKDGKIIPFVSDFFDFSIYVDAETEVIRHWYLERFKRLRKTAFQNPKSYFHRYALMHEEESLKIAENIWQTINLKNLQENILPTRPRSNLILRKGKKHLVEYVALRRL

SEQ ID NO: 5882 - DNA, 951 bp, Erwinia carotovora subsp. atroseptica SCRI1043
  CDS (1)..(951): transl_table=11
atgagcaatagagatcaatcattggccacgccatatctacaatttaaccgcagccaatgggccgccttgcgcgattctgtcccgttaacgctgacagaagaagagatcgttaagctcaaagggatcaacgaggatctttcattagacgaggtcgcagaaatttatctaccgttatctcgcctgctcaatttttatatcaactctaacttacgccgtcaggctgtacttgagcagttcttaggaactgatggccaaaagataccttatataataggtattgcaggtagtgtcgcagtaggaaaaagtaccactgcccgtgtacttcaagcattattgagccgctggccagaacatcgtagtgtagaactaattacaactgatggatttcttcatccaaataaggtactaaaagaacgtgatttgatgaagaaaaaaggcttcccgcaatcatatgatatgcatagcctagtgaaatttgtttcggatataaaatcgggaacacatcaagtcaccgccccaacgtattcgcacttaacatacgacatcgttcctaataataataaagtgttggagcaacctgatattttaatattagaaggcttaaacgtcctacaaagtggtatggactatccacatgatccacatagagtttttgtttctgactttgtggatttttctatctatgtcgatgcccctgaaacattgctacaaccatggtatataaatcgctttttaaaattcaggcaaggtgcattctcaaatccaaattcgtattttcataattatgcaaaattgacggaagaagaagctgtcggcatcgcatctcaattatggaaggaaattaacgggcttaatttaaaagaaaacatcctacccacaagggaaagggccagccttattatgactaaaagcgctaaccatgcggttgagtgtgttcgattaagaaaataa

SEQ ID NO: 5883 - protein, 316 aa, Erwinia carotovora subsp. atroseptica SCRI1043
MSNRDQSLATPYLQFNRSQWAALRDSVPLTLTEEEIVKLKGINEDLSLDEVAEIYLPLSRLLNFYINSNLRRQAVLEQFLGTDGQKIPYIIGIAGSVAVGKSTTARVLQALLSRWPEHRSVELITTDGFLHPNKVLKERDLMKKKGFPQSYDMHSLVKFVSDIKSGTHQVTAPTYSHLTYDIVPNNNKVLEQPDILILEGLNVLQSGMDYPHDPHRVFVSDFVDFSIYVDAPETLLQPWYINRFLKFRQGAFSNPNSYFHNYAKLTEEEAVGIASQLWKEINGLNLKENILPTRERASLIMTKSANHAVECVRLRK

SEQ ID NO: 5884 - DNA, 984 bp, Propionibacterium acnes KPA171202
  CDS (1)..(984): transl_table=11
atgaacttgacccccaccactcccgttgacgacgacaacaccgaaccggggccgttcatcgaattatcgcgagaatcgtgggccgtactttcggactcgaccgagatcgatatcgacgaggccaccctggaccacatccgtggtctcggcgaccccaccagtcaccgcgacgtcgtcgaggtgtaccgcccgttgacccaactcatccacctgtactgcatgcacacgggcgccctcttcgacgcctccaataacttcctgcaactcacccgccacggcatgaagcgcaccccctttgtcatcgggatcgccgggtcggtggccgttggcaagtcgaccgtggctcgtctgctacgggagctcctgggacgttccccgcgccgtccggtcgtggacctcgtgacgaccgacggattcctctaccctaaccgggtactcgaggaacgcgagctgctttcccgcaaggggttccctgaatcctacgaccgcaaggccttgctgaggttcgtcgtcgatgtcaagtccgggatgcctgaagtcaccgcaccggtttactctcacgtcacctacgacatcgtgcccaaccagcaactcgtcgtccggcaacccgacatcctcattattgaggggcttaacgttctacagccaccacgacggcgcagcagtgggacaatgggactggccctgagcgacttcttcgacttctcggtatacgtcgatgctgaggaggccgacatcatccggtggtacatcaaccggttcctcaccctgcggcaaaccgcgttcaccgacccccactcgttcttcggtgagtacgcacgaatgcccgacaacgaagccatcaccatcgctaaggagatttgggacaccatcaacggcccgaacctggtgcagaacgtgctgcccacccgcggccgggctaccgcgatcctgcataagggtcccgaccacgaggtccgcaatgtgtggatcaggaaagtttga

SEQ ID NO: 5885 - protein, 327 aa, Propionibacterium acnes KPA171202
MNLTPTTPVDDDNTEPGPFIELSRESWAVLSDSTEIDIDEATLDHIRGLGDPTSHRDVVEVYRPLTQLIHLYCMHTGALFDASNNFLQLTRHGMKRTPFVIGIAGSVAVGKSTVARLLRELLGRSPRRPVVDLVTTDGFLYPNRVLEERELLSRKGFPESYDRKALLRFVVDVKSGMPEVTAPVYSHVTYDIVPNQQLVVRQPDILIIEGLNVLQPPRRRSSGTMGLALSDFFDFSVYVDAEEADIIRWYINRFLTLRQTAFTDPHSFFGEYARMPDNEAITIAKEIWDTINGPNLVQNVLPTRGRATAILHKGPDHEVRNVWIRKV

SEQ ID NO: 5886 - DNA, 960 bp, Bacillus licheniformis ATCC 14580
  CDS (1)..(960): transl_table=11
gtggcgaatcaggatttgaatttgcacacgttatatacgagtcatacccgtgatgcctgggcaaatctcggcgggcatatgtcggtaaagatgaccgaagaggaagtaaagaagcttgaaggtttaaatgactatctgtctttggaagaagtcgaaaccgtttatgttccgctggcgaggctgctttatttacaccgggcaactcaatatgaacggaacacccgggtaaacggttttttgaatcatcctcacgcggccaagattccgtttatcatcgggattgccggaagcgtcgcggttggaaaaagcacgacggcccgcatcattcagactgtgctctcccgtttgcaggaacggctgaaagtcagtctgatcacaaccgacggttttctttatcctaatgcggttctgacagaaaagcagatgatgtcgaggaaagggtttcccgaaagctatgatgtcaaagcgctgcttgagtttttgaacgatttaaaatcaggaaaggaaattgtccacgcacccgtttattcccatctaacgtatgacagattggaaggggtttatgaaacggtagaacaagcggatatcgtgatcatcgaaggcgttaatgtgctgcagacaccgacgatcgaagacgaccgtacaaaaccgcgggttttcgtttccgatttttttgacttctcgatttatgtggatgccgaagaagacctcattatcaaatggtatcttgaacgctttcgcatgctcagggagacggcttttcaagatccgagttcttatttccataaattcaaagacctcgcggacgaagaagcggaccatatggcaaagtcaatatgggagaccgtcaaccgtccgaatttgtatgagaacattctgcctacaaaattccggtctgatttaatcttgagaaaaggcgaaggccacaaggtggaagagattttggtcagacgggtatag

SEQ ID NO: 5887 - protein, 319 aa, Bacillus licheniformis ATCC 14580
MANQDLNLHTLYTSHTRDAWANLGGHMSVKMTEEEVKKLEGLNDYLSLEEVETVYVPLARLLYLHRATQYERNTRVNGFLNHPHAAKIPFIIGIAGSVAVGKSTTARIIQTVLSRLQERLKVSLITTDGFLYPNAVLTEKQMMSRKGFPESYDVKALLEFLNDLKSGKEIVHAPVYSHLTYDRLEGVYETVEQADIVIIEGVNVLQTPTIEDDRTKPRVFVSDFFDFSIYVDAEEDLIIKWYLERFRMLRETAFQDPSSYFHKFKDLADEEADHMAKSIWETVNRPNLYENILPTKFRSDLILRKGEGHKVEEILVRRV

SEQ ID NO: 5888 - DNA, 954 bp, Mannheimia succiniciproducens MBEL55E
  CDS (1)..(954): transl_table=11
gtgaacatagaaagccaatcgtcagtttcagagaaatttagcccgtttttgacatttacccgtaaacaatgggcggaattgcggaaatccgtgcctttaaaactgacagaacaagatttaaagcctttactcggttttaacgaagaattatcgttggaagaagtcagcaccatttacctgcctcttgcgcgtttaattaattattatattgaagaaaatttacgtcgccagaccgtaatgaaccgttttctcggcaataccaacgccaatgtaccttatattatcagtattgccggcagcgtttcggtcgggaaaagcacttccgcgcgtattttgcagtctttactgtctaactggcctgaaaatcgcaaagtggatttgattaccaccgacggttttctctatcccttagaaaaattaaaaaaagaaaatttattgcataaaaaaggcttccccgtctcttacgatacgcccaaattaatcaaatttctggcggacgtaaaatccggcaaaccgaacgtgtcggcgccgatttattcgcatttgacctatgatattatccccgataaatttaacaaggtagatcgcccggatattcttatattggaaggtttaaacgtattacaaaccggttcgcgcaaagcggaacagacttttgtctccgattttgttgatttttccgtttatgtggacgccgatgaagccttattaaaggaatggtatattcgccgctttttgaaattccgtgaaagcgcgtttaccgatccgaattcctattttaaagattatgcgaaactctctaaagaagaagcggttgaaaccgccgctaatatttggaataccattaacggcttgaatttacggcaaaatattttaccaacccgtgaacgggcaaatttaatcttgcgtaaaggcgccgaccatgcggtacaagaagtgaagttgcgcaaataa

SEQ ID NO: 5889 - protein, 317 aa, Mannheimia succiniciproducens MBEL55E
MNIESQSSVSEKFSPFLTFTRKQWAELRKSVPLKLTEQDLKPLLGFNEELSLEEVSTIYLPLARLINYYIEENLRRQTVMNRFLGNTNANVPYIISIAGSVSVGKSTSARILQSLLSNWPENRKVDLITTDGFLYPLEKLKKENLLHKKGFPVSYDTPKLIKFLADVKSGKPNVSAPIYSHLTYDIIPDKFNKVDRPDILILEGLNVLQTGSRKAEQTFVSDFVDFSVYVDADEALLKEWYIRRFLKFRESAFTDPNSYFKDYAKLSKEEAVETAANIWNTINGLNLRQNILPTRERANLILRKGADHAVQEVKLRK

SEQ ID NO: 5890 - DNA, 969 bp, Bacillus licheniformis ATCC 14580
  CDS (1)..(969): transl_table=11
gtgagaatagtggcgaatcaggatttgaatttgcacacgttatatacgagtcatacccgtgatgcctgggcaaatctcggcgggcatatgtcggtaaagatgaccgaagaggaagtaaagaagcttgaaggtttaaatgactatctgtctttggaagaagtcgaaaccgtttatgttccgctggcgaggctgctttatttacaccgggcaactcaatatgaacggaacacccgggtaaacggttttttgaatcatcctcacgcggccaagattccgtttatcatcgggattgccggaagcgtcgcggttggaaaaagcacgacggcccgcatcattcagactgtgctctcccgtttgcaggaacggctgaaagtcagtctgatcacaaccgacggttttctttatcctaatgcggttctgacagaaaagcagatgatgtcgaggaaagggtttcccgaaagctatgatgtcaaagcgctgcttgagtttttgaacgatttaaaatcaggaaaggaaattgtccacgcacccgtttattcccatctaacgtatgacagattggaaggggtttatgaaacggtagaacaagcggatatcgtgatcatcgaaggcgttaatgtgctgcagacaccgacgatcgaagacgaccgtacaaaaccgcgggttttcgtttccgatttttttgacttctcgatttatgtggatgccgaagaagacctcattatcaaatggtatcttgaacgctttcgcatgctcagggagacggcttttcaagatccgagttcttatttccataaattcaaagacctcgcggacgaagaagcggaccatatggcaaagtcaatatgggagaccgtcaaccgtccgaatttgtatgagaacattctgcctacaaaattccggtctgatttaatcttgagaaaaggcgaaggccacaaggtggaagagattttggtcagacgggtatag

SEQ ID NO: 5891 - protein, 322 aa, Bacillus licheniformis ATCC 14580
MRIVANQDLNLHTLYTSHTRDAWANLGGHMSVKMTEEEVKKLEGLNDYLSLEEVETVYVPLARLLYLHRATQYERNTRVNGFLNHPHAAKIPFIIGIAGSVAVGKSTTARIIQTVLSRLQERLKVSLITTDGFLYPNAVLTEKQMMSRKGFPESYDVKALLEFLNDLKSGKEIVHAPVYSHLTYDRLEGVYETVEQADIVIIEGVNVLQTPTIEDDRTKPRVFVSDFFDFSIYVDAEEDLIIKWYLERFRMLRETAFQDPSSYFHKFKDLADEEADHMAKSIWETVNRPNLYENILPTKFRSDLILRKGEGHKVEEILVRRV

SEQ ID NO: 5892 - DNA, 951 bp, Bacillus clausii KSM-K16
  CDS (1)..(951): transl_table=11
atgacaacggatgaattaacaaaaagcttagaggcttttacccacttcactcgtgcagaatgggcacagctaaatgacgggcatagcgctcctctcacggaaaaagagcggaaaaacctcgaagggatttatgaaacgatatctgaggcagaagtgaacgatgtatacatgcctttatctgaattactttataaacgaatggtccataatgttaggcttcatgacgatttaaatcgctttttaaagcgggaacggaagcgggtgccctttgtcattggcatagccgggagcgttgcagtcggaaaaagcacaaccgcaaggctgattcaagcattggcctcaagatggcccggctctccgaaagtggagcttgtcacaacagacggctttctatatccaaatgaagtgctggaaaaacgaggcctcatgaaacggaaaggctttccagaaagttacgatatccgcagcctgcttacttttttgacagacttaaaagcaggcacgcctgtcgtaaaagcacctatgtattctcacttgacttataacattgaaaaagatcatatccaaacgttgatagaaccggatgtcgtcattgtcgaaggcattaatgtcctacaagtaaaccgaaaaggcaagcgcatgccccatgtgtttgtctctgatttttttgatttcagcatttatgtcgatgcagaggaaaaagacatattatcttggtatatcgagcgctttcaactgctccgtaacacagcattccaaaagcccgagtcgtattttcaccgctaccgcgacttaacggatgaagaagcggttgcaatggcggaatcgatttggcataccattaatggcgttaatttagaaaagaacattaagccaacacgccttcgcgcagacttgatcttaacaaaaggcgctcaccaccgcgttgagcaagtccaattgcgaaaataa

SEQ ID NO: 5893 - protein, 316 aa, Bacillus clausii KSM-K16
MTTDELTKSLEAFTHFTRAEWAQLNDGHSAPLTEKERKNLEGIYETISEAEVNDVYMPLSELLYKRMVHNVRLHDDLNRFLKRERKRVPFVIGIAGSVAVGKSTTARLIQALASRWPGSPKVELVTTDGFLYPNEVLEKRGLMKRKGFPESYDIRSLLTFLTDLKAGTPVVKAPMYSHLTYNIEKDHIQTLIEPDVVIVEGINVLQVNRKGKRMPHVFVSDFFDFSIYVDAEEKDILSWYIERFQLLRNTAFQKPESYFHRYRDLTDEEAVAMAESIWHTINGVNLEKNIKPTRLRADLILTKGAHHRVEQVQLRK

SEQ ID NO: 5894 - DNA, 924 bp, Haemophilus influenzae 86-028NP
  CDS (1)..(924): transl_table=11
atgaatctaaccccttttttaagttttaaccgcaaacaatgggcagaattgcgtaaatctgtccccctaaaacttacagaacaagatcttaaaccgcttttaggttttaatgaagagctatctttggatgaagtcagtatgatttatttaccattagctcgtttaattaattattacattgacgaaaaccttcgcagacaagctgttttacaccgttttttagggcgtaataaaacaaaagtaccttatatcattagcattgcaggtagcgtagcggtagggaaaagcacttcagcacgaatactccaatcacttctttcccattggccagcggagcgcaaagtagatcttataactactgatggttttttatatccattagaaaaactaaaaaaagatcatcttttacacaaaaaaggtttccctatttcttatgatacgcccaaacttattcattttttagctgatgtgaaatctggcaaaactgaggtggaagcaccaatctattcgcatttaacctatgatattattcctgataaatttaatgtgataaataaacctgacattcttattttagagggcttgaatgtacttcaaacaggtaataataaaaccaatcaaacattcgtatcagattttgttgatttctctatttatgttgatgcagaagaaaaattattgaaagaatggtatatcaaacggtttctgaaattccgcgaaagcgcattcaacgatcctaattcttactttaaacattatgccaatttatcgaaagaagaatccattaccaccgctagtaaaatttgggatgaaattaacgggttaaaccttaatcaaaatattcttccaactcgtgagcgagcaaatctaattctaaaaaaaggtcacaatcaccaagtagaattaataaaattaagaaaataa

SEQ ID NO: 5895 - protein, 307 aa, Haemophilus influenzae 86-028NP
MNLTPFLSFNRKQWAELRKSVPLKLTEQDLKPLLGFNEELSLDEVSMIYLPLARLINYYIDENLRRQAVLHRFLGRNKTKVPYIISIAGSVAVGKSTSARILQSLLSHWPAERKVDLITTDGFLYPLEKLKKDHLLHKKGFPISYDTPKLIHFLADVKSGKTEVEAPIYSHLTYDIIPDKFNVINKPDILILEGLNVLQTGNNKTNQTFVSDFVDFSIYVDAEEKLLKEWYIKRFLKFRESAFNDPNSYFKHYANLSKEESITTASKIWDEINGLNLNQNILPTRERANLILKKGHNHQVELIKLRK

SEQ ID NO: 5896 - DNA, 894 bp, Pseudomonas fluorescens Pf-5
  CDS (1)..(894): transl_table=11
gtggggtatctggagttcgatcgcgaccattgggccgctctgcgggccggtgagccgatgagtcttgcgccatccgagatggagacgctgaccagtccgacccagcccatggcgtccgaagaagtgcggcagatcctcctgccgctgtcgcgcctgctgcatttgcatgcggcgcaggtgcaatcgctgaaggtgccgcagacaggtttcaaggccccctacgtgatcggtgtttccggcagcgtggcggtgggcaagagcagttttgcccgggtcctggcggcgctgctggcctattggccgggcaagcccaatgtgcacctggtgaccacggattcgttcctgttcccgctggccaccctgcaggaaaaaaacatcctgcaccgcaagggctttccagagtcctatgacgagccgctgttcttggattttctccaggcggtgtgccgccggggcgaagcggcgcggattcccatctattcccatgtgcgctacgacatcctggccgatgaggcgcagtcggtggaggcgccggacatcatcatcctggaaggcttgaatgtgttgcagggggagcagggcgagggcctgaacgccctggatttcatcgacttctcgatctatgtcgacgctcccgaagcgaccatcaagacctggtacctggagcggttcgtctacctgaagaacactgccttccagtcgggggattcctacttcaacaagtacaagggcctgtccgattccgaggcgctgtcagtggcctccgatacctgggaccgggtcaacctgaagaacctggttgaaaacatcctgccgactcgggagcgagccaacctgatcatccacaagtcggcggaccacagcatcgaccggttgctgctgcgtcaggcctga

SEQ ID NO: 5897 - protein, 297 aa, Pseudomonas fluorescens Pf-5
MGYLEFDRDHWAALRAGEPMSLAPSEMETLTSPTQPMASEEVRQILLPLSRLLHLHAAQVQSLKVPQTGFKAPYVIGVSGSVAVGKSSFARVLAALLAYWPGKPNVHLVTTDSFLFPLATLQEKNILHRKGFPESYDEPLFLDFLQAVCRRGEAARIPIYSHVRYDILADEAQSVEAPDIIILEGLNVLQGEQGEGLNALDFIDFSIYVDAPEATIKTWYLERFVYLKNTAFQSGDSYFNKYKGLSDSEALSVASDTWDRVNLKNLVENILPTRERANLIIHKSADHSIDRLLLRQA

SEQ ID NO: 5898 - DNA, 945 bp, Thermobifida fusca YX
  CDS (1)..(945): transl_table=11
gtgtctcacgcgacgaaaaacggctttttgacgccgtacgtggaactcgaccgccaagcatgggccgagttgcgggcggcgactccgctgtcgctgacggaagcggaactggagaagctccgcggtaccgcggaccccacgtcgctggacgaagtccgggacatctacctgccgctctcccgactgctcaacttgtatgtcaaagcgacccggcagcggcacgcggcggtgcgggacttcctcggggaaagcgaccgtcccaccccgttcgtcatcggagtagcggggagcgtagccgtcggcaagtccacgacagccaggctgctgcggacactcttgtcgcagtggccggaccatccccacgtcgaactggtcagcaccgacaacttcctctaccccaacgcggtgctggaggagcgcgggatcatgaaccggaagggcttcccggaaagctacgaccggcgcgctctcctccggttcgtctcagagatgaaggccggagcggacaagatggagatccccgtctactcgcacctggcctacgacatcctgcctggcgagacgcagatcgtgcaccggcccgacatcctcatcgtggagggcatcaacgtgcttcagccgcctccgcccgggcggctggcgctggccgacttcttcgacttctccctctacgtggacgcccgcgtggagcacatccggtcgtggtatctgaaccggttcctggaactgcgccgcaccgcgttcgaggacccgcgctcctacttccacgcgatggcgacgtccgcttctgaggaagaagccaaagaattcgcgatgcacacctggcacaccatcaacgaggtcaacctggtggagaacatcatccccacccggccgcgcgcgaccctggtcctcttcaaaggagaagaccaccgggtccgccgggtccgtttgcggaagacctga

SEQ ID NO: 5899 - protein, 314 aa, Thermobifida fusca YX
MSHATKNGFLTPYVELDRQAWAELRAATPLSLTEAELEKLRGTADPTSLDEVRDIYLPLSRLLNLYVKATRQRHAAVRDFLGESDRPTPFVIGVAGSVAVGKSTTARLLRTLLSQWPDHPHVELVSTDNFLYPNAVLEERGIMNRKGFPESYDRRALLRFVSEMKAGADKMEIPVYSHLAYDILPGETQIVHRPDILIVEGINVLQPPPPGRLALADFFDFSLYVDARVEHIRSWYLNRFLELRRTAFEDPRSYFHAMATSASEEEAKEFAMHTWHTINEVNLVENIIPTRPRATLVLFKGEDHRVRRVRLRKT

SEQ ID NO: 5900 - DNA, 954 bp, Myxococcus xanthus DK 1622
  CDS (1)..(954): transl_table=11
atggccttagccaccggtctgtccccagccatgttcatcgacctggaacgggatgcctggcgggcgctgcgtgccgcaacgcctctgccgctgaagtccgaggacattgacggcctgcggggcctgggagagcacctcgacctggacgaggtggtggacgtctacctgcccttgtcccggttgctgaacctgcaggtggccgcggcgcagcggctgtgggcggagcagcaagccttcctgggaggttcgacgcagaaggtgccgtacatcatcgccatcgccgggagcgtggcggtgggcaagagcacgacggcgcgcatcctccaggcgctgctgaagcggtggccggaccacccgcgcgtggagttggtgacgacggacgggttccttttccccaacgacgtcctcaccgagcgcgacttgatgaagcgcaagggcttcccggagagctacgaccggcgcgccctggtgcgcttcctggcggagctgaaggccggacgcgcggaggtggcggcgccggtgtattcgcacctcgtctacgacgtggtgcccggtgaggcgcaggtcgtccgccagcccgacatcctcatcctggaagggctcaacgtcctccaggccggggcacaggaggggaagcagatgccggcgacgttcctctccgacttcttcgacttctccatctacgtggacgcgcacgagcacgacatccgccgctggtacgtcaaccgtttcctcaagctccagcagacggcgtttcgcgacgagcgcagctacttccgccggttctccgagctgaaccacgagcaggcgattcagctcgccgagtcggtgtggggcgaaatcaacgggcccaacctggcccagaacatcgcgcccacccgttcgcgcgcgcgcctcatcctcctcaagggccccgaccacaaggtgaagcgggtgaggctgcgcaagctgtag

SEQ ID NO: 5901 - protein, 317 aa, Myxococcus xanthus DK 1622
MALATGLSPAMFIDLERDAWRALRAATPLPLKSEDIDGLRGLGEHLDLDEVVDVYLPLSRLLNLQVAAAQRLWAEQQAFLGGSTQKVPYIIAIAGSVAVGKSTTARILQALLKRWPDHPRVELVTTDGFLFPNDVLTERDLMKRKGFPESYDRRALVRFLAELKAGRAEVAAPVYSHLVYDVVPGEAQVVRQPDILILEGLNVLQAGAQEGKQMPATFLSDFFDFSIYVDAHEHDIRRWYVNRFLKLQQTAFRDERSYFRRFSELNHEQAIQLAESVWGEINGPNLAQNIAPTRSRARLILLKGPDHKVKRVRLRKL

SEQ ID NO: 5902 - DNA, 939 bp, Mycobacterium sp. MCS
  CDS (1)..(939): transl_table=11
atggcgcggctgagcgaaccgagcccctacgtggagttcgaccgcacccagtggcgtgcgctccggatgtctacgccgctgaaactgaccgaggacgagctcaagaagctccgcggtctcggcgagaaactcgacctcctcgaggtcgaggaggtctacctcccgctggcccggctgatccacctgcaggtggccgcccggcaacggttgttcgccgcgacgtcggagttcctcggcgaaccgcagcagaaccccgaccggccggtcccgttcatcatcggcgtcgcgggcagtgtggccgtcggcaagtccaccaccgctcgtgtgctgcaggcgctgttggcgcggtggggtaaccacgcccgcgtcgacctggtcaccaccgacgggttcctctacccgaatgcggagttgggccgccggaacatcatgcaccgcaagggttttccggagagctatgaccgcagggcgttgatgcgcttcgtcaccgcggtgaagtccggcgccgattacgcctgcgcgccggtgtattcacacctgctctacgacatcgtgcccggcgagaagcaggtgatccgtcatcccgacatcctgatcctcgagggtctcaacgtgctgcagaccggcccggcgctgatggtctcggacctgttcgacttctcggtctacgtcgacgcgcgcctcgaggacatcgagggctggtacatctcgcggttcctgacgatgcggtcgacggcgttcgccgatccggcgtcgcacttccatcactacgcgacgctgaccgacgaacaggccgtcttcgctgcccgcgacatctggcattcgatcaaccggccgaacctgatcgagaacatcctgccgacccggccgcgggcgacgctggtgctgcgcaaggacgccgaccacgccatcaaccggttgcgcctgcgcaagctctga

SEQ ID NO: 5903 - protein, 312 aa, Mycobacterium sp. MCS
MARLSEPSPYVEFDRTQWRALRMSTPLKLTEDELKKLRGLGEKLDLLEVEEVYLPLARLIHLQVAARQRLFAATSEFLGEPQQNPDRPVPFIIGVAGSVAVGKSTTARVLQALLARWGNHARVDLVTTDGFLYPNAELGRRNIMHRKGFPESYDRRALMRFVTAVKSGADYACAPVYSHLLYDIVPGEKQVIRHPDILILEGLNVLQTGPALMVSDLFDFSVYVDARLEDIEGWYISRFLTMRSTAFADPASHFHHYATLTDEQAVFAARDIWHSINRPNLIENILPTRPRATLVLRKDADHAINRLRLRKL

SEQ ID NO: 5904 - DNA, 951 bp, Actinobacillus pleuropneumoniae serovar 1 str. 4074
  CDS (1)..(951)
atgagcctgcaaaaatcaaacaaaatcacaccatttttaacttttgatcgtcaaaaatgggccgaattacgtaaatccgtcccgctaaaattgaccgaacaagatctcaaaccgctactcggttttaatgaagacctttctttagatgaagtaagcactatttatttaccgcttgcccgtttaattaactactatattgaagaaaacttaaaacgtcagaccgtattacaccgctttcttgacgttgcgtcaccgaaagtaccttatattatcagtatcgccggcagcgtatcggtcggcaaaagcacttcggcacgtattttacaggccttactgtcgcaatggccgagcgaacgtaaagtcgatttgattacgacggacggttttttatatccgctgacaacattacaagaaaaagatttgcttaaacgcaaaggctttcccgaatcatacgatattcatcgcttaattcagttcgtctccgatattaaatcgggtaaacgtcatatccaagcgccgatttactcacacttaacttatgacattattcccgatcaatataatgtggttgatcagccggatattgtgattttagaaggtttaaacgtactacaaagcggtatgaattacccgtcaagtccgcataacgtattcgtttcggattttgtcgatttttctatttatgtcgatgccgatgaagatttgcttaaagaatggtatgtcgctcgttttttaaaattccgccgcagtgcgttttccgatccgaacgcttacttccatcattattccaaactttcggaacaggaagccattcgaaccgcttcgagcatttgggatgaaattaacggtttgaatttaaaacaaaatattctgccgagccgcgaacgcgcaaacttaatattaataaaaggcgaggaccatgcgattcagacggtgaagcttcgtaaataa

SEQ ID NO: 5905 - protein, 316 aa, Actinobacillus pleuropneumoniae serovar 1 str. 4074
MSLQKSNKITPFLTFDRQKWAELRKSVPLKLTEQDLKPLLGFNEDLSLDEVSTIYLPLARLINYYIEENLKRQTVLHRFLDVASPKVPYIISIAGSVSVGKSTSARILQALLSQWPSERKVDLITTDGFLYPLTTLQEKDLLKRKGFPESYDIHRLIQFVSDIKSGKRHIQAPIYSHLTYDIIPDQYNVVDQPDIVILEGLNVLQSGMNYPSSPHNVFVSDFVDFSIYVDADEDLLKEWYVARFLKFRRSAFSDPNAYFHHYSKLSEQEAIRTASSIWDEINGLNLKQNILPSRERANLILIKGEDHAIQTVKLRK

SEQ ID NO: 5906 - DNA, 918 bp, Pediococcus pentosaceus ATCC 25745
  CDS (1)..(918)
atggaagcacaaggttattttgagtttaagcgggaagattggcaaaatttagccaaacgagccgaattaccactgacgacgcaacaattaacagatatcaaagctttaaatgatcaaatttcactcgaagacgtgcaagatgtttacgtgccgttagtacgattgctccaaaaaaagtatgcggattttgaaaaatggaatcgtgataaattagactttttacaattgccagttaaaaaaacgccttttattatcggtatttcagggagtgtggcggttggtaaaagtacaacagcacgtttactacaagaactcttgagtagctggtttacgagcttaaaaacccagttaataactaccgatggatttttataccctaccgcggaacttaagcgacggaatattttaaatcgcaaaggatttcccgaaagctatgatatgaaatccttaattaagtttttaagcgacgttaagagtggtaaaaaagaaattaaagtaccgaagtattctcatcaagtttacgatattgtggaaaatgagtttgatacgattgatcaaccagatattctgattgttgaggggatcaacgtgctacagttaccggctaatgaaaccatttatgtgagtgatttttttgattggtccatttatgtggatgcggatgcaaatttaattgagcaatggtttttagaacgcttcggggtattgcttgatacagcgttccatgatccaactaattattattacaaatacgctaaattaccacgttcggaagctttcgaaatggcacataaaatttggcgagacattaatttaaaaaacctggaagaatttatcttaccgacacggtttagagcggatattattctgcataagactacgggacatgtaatggataacattttagtacgagtttaa

SEQ ID NO: 5907 - protein, 305 aa, Pediococcus pentosaceus ATCC 25745
MEAQGYFEFKREDWQNLAKRAELPLTTQQLTDIKALNDQISLEDVQDVYVPLVRLLQKKYADFEKWNRDKLDFLQLPVKKTPFIIGISGSVAVGKSTTARLLQELLSSWFTSLKTQLITTDGFLYPTAELKRRNILNRKGFPESYDMKSLIKFLSDVKSGKKEIKVPKYSHQVYDIVENEFDTIDQPDILIVEGINVLQLPANETIYVSDFFDWSIYVDADANLIEQWFLERFGVLLDTAFHDPTNYYYKYAKLPRSEAFEMAHKIWRDINLKNLEEFILPTRFRADIILHKTTGHVMDNILVRV

SEQ ID NO: 5908 - DNA, 1029 bp, Mesorhizobium sp. BNC1
  CDS (1)..(1029): transl_table=11
gtggcaagccgccggagagcgccgcttagagatgcgatgggccggaaagcaggcacggaaaagacgctgatggaccagttggtacccgccgaacgctactccccttatcgcttcttttcggcggaggattgggcgaagtttcgcgccgacaccccgctcacgctgactgaggacgaggttcgccggctgcgctctctgaacgatcccgtcaacctggaagaggttcggcgtatctacctctccatgtcccgattgctctcggcccatgtggaggcaagccagcttctttttcagcagcgtcaggtcttctttgattccgaccatgcggtgaagacacccttcatcatcggcattgctggttcggtggcggtgggcaaatccaccacagcccgtgtgctgaaggaactgctcacacgatggccgtccagcccgaaggttgatctcataacgacggacggatttcttcttccaaacgccgtgctgagccatgaaggtttgatggaacggaaaggtttcccggaaagctatgacgtgggcgccatcctgcgctttctgtcaggcatcaaggctgggctgccgaatatgcgagcgccgatttattcgcacctgacctatgatgttgtacccggcgaattcgccgtcatcgaccggcctgatatcctcatcttcgaaggcatcaacgtgctgcagacccgggatcttccgagggatggcaaggcagtgcccttcgtttcggatttcttcgacttctcgatatatatcgatgcgcccgaggaactcattcacgagtggtatgtcgatcgcttcatgcgcctgcgcgagacggcgttccgcgacccaaattccttctttcaccgctattccaccctccccgaggtggaggcgaggactatcgcggaggagctttggacaaatatcaacctgaagaacctgcgtgagaacattctgccgacccgtccgcgcgcagacctcattttgagaaaaggcacaaatcatctggtccaggaagtggcgctcaggaaactttaa

SEQ ID NO: 5909 - protein, 342 aa, Mesorhizobium sp. BNC1
MASRRRAPLRDAMGRKAGTEKTLMDQLVPAERYSPYRFFSAEDWAKFRADTPLTLTEDEVRRLRSLNDPVNLEEVRRIYLSMSRLLSAHVEASQLLFQQRQVFFDSDHAVKTPFIIGIAGSVAVGKSTTARVLKELLTRWPSSPKVDLITTDGFLLPNAVLSHEGLMERKGFPESYDVGAILRFLSGIKAGLPNMRAPIYSHLTYDVVPGEFAVIDRPDILIFEGINVLQTRDLPRDGKAVPFVSDFFDFSIYIDAPEELIHEWYVDRFMRLRETAFRDPNSFFHRYSTLPEVEARTIAEELWTNINLKNLRENILPTRPRADLILRKGTNHLVQEVALRKL

SEQ ID NO: 5910 - DNA, 990 bp, Nocardioides sp. JS614
  CDS (1)..(990): transl_table=11
atgcctgcccaagggccgtcccacggcgagctgccccccgccgacgccggccgggagtcctctccctacctggagctggaccgctccgcctgggccgcgctcgccagcgaggtcgagaaccccctcagcgccgaggagatccgccggctgcgcggcctcggcgaccagctcgacctcgacgaggtgcagcagatctacctgccggtctcccggctgctcagcctgtacgtcgagtccgcgggccggctgtaccgcgcccaggaggagttcctgcaccaggaccagccgccgcgcaccccgttcgtgatcggcctggccggctcggtcgcggtcggcaagtccacgaccgcgcgggtgctgcaggagatgctggcccactggccccagcacccgaacgtcgccctggtcaccacggacggcttcttgtaccccaacgccgagctcgagcggcgcggcctgctggagcgcaaggggttcccggagtcctacgaccgccgggccctgctgaagttcgtggtcgacatcaagtccgggaaggacgaggtgctggcgccgacgtactcccacctcgtctacgacgtcgtgccggacgagaaggtcgtcatccgccgccccgacatcgtcatcgtcgaggggctcaacgtgctccagccggcccgggtgcgcgacgacgggcggaccggcctgaccttgagcgacttcttcgacttcagcgtgtacgtcgacgccaagaccagcacgatccgcgactggtacgtgtcccgcttcctgcggctgcgcgagacggcgttccaggacaccggctcctacttcgccaagtacgccaccttgtcgatcgaggaggcgatggccgaggcggagcggatctgggacacgatcaacggccccaacctggcccagaacgtgctgcccacccgctcgcgcgccacgctggtgctgcgcaaggaccgggaccactcggtccgctacgtccgcctgcgcaagctatag

SEQ ID NO: 5911 - protein, 329 aa, Nocardioides sp. JS614
MPAQGPSHGELPPADAGRESSPYLELDRSAWAALASEVENPLSAEEIRRLRGLGDQLDLDEVQQIYLPVSRLLSLYVESAGRLYRAQEEFLHQDQPPRTPFVIGLAGSVAVGKSTTARVLQEMLAHWPQHPNVALVTTDGFLYPNAELERRGLLERKGFPESYDRRALLKFVVDIKSGKDEVLAPTYSHLVYDVVPDEKVVIRRPDIVIVEGLNVLQPARVRDDGRTGLTLSDFFDFSVYVDAKTSTIRDWYVSRFLRLRETAFQDTGSYFAKYATLSIEEAMAEAERIWDTINGPNLAQNVLPTRSRATLVLRKDRDHSVRYVRLRKL

SEQ ID NO: 5912 - DNA, 924 bp, Vibrio sp. Ex25
  CDS (1)..(924)
atgagtccatttttgtcatttgaccgtgcaaattgggccgagttaagaaactctgtaccgatgacactttctgaagacgacttgactgcgcttcagggcattaatgaaaacctaaccatggaggaagcggtagaaatctaccttcctttgtctcgtcttttgaatctttacgtccaagcgcgtcaaagccgcaactctgtattacaacaattcttgaatacggaagaacatgcccctccttttgtgattggtatcgccggcagtgtcgctgtaggcaaaagtacgacagctcgtattctgaccgcattgctttctcgttgggagaatcatcccaaagtgtccttggtcactacagatggctttctatatccgaaaaaggtactagaagaacgcggtatcatgcatcgtaaagggtttcctgagtcctatgatatcaagcgtttagtcgagttcatgtctgacgtaaaggcgggaaaacccgatcttgaagtacccatctattctcacatcacgtatgacattactgatgaactaagaaaagtggatagacccgatgttcttatcattgaaggtttaaacgttctacaaagtggaatggattatccgcatgatccacatcgcgtctttgtctctgattttttggatttttcgatctatgtcgatgctgaaacagagacaattgaacagtggtatgtggaacgatttttaaagtttcgccaaggggcttttactaaacccggttcttattttagtcactacacgcaactgtcagtcgatgaagcaaagcaaaaagcgaaacaaatttggcatgatattaatgggctcaacttggagctgaatattcttccaacccgagaaagagcccatttgattctacacaaaggcgtcaaccacttggttgataaggtatctttgcgaaagtaa

SEQ ID NO: 5913 - protein, 307 aa, Vibrio sp. Ex25
MSPFLSFDRANWAELRNSVPMTLSEDDLTALQGINENLTMEEAVEIYLPLSRLLNLYVQARQSRNSVLQQFLNTEEHAPPFVIGIAGSVAVGKSTTARILTALLSRWENHPKVSLVTTDGFLYPKKVLEERGIMHRKGFPESYDIKRLVEFMSDVKAGKPDLEVPIYSHITYDITDELRKVDRPDVLIIEGLNVLQSGMDYPHDPHRVFVSDFLDFSIYVDAETETIEQWYVERFLKFRQGAFTKPGSYFSHYTQLSVDEAKQKAKQIWHDINGLNLELNILPTRERAHLILHKGVNHLVDKVSLRK

SEQ ID NO: 5914 - DNA, 951 bp, Shewanella sp. ANA-3
  CDS (1)..(951): transl_table=11
atgacgtcaaaaaatccaattcaaaaagcactctatcttgcctttgagcgcgcgcaatggtctgttttacgggacgcagtgccgatgacactgagtgaacaagacttggaaaatttgcgcggtattaatgagaaggtctccctctcagaagttaccgacatttacttgccactcagcaggttactcaatctcatcgtaaaatcgaagcaacaacgtggcttagtcttggatgagtttctcggccaaaaaccctcaagtagcccttatatcattagtatcgccggcagcgttgccgtaggtaaaagtaccacagcgcgtattttgcaagccttgctgcgccactggcctgagcatcctaaggtcgatttagtcactactgatggttttttatatcctttggctgacctaaagcgcaagggtttactgcagcgtaaaggctttcccgaaagctacgacatgaagatgttggtagaatttatttcggcggtaaaatcggggcaggcccatgtgaatgcgcctatctactcccacgtgacttacgatcgtatccgcggccagcatcaaacggtctctcagcccgatattttgatcctagaaggactcaatgtactgcaaaccggcttagattcaccagtagatatacgccgccccttcgtctccgactttgtcgacttctccatttacgtcgatgccgaagagcacttattaaagcagtggtatcaggagcgctttttgcagttccgcaaaggtgccttcagtgatgaaaagtcgtattttcatcactatgccagcctaacagatgatgaggcgaatgccattgcagcgaagatttgggacacgatcaacggccccaatttgcaactcaatatccagccgacaagagagcgggcacatctgatcctgcaaaaaggccaggatcacttgatgtcccacgtattgttacgcaaataa

SEQ ID NO: 5915 - protein, 316 aa, Shewanella sp. ANA-3
MTSKNPIQKALYLAFERAQWSVLRDAVPMTLSEQDLENLRGINEKVSLSEVTDIYLPLSRLLNLIVKSKQQRGLVLDEFLGQKPSSSPYIISIAGSVAVGKSTTARILQALLRHWPEHPKVDLVTTDGFLYPLADLKRKGLLQRKGFPESYDMKMLVEFISAVKSGQAHVNAPIYSHVTYDRIRGQHQTVSQPDILILEGLNVLQTGLDSPVDIRRPFVSDFVDFSIYVDAEEHLLKQWYQERFLQFRKGAFSDEKSYFHHYASLTDDEANAIAAKIWDTINGPNLQLNIQPTRERAHLILQKGQDHLMSHVLLRK

SEQ ID NO: 5916 - DNA, 951 bp, Shewanella sp. MR-7
  CDS (1)..(951): transl_table=11
atgacgtcaaaaaatccaattcaaaaagcactctaccttgcctttgagcgcacacaatggtctgttttacgggacgcagtgccgatgacactgagtgaacaggacttggaaaatttacgcggtatcaatgagaaggtttcacttactgaagtgacggacatttacttacctctcagtaggttacttaatctcattgttaaagcgaaacaacaacgcggcttagttttggatgagtttctcggccaaaaaccctcgagtagtccttatatcattagtattgctggcagcgttgccgtgggtaaaagtaccacagcgcgtattttgcaagcattgctgcgccactggcctgagcatccaaaagtcgatttagtcacgaccgatggttttttgtatcctttggccgacttaaaacgcaagggattactgcaacgtaaaggcttccccgaaagctacgatatgaagatgttggtcgaatttattgcggcagtcaaatcgggacaagcccatgtgaatgcgcctatctattcccacgtgacttacgatcgtattcgcggccagcatcagacagtttctcagcccgatattttgatcctagaaggactcaatgtactgcaaaccggcttagattcaccagtagatatacgtcgtccctttgtttccgactttgtcgacttctctatttatgtcgatgccgaagagcacttattaaagcaatggtatcaagagcgctttctgcaattccgcaaaggcgctttcagtgatgaaaagtcttatttccatcactacgccagcctaacggatgatgaggcgaatgtgattgctgcgaagatttgggacactatcaacggccccaatctgcaactcaatatccagccgacaagagagcgagcacatctgatcctgcaaaaaggccaggatcacttgatgtcccacgtattgttgcgcaaatag

SEQ ID NO: 5917 - protein, 316 aa, Shewanella sp. MR-7
MTSKNPIQKALYLAFERTQWSVLRDAVPMTLSEQDLENLRGINEKVSLTEVTDIYLPLSRLLNLIVKAKQQRGLVLDEFLGQKPSSSPYIISIAGSVAVGKSTTARILQALLRHWPEHPKVDLVTTDGFLYPLADLKRKGLLQRKGFPESYDMKMLVEFIAAVKSGQAHVNAPIYSHVTYDRIRGQHQTVSQPDILILEGLNVLQTGLDSPVDIRRPFVSDFVDFSIYVDAEEHLLKQWYQERFLQFRKGAFSDEKSYFHHYASLTDDEANVIAAKIWDTINGPNLQLNIQPTRERAHLILQKGQDHLMSHVLLRK

SEQ ID NO: 5918 - DNA, 921 bp, Streptococcus suis 89/1591
  CDS (1)..(921): transl_table=11
atgaaaaatgaatttttaaattttgaacaaattgaccgagccacttggcaacaactacatcgtaagactaccattccacttagtcaaagcgaactaaattctattaaaagttttaacgaccgcatccaattacatgaggtttctgacatctatcttcctttggttaatcttatccatatctatcggaaagcacgcaaagacctaaattttacgaagagtttatttctacagaagactatcaagccacaaccatttatcattggcgtttctggaagtgttgctgtcggcaaatcaacaactagtagattgctgcaaattcttatcgctcggacatttaaacacgccaaggttgaattagtaacaacagatggttttctccatccaaatgcggtcttagaagaacggcaactgttaaataaaaaaggttttcctgaatcctatgacatggagaaattgattgatttccttgataagataaaaaacggctacgactgccaaattcctgtctattcacatgaaatctatgatattgtccccaacaaaactcaggaaattaaatctccagatttcttgattgttgaaggaatcaatgtatttcaaaatccacaaaaccagcgcctctatgtcagtgactattttgacctatctatatacgttgacgctgatgtggagcatattgaaacctggtacttggagcgattccaaaaattattgacattggcaaaaaatgaccctaacaactattaccatcgttttacccagatgacgtaccctgagattctatctattgcccagaatacttggaaaaatattaatctagctaacttagaaaaattcattgaaccaaccagaaaccgtgctgatattattcttcataaggccgaaaaccatgagattgataaaatttatctaaaaaaataa

SEQ ID NO: 5919 - protein, 306 aa, Streptococcus suis 89/1591
MKNEFLNFEQIDRATWQQLHRKTTIPLSQSELNSIKSFNDRIQLHEVSDIYLPLVNLIHIYRKARKDLNFTKSLFLQKTIKPQPFIIGVSGSVAVGKSTTSRLLQILIARTFKHAKVELVTTDGFLHPNAVLEERQLLNKKGFPESYDMEKLIDFLDKIKNGYDCQIPVYSHEIYDIVPNKTQEIKSPDFLIVEGINVFQNPQNQRLYVSDYFDLSIYVDADVEHIETWYLERFQKLLTLAKNDPNNYYHRFTQMTYPEILSIAQNTWKNINLANLEKFIEPTRNRADIILHKAENHEIDKIYLKK

SEQ ID NO: 5920 - DNA, 951 bp, Shewanella sp. MR-4
  CDS (1)..(951): transl_table=11
atgacgtcaaaaaatccaattcaaaaagcactctaccttgcctttgagcgcgcacaatggtctgttttacgggacgcagtgccgatgacactgagtgaacaagacttggaaaatttacgcggtatcaatgagaaggtttcacttactgaagtgaccgatatttacctgcctctcagtaggttacttaatctcattgttaaagcgaaacaacaacgcggcttagttttggatgagtttctcggccaaaaaccttcgagtagtccttatatcattagcattgctggcagcgttgccgtggggaaaagtaccacagcgcgtattttgcaagcattgctgcgccactggcctgagcatccaaaagtcgatttagtcactaccgatggttttttgtatcctttggccgacttaaaacgcaagggattactgcaacgtaaaggcttccccgaaagctacgatatgaagatgttggtcgaatttattgcggcagtaaaatcggggcaagcccatgtgaatgcgcctatctattcccacgtgacttacgatcgtattcgcggccagcatcagacagtttctcagcccgatattttgatcctagaaggactcaatgtactgcaaaccggcttagattcaccagtagatatacgtcgtccctttgtttccgactttgtcgacttctctatttatgtcgatgccgaagagcacttattaaagcaatggtatcaagagcgctttctgcaattccgcaaaggcgctttcagtgatgaaaagtcttatttccatcactacgccagcctaacggatgatgaggccaatgtgattgctgcgaagatttgggacactatcaacggccccaatctgcaactcaatatccagccgacaagagagcgagcacatctgatcctgcaaaaaggccaggatcacttgatgtcccacgtattgttgcgcaaatag

SEQ ID NO: 5921 - protein, 316 aa, Shewanella sp. MR-4
MTSKNPIQKALYLAFERAQWSVLRDAVPMTLSEQDLENLRGINEKVSLTEVTDIYLPLSRLLNLIVKAKQQRGLVLDEFLGQKPSSSPYIISIAGSVAVGKSTTARILQALLRHWPEHPKVDLVTTDGFLYPLADLKRKGLLQRKGFPESYDMKMLVEFIAAVKSGQAHVNAPIYSHVTYDRIRGQHQTVSQPDILILEGLNVLQTGLDSPVDIRRPFVSDFVDFSIYVDAEEHLLKQWYQERFLQFRKGAFSDEKSYFHHYASLTDDEANVIAAKIWDTINGPNLQLNIQPTRERAHLILQKGQDHLMSHVLLRK

SEQ ID NO: 5922 - DNA, 972 bp, Xanthobacter autotrophicus Py2
  CDS (1)..(972): transl_table=11
atggatcgacggctcgacccaggcctctctccctaccgcaccttctcgcgcgccgaatgggccgcgctgaggcgcgacacgcccatgaccctgcgcccggacgagatcacccggctggagggcctcggcgtccatctctccatgcaggaggtggaggagatctacctcccgctgtcgcggctgctctcactttacgtagcggcaacgcaaaagctcttccgcgccatgagctacttcctcgactctcgcgacagcgaggcgaacggggacggcaagatgccctacatcatcggggtggccggatcggtggcggtgggcaagtccaccaccgcccgcgtgctccaggcgcttctggcgcgctggcccaacacacccaaggtggatctcgtcaccaccgacggcttcctcctgcccaacgccatcctcgagcgcgaggggctgatggacaagaagggcttccccgaaagctacgacctgccgctgctgctgcgcttcctcaccgacatcaaggccggccggcggccggtgcgcgcgccgctctattcgcacttcttctacgacgtgatgcccgaccagtatgtggagatcgaccggcccgacatcctcatcgtggaaggcctcaacgtgctgcagaccacgcgtcctccgaaggacggcaaggccattcccttcgtctcggacttcttcgatttctcggtctatatcgacggcgacgaggacgtgatcgagcgctggtacgtggagcgcttcatgcggctgcgggccaccgccttcaaggaccctttgtcctacttccaccgctactcgcagctcacggaagagcaggcccgcgccaccgccctgtccatctggcgcggcatcaatctgcccaacctcatggacaatgtgctgcccacccgccagcgcgccgacctcatcctgcgcaagaccggcgagcacgaggtggcggaggtcagcctgcgccgcctgtaa

SEQ ID NO: 5923 - protein, 323 aa, Xanthobacter autotrophicus Py2
MDRRLDPGLSPYRTFSRAEWAALRRDTPMTLRPDEITRLEGLGVHLSMQEVEEIYLPLSRLLSLYVAATQKLFRAMSYFLDSRDSEANGDGKMPYIIGVAGSVAVGKSTTARVLQALLARWPNTPKVDLVTTDGFLLPNAILEREGLMDKKGFPESYDLPLLLRFLTDIKAGRRPVRAPLYSHFFYDVMPDQYVEIDRPDILIVEGLNVLQTTRPPKDGKAIPFVSDFFDFSVYIDGDEDVIERWYVERFMRLRATAFKDPLSYFHRYSQLTEEQARATALSIWRGINLPNLMDNVLPTRQRADLILRKTGEHEVAEVSLRRL

SEQ ID NO: 5924 - DNA, 969 bp, Agrobacterium tumefaciens
  CDS (1)..(969): transl_table=11
atgccaggcacactcgatcattttcgtgcggacgaatattcgccctatcacttcttcagttccgaagaatgggccaaattccgcgctgacacgccactgacgctttccgccgatgaggtgaagcggctgcgatcgctggatgaccccatcgatctggatgaagtgcggcgcatttacctgtcgctgtcgcgcctcctttcatcgcatgttgaagcgtcgcagctgcttttcgaacagcgcaaccgctttctgaatatgggggatgtcaacaagacgcccttcgtcatcggcattgccggatcggtggccgttggcaaatcgacgacagcgcgtatcctgaaagagcttctggcgcggtggccttccagcccgaaggtcgatctcatcaccactgacgggtttctttacccgaacgaggtgctgcggcgcgaaaacctgatggagcgcaagggctttccggaaagctacgatatcggcgcgctgctgcgttttctttcggcgatcaaggcgggccagccgaatgtgaaggccccgcgttattcgcacctgacctacgacgtgttgccgaacgaattcaccgtcatcgaccagccggatatcctgatcttcgaaggcatcaacgtgctgcaatcccgtgaccttccggcgggcggtcgtatcgtgccgatcgtttccgacttcttcgatttctcgatctatatcgatgccgatgaggatttcattcacaactggtatgtgaaccggttcatgaacctgagacagaccgccttccgcgacccgaactcattcttcaaccggtatgcgtcgatcagcgaagaggcggcactcagcattgccgaagggctctggcagaacatcaacctgaagaacctgcgccagaacatcgtgccgacgcgcccgcgcgccgatcttattctgcgcaagggagagaaccacctgatagatacggtggcgctgcgaaagctctga

SEQ ID NO: 5925 - protein, 322 aa, Agrobacterium tumefaciens
MPGTLDHFRADEYSPYHFFSSEEWAKFRADTPLTLSADEVKRLRSLDDPIDLDEVRRIYLSLSRLLSSHVEASQLLFEQRNRFLNMGDVNKTPFVIGIAGSVAVGKSTTARILKELLARWPSSPKVDLITTDGFLYPNEVLRRENLMERKGFPESYDIGALLRFLSAIKAGQPNVKAPRYSHLTYDVLPNEFTVIDQPDILIFEGINVLQSRDLPAGGRIVPIVSDFFDFSIYIDADEDFIHNWYVNRFMNLRQTAFRDPNSFFNRYASISEEAALSIAEGLWQNINLKNLRQNIVPTRPRADLILRKGENHLIDTVALRKL

SEQ ID NO: 5926 - DNA, 951 bp, Bacillus halodurans
  CDS (1)..(951): transl_table=11
atggcaacgatagaagcatgtgacttttttccatataccgtactttctcgcagtcagtggaagtcgttacgaaaagcttcaagccttccgattaatgagcaggaactagagcagttggttggtttaaatgaacctattaccttaaacgaagtagcagatatttacgttccccttgctgagctattacacgttcatgcaaccgcttaccaacggttacagcagcagaagagaggtttttttcaccatgggaaaaatcgctccccgttcattatcggacttgcagggagtgtagccgtcggcaaaagcacgactgcaagactcctacaaaaactacttaaagcttggccagaacatcatcatgttgatcttgtgacaactgatgggtttctttatccgaacgaaacgctagaggctcgaggattaatggacaaaaaagggtttcctgaaagctatgacctacccgctctcattcgttttttatccgatgtaaaggctggtgaaccatacgtaaaagcacctgtttattcccatttaacatacaatattgtggagggggactatcaagtcgttcatgagcctgatattgtcattgttgaaggaattaacgtgttacaagtcaacaagagaaaccatcatataccgaatgtgttcgtttctgacttttttgatttctcgatttatgtcgatgctaaggaggagcaaattctccaatggtacatcgaacgctttaagctattgcaaaacaccgcctttcaggatccgaactcttatttccatcgctttcgccatttatctgaagtcgaggcagagcaatttgccacctctatttggaaaaacatcaacggtgtaaatttacatgaaaacattttaccgacgaagcatcgagcggatttagtgctgcaaaaaggcccccatcatttcattgatgaagtgaaattacgaaacatctaa

SEQ ID NO: 5927 - protein, 316 aa, Bacillus halodurans
MATIEACDFFPYTVLSRSQWKSLRKASSLPINEQELEQLVGLNEPITLNEVADIYVPLAELLHVHATAYQRLQQQKRGFFHHGKNRSPFIIGLAGSVAVGKSTTARLLQKLLKAWPEHHHVDLVTTDGFLYPNETLEARGLMDKKGFPESYDLPALIRFLSDVKAGEPYVKAPVYSHLTYNIVEGDYQVVHEPDIVIVEGINVLQVNKRNHHIPNVFVSDFFDFSIYVDAKEEQILQWYIERFKLLQNTAFQDPNSYFHRFRHLSEVEAEQFATSIWKNINGVNLHENILPTKHRADLVLQKGPHHFIDEVKLRNI

SEQ ID NO: 5928 - DNA, 969 bp, Brucella melitensis
  CDS (1)..(969): transl_table=11
atgtgggaaaaagtcgatcagctcaccccgtcccggtattcgccctaccgcttcttttcggcgcaggaatgggcagccttccgggccgatacaccgctcaccctcacctatgaagaggtcaagcggctgcgctcgctgggcgacccgattgatctggatgaagtgcggcgcatctatctgtcgctctcgcggcttctttatgcgcatgtggaggcaagccagcttctgtttcgccagcgccagcaattcctcaacatggaggaatcctacaagacccccttcatcatcggtgtggccgggtccgtggcggtgggcaagtccaccatggcacgtatcctcaaggagcttctggcccgctggccgtcaagccccaaggtcgacctcgtgacgaccgacggttttctctatcccaacgcggtcctgcgcgagcagaacatgatggagcgaaagggctttcccgaaagctacgatattggcgcggtcctgcgcttcctgtcggcgatcaaggcgggcatgagccgtgtgcgcgcgccgctctattcgcatttgagctatgatgtgctccccggcgagtaccagatcgtcgacaagcccgatattctgatttttgaaggcattaacgtgttgcaggtgcgcgatctgccggaagacggcaagatggtgcctttcgtatcggatttcttcgatttctcgatctatatcgatgccgatccgcgcctgatccataaatggtatatcgaccgcttcatgcgcctgcgtgaaacggcgtttcgcgacccgcaatccttcttccatcgctattcgcagctttcgcaggaggcggcccgctccatcgccgagggcctctggcagaatatcaacctgaagaacctgaatgagaatattctgcccacccgcccccgcgccgatctcatcttgcgaaaaggcagcgatcatctgattgaggaagtggctctcaggaaaatctga
